United States Patent Application Publication US 2019/0348154 A1 - sequence listing, part 24

SEQ ID NO: 89783 - DNA, 1431 bp, Enterobacter aerogenes
atgtccggattcaaagaaggttttttgtggggcggcgcggtagcggcgcatcagcttgagggcggctggcaagaaggagggaaggggattagcgtcgcggacgtgatgaccgcaggcgcccatggggtgccgcgaacgatcaccgacggcgtactgcctggtcataactatcccaaccatgaggcaattgatttttatcatcgttataaagaagacgtagcgctgtttgccgaactgggatttaagtgtttccgtacttcaattgcctggacgcgaatttttccgcggggcgatgagctggagcccaatgaggcgggcctgcaattctatgacgatctgttcgacgagtgcctgaaatatggcatcgaaccggtgatcacgctctcccattttgaaatgccttaccacctggtgactgaatacggcggctggcgcaaccgtaagctgattgatttctttgtccgcttcgcgaaggtggtgtttacccgctatcagcacaaagtgaagtactggatgacctttaacgagatcaacaaccaggccaacttccatgaagatttcgccccctttaccaactccggcctgaagtatcagcccggagaagaccgtgagccggtgatgtttcaggccgcccattatgaactggtggccagcgcgctggcggtaaaggcggcacgtgagattaattcggacctgcagattggctgtatgatcgcgatgtgtccaatctatccgctcacctgcgcgccggacgacatcatgatggcgatgaacgctatgcatcgtcgttactggtttaccgatgtgcacgtgcgtggccgctatccgcagcatttgctcaactacttcgcgcgccgcggttttacgctggatatcaccgacgccgatcgcctggcgttaaaagagggttgcgtcgactatattggttttagctactacatgtccttcgccaccaaagcgactgacgataatccgcacctggattacgacgaaagcaccagcctggtctccaacccttacgtcaagaaatcggattggggctggcagattgacccggttggtctgcgttactcgctcaactggttctgggatcactatcagttgccgctgtttatcgttgagaacggctttggcgccattgacgtgcgtgaagctgacggcagcgtggatgaccagtatcgtatcgagtatctcagtgcccatattgccgaaatgaaaaaagcggtagtggaagatggcgtcgatctgatggggtataccccgtggggttgtatcgatctggtctccgccggtaccggcgagatgaaaaaacgctatggatttatctttgtcgataaagataacgacggtcgcggcacgttggcccgcagccgtaaaaaatcctttgcctggtatcagcaggttattgccagtaacggcgaaaatctgtaa

SEQ ID NO: 89784 - DNA, 627 bp, Enterobacter aerogenes
atgaagatcgtggaagtgaaacatccactcgtcaaacacaagctgggcctgatgcgtgagcatgacatcagtactaaacgcttccgtgaactcgcctcagaggttggtagcttactgacctacgaagcaaccgccgatctcgctaccgagcgtgtcactatcgaaggctggaacggtccggtcgaagttgagcagatcaaaggtaagaaaattaccgtggtgcctatcctgcgtgccggtctggggatgatggaaggcgtgctggagcacgtgcctagcgcgcgtatcagcgtggttggcatctaccgtgatgaagaaacgctggagccggttccttacttccagaagctggtttctaacattgacgagcgtatggcgctggtggttgacccgatgctggcaaccggcggttcgatgatcgcaactatcgacctgctgaaaaaagcgggctgttcgagcattaaggtgctggtgctggtggcggcgccggaaggcattgccgcgctggagaaagcgcatcctgacgtcgagctgtacaccgcctccgtcgaccagggcctcaacgagcacggatacattattccgggcctcggcgatgccggcgataagattttcggtaccaaataa

SEQ ID NO: 89785 - DNA, 1287 bp, Enterobacter aerogenes
atgacgcgccgtgcaatcggggtgagtgaaagaccgccgcttttacagacaatcccgcttagtttgcaacatctgttcgccatgtttggcgcaacggttctggtgcctattctgttccacattaacccggctaccgtactgctgtttaacggcatcggtacgctgttgtacctctttatctgtaaaggcaaaattccggcctatttggggtcgagcttcgcctttatctccccggtgctgctgctgttgccgctgggttatgaagtggcgctcggcggtttcattatgtgcggcgtcctgttctgcattgtctcctttattgtcaaaaaagccggtaccggctggctggatgtgatgttcccgccggcggcgatgggcgccatcgtggcggttatcggcctggaactggcgggcgtggcggcgaacatggccgggctgctgccggctgatggccaatcgcccgatagcaaaaccattattatttcgatggtgacgctggcggtgacggtttttggttccgtactgttccgcggcttcctggcgattatcccgattcttatcggcgtgctggtgggctatgcgctctccttcgtgatgggtgtggtcgatacgacgcctatcgccgaagcgcactggtttgcactgccgactttctacaccccgcgctttgaatggtttgccattttcaccattttgcctgccgcgctggtggtgatcgccgagcacgtggggcacctggtggtgaccgccaatatcgttaaacgcgatctgatccgcgatccgggtctgcaccgctcgatgttcgccaacgggctgtcgacgattgtctccggtttctttggctcaacgccaaacaccacctacggtgaaaatatcggcgtgatggcgattacccgcgtatacagtacctgggttattggcggcgcggcgattattgcgattctgctctcctgcgtcggcaagctggcggcggcgattcagattatcccggtaccggtgatgggcggcgtttctctgctgctgtacggggtgatcggtgcatccggtatccgcgtgctgatcgaatcaaaagtcgattacagcaaagcgcagaacctgattctgacctcagttattctgattatcggcgtgagcggcgcgaaggtgcatattggcgcggcggagctgaaaggcatggcgctggcgacgatcgtcggtatctgtctgagcctgatctttaaactgatcagcgttctgcgtccggaagaagtggtgctggacgccgcggatagcgaagaagcgaaataa

SEQ ID NO: 89786 - DNA, 678 bp, Enterobacter aerogenes
ttgccactgtatcttcctgacgacgaaacgttcgcgagtttctggccgggtgataatccttccctacttgccgctctgcagaacgtgttgcggcaggaacacagcggatacatctatatctggtctcgtgaaggcgcggggcgtagccaccttttgcatgccgcctgcgctgagctatcccagcgtggcgatgccgtcggctacgtgccgttggataagcgcacgtggttcgtgccggaagtgctggacggcatggagcaactggcgctggtgtgcatcgataacatcgagtgcgtggccggggacgagccctgggagatggctatctttaatctctataaccgtattctcgaatcaggtaaaacccgcctgctgatcaccggcgattgcccgccgcggcagctgcatctcggcttgccggatctcgcctcgcgccttgactgggggcaaatctataagctgcagccgctgtcggatgaagataagctgcaggcgctgcagctgcgcgccagactgcgcggtttcgagatgccggaagacgtctgccgattcctgctcaagcggctggatagagaaatgcgctcgctgtttatgacgctcgatcagctcgatcacgcatcgattaccgcccaacgaaaactgacgatcccattcgttaaagagatcctgaagctttaa

SEQ ID NO: 89787 - DNA, 912 bp, Enterobacter aerogenes
atgaaaaaagctatttccacgccgcatgacgcagtatttaaaacctacctttcccattcggataccgcgcgtgattttctccggttgtatcttcctgaagcgctaaaggagatctgcgatctgcgcacgctacatttagaatcaggtaattttatcgaagaagatctcagaccttactattccgatattctctactcgctgcaaaccactgcgggcgacggctatatttacgcgctaatcgaacatcaaagtagccccgaccgacatatggcctttcgcctgatgcgctacgccgtcgccgtcatgcagcgccaccttgatgccggacacgaaaaacttccgctggtgatcccggtgcttttctatcacggcctggtgacgccctatccgttttcaatgcgctggctggatgagtttgccgcgccggagctggcgaccacgctctactacggcgaatttccactggcggatatcaccgtcataccggatgatgaaatcgccactcatcaacgtatggcaacgctggaattactgcaaaaacatattcgacaacgcgatctggcgcagttactcgacaagctgagcgaattattattgactggattagccacgcaaacacaggtgcaggcgctaatgcactacctggtgctcgcgggaaatagccgcgaaccgataaagtttattcgtgagttggcgcgccggacgccgcaacataaggagacgctgatgactattgcagaatatctcgagcagcaagggctggagcgcggtttgcttcagggccggcaagaaggccggaaagaagaagcacagcgtatcgccgccgcaatgttacgtagcggtctcgcccccgcgctggtggcgcagctaaccgggctggcagagcaggaactggcgtcgctttcggcttaa

SEQ ID NO: 89788 - DNA, 360 bp, Enterobacter aerogenes
atgtctgacgcggtaaaaatttaccacaaccctcgctgctcgaagagccgtgacacgctcagcctgctgaaagctaacggcatcgaccctgaagtggtgctgtatctggagacgccgccggatgccgcgacgctgcgccagctgttgaaaatgctgaatatgagcagcgcccgtgaactgatgcgccagaaagaagatctgtataagtcgctcaatctcgccgacccacagctcagcgaagaggcgttgattcaggccatggtcgagaacccgaagctcatcgaacggcccatcgtggtcagccacggccaggcgcgtatcggccgcccgccggaacaggtactggaaatcgtcagctaa

SEQ ID NO: 89789 - DNA, 1464 bp, Enterobacter aerogenes
atgttcaggcagttaaagaaaacgctggtggccgccgccgtcgcgtcgttgacgctggggacgatattacctgccgccgctgactcggcggatacgctgccggatatgggcacctcggcaggaagcaccctttccatcggtcaggaaatgcagatgggggattactacgtacgccagctacgcggcagcgcgccgctgataaacgacccgctgttggtgcaatacattaacgggctgggcatgcgcctggtcgctcacgctaattccgtccgtacgccgttccacttttatctgattaataacgatcagattaacgcctttgccttcttcggcggcaacgtggtgctgcactcggcgctgttccgctatgcggataacgaaagccagcttgcctcggtaatggcgcacgaaatctctcacgtcacccagcgccatctggcgcgtgcgatggaagatcaaaaacgtagcgcgccgctaacctgggttggcgcgctgggctctattctgctggcgatggccagcccgcaggcggggatggcggcattaaccggcaccctggctggcacccaacaggggatgattagctttacccgtcagaacgaagaagaagccgaccgcatcggtattcaggtactgcagcgctccggtttcgatccgcaggcgatgccggcgtttatgggtaaattactcgacgaatcccgctattccagccgcccgccggaaatgctgctcactcacccactgccggaaagccgtctggccgacgcccgtaaccgcgccaatcagatgcgcccggtggtagtccagtcgtcggcggatttctatctcgccaaggcccgtaccctcggtatgtacaactccggggaaaataagctcggcagcgatctgcttgacgcctggtcaaaagggaacatccgcgaacagcacgccgcgcagtatggccgcgcgctactggctatggagagcaataactacgatcaggcgcgcaaagcgctccagccgctgctcagcgccgacccacaaaatccctggtatctggatctcgccaccgatatcgatcttgggcagaaaaagaccactgacgcaattaaccgcctgaaaaacgccaaagagatccgcaccgatccggtcctgcagctgaacctggccaatgcctacgtacagggcgggcagccggcggaagccgcgaccattctcaaccgctacacctttaacaataaagatgacggcaacggttgggacctgttggcgcaggcggaaggcgcattgggtcatcgcgaccaggagctggcagcgcgagccgaaggcatggcgctggccggtaggcttgaccaggccatctcgctgctgagcagcgccagttcgcaagtaaaattgggcagtttgcagcaggcgcgctacgacgctcgcatcgaccagctgcgccagctgcaggaaagattccgcccctatcagaaaatgtaa

SEQ ID NO: 89790 - DNA, 1086 bp, Enterobacter aerogenes
ttgcgcttcagggaagggtttatgcttgagatgttaatgcagtggtatcgtcgtcgtttcagcgacccggaagcgatagcgctgctggttattctgctggccggcttcggcattatgttctttttcagcgggctgctggcgccgctgctggtcgccatcgtgctggcctatctgctggagtggcccaccgttcgtctggagcgtatcggcttgtcgcgaacctgggccacctcgctggtgctggtgctatttgtcggtatcttgctgttaatggcctttgtggtgatgccggtggcctggcaacagggcatttatctcatccgcgatatgcctggtatgctcaataagctttccgatttcgccgccacgctgccgcggcgctatccggcattgatggatgccggcatcattgatgcaatggccgaaaatatgcgcagccgcatgctgaccgttggcgattcggtagtgaagtattcgctcgcctcgctggtcggcctgctgacgctggcggtgtatctggtcctggttccgctgatggttttcttcctgctgaaagataaacagcagatgctcaatgccgtacgccgcgtattaccgcgtaatcgcggcctggcggggcaggtgtggaaagagatgaaccagcagattaccaactatatccgcggcaaggtgctggagatgattgtcgtcggcgtcgccacctggataggcttcattctcttcggtctcaactactcgctgctgctggcggtgctggtgggattctcggtgctgattccgtatatcggcgcttttgtggtcaccattcctgtggtcggcgtggcgttgttccagttcggcgcgggtactgagttctggagcctgtttgccgtatacctgataattcaggggctggatggcaacctgctggtgccggttctcttctcggaggcggtgaatttacatccgttggtgattattctgtcggtagtgattttcggcgggctgtggggtttctggggggtattcttcgcgattccgctggcgacgttaatcaaggcggtggttcacgcctggcctgatggaatggttattgaagacgagtga

SEQ ID NO: 89791 - DNA, 471 bp, Enterobacter aerogenes
atgaccccactgaaagccggtgatatcgcaccgaaatttagcttaccggaccaggacggcgaggaagtaaatttaaccgacttccagggacagcgtgttctggtttatttttacccgaaagccatgaccccaggctgcaccgtacaagcgtgcggtttacgcgataatatggacgacctgaaaaaagcgggcgtcgaagtactgggtatcagcactgataaaccagaaaaactgtctcgttttgccgaaaaagagctgctgaactttacgctgctgtctgatgaagatcatcaggtctgcgaacagttcggcgtctggggcgaaaaatcatttatggggaaaacctacgacggcattcaccgtattagcttcctcattgatgctgacggcaagattgaacatgtgtttgataacttcaaaaccagcaatcaccacgatgtcgtgctgaactggctgaaagaaaacgcataa

SEQ ID NO: 89792 - DNA, 570 bp, Enterobacter aerogenes
ttgacagcctcattacaacactatctggtgattaccgctctgggcgcagaccgccccggcatcgtaaacacaatcactcgccacgtcagcagctgcggctgcaatattgaagacagccgcttggccatgctcggcgacgagttcacgtttataatgctgctttccggctcgtggaacgcgattaacctgatcgaatcaacgctgccgttaaaaggagccgagctggatttgctgatcgtaatgaagcgcacctccgcccgcccaccgcaggcgatgccgaatacggtttggatccaggtagaggtgccggactcgccgcatatcattgagcgctttaccgcgctgtgcgacacgtggagtatgaatatcgccgaactggtctcccgtactcaaccgggagaagataaagacgccgctcagctatttattcaaatcaccgcacacagtcctgcctcgcaaaacacgacaaatatcgagcaagcgttcaaagcactatgtacagaactgagcgcacaaggcagtattaacatcgttaattattcacagcatgatgaacaggatggagtttaa

SEQ ID NO: 89793 - DNA, 879 bp, Enterobacter aerogenes
atgttcacgggaagtattgtagcgcttgtcacgccgatggatgataacggtaatgtctgccggtcaagcctgaaaaaactgattgattaccatgtcgccaacggaacctcggcgattgtttcggtagggactaccggcgaatccgcaacgttgagccatgaagagcatggcgacgtcgtgatgatgacccttgagctggccgatggccgcatcccggtcattgcaggtaccggtgcaaatgcaaccgcagaggcgattagcctgaccaaacgtttcaacgatagcggcgttgtcggctgcctgacggtcactccttattataaccgtccgacccaggaaggcctgttccaacactttaaagctatcgctgaacatactgacctgccgcaaattctgtataatgtgccgtcccgtaccggttgcgatatgctgccggaaaccgttggccgcctggcggaaattaaaaatattgtcggtattaaggaagctacagggaacttaagtcgtgttcaccagatcaaagagctggtttcagatgactttattctgctgagcggcgatgacgcgaccggcatggactttatccagctcggcggcgtcggcgttatttccgtcacggcgaacgtcgccgcccgtgaaatggccgacatgtgccgactggcgatggcggggcaattcgcggaagctcgcgcgattaaccagcgtctgatgccgctgcatacaaaattatttgtcgaacccaacccgatcccagttaaatgggcttgtaaggcgttgggacttgtagcgaccgacacgctgcgcctgccgatgacgccgattaccgaagcgggtacgaaagcggttaccgcagcgctgaagcatgccggtttgctgtag

SEQ ID NO: 89794 - DNA, 1035 bp, Enterobacter aerogenes
atggcttactcagtacagaagtcgcgcctggcgaaggttgcgggtgtttcgctggttttactcctcgcggcctgtagttctgactcgcgctataagcgtcaggttagcggcgacgaggcttatttagatgccacgccgctcagtgaacttcacgccccggcggggatgatcctgccgctgcagactggcgactacaacattccggttgccgccagcaccggtgcggtaggcaaggcgctggatattcgtccgccggctcagcctttagccctggtcagcggcgcgcgtacccagtttaacggcgacacctccaccctgatggtggaaaacagccgcagcggttctttatgggcgcaggtggttagcatcgtacaggcgaaaaactacaccatcaccaagcgtgacgatgcaggccagacgctgaataccgattgggtagagtggaaccgccttgatgaagaccagcagtaccgtggccgttatcaaatctccgttaagccgcagggctatcagcaggcggtggtggtgaagctggtgaacctggagcaggcgggcaagcccgtgtctgacccggcttctctgcagcgctacagcacctcaatgctgaacgttatctcttccggtcttgattccaacgccactaatgcgcagaacgcggcgcagcgaagcgctggcgcgaccttcgacgtgcagagcgcggcggatgacaccggcttgcctatgctggtggtgcgcgcgccgttcaacatggtgtggcaaaaactgccggccgcgcttgaaaaagtgggcatgaaggtaaccgacagcactcgctctcagggcagcatggcggtaacttacaagccgctgtctgacagcagctggcaggatctgggcgccagtgacccgcagctggcctctggcgactataaactgcaggtcggcgatctcgataaccgcagtagtctgcagtttatcgacccgaaaggccacaccctgacgcagtcgcaaaatgacgccctggtagccgtattccaggccgcatttaacaagtaa

SEQ ID NO: 89795 - DNA, 714 bp, Enterobacter aerogenes
atgaaaaagcaagctgagttgtatcgtggcaaagcgaaaacggtatacagcaccgaaaacccggatctgctggtacttgaattccgtaacgatacgtcagcaggggatggcgcccgcatcgaacagttcgatcgtaaaggtctggtgaataacaaattcaaccatttcattatgagcaagctggaagaagccggtatcccgacccaaatggaagcgctgctttctgatactgaatgcctggtgaaaaagctggatatggtgccggttgaatgcgtgattcgtaaccgcgcggcgggttcactggtgaaacgcctgggtattgaagaaggtatcgaactgactccgccgttgttcgacctgttcctgaaaaacgacgccatgcacgacccgatggtcaacgaatcctactgtgagacgttcggctgggtgaataaagaaaacctggcgcgcatgaaggagctcagctacaaagcgaacgacgtactcagcaagctgtttgatgatgccggtctgattctggtcgacttcaagctggagttcggtctgttcaaaggcgaagtggtgcttggcgatgaattctctccggacggtagccgtctgtgggataaaaacaccctcgataaaatggacaaagatcgcttccgccagagcctcggcggcctgatcgaagcttacgaagaagtggcccaccgtctgggcgtcaagctcgactaa

SEQ ID NO: 89796 - DNA, 876 bp, Enterobacter aerogenes
atgcgctggcaagggcgtcgtgaaagcgacaatgtggaagacagacgtagtgattcaggttcgccgctgggcggcggcggtggcggtttccgtattccaagcggtaaaggcggcatcgtcctgctcattatcgttctggtggcgggttactatggcgtggatttaaccggcatgctgaccggcgaaccgatgccgcagcagcagacttcaacccagcgttcaatcagcccgaaggatgatgaagcggcgaagttcacctccgttattctggccactaccgaagatacctgggggcctatttttgaaaagatggggcggcaatacgtacagccgaagctggtgatgtatcgcggcgcgacccgtaccggctgcggcaccggtcaatcggtgatggggccgttctactgcccggcggacagcacggtctatatcgacctgtcattctatgacgagatgaaaaacaaactcggcgctgacggcgactttgcgcagggctacgtgattgcgcacgaagtcggccaccatgtgcagaagctgctcggcatcgaacctaaggtccgtcagatgcagcagcaggcttcgcagactgaagtgaaccgcctgtcggtgaaaatggagctgcaggcagactgctttgcgggcgtctggggcaataacatgcagaaacaggatgtgatggaaaccggcgatctgcaagaggcgctcaatgccgctgaggccatcggcgacgatcgtctgcaggagcagagccagggccgtgtggtgccggacagcttcacccatgggacctcccagcagcgctatacgtggttcaaacgcggtttcgatagcggcgatccttcgcagtgtaataccttcggcagcgcgcttcgctaa

SEQ ID NO: 89797 - DNA, 2001 bp, Enterobacter aerogenes
atggaaacgctgcttgacctgaccgcgcggatggcgcgcgagggtattcgtcgcctgctggtgctcagcggcgacgaacattggtgtctggcgcaggccgttgagctgcgagagcggctgggcgacgatagtctatgggttggcgcgttgccgcagcaggaaccctgcgtggcgtcgggcgcgctgaaaacgctgctcgggcgcgagttcctgcatgccttcttcgatgctcgtcacggttttgacgtggcggcttttgctgccctcggcggtacgctgcgcgccggcagttggttagtgctcctcgcgccggattttgcccgctggcctgagcaggtggatggcgattcgctgcgctggagcgatacgtctgaaccgatcgccacccctaactttgtccatcgttgtcttcaactctttagcgcggatcctgaggtcgcgctgtggcgacagggcgacggcttacggttgccggaggccgcgccgcgcaggcactggcatgctgccgatggctacccgcaggccgaacaggccgccattctttcgtcactactgtcatcgcccccggaaattgccgccgtcaccgccgggcgcgggcgcggtaaatccgcgctggcgggaatgttgatccatcagctcgccggctccgccatcatcaccgcgccgacgcgcgacgcgacagcggtcatcgccgcttttgcgggggagaagatgcgctttatggcgcctgatgccttgctggcaagcgacgcgaaagccgactggctggtggtcgatgaggctgccgctatcccggcaccgacgctgcgccagctgacggcgcgttttccacatacgctgttaacgacgacggttcagggctatgagggtaccggtcgcggcttcttattgaagttctgcgccggtttcccaacgctacggcggtataacctgtcgtcgccgattcgctgggcgccgggttgcccgctggagtcggttatcgaccggttattattatttaacgatgaggcgtttctccatgtgccacatggggaaccgcagctggagacgttaagccaggatgcctggcgcgaacaacccacgcgcccatcagaggcttatcaactgctttccggcgcacattaccgcacgtcgccgctggatttgcgcaggatgatggatgcgccgggccagcactttaccgtggctcgctgcggggatggcgtcgctggcgcggtgtggctggtggaggagggagggcttgaacctgaacttagccgtgccgtctgggccggatatcgccgcccgcgcggcaatcttgtggcccagtcattggccgcgcatggcggcagcccgctggcggcgacgctgaccggcaggcgcgtcagccgtattgccgtacatccagcgcgccagcgcgaaggtctggggcagcgtttaatcgcccatgccgtcaagcagacgcacggctgtgactatctctccgtcagctttggttatacccctgaactatggcgcttctggcagcgctgcggttttctgctggtgcggatgggcacgcatcgcgaggcgagcagcggttgctatacggcgatgtcgctttatccgctcagtgcagcggggcagcagctggcctggcgcgaacatcaacggctggcgcgggatgaacgctggctaagtcagtggcgtgacgaacgcgctccggtgacagcggatgaaacagctatgcttactgaggaggactggctggagattgccggttttgcctttgcgcatcgtccactgctgacggcggttgggagtctgaaccggcttctgcaggtgacgccgctgccgttagtggcgcttcgtgcgcgattagcgcagcacgatgaggcagcgctgtgcgcaaaccttggtttatccgggcgcaaggcgctgttggggcgactgcgggaagaggtggcggcggcgctgtcaggcctcgatcctgcccgcgcgcaacggctggacgagtgggtcaggaagctgcaatttttttaa

SEQ ID NO: 89798 - DNA, 699 bp, Enterobacter aerogenes
atgaaacacgatcactttattgttcagagcccggcaacacctgcgcaacagttgctgctgctgtttcatggcgttggcgataatccggtttcgatggggcaaattggtagctggtttgcgccgcaatttcccaatgcgctcattgtcagtatcggtggcgcagaaccctgcggcccggcgccggcgcggcagtggttttcggtgcaaggcgtgacggaagagaatcgtcagcaacgcatcgatgccattatgccgacctttattgaaacggtgcgctactggcaaaaacagagcggtttgggcccacaggcgacggcgctgatcggtttttcgcagggggcgattatgtcgcttgagagtattaaagccgagccaggactggcgtcgcgggtgattgcctttaacggccgttacgcgacgctgccgcaaacggcgaccacgcaaaccaccgtgcatctgatccacggcggcgaggatcgggtgatcgatctggcgtgggcggtttccgcacaggagcggctgcaggagctggggggagatgtcacgctggatatcgttgaagatctcggacatgccattgatgaccggagcatgcagtttgccctcgatcggctgcgttataccgtaccgaagcactattttgatgaagcgctaagcggcggtacgccgaaagatgacgatattatcgaaatgctgtaa

SEQ ID NO: 89799 - DNA, 201 bp, Enterobacter aerogenes
atggaatggcttatcaaccactggtggattctggtgttggtatttttagtcggcgtgatgatcaacgtgattaaagatcttaatcgcgtcgacccgaaaaaatatctcgataacaaaccggatctgccgccgcatcgcgacttcaatagcaagtgggatgacgacgacgactggccgaacaaagaccagccgaagaagtaa

SEQ ID NO: 89800 - DNA, 1128 bp, Enterobacter aerogenes
atgtcttgcccggtcattgagctggctcagcagcttattcgccgcccttcccttagccccaatgatgcgggatgccaggcgttaatgattgaacgcctgcgggcgatcggctttaccgttgaagcgatggacttcggcgatacgcaaaatttctgggcctggcgcggacagggtgaaacgctggcctttgccggccataccgatgtggtgccggccggcgacgccgaccgctggatcaacccgccgtttgaaccaactattcgcgatggcatgctgtttggccgcggcgcggcggatatgaaaggatcgctggcggcaatggttgtcgccgccgagcgctttgtcgcgcagtatccgaaccacaaaggacgcctggcgtttctcatcacctctgatgaagaagccagcgccacccatggcacggtaaaagtggtcgaaacgctgatggcgcgtaacgagcgccttgattactgcctggtcggcgaaccttcaagtaccgaagtggtcggcgatgtcgtgaaaaacggccgccgcggttcactcacctgtaacctgacgattcatggtgtccagggccacgtcgcttatccgcacctcgccgataacccggtacaccgcgcggcgccgatgctggcggagctggtggctatcgaatgggataaaggcaacgaatacttcccgccgaccagcatgcaaatcgccaacgtgcagtccggcaccggcagtaacaacgtcatcccaggcgatatgttcgttcagttcaacttccgtttcagcaccgagctgaccgacgagatgatcaaggcgcgcatcatcgcgctgctggaaaaatatcagctgcgctataccgtcgaatggtggctttccggccagccattcctgaccggccgcggcaatcttgtcgatgcggtagtgaacgccattgagcactataatgaagtaaaaccgcagttgctaaccaccggcggtacctctgacggacgctttatcgcccgcatgggcgcgcaggtagttgaactgggtccggtgaatgcgaccattcataaaattaatgaatgcgtcaatgccgccgacctgcagctgctggcgcggatgtatcaacgcatcatggaacaactggtcgcctga

SEQ ID NO: 89801 - DNA, 357 bp, Enterobacter aerogenes
atgttgaccatgtacggcatcaaaaactgcgacaccattaaaaaggcccgccgctggctggaagcccatcagattgactatcgcttccatgattatcgtgttgacggactggaccgcgaattgctgaatacctttattgccgaattaggctgggaagcgctgcttaacacccgcggtaccacctggcgcaaactcgatgaatcggtccgcgccggtatcgataatgccgatgcggcggcggcgttgatgttggaaatgccggcaattatcaaacgcccattgctctgcgcgcccggtcagcctatgctgctgggctttagcgaagcaaactacgaaaaatttattaacgaggtgtag

SEQ ID NO: 89802 - DNA, 3114 bp, Enterobacter aerogenes
atggcgaatttctttatcgatcgccccatctttgcctgggttttggctattctgttggtcctgaccggcacgttggcaattttgtcgctccccgtagaacaatatccggatttggcgccgcctaacgtccgggtgacggccaattatcccggcgcctccgcgcagacgctggagaataccgtgacccaggttatcgaacagaatatgaccggccttgataacctcatgtatatgtcatcgcagagtagcgccaccggtcaggcaacggttaccctgagctttaccgccggtaccgacccggatgaggccgtgcagcaggtacaaaaccagctgcaatcggcgatgcgtaaactgccgcaggcggtacagaatcagggggtcacggtgcgcaaaaccggcgacaccaacattctcactcttgcgtttgtctctaccgacggcagcatggataagcaggatattgccgactacgtcgccagtaacgtgcaggatcctctaagccgcgtcaacggcgtcggcgatatcgacgcctacggttcgcagtactcgatgcgcatctggctcgatccggcgaaactcaacagctatcagatgacggcgaaagatgtgactgacgccatcgaatcgcagaacgcgcagattgccgtcggccagttgggcggtaccccgtcggtggataaacaggcgctgaacgccaccatcaactcacaatcgctgctacaaacgccacagcagttccgcgatattaccctgcgcgtgaatcaggatggttcggaagtcacgctgggcgatgtcgccagcgtcgaaatgggcgctgaaaaatatgattatctgagccgctataatcgtcaggccgcttcgggactgggaattaagctcgcctccggcgccaacgaaatggccaccgccgagcgcgttatcgcccgtcttgatgaactgtcgcaatatttcccgcacggactgcagtataaagtcgcctacgagaccacctcttttgtaaaagcctcgattaccgatgtggtgaaaacgctgctggaggcgattctgctggtgttcctggtcatgtatttgttcttgcagaacttccgcgcgaccctgatcccgaccatcgccgtgccggtggtattgatgggcaccttcgcggtgctttacgcctgcggttacagtattaacaccctgacgatgttcgcgacggtgctggctatcggcctgctggtcgatgacgccatcgtcgtggtcgaaaacgtcgagcgcattatgagcgaggaagggctctcgccgcgcgaagcgacgcgaaaatcgatgaagcagatccagggggcgctggtcggtatcgctatggtgctatcggcggtattcgtgcccatggccttcttcggcggcaccaccggcgccatttaccgccagttctccattaccatcgtttcagcaatggtgctgtcggtgctggtagcgatgatcctcaccccggcgctgtgcgccacgctgttaaaaccgattcacaaaggcgaagtacatggtcaaaaagggttctttggctggtttaaccgcgccttcaaccgcagcgccagccgctatgaaactttcgtaggcaaaattctccaccgctcgctgcgctggattttgatttacgtcctgctgctcggcggcatggtgctgctgttcctgcatctgccgacctcgttcctgccgctggaagaccgcggtatgttcaccacctcgatacagcttccgagcggttccacccaacagcagacgctgaaagtggtgcagaaagcggaagattatttcctcaataacgagaagagtaacgtcgagtcggtgtttgctaccgtcggctccggccccggcggcaacggccagaacgtcgctcgtatgtttgtccgccttaaagactgggaccagcgagacccgacaaccggttcctcgttcgctatcattgagcgcgcgaccaaagccttcaataaaattaaagaagcgcgcgtttttgccagcagcccaccggccatcagcggccttggcagctccgcgggcttcgatatggagctcgaagaccacgccggtaatggtcacgaggcgttgatgtcagcacgcgacaagctactggagctggcggcgaacaacgaccagctcacccgcgttcgccacaacgggctggacgacagcccacagctacaggttgatatcgaccagcgtaaagcccaggcgctgggggtctctattgatgatattaacgatacgctgcagaccgcctggggttcgagctacgtaaacgactttatggatcgcggacgcgtgaagaaggtctacgtccaggctgcggcaaaatatcgcatgctgcctgacgatatcaatttgtggtatgtgcgtaacagtagcggcaccatggtaccgttctccgccttcgccacctcgcgttgggaaacggggtcaccgcgcctcgaacgttacaatggctactcagcggtcgagatcgtcggtgaggccgcgccaggcgtcagtaccggtaccgccatgaccatcatggaagagttagccaaacagctaccgaacggtttcggccttgaatggacggcgatgtcctaccaggaacgcctctctggcgctcaggcgcctgccctgtacgccatttcgctgctggtggtgttcctgtgtctggcggcgctatatgaaagctggtcggtaccgttctcggtgatgctggtggtgccgctgggagttatcggcgcgctgctggcgacctggatgcgcggcctggaaaacgacgtctacttccaggttggcctgctgacggtcatcggcctgtcggcaaagaacgccatcctgattgttgagttcgccaacgaactgaaccagaaaggcgaagatctgctgatcgccacgctatcggcctgccgccagcgtctacgcccgatactgatgacctcgctggcgtttatcttcggcgtgctgccaatggccaccagtaccggcgcgggttccggcagtcagcatgcggtcggtaccggcgtcatgggcgggatgctctccgccaccgtgctggccatcttctttgtgccgctgttcttcgtgttggtgcgccgccgcttcccgctgaaagagaggccggaataa

SEQ ID NO: 89803 - DNA, 1971 bp, Enterobacter aerogenes
atgaaccactttattatgagcgatagtcgcaaatgcatcggatgcaggggctgcgaagtggcctgcgtgatggcgcataatggcgaacaacatgtcttgaccccacagcgctttttgccgcgtattaccgttattaaaaaccagaaacagcgtaacgcggtaacctgtcgtcactgtgaaggcgcgccctgcgtgcgtagctgccctaatggcgccattagccagcaggatgacagcgtattggtgcatggagaaaaatgtattggctgtaaatcctgcgtggtggcttgcccctttggcgtgatgcaaatcgtcgtcacgccagacggcagggcaacggcgtacaagtgcgacttatgccatgagcgccaagccgggccggcctgcgtgcagaattgtccggcgcaggcattacagctggcgaccgattccatgctaagcgagatggcgaaaacgcggcgcctgcgggcagcgcgtgcggatgcggcgtcgtggcaacatcgtactttgaccgctttagcgtcaacctctggcgataaggccagccagatggcggccacgcccgcgcgcggcgaggcggataaactggcggctgatgtccgtaaacagcactttggcgaaatctatttgcccttcagcgccgaacaggcgcggcgggaaacgcaacgctgtctgaaatgtggcgatcgcagcatctgcgagtggacctgtccgctgcataaccatattccgcagtggatcgagcgggtaaaagccggcgacatcgccagcgccgttgagctttcccatcaaaccaactgtctgccggaaatcaccggccgcgtctgcccgcaggatcgcctgtgcgaaggcgcctgcacgctgcgcgacgagagcggctcggtgactatcggcaacatcgaacgctatatctccgaccaggcgctggccgacggctggcgcccgaacctttcggcggtaaaagccagcggcaagaaggttgccatcatcggcgccgggcctgcgggcctggcctgcgccgaccttctggcgcgtagcggcgtggcgccggtggtgttcgatcgccacccggaaatcggcggcttgctgactttcggtattccgcctttcaagctggataaatcattgctggcccgtcggcgcgagattttcagccaaatgggcatccgctttgaactgaactgcgaggtgggcaaagacatcgaactcgctcaactgcttgcagactatgacgcggttttcgtcggcgccggtacctatcgctcgatgaaagccggtctgcccaatgaggaggcgccgggcgtgtatgaagcgctgccgttccttatcgccaacactaaacaagtgatggggctggaagcgctggtcgatgaaccttatatcgataccgccgggctgaatgttgtcgtgctggggggcggcgatacggcgatggactgcgtgcgtaccgcgctgcgccacggcgcgcaacgggtcacctgcgcctatcgtcgggatgaagctaacatgccggggtcgaaaaaagaggtcaaaaacgcccgcgaagagggggcgaactttgaattcaatgttcagccgatcacccttgagctcggcgagggcggccgggtcagcggcgtgcgttttctgcgtacccggcttggcgaaccggacgcacagggccgccgcagcccgtcgccgatccccggcagcgaatttgtgatgcctgccgatgcggtcattatggcgtttggtttccacccgcattcgatgccgtggctggaagccgcaggggtacagttggacagtcgcgggcggatcaaggcgaacgtggagagccgctatcgttaccagaccagtaatcagaagatctttgccggcggcgacgcggtacgcggcgcggatttggtggtgacggcgatggcggaagggcggcatgccgcgcaggggatcatagactatcttggtgtcgcttccgcactgccgcactaa

SEQ ID NO: 89804 - DNA, 585 bp, Enterobacter aerogenes
atgtcacttaatattcacgtcattaaagataaaatcctctccgaaaactactttctgctgcgcaacatgacctatgagttgacgcgccgcgacggcagcgtcgtgcgtcacaaacgcgaagtgtacgatcgcggcaacggcgccacggttctgctttacaaccccaacaagcagagcgtggtcctggtgcgtcagttccgcgtcgccacctgggttaacggcaacccggatggcatgctgattgaaacctgcgccggactgctggataacgacgcgccagaggtatgcatccgcaaggaggcgattgaggagaccggctatcaggtcggcgaggcgcgcaaggtcttcgaactctatatgtcgcccggcggcgtgaccgaactgattcacttttttatcgccgaatacagcgaagcgcagcgcgctaaccggggcggcggcgtggatgatgaagatattgaggtgctggaactgccgttcgtccgggcgctggagatggtcgccagcggtgaaattcaggatggcaaagcggtgatcctgctgcaatacctacaaaattccggcctgatgtcgcgggatctctga

SEQ ID NO: 89805 - DNA, 1047 bp, Enterobacter aerogenes
atgttttatcgggttttaatgctgctttttttcggttttctgccgacgtcgttggcgtgggcggcgccagcccagcagttgtttggagactggcttgtcacctgcaacaatcaaaattattgcgtcacgcgtaatgtcgggttgcatcatggattggtgatgacgttaagccgcagcgcgggggcggccaccgatgccgctttacgcatcgaacttggcggcgtcggtaatccggttgccgcgctggcggccatcggcccgcggctgcagttagatggaaaaccgctgcattttgacggtaaacattggcagattgccgataagctgattaaaaccggcgatagcgtcagtatcgacgctttcctgcagcaggcccaggaggggaaagagattaccctgcaaaacggtctgcaaagcatttcattgaagggcctgaaggccgcgctgctatttattgataatcggcaaaagcgggtcggcagcgaaaccgcgtgggtcggcaaaggtgaagaaccaccgctcagcgtaccgccagcgccggcgttgcgcaccgtaggcaaagcggaggtggcgcagtcgcccctcagccgcgacgaacttaatgagcttatcgattacggcaatgagcggatgaacgccagcccctgttcgctcgatcctttccgccgcgaaatccgcgtcaccgcgctgaccgatgagaaagttctgctgatgaccagttgcgaagcgggcgcctacaacaccgtctggctggcgtggctggtgtcgcgcaaaacgccgcatcttgcccgccaggtgcgcctggcgctgcctttccagccgcccggcaatgcgccgcgcgatattgagttgattaacgccagctttgacgagcagcgtcatgaactggtgaccttcgataaaggccgcgcgccgggcgattgcgggatccaaacccgctggcgttatgacggccagcggtttaatttgacccgctacgctcagcaaccgcagtgcgataactggcaggggccagacgcctggcccacactatggatcacccgttaa

SEQ ID NO: 89806 - DNA, 1995 bp, Enterobacter aerogenes
atgtcccgaagagagcttgctaacgccattcgcgccctgagcatggacgccgtccagaaagccaattccggccaccccggcgctccgatggggatggcggatatcgccgaagtgctgtggaacgattttctcaagcacaacccgacaaacccgcactggtacgatcgcgatcgtttcattttgtctaacggccatgcttcgatgctgctgtatagcctgctgcatttgaccggctacgatctgccgatgaatgagctgaaaaacttccgccagctgcattcgaaaacgccgggtcacccggaacatggttatacccccggcgtggaaaccaccaccgggccgctcggccaggggctggctaacgccgtcgggatggctatcgccgaacgtacgctggcggcgcagtttaaccgtcccggccacgacatcgtcgatcactacacctgggtgtttatgggcgatggctgtctgatggaggggatttctcacgaggccagttcgctggcgggcaccctgggattaggcaagctgattgggttctacgatcacaacggtatctctattgacggccacgttgaaggctggttcaccgacgataccgccgagcgctttcgcgcctaccactggcacgtgattggcgatatcgacggtcacgacccccaggcggtgaagcaggcaatccaggaagcgcaggcggtaacagacaaaccctcgctgattatttgccgcaccataatcggctttggttcaccaaataaagccggttccgaagagtcgcacggcgcggccttgggggaaaaggaggtcgcgctggcccgcgaacagctgggctggaaatatccgccgtttgaaatcccgaaagaaatttatcagggctgggatgcgcggccgcgcggcgagaaagcagaacatgcgtggaatgaaaaattcgccgcttatcagcagcagtatccagaactggcggctgagcttaaacggcgcatggaaggcgagctcccggctgactggcaaaaaacggcccatgattatgtggcgaagctacagtcggaaccggcgaaaatagccagccgtaaggcttcgcaaaatgcgcttaacgcctacggcccggatttgcctgagctgctcggcggttccgccgacctggcgcccagtaacctgacgatctggtccggctcgaagtcgatcaaagaggatcaggcgggtaattatatccactacggcgtacgcgaattcggtatgaccgcggtagccaacggcatcgccctgcacggcggttttattccctatacctcgactttcctgatgttcgtcgaatacgcgcgcaacgccgcgcgcatggcggcgctgatgaaggcgcaccagattatggtctacacccatgattcaatcggccttggcgaagacggtccaacacaccaggcggtagagcagctggcaagcctgcggctgacgcccaattttagtacctggcggccgtgcgatcaggtggaaaccgccgtcgcctggcaggcggccattgagcgcaaggacggccctaccgcattaatcctttcgcgacagaatctggcgcaaatggcccgtacgccggaacaggtgcaggaaattgctcgcggcggttacgttctgaaggatgcgggcggcaagccggatctcatcctgatcgccacaggttcggaagtcgagatcgccgttcaggcggcggagacgctgctggccagcggcgtaaacgtgcgggtggtgtcgctgccttccaccgacgttttcgatgctcaggatgaggcctggcgcgagtcggtgctgccttccgatgttagcgcccgcgtcgctatcgaagccggtattgccgactactggtataaatatgtcggcctgaaaggcgcaattgttggtatgacccgctacggggaatcggcgcccgccgacaagctgttcccgttcttcggctttaccgctgaacatatagtcgaagtcagccgtaaggtgcttaacgggtga

SEQ ID NO: 89807 - DNA, 969 bp, Enterobacter aerogenes
atgaaccagctagacagtatcaaacaattcaccaccgtagtcgccgacagcggcgacattgaatctatccgccactatcagcctgaagatgccaccaccaacccttcgctgctcttaaaggctgccggactggataactacgccgggcttatcgatgatgccctcgcctgggctgcaaaacagggcggcaaccgcgagacgcaggtcgccaatgcctgcgataaactggcggtcaattttggtgcggaaatactcaaaagcatcccagggcgcgtctccaccgaagtcgatgcccgtctctccttcaatcgtgaaaaaagtatcgagaaagcacgccatctggtcgctctctatcaggaaatggggatcgataagtcgcggatcctgatcaaactagcctccacctgggaagggatccgcgccgcggaggtgctggaaaaagaagggattcactgcaacctgacgctgctgttctctttcgcccaggctcgcgcctgcgctgaagccggcgtgtttctgatttcgcccttcgtcgggcgtatttacgattggtatcaggcgcgtcagccgttagatccttacgtggttgatgaagacccgggggtgaaatcggtgcgcaatatctacgactatttcaaactccataagtacaacaccatcgtgatgggcgccagcttccgccgcaccgaacaaatcctcgcgctggttggctgcgaccgcctcaccatctccccggccttgttacaagagctgcaggccagcgacgcgccggtaatacgcaaactcatccccgctcatcagatactgccacgcccggttccgatgagcgaagcggaattccgctgggagcataaccaggatccgatggcggtagaaaaactggcggaaggtattcgccagttcgccgtcgatcaacgcaaactggaagatctgctagcagcaaaactgtcatcctttgtcacggagtaa

SEQ ID NO: 89808 - DNA, 2280 bp, Enterobacter aerogenes
atggatgagcagttgaaacaaagcgccctcgatttccacgagttcccggtgcccgggaaaattcaggtgtcgccgactaagcccctggcgacccaacgcgatctggcgctggcatattcgccgggcgttgccgcgccgtgcctggaaattgagaaggatcctttggccgcttacaaatacaccgctcgcggcaacctcgtggcggtggtctccaacggtaccgctgtcctcggtttaggcaatatcggcgcgctggccggaaaaccggtaatggaaggaaagggcgttctgtttaaaaagttcgccggtatcgatgtgttcgatattgaagttgatgagctggatcctgacaaattcattaatgtcgttgccgccctggagccgacgtttggcggcatcaacctcgaagatattaaagcgccggaatgtttctacattgagcagaaactgcgtgagcgcatgaatattccggtgttccacgacgatcagcacggcacggcgattatcagcaccgcggcaattctcaacggtctgcgggtggttgagaagaatctctctgatgtgcggatggtggtctccggcgcgggagcggcggctatcgcctgtatgaacctgctggtggcgctgggaatgcagaaacacaatatcgtggtctgcgactcgaaaggcgttatctataaagaccgcgaagccaacatggcggaaaccaaagcggcctacgcggtggaagacgacgggaaacgtaccctcgacgatgtcatcgatggcgcggacattttccttggctgctccgggccgaaagttctgactccggagatggtcaagaagatggcgcgctcaccgctgatcctcgcgctggcgaacccggagccggaaatcctaccgccgctggcgaaggaagtgcgcgacgacgtgattatttgtaccggccgttccgactatccaaaccaggtcaacaacgtgctgtgcttcccgttcatcttccgcggcgcgctggatgttggcgcgacggcgataaacgaagagatgaagctggcggcggttcatgctatcgccgagctggcgcatgccgaacagagcgaagtcgtggcttccgcctatggcgaccaggatctcagctttggcccggagtacattattccgaaaccgttcgatccgcgcctgatcgtcaagatcgcgccagcggtcgctaaagcggcgatggaatcaggcgtggcgacccggccgattgccgacttcgatgcctacatcgagaaactgagcgagttcgtctataaaactaacctgtttatgaagccgatcttctcccaggcgcgcaaagagccgaagcgcgtggtgctggcggaaggcgaggagactcgcgtgttgcacgccacgcaggagctggtttctctggggctggcgaagccaatcctcatcggtcgcccgagcgtgattgaaatgcgcatccagaaactgggcctgcagattaaagcgggcgtggacttcgaaatcgtcaataatgaatccgatccgcgcttcaaagagtactggagcgagtactaccagttgatgaagcgccgcggcattacccaggagcaggcgcagcgggcggtcattagcaacacttcggtcattggcgcgattatggttcatcgcggtgaggcggatgcgatgatctgcggaaccatcggagattatcatgagcactatcgcgtggttcagccgctgtttggcttccgcgacggcgtcagcaccgccggggcgatgaacgcgctgctgctgccaagcggaaacacctttatcgccgatacctatgtcaaccacgatccatcgccggaagagctggcggagatcaccctgatggcggcggaaagcgtgcgtcgttttggtatcgaaccgcgtgtcgcgctgctgtcgcactctaacttcggttcagctgattgcccgtctgccagcaaaatgcgcaaaacgctggaattggtgaaagcgagcgcgccggatctgatgattgacggcgaaatgcacggcgacgccgcgctggtggagagcatccgcaacgatcgtatgccggatagcccgctgaaaggggcggctaatattctggtgatgccgaatatggaagccgcgcgtatcagctacaacctgctgcgcgtctccagttcggaaggggtaaccgtcgggccggtactgatgggtatcgctaagccggtgcatattctgacgcctatcgcctccgtgcgccgtatcgtcaacatggtggcgctggcggtcgtggaagcgcagacccagccgctgtaa

SEQ ID NO: 89809 - DNA, 900 bp, Enterobacter aerogenes
atgaaacccgatgtacagcaggtcaaagccttccttcttcagctgcaggatgccatttgcgccaaactctccgccgttgacggcaaggattttgttgaagatagctggcagcgcgaaggcggcggcggcggacgcagccgggttttacgtgacggcggcatctttgagcaggccggggttaacttttctcacgtccacggcgatacgatgcccgcctcggctaccgcccaccgcccggaactggccgggcgcagctttgaagcaatgggggtttcgctggtggtgcatccgcgcaacccctatgtgccgaccagccacgctaacgttcgcttttttattgccgagaagcccggcgccgacccggtgtggtggttcggcggcgggtttgatctaacgccttattatgggtttgaagaagacgccattcactggcatcgtactacccgcgatttatgcctgccgtacggcgacgaggtctatccgcgctacaaaaagtggtgcgatgattacttcttccttaagcaccgcaacgaacagcgcggcattggcggtctgttctttgatgatttaaataccccggacttcgaccactgcttcgcctttatgcaggcagtgggcaacggctttaccgacgcttacctgccgatcgttgagcgtcgaaaaaccacgccttacggtgagcgcgaacgcgatttccagctttatcgccgcgggcgttatgtggaattcaatctggtgtgggatcgcggcacgctgttcggcctgcagaccggcggtcgtacggagtctattctgatgtcgatgccgccgctggtgcgctgggagtatgactaccatccgcaggaaggcagcccggaagccgcgctgagcgagttcatcaaagtgaaagagtggatctga

SEQ ID NO: 89810 - DNA, 804 bp, Enterobacter aerogenes
atgacgctaaccggcgtcgcttcccaagccactgccaaagagcagccgctaaaaacttccaatggacacagcaaacccgtcgcaaagaaagcaggcagcaggcgtctggtgatgcttgaccccggtcatggcggcatcgatacgggggcaattggccacaacggttcgaaagaaaaacacgtcgtgctggccattgctaaaaatgtgcgcagcattttacgcagcaacggcatcgatgcccgtctgacgcgtagcggcgatacctttattccgctgtacgatcgcgttgagatcgcccaccagcacggcgccgatctgtttatgtcgattcacgccgacggctttaccaacccgagtgcggccggcgcctccgtctttgcgctctccaaccgcggcgccagtagcgccatggcgaaatatctctccgagcgcgaaaaccgcgccgatgaggtcgccggtaaaaaagcgacggataaggaccatctgctgcagcaggtattgttcgatttggtgcaaaccgacaccattaagaacagcctgacgctcggctcgcatattctgaaaaagattaagccggtgcataaactgcacagccgcaatacagagcaggcggcctttgtggtgctgaagtccccttcgattccctcggtgctggtcgaaacgtcgttcattaccaacccaaatgaagagaagctactcggcacaaccgctttccgccagaagattgctaacgctatcgcttccggcattattagttatttccactggttcgataaccagaaagcgcattcgaagagacgttaa

SEQ ID NO: 89811 - DNA, 426 bp, Enterobacter aerogenes
atggagattcgcgtttttcgccagcaggatttcgaagaagtgatcaccctttgggagcgctgcgatcttctgcgcccatggaacgatccggaaatggatatcgagcgtaagctcaaccacgacgtgagcttgtttctggtcgctgaagtgaacggtgaagtggtggggacggtgatgggcggttacgacggccaccgcggctccgcttactatcttggcgtacatccggaataccgcggccgcggtatcgctaatgcgctgctcaatcggctggaaaagaagctgatcgcccgcggttgcccgaaaatttcaattatggtgcgtgacgataacgatgtggtgcaggggatgtacgagcgtctcggttacgagcactcggatgtactcaccctgggtaagcgcctgattgaagatgaagaatactga

SEQ ID NO: 89812 - DNA, 450 bp, Enterobacter aerogenes
atgaagaatactgaatttattcctgccgattatgatacccagggtcgtttacggctgccgctgttgttttggggcgtgctgttgctgcaggcgcgcacctgggtgctattcgtcatggccggggcctcccgccagcagggggatgcgctgctgaacctgttttatcccgatcacgataacttctggctgggtttactgcccggcgtaccggcggtcgcggcatttttgttgagcggtcagcgtcagcgttttccccggatctggccgctgatgcgttggctgctgattgcttcacaggcgctattgctggcctggcagccgtggctgtggttcaccggcgaggcgccttccacgctgaccatcgccctgctggcggccgatatttatgcgctatggtggctgataaccagccgcaggttgcacgcctgttttcgccttgaagcgctttaa

SEQ ID NO: 89813 - DNA, 576 bp, Enterobacter aerogenes
atgaaatcgctacgtctaatgctttgcgcgcttccgctggcgctaaccggctgctcaacgatgagcgcggtgaactggtcggctgcctatccatggaactggtttggttcctccaacgaggtcaccgagcagggcgtgggtaaactgacggcgtcgacgccgctcaatgaacaggcaattagcgatgccctcggcggcagctaccgtctgcgcagcggaatgaaaaccgcggatggcaaaatcgttcactattttgaagcgctaaaggatgacaagctggcgctgactatcaacggcgatggcggtacggtgagccgcattgatgtgcgcgatagcgcgattcccgccgccagcggcgtgaaaatcggtaccccgtttagcgagctgtacggcaaagcgttcggcaactgcgagaaaggcgttcccgacaacggcgcggtggtggaatgtaaagcgcctggcagccagcacatcagctacgcctttaccggccactggagcggcccggacgagctgatgccgtccgacgataccctgaagaactggaaagtcagcaaaattatctggcgtcgctaa

SEQ ID NO: 89814 - DNA, 900 bp, Enterobacter aerogenes
atgtctcaggttcagagcggcattttgccggaacattgccgcgcggcgatttggattgaagccaatgtaaaaggggacgttaacgccctgcgcgaagcgagcaaaatttttgtcgataatgtggccaccttccaggctaaatttcctgacgccaaactcggcgcggtggtcgctttcggcaataccgtctggcgtcagctgagcggtggtgaaggcgcggaagagttaaaagattttccggtttacggcaaagggctggcgccatccacgcagtatgacgtgttgattcatattttatccgcccgtcatgaagtgaacttttccgtcgcccaggcggcggtggccgctttcggcgacgccattgaagtgaaagaagaaattcacggtttccgctgggtggaagaacgcgatctgagcggctttgtcgacggcaccgaaaacccggcaggcgaagaaacccgccgtgaagtcgcggtgattaaagacggcgttgacgcgggcggcagctacgtattcgtgcaacgctgggagcacaatcttaagcaactgaaccgcatgagcgtgccggatcaggagatgatgattggccgtaccaaagacgccaacgaagagatcgacggcgacgagcgcccgattacttcgcacctgagccgcgtggacttaaaagaagatggcaaagggctgaaaatcgtccgccagagcctgccatacggtaccgccagcggcactaacggcctgtacttctgcgcctactgcgctcgcctgtataacattgagcagcagttgctgagtatgttcggcgataccgacggtaagcgcgatgccatgctgcgcttcactaaaccggtgaccggcggttattacttcgcgccgtcgctggagcgtattcaggcgctgtaa

SEQ ID NO: 89815 - DNA, 1017 bp, Enterobacter aerogenes
atggccgttaaatcactgaaaaaaggatatctggcgctggcagcttccatgctgctggtggcgcaggcgcaggcgactgaactgctgaacagttcctatgatgtttcccgcgagctgttcgccgcccttaatccgccttttgaacagcagtgggcaaaagaaaacggcggcgacaagctgaccattaagcagtcacatgcgggctcctccaagcaggcgttggcgattctgcaaggtctgaaggctgacgtcgtgacctataaccaggtgacggacgtccagattctgcatgataaaggcaacctgatcccggcagactggcagagccgtctgccgaataacagctcgccgttctattcgaccatggcgttcctggtgcgtaagggcaatcccaaaaatattcatgactggaacgatctggtgcgttctgacgtgaagctgatcttcccgaatcctaaaacttcaggcaacgcgcgctatacctatcttgcggcctggggggcggcggacaaagccgatggcggcgataaagccaaaaccgaacagttcatgacccagttcctgaagaacgtcgaggtattcgataccggcggtcgcggcgcgaccaccaccttcgtcgagcgcgggttgggcgatgtgctgattacttttgaatcggaagttaacaacatccgtaaacagtatgaagcgcaggggttcgaagtcgttgtgccgaaggtcaatatcctcgccgaattcccggtcgcgtgggtagacaaaaacgttaaggccaacggtactgaaaaagcggcgaaagcctacctgaactatctctatagtccgcaggcgcagaccatcatcaccgattactactatcgcgtgaacgatccgaaagtgatggcgtcgctgaaagataaattcccgcagaccgaactgttccgcgtggaagaccagtttggcagctggcctgaagtgatgaaaacccacttcgtcagcggcggcgagctggacaaactgctggcagcggggcgtcagtaa

SEQ ID NO: 89816 - DNA, 834 bp, Enterobacter aerogenes
atgttggctgtgtcgtccaagcgcgtgctgccgggctttaccctgagccttggcaccagcctgctgtttgtgtgcctgattttactgttgccgctcagcgcgctggtgatgcagctggcgcagatgagctgggcgcagtattgggaggtgattaccaaccctcaggtggtcgccgcctataaagtcacgctgctgtcggccttcgtggcctcgatttttaacggcgtgttcggcctgctgatggcgtggattcttacccgttatcgttttccaggccgtacgctgctcgatgccctaatggacctgccgttcgcgctgccgacggcggtggcgggcctgacgctggcctcgctgttctcggttaatggcttgtacggcgagtggctggcgaagtttgatatcaaagtgacctatacctggcttggcatcgcggtggcgatggcctttaccagcatcccgtttgtggtgcgtaccgtgcagccggtgctggaagagttagggccggaatatgaagaggcggcggaaaccctcggcgcgacgcgcttacagagtttccgcaaagtggtgctgcctgaactgtcgccagccctgctggcggggattgcgctgtcgtttacccgcagccttggcgagttcggtgcggtgatctttatcgccggcaacatcgcatggaaaacggaagtgacttcgctgatgattttcattcgtttgcaggagtttgattacccggcggcgagcgcgattgcctcggtgatcctcgcggcttcgctgctgctgctgttctctatcaacaccctgcagagtcgctttggtcgacgcgtggtaggtcactaa

SEQ ID NO: 89817 - DNA, 876 bp, Enterobacter aerogenes
atggcggaagttactcaattgaagcgctatgacgcgccccggatcaactggggcaaatggtttctgatcggcgtcgggatgctggtatccgccttcatcctcgtggtgccgatgatttatatttttgtccaggctttcagtaaagggttaatgccggtgctggaaaacctggccaatccggacatgctgcacgccatctggctgacggtgatgatcgcgttgattaccgtgccggtgaatctggtattcggtacgctgttggcctggctggtaacgcgctttaccttccctggccgccagctgctgctgacgatgctggatatcccgttcgccgtctcgccggtggtggcaggtctggtttatttactgttttacggctccaacggcccactcggcggctggcttgatgagcacaacatgcagatcatgttcgcctggccgggcatggtgctggcgactatcttcgtcacctgcccgtttgtggtccgcgagctggtgccggtgatgatgagccaggggagcaacgaagatgaagcggcgatactgctcggcgcttccggttggcagatgttccgccgggtgacgctacccaatattcgctgggcgctgctgtacggcgtggtgctgaccaacgcccgcgcgattggcgaattcggcgcggtgtcggtcgtttccggctcgatccgcggcgaaacgctgtcgctgccgctgcaaattgaattactgcagcaggactacaacaccgtcggttcgtttaccgccgcggccctgctgacgttaatggctattttgaccctgtttttaaagagtatgttgcaatggcgtctggccaatcaggaaaaacgcgcgcaacaggagggaaatcatgagcattga

SEQ ID NO: 89818 - DNA, 1095 bp, Enterobacter aerogenes
atgagcattgagattgccaatattaagaaatcgtttggtcgcacccaggtgctgaatgatatctcgctggatatcccttccgggcaaatggttgcgctgctggggccgtccggctccggtaaaaccaccttattgcggattatcgccgggctggagcatcaatccagcggccatatccgttttcacggcaccgacgtgagccggatgcacgcccgcgatcgtaaagtgggctttgttttccagcactatgcgctgtttcggcatatgacggtattcgataacatcgcctttggcctgaccgtgctgccgcgccgtgagcgtcccaatgcggcggcgattaaagccaaagtgaccaaactgctggagatggtgcaactggcccatcttgccgaccgttatccggcgcagctttccggcggccagaagcagcgcgtagcgttagcgcgcgcgctggcggtcgagccgcaaattctgctgctggatgaaccctttggcgcgctggatgcgcaggtgcgtaaagaactgcgccgctggctgcgccagctacatgaagaattaaaattcaccagcgtgtttgttacccacgaccaggaagaggcgatggaagtcgccgatcgggtagtggtaatgagccagggcaacatcgaacaggccgatgcgcctgaacgcgtctggcgtgaaccttcgacccgttttgtgctcgagtttatgggcgaagttaaccgcctgcagggcaccattcgcggtggccagttccacgtcggcgcccaccgctggcctttaggctataccccggcataccaggggccggtcgatctgttcctgcggccgtgggaagtagatatcagccgccgtaccagcctggattcgccgttgccggtgcaggtgctggaagctagtccgaaggggcactacacccaattagtcgtccagcctcttgggtggtatgacgaaccgctgagtgtagtgctggcgggcgatgaggccccgtcccgcggcgaacgcctgtttgtcggcttgcagaatgcgcgcttgtataacggaaccgagcgcatcgagccgcgcggcgaacttgctctggcagagtcggcctga

SEQ ID NO: 89819 - DNA, 912 bp, Enterobacter aerogenes
gtgaacacattagaacaaacaattggcaacacgccgctggtgaaattacaacgtctggggccggacaacggcagcgaaatttggctcaagcttgagggcaacaacccggcgggctcggtaaaagatcgcgccgcgctgtcgatgattgtcgaagcggaaaagcgcggcgaaattaaacccggcgatgtattgatcgaggcgaccagcggtaataccggtatcgcgctggcgatgattgcggcgttaaaaggctatcagatgaaactgctgatgccggacaacatgagccaggagcggcgcgccgcaatgcgcgcctacggcgctgaactcatcctggtcaccaaagagcaggggatggagggcgctcgcgatctggccgccgcgatggccgagcgtggcgagggtaagctattggatcagttcaataatccggataacccttacgcccattacaccaccaccggcccggagatctggcgccagacggacgggcgtatcacccactttgtttccagcatgggcaccaccggtaccattaccggcgtatcgcgttttctgcgcgaacaggcgaagccggtaagtatcattgggctacagccggaagagggcagcagcattccggggatccgccgctggccgcaggaatatatgccgggcatttttaatgcctcgttggtggatgaggtgctggatatccaccagcaggatgcggaaaacacgatgcgccagttggccgtacaggaagggatcttctgtggcgtcagttccggcggcgcggttgccggggcgctgcgtattgctcgcgccaatccgggcgcggtggtggtggcgatcatctgcgatcgcggcgatcgctatctctcaaccggcgtgttcggcgaagaacacttcagccagggagcgggtatctaa

SEQ ID NO: 89820 - DNA, 717 bp, Enterobacter aerogenes
atgcggatccactttatcgtccatgaagtttttgaagcgcctggcgcctatctgcgctgggttaacgcgcgcggctatcaggccagctggtcgcgagtttatgccggggatccgctgccggcgaatgccgaaggttttgatatgctggtggtacttggcggcccgcaatcaccacgcaccacgcttgccgagtgcccatggtttgatgcccatgccgagaaaaacctgattgcccaggcgattgccgccgggcgtatcgtggtcgggatttgtctcggatcgcagctcatcggcgaagcgctgggggcgccggtgatgcaaagcccggaaaaagagattggccactatcctatcatcctgaccaccgccggactgcaggatgacaacatcgcccatttcggaccatcggtggtagtcggtcactggcacaacgatatgccgggcctgacgcctgcggcggaagtcctggcttccagcgaagggtgcccgcggcaaatcgtcaaatatagcgatcggatctacggttttcagtgccatatggagtttgacgcggaggtcattgagttattaattacccactcgcaacatgaacttgccgccgcaaaaggcaggcgctttattcgcagcgaagatgaaatgaggcaatgggattatcgcgagatgaatcaaaaactatgggcgtttctggataagctggtagcgaaacacgcactttag

SEQ ID NO: 89821 - DNA, 1296 bp, Enterobacter aerogenes
atgttcaccggaaaaaccgcaagcgagattttcgataacatccgtcatctggtgcagagcggcgcgttgcaacccggcgaggcgctgccgccggtgcgcgaactggcaggcgaactggcagtcaaccgcaacacggtggcggcggcctacaagcggctggtgacttcaggcctcgccgtcagtcaggggcgtaacggcacggccattaaggcgcgcaatacgcttaatgcggtcgagggtggcgatccaacgacatcgctgattgatatttccggcggcaatccggatccacgatgtctgccggatattggccgttttcttccgcagctggcgcagaccccgcacttatatggcgatgccgccgttgagccacggctggctgactgggcccgggagtgggtcagcggtgatatcggccaggaatttgacatcaacttgaccagcggcgcgattgacgctctggaacgactgctctgcgcgctgctgctacccggcgacagcgtcgcggtagaagacccctgctttctgagcagcatcaatatgctgcgttacgccggtttccagcccagccctgtcgccgtcgacggtgaaggcatggacccggtgcgacttgaagaagcactgcgcaacggcgcccgcgcggtaatactgactccacgcgcccacaacccgaccggctgcagtttgacgccggagcgcgcacaagcgattcgcaccgtgctcgcccgctatccgcagacgctggcgatcgttgacgatcacttcgccctgctctcagcgacatgctggcacaatccgctacctgacggcattcagcgttgggcgctggtgcgctcaatgtccaaaaccctgggcccggatttgcggctggcgatagtcgccagcgacccgacaacctcggcggcgctgcgcctgcgcctgaacgccggtagccagtgggtcagccatttactacaagagctggcgttcgcctgcctgaatgatagcgcttttgccgcctctctgactgcgagccagcgccattatcagcagcaaaatcagcagctcgccgccgcgttggcccgccacggcgctggcgattatccgcctggcgatggtcttaacttctggctgccgctatcagccgccagccagccgctggcgttgcgtctggcgcgggccggttggctggtacgtgaaggtgaagcctttggcgtgaaaacaccggcgcacggcctgcgcctatcgctgggcgccttaaccgaggcgcaaattgaacaacttgcacacgatttatcgctggtcttaccttgttaa

SEQ ID NO: 89822 - DNA, 864 bp, Enterobacter aerogenes
atgagtcagcaagacgaaatacagtccgtgctctttaacgaccacagccgggcgctggaggttgatatcgtggcggtgcaatcgcaggtggtatacggcagcgtcggcaacagtatcgcggtaccggcaatcaagcagcatgaattacgggtgatggcggtgccgacggtgttattcagcaataccccacattacgatactttctacggtggagtgatcccggaagagtggtttagcggctatctgcgggcgctggaggagcgtgatgcgcttcgcgagctgcgggcggtaaccaccggctatatgggcagcgccgggcaaattgcgctgctagcgcagtggctgcagcggatccgcgtgcaccatcccgacctctgtattctggttgacccggtgattggcgacgtggatagcggcatttacgtaaaagcggagatccccgaggcttatcgccgccatctattgccgctggcgcggggtatcacaccaaatctgttcgagctcgaaaccctcagcggcatgccgtgccacaaccagcaggaagcggtggtcgccgcgcgaagtctgctttccgatacgctaaagtgggtggtgattaccagcgcgcctggaccggatgcttcgactattaacgtgctggtggtcaccgacgacgcggtcgaagtggtcgtccatcctcgcgtcgaaaccgacctcaaaggcaccggcgacctgttctgcgccgagctcatcagcaacctggtgcgcgacatgccgttgggagacgctacgcgcgccgccgctcagcgcgtgctggcggtaatgacctggaccgagagtcagggctgcgatgaacttattttaccgccgtctggagcgcaataa

SEQ ID NO: 89823 - DNA, 228 bp, Enterobacter aerogenes
atgcatagctatcggttagtggtacgcagggagggaagaaccgtcggccatttcgagacatcgggaatgaatgcgctggaagatgcctgtagggcgaggtcgttgtttgaaagcgatcctggctaccagtgcgagctatgggtcgcggatagcgaacggcggattctggaaagtagcccgcaggggatgaaaatcctggcgagtgaaaaatgctaccgcccagcataa

SEQ ID NO: 89824 - DNA, 510 bp, Enterobacter aerogenes
atgggtttgttcgataaactgaaatctctggtttctgatgacaaaaaagacaccggaactattgagattgttgctccgctctctggcgagatcgtcaacatcgaagacgtgccggatgtggtttttgcggagaaaattgtgggtgatggcattgccatcaaacctactggcaacaaaatggttgcgccggtagagggtaccatcggtaaaatttttgaaaccaaccatgctttctctattgaatccgatagcggcattgagctgtttgttcacttcggtatcgataccgttgaactgaaaggcgaaggcttcaagcgcatcgctgaagaaggtcagcgcgtgaaagtcggcgacccggttatcgaattcgatctgccgctgctggaagaaaaagccaagtctaccctgactccggttgttatctccaacatggacgagatcaaagagctgatcaaactgtccggtagcgtcaccgttggtgaaactccggttatccgcatcaagaagtaa

SEQ ID NO: 89825 - DNA, 1728 bp, Enterobacter aerogenes
atgatttcaggcattttagcatccccgggtatcgctttcggcaaggctctcctgctgaaagaagatgaaattgtcatcgaccggaagaaaatttctgccgataaggttgatcaggaagttgaacgtttcctgaacggccgcaccaaggcctccgcccagctggaggtcatcaaaaccaaagctggtgaaactttcggtgaagaaaaagaagccatcttcgaagggcatattatgctgctggaagatgaggagcttgagcaggaaatcatagccctgattaaagataagcacatgactgccgatgcggcagccaatgaagttatcgaaggtcaggcaactgcactggaagagctggatgacgaatacctgaaagagcgtgccgctgacgtacgcgatatcggtaaacgtctgctgcgcaacattctgggcctggcaatcatcgatctgagcgctatcgcggatgaagtcatcctcgttgccgccgatctgaccccgtcggaaaccgcacagctgaacctgaataaggtgctgggtttcatcaccgacgcgggcggccgtacttcccacacctctatcatggcgcgctcccttgagctgccggcaattgtcggtaccggaagcgtcacctcccaggtgaaaaacggcgactatctgattctcgatgcggttaacaaccaggttctggttaacccgagcaacgaaaaaattgaagagctgcgtgcgctgcaggcgcaggttgctgaagaaaaagcggaactggcgaaactgaaagatctgccggccatcaccctcgacggtcatcaggttgaagtttgcgctaacatcggcaccgttcgcgacgtagacggcgctgagcgcaacggcgcggaaggcgtgggcctgtaccgtaccgaattcctgttcatggaccgcgattctctgccgactgaggaagaacagttcgcagcctataaagcggtggctgaagcgtgcggctcacaggccgttatcgttcgcaccatggacatcggcggcgataaagagctgccgtacatgaacttcccgaaagaagagaacccgttcctcggctggcgcgctgtgcgtatcgcgatggatcgtaaagagatcctccgcgaccaggttcgcgctatcctgcgtgcctccgctttcggtaagctgcgcatcatgttcccgatgatcatctctgttgaagaagtgcgcgcactgaagaaagagattgagatctacaaacaggaactgcgtgacgaaggtaaagcttttgacgaatcaattgagatcggcgtgatggtggaaaccccggcagccgcgactattgctcgtcatttagccaaagaagttgatttctttagtatcggaaccaatgatttaacgcaatatactctggcagttgaccgtggtaatgatatgatctcgcatctttaccagccgatgtcaccgtctgtgctgactctgatcaagcaagttattgatgcttctcatgcagaaggcaaatggactggtatgtgtggtgagcttgcgggcgatgaacgtgctacacttctgttgctgggtatggggctggacgaattctctatgagcgccatttccatcccgcgcatcaagaagattattcgtaacacgaacttcgaagatgcgaaagtattagcagagcaggctcttgctcaaccgacaacggacgagttaatgacgctggttaacaagttcattgaagaaaaaacaatctgctaa

SEQ ID NO: 89826 - DNA, 258 bp, Enterobacter aerogenes
atgttccagcaagaagttaccattaccgctccgaacggtctgcacacccgccctgctgctcagtttgttaaagaagcgaaaggcttcacttctgagatcactgtaacctccaacggcaaaagcgccagcgcaaaaagcctgttcaaactgcaaactctgggcctgactcagggtaccgttgtgaccatctccgctgaaggcgaagatgagcaaaaagcagttgagcatctggttaaactgatggctgaactcgagtaa

SEQ ID NO: 89827 - DNA, 972 bp, Enterobacter aerogenes
atgagtaagatttttgaagacaactccctgacaatcggtcatacgccgctggtacgactgaaccgcatcggtaatggccgaatcctggccaaggtagaatctcgtaacccgagctttagcgttaaatgccgtatcggcgccaatatgatttgggatgctgaaaagcgcggcgtactgaaaccgggtgttgaactggttgaaccaaccagcggcaacaccggtatcgccctcgcctacgtcgccgccgctcgcggctacaaactgacgctgaccatgccggaaaccatgagcgtggaacgccgcaagctgctgaaagcgctgggtgctaatctggtgctgaccgaaggcgcgaaaggcatgaaaggcgccatccagaaggcggaagagattgtcgccagcgccccggaaaaatatctgctgctgcagcagttcagtaacccggctaacccggaaattcacgaaaagaccaccggcccggaaatctgggaagacaccgatggccaggttgacgtctttatctccggcgtcggtaccggcggtaccctgaccggtgtttctcgttatattaaaggcactaaaggtaaaaaagatctgattaccgtcgccgttgagccgaccgactcgcctgttatcgcccaggcgctggctggtgaagagctgaaacctggcccgcacaaaattcagggcatcggcgccggctttatcccgggcaacctcgacctgaaactggtcgataaagtggtcgccatcaccaacgaagaagccatctccaccgctcgtcgcctgatggaagaagaaggtattctggccggtatctcttccggcgctgctgtcgccgcggcgttaaagctgcaggaagatgaagcctttaccaataagaatattgtggttatcctaccgtcttctggtgagcgttatttaagcacggcgctgttcgcagatctcttcaccgagaaagaattgcaacagtag

SEQ ID NO: 89828 - DNA, 762 bp, Enterobacter aerogenes
atggtttcatcatccgcaactaccccacgtagcggcgtctactatttttcacaaggctggaaactcatcaggctgccagggatccgacgtttcgtgttcctgcctttattagttaacgtgattctgatgggcggcgcgttctggtggctgtttacccgcctcgatagctggatcccttcattaatgagccatgtgcctgaatggcttcagtggttaaactacctgctgtggccggtggcggttatctctattttgttggtatttggttacttcttttcgaccatcgccaactggattgccgcgccgtttagcggcctgctggcggaacagctcgaagcgcgactgaccggcgcgacgccgcccgacgttggcatattcggcatcatgaaagatgtcccgcgcatcatgaaacgcgaatggcaaaagtttgcctggtacctgccgcgcgccatcgttctgttactgctgtactttatccccggcattggccaaaccgtcgcgccggtactgtggttcttgtttagcgcctggatgctggccattcagtattgcgactatccgttcgataaccataaagtgccgtttaaaaccatgcgcgaggcgctgcgttcgcggaaggtcatcaacatgcagtttggcgcgctgaccagcctgttcaccatgatcccggttctcaacctggttattctgccagtcgctatctgcggcgcgacggcgatgtgggtggattgctatcgcgataagcacgcgatgtggaaatag

SEQ ID NO: 89829 - DNA, 1083 bp, Enterobacter aerogenes
atgatgcaggatttgcgtctgatattaatcattgttggcgcgatcgccataatcgctttactggtacatggtttctggaccagccgtaaagagcgttcctcgatgttccgcgatcgcccactgaaacgtatgaagtctcgcgacgatgaaacatcggaaggcgatgactttgatgacgatgttgaaggcgtaggtgaagttcgcgttcaccgggttaatcacgccccgaacggcgcatatggggagcaagaagcacctcgtcaggcgccgcaacaccagtatcagcctccttatgagcgtcaggtgcagcagcctgtgcgtcaggacgagccggttcatcaggcgccgccgcacgcgtcgcgcccgcagcagcctgttgctccgcagccgcaggcccagccgccgcatcatgttgcccctgctcagccggtacatccagcgcagccggtccatcagccgcagccggtaccgccgcaatatcagcagccggtgcagccagctccgcagcagcctgtagctcaacagtcggcaccagtcccacaacctgttgctcaacaacctgcgccggttcaacagcctgccgcgccgcagccgcaaccggtccctgaagcgccagccgctgaacctcagcagccggccgccgcgccgcagacgaaagagcgcaaagagacggtcatcgtgatgaacgtcgccgcgcatcacggttctcagcttaatggcgaactgctgatcaacagcatccagcaggccggctttaagtttggcgatatgaatattttccatcgtcatttaagcccggacggtagcggacaggtattgtttagcctggcgaacatggttaaacctggcaccttcaatccggatgcgatggtggatatgaccacgccaggcgtgactatctttatgcaggtgccgtcgtttggcgacgagctgcaaaactttaaactgatgctgcaatcggcgcagtacatcgccgatgaagttggcggcgtggtgcttgacgaccagcgtcggatgatgacgccgcagaaactgcgtgagtaccaggatcgtattcgcgaagtaaaagaggctaacgcctga

SEQ ID NO: 89830 - DNA, 2016 bp, Enterobacter aerogenes
atggaaccaatcgaacaaaaactgactgaactgcgaaccacccttcgccatcatgaatatctgtatcatgttatggacaccccggagattcccgatgcggaatatgaccggctgatgcgcgaactgcgcgaactcgaagcgcaacatcctgagctgattacccctgactcgccgacccaacgcgttggcgcggcgccgttggcctctttcagccagattcgccatgaagtgcccatgctgtcgctggataacgtctttgatgaagagagtttcctcgcctttaacaaacgcgtgcgggaccgtttaagcgatacggcggacctgacctggtgctgtgagctcaagctcgatggcctggcggtcagcatcctctatgaaaacggcgtgctgatgcaggcggcgacccgtggcgatggcaccaccggcgaggatattacctccaacgtgcgaaccattcgcgctattccgctgaagctacgcggcgacaatatcccggcgcggctggaagtgcgcggagaagtgttcctgccgcaggccggatttgaaaaaatcaatgaagaagcgcgccgcaccggcggcaaagtatttgctaacccgcgcaatgccgccgcgggttcgttgcgccagttggatccgcgtattaccgcgaagcgaccgcttactttcttctgctacggcgttggcgtgctggaaggcggtgaactaccggccagccactccgcgcgtttgcagcagtttaagcagtggggattgccggtgagcgaccgcgtgaagctgtgtcattctccagaggaagtgcttacttactatcgccaggttgaagaagaccgtccgaaacttggttttgatattgacggcgtggtgattaaagtcgattcgctggcgctgcaggagcagcttggtttcgtcgcccgcgctccgcgctgggcggtggcctttaaattcccggcccaggagcagatgacttttgtcaacgatgtggaattccaggttggccgtaccggagcgattacgccggtagcgcgccttgaaccggtgcacgtggccggggtactggtcagtaacgccaccctgcataacgccgacgaaatcgaacgtttaggtctgcgtattggcgacaaagtggtgattcgccgcgcgggggacgtgatcccgcaggtcgtcaacgtggtgctttctgaacgcccggaacatacgcgtgaaatcatcttccccacacattgtccggtatgtcattccgatgttgaacgggtggaaggggaagcggtggcgcgctgtaccggcgggcttatctgcggcgcacagcgtaaagaagcgctgaagcactttgtctcccgacgggcgctggatgtcgacggtatgggcgataaaatcatcgatcagctggttgagaaagagtacgtccatacgccagccgatctgttccggctcagcgccggtaagcttaccgggctggatcgcatgggaccgaaatcggcgcaaaatgtggtcaacgcgctggagaaagcgaaagagacgaccttcgcccgcttcctgtatgcgttaggtattcgcgaagtcggtgaggcgacagcagcgggactggcagcgcattttggcactattgaagcgctggaacaggcttcgattgaggagctgcagaaggtgcctgacgtcgggattgtcgtcgccacacatacttttaacttcttcgccgaagagagcaaccgcgaggtcatcgcgcaactgcgcgctgaaggcgttcgctggccggcgccggtggtggtgaaggcggaagaaattgacagtccgtttgctggtaaaaccgtggtattaaccggtagcctgagccagctgtcgcgcgatgatgccaaagcgcggctggtcgcgctgggggcgaaagtcgccggcagcgtgtcgaagaaaaccgatctggtgattgccggcgaagcggcgggctctaagcttgcgaaggcgcaggagttaggcattgaggttatcgacgaagccgaaatgatgcgcctgctgggagaataa

SEQ ID NO: 89831 - DNA, 219 bp, Enterobacter aerogenes
gtggataaagcgcagctcatcgagattgctaataccgagatgccatttggcaaatataaggggcgccgtttgatcgacgtcccggaagagtatttgctgtggtttgcccgtaaggatcaattccctgccgggcatctcggcgagctgatggcgttgaccttattaatcaagaccgaggggctgacgcaactggtgcagccccttaaacaaccgcgttaa

SEQ ID NO: 89832 - DNA, 999 bp, Enterobacter aerogenes
atgaaacttttccgcattcttgatccatttacactgacattgattaccgtggttctgctggcctcgttctttccggcgcgcggcgaattcgtccctttcgtcgagcatctcaccaccgccgccatcgcgctgttattctttatgcacggcgccaagctgtcgcgtgaagcaattatcgccggtggcagccactggcgtttacacctgtgggtgatgtgcagcacctttattgtttttccggttctgggggttctgtttgcgtggtgggcgccgattaaggtcgacccgatgctctatagcggttttatttacctttgcatattgccggcgaccgtacagtcagcaattgcctttacttcgctcgccggcggtaacgtcgccgcggcggtctgttccgcttcagcatcaagtctgctcggtatttttgtttcgccattgctggtagggctgctaatgcatttgcatggcgctggcggcgatctggaacaggtcggtaagattatgctgcaactgctgctgccgtttgttcttggacacttgtcgcgcccgtggatcggtagctgggtggcgaaacataaaaaatggattggcaaaaccgatcagacctcgatcttgctggtggtctactcagccttcagcgaagccgtcgtcaatggaatctggcataaagtgggcgtgggatcgctgctgtttatcgtcgttgtcagcctggtgctgttggctattgtcatcgcgatcaacgtttttgtcgcccgccgctgcggctttagcaagccggatgaaattaccatcgtcttctgcggctcgaaaaagagcctggcgaacgggataccgatggcgaatatcctgttcccggcatcgattctggggataatggtgctgccgctaatgatcttccatcagatccaactgatggtctgcgctgtactggctcgtcgctataaagcgcagacagacgcccaacaggcgcaggagaaatcccgcgctacggcaggttaa

SEQ ID NO: 89833 - DNA, 927 bp, Enterobacter aerogenes
atgaattattcgttacgtcagttaaaggtctttgtcaccgtcgccagggcgcgcagttttagccgtgccggggaaattattggtcttagccagtcggcagtgagccatagcgttaaggagctggagcaccagaccggcgtacgtttgctcgacagaacgacgcgtgaagtggtgctcaccgaagcaggccatcagttggcgggcaagcttgagcgtttgcttgatgaactccatgtgaccctgcgtgaagcggggcgggtagggcagcagttgacggggaccgtgcgcgtcgccgccagccagaccatctcggcgcatctgatcccgcaatgcatcgctcatagcaatcgccgctatccggatattgatttcgtactgcatgacaggccgcagcagtgggtgctggaaagtatccgtcagggcgaggttgattttggtatcgttatcgatccggggacggcggcagacttacagtgcgagtccgtgttggcggaaccttttctgttgttatgtcgtgaggatcaccgtttttcccggcagttatcggtcaactggcaggaattgcagggggagaggctggtattgcaggactatgcttccggcagccgaccgctgattgatgccgcgctggcgcgttttgccatcaaagccgatattgtgcaggaaattggtcatccggcgacgctgttcccgatggtggaatcggggattggcattagcgtactgccggcgctggctttacccttgccgcagggcagccgtttgcaggtaaaaagattaactccggttgtggagcgccaattgatgctggcgcagcgtaaaaatcgctcgctgtcgaccgcggcgcaggcgctatgggagatcgtgcgtgaagagggggcaagcctgacatcagccagggtcgaggacccgctttatcagcgctaa

SEQ ID NO: 89834 - DNA, 1806 bp, Enterobacter aerogenes
atggaattatcagtcccttttatgctcgttattatttccattgcttcgctgcttgctcagtggttggcgtggcgattacgcataccttctatcctgccgctgctgctcatcggcgtactacttggccccggggtgcatttattgcaaccggatatattatttggtcctctacttttcccactggtatcgctgtcggtggccatcattctgtttgaaggggccctaacgctacgttttgacgagattcgtggcttgggtggcattgtgcgcaatttagtcacaattggaatgttgatcactttcgccgttatctcactaacctgctggggaattttaggcctcacgccgcagatttctgcgctgatcggggcggtcacggtggttacagggccgacagtgatttctccacttatgcgagtggttcgtccaacagcctctattaatcaggtactgcgctgggaagggatcgtcattgatccggtgggagcgatttttaccctattagtatttgagtttattactttgcaggagcaaacgggcacatggcttcatttgctgatcatgcttacaaaaacggtagttatagggctggtgagcggggcggtgtttggcgttttcttagggaatgcgctcaggcgtggttggatcccgggttatctgcaaaacttcgctgttttatccttcgttctattgacgtttggcgtgtccaatacgctggcggatgaatctggtctgcttgcggtaacggtcctggggatctggctggctaatatgcgagaggttgagacctcggatatcgttgaatttaaagaagagctatccgccatcttactttcagcgctatttatcatcctggcggcccgtcttgatatccatgcactctgggcgatgggctggccgctgctgatattgatgcttatcgtccagtttgtggcccgtccactatgcattcttgtttcgacatggcgttccagcttgcattggcgtgacaggctgatgttatgttggatcgccccgcgcggaatcgttgctgccgctgtcagttccctgtttgctttgacgctgcaaaaaaaaggctatgagaacgcggatcagctggtaaccgtcgttttcgcaatcattataggtacggtagttttgcaaagccttaccagcagtcaattggcgcgctggcttggcgtgcagcaacgtaggcctcgaggagtgctgattgtcggggcgaatacggtcgccagaaccctggcccaggcgctcagaaaactcgatattccggttcagctgagcgataacagctgggaatactaccggctggcaaggatggaaggcttaccaacatattatggcaatgtctggtctgaacatgcggaaaactacctgaatctgagtgagattcgtcaggtgatcgccttgtcgccaaatcgtcaccagaatgcgctgaccaccctgcattttcagcatatatttggtaataatcgcgtcttctcaatccgtacggggcctgtgactaaaggacgtagtgagaaagaaacgcgtcacgaacagcttttcgatactgatatgacctgggcacggcttagtagcctgatagcgaaaggcgcagtcatgaaagtcactcgcctgaataacaattttggctggccggagtatctcagcaccaaccccggtgcaacaccgctgtttgcgcaaagagaggatggcaatctgatagcgattaataatggaatcatgccgccgccaccctgtaccgtcgtggcgattatcgaacctggagtggaaagtgaaaaaattccgtcagaagcgtattga

SEQ ID NO: 89835 - DNA, 921 bp, Enterobacter aerogenes
atggaattaacatttttggggacatccgccggcgtgccgacccgtacgcgtaatatgacgtcgataatactgaatttgcaacaacccaccagcgctgaaatgtggttgtttgactgcggcgaaggcacccagcatcagtttctccataccccttaccacccaggcaaactgaataaaattttcatcactcacctgcacggcgatcatctgttcggcctgcccggcctgttgtgcagccgctcgatgcagggaaattcgctgccgctgacggtttacgggccaaaagggattaaagaatttatcgaaaccgcactgcgcctgagcggctcgtggaccgattatccgctcactatcatcgaagtcggccccggcctggtcttcgacgaagacggctatcgggtcagcgcgtacccgctcagtcatccggtggagtgctacggctaccgcatcgaacagcatgacaagcccggaacgctcgatgccgcccaactgattgccgatggcgtgcgtccggggccgctgttccatcagctcaagctcggccagcgtgttgaactggaagatggccgggtcatcgacggtagccgctacctggggccatcgacgccgggtaaaacgctggccatttttggcgataccgccccctgcccgcaggcgctggagatggcgcgcggcgcggatgtgatggtccacgaaaccacccttgagcaggcgatggcggagaaagccaatagccgtggccactcttccagtcagcaaaccgcggcgcttgccaaagaagcgggggtcggcacgctaatcgccacccactttagctcgcgctacgatgccgaaggctgcctgcgtatgctggcggaatgtcgggagattttcgccaatacgctactggcggaggattttatggtctatcggctggcgtaa

SEQ ID NO: 89836 - DNA, 462 bp, Enterobacter aerogenes
atgatgacctggcaggatttacatcacagcgagctcaccgttgctcaactgtacgccttgctgaagctgcgcagcgcggtgtttgtcgtcgaacaacgctgcgtctatcaggatatcgacggcgatgatttagtcggtgagaaccgtcatctgctcggctggcgcgacggagagctggtggcctacgcgcggatcctcaaaagcgaagaggagttcgaaccggtggtgatcggtcgggttatcgtcagcccgtccgtgcgcggcgagaagctgggctaccagctgatggagcaggcgctggccagctgccggcagaactggccgcagaaggcgatttatcttggggcgcaggcgcatttgcagaaattttatgccagctttggttttgtgccggtgacggaggtatacgatgaggacggtattgcccatatcggtatggcgcgtgacatcacaactcattaa

SEQ ID NO: 89837 - DNA, 1296 bp, Enterobacter aerogenes
gtgctgtctgtttccaccgcgctggaaagcctgctgggctgcctggctgaagatttccctccgtcacccggcacgcgaatttttgatatcccattcccgttaaacgacgccttcgacccgttactgtggtgcgcgcatcagccgtgctggccgcaattctactggcagcagcgtaacggcgatgaagagctggcggcgctgggggcagtaaccacctttgcctctttgtccgcggcgcatgattttttatgcgcccaggggcgggaagatctgcgcatcagcgggctgaatgcgttcgacccgcagcagggtcatctgtttctgccgcggctggagtggcgccgcctgggcggcaaagcgactttacggctggtggtacacagtgtgacctcgctgcaagacgacgcggccgccgcgagggcgtttcttcaatcattaaatagcgagcaggcgacagcggtatcgatgccgccgctgcaaagcgagcagcatgcgccggaatacccgcagtggcgcgagctgattacacaggcgacgcaggcaatcggcgccggcgaaatggataaggttgtgctggcgcgggtcacggatttacgctttagcgcgccgctgcaggcgtttgccattatggcggccagtcggcgcagcaatcttaactgttttcacttcctgatggcctttagcccacagcaggcgtttctcggctccacgccggaacggctgtggcggcgacgcggcgcgctgctgcgcaccgaagcgctggcgggcaccgtcgctaaccatcacgatgacgcccgggcgcagcagttggccgattggctaatgaaagacgataaaaaccagcgggagaatatgctggtggtggaggatatctgccagcgtttgcagggtgagtcgccgacgcttgacgttctgccgccgcaggtcgtacgcctgcgtaaggtgcagcatctccggcgctgtatctggtgcgaattggctgagcccgacgacagccgctgtctgctgcagctgcagcctaccgccgcggtggcggggctgccgcgccaggcggcgctggcgttcatccgccgccatgagcctttcacccgcgaatggtatgccggctccgcaggttatctttcactggcgcaaagcgagttttgcgtggcgctgcgttcggcaaaagtcgaaaacgacactctgaggctgtatgccggggccggtattgtcagcggatctgacccgcagcaggagtggcaagaaatagaaaataaagcggcgggattacgaacgttattactttcagaaacgtag

SEQ ID NO: 89838 - DNA, 1671 bp, Enterobacter aerogenes
atgtcagtaagcgcatttaaccgacgctgggcggcggtgatccttgaagctttaacccgccacggcgtgcagcacatttgcattgccccaggctcgcgctcgacgcccttaaccctggcggcggcggaaaaccgcgcttttattcatcatactcattttgacgaacgtggtcttggccacctggcgctgggactggcgaaggccagccgccagccggtggcggtgattgtgacctccggaaccgcaaccgcgaatctctatccggcgctgattgaagcgggcctgacgggtgaaaaactgatcctgctgaccgccgaccgcccgccggagcttatcgactgcggcgccaatcaggccatccgccaaccgggaatgtttgcttctcatcctgcgcagaccgtttctttaccgcgtccttcgcaggatatttccgcccgctggttggtctcgaccatcgatcagtcgctgggcgagctgcatgccggcggggtacatatcaactgcccgttcgctgagcccctgtatggcgatatggacgataccgggctagagtggcaacagcagctcggcgactggtggcagagcgataagccctggctgcgtcaggcgctgcagatggagagtgagaaacagcgcgactggttcttctggcggcaaaaacgcggcgtagtggtcgcgggcaggatgagcgccgcggaaggtaaaaaagtggctgaatgggcgcagacactcggctggccgctgattggcgatgtcctgtcgcagaccgggcagccgttgccgtgcgccgacctgtggctgggcaacggtaaagcggtcagcgaacttgcgcaggcgcaaatcgtcgtgcaactcggtagcagtctgaccggcaaacgcgtgctccagtggcaggcgacctgcgagccggatgaatactggctggtggataatctgcgcggtcgcctcgatccggcgcagcaccgcggtcgccgtctgctctcaagcgttgaacgttggctcgaactgcatccggcggagaaacgtcagccgtgggcgacggtgatcccgcagcttgccgggcaggcgtggcaggccgcggtcgccagcaacgagccttttggcgaagcgcagctggcgcagcgcattcggcgctatttgccggatcagggacagctgtttgttggcaacagtttagtggtacgcctgatagacgcgctggggcaactgccggcgggttatccggtctacagtaatcgcggcgccagcggcatcgatggcctattggcgaccgccgccggcgtgcagcgggcgagcgcccggcctacgcttgcgatcgtcggcgatctttcggcgttatacgatctcaactcgctggccctgctgcgccaggcgtcggcgccgctggtgctgatcgtggtcaataataacggcgggcagattttctctatgctgccgacgccgcaggacgagcgccgccagttctatttaatgccgcaggacgtggatttcagccacgcggcggcgatgttcggtctggcttatcaccgccctgatgactggcagtcgctggatgaggcgctggcaggcgcgtggcgccgcgccggggcgacggtaattgagctggcggttaacgagaccgatggtacgcagactctccagcaactgctggcgcaggtaagtcgcctgtga

SEQ ID NO: 89839 - DNA, 759 bp, Enterobacter aerogenes
gtgacgctcaacgcggcggttgaaagcggccagcctggttatccctggttggtattcctgcacggcttttccggagaccgcgacgagtggcgtacggttggcgaatcgtttccggcctggccgcggctgtatctcgatctgccggggcacggtggctcggcggatatcgcggtcgatggctttaccggggttagcgaattactgcaggctacgctaaatagttacaacatcctggattactggctgattggctactccctgggcggccgggtggcgatgaacttcgcctgccagccgcgcgcgggcctgcgcggcctgatcgttgagggcggacatccgggcctgcaggacgaagcgtcgcggcaggcgcggctcatcaacgatagcgcctgggcagaacgttttcgccgcgagccgttagcgcaggtcttcgccgactggtatcagcagccggtcttcgcttcgctgaatgcggcgcagcgcgcgtcactggtcgccctacgtcgccgcaataacggcgctacgctggcggtgatgctggaggcgacctcccttgcccggcaggccgatttgcgcccgtctctgcaggctcgcgattttccttttcactacctgtgcggcgaacgcgacgccaagtttcgcgctatcgcgcaagcgctcgccgccgatacccatattattcaccatgccggacacaacgcgcaccgggacaaccccgcggcggtgattgcctgtctggcgcagattctggcaagttaa

SEQ ID NO: 89840 - DNA, 858 bp, Enterobacter aerogenes
atgatctctcttgatgaagcaatgctctacgcccccgttgaatggcacgattgctcagaaggctataccgatattcgttatcaaaaatcgactgacgggattgctaaaatcactatcaatcgtccgcaggtgcgcaacgccttccgtccgctgaccgtcaaagagatgattcaggcgctggcggatgcccgctatgacgacaatatcggcgttatcgtactgaccggtgaaggcgataaagctttctgcgccggcggcgaccagaaagtccgcggcgattacggcggctatcaggacgactccggcgttcaccatctcaacgtgctcgacttccagcgccagatccgcacctgcccgaaaccggtagtggcgatggtcgccggttactctatcggcggcggccacgtactgcacatgatgtgcgatctgaccatcgcggcggacaatgccatcttcggccagaccgggcctaaagtcggctcctttgatggcggctggggcgcttcctatatggcgcgtatcgtcgggcagaaaaaagcgcgcgaaatctggttcctgtgccgtcagtacgacgcccagcaggcgctggatatggggctggtgaataccgtggtcccgttggcggatctggaaaaagagaccgtgcgctggtgtcgtgaaatgctgcaaaacagcccgatggcgctgcgctgcctgaaagcggcgttgaacgccgactgcgatggccaggccgggctgcaggagctggcgggtaacgccaccatgctgttctacatgacggaagaagggcaggaaggacgtaacgcttttaaccagaaacgtcagccggacttcagcaaatttaaacggaatccataa

SEQ ID NO: 89841 - DNA, 966 bp, Enterobacter aerogenes
atgcgcgtttcgcaggtttaccgctggcagataccgatggacgcgggcgtggttctgcgcgaacggcggttaaaaacccgcgacgggctgttcatccgtctgcaggagggtgaacgcgaaggctggggggaaatttctcccctgccgggattcagtgacgaaacgctggaagaggcgcaaatggcgctgctggcgtgggcgcgggcctggcgcgacggcgccgagccgccgcttcctatgcagccctccgtcgcttttggtattagctgcgcgcaggcggagcttggcggcgagctaccacaggcggcggattatcgcgcggcgccgctctgttccggcgacccggatgaactgttcgccaaactggcggcgatgcccggcgagaaagtcgctaaggtgaaagtagggctgtgggaggcggtacgcgacggcatggtggtgaatctgctgctggaagcgatccccgacctgcagctgcggctggatgccaaccgggcgtggacgccggtcaaagcgcagcagttcgccaaatacgttaatccggcgtatcgccaacgcattgcttttctcgaagaaccgtgcaaaagccgcgacgattcgcgtgaattcagccagcagaccggtattgctatcgcctgggatgaaagcctgcgcgaggcggatttccgctttgtcgccgagcccggcgtgcgcgcggtggtgatcaaaccgacgctgaccggcagcttgcaaaaggttcagcaacaggtcgccgcggcgcatgcgctggggctgagcgcggtgattagctcgtcgatcgagtccagcctggggttaacgcagctggcgcggatcgccgcctggctgaccccgcagactgtccccggactcgatacgctggcgctgatgggcgcgcaactggtgcgggcgtggccggagagtacgctgccaatttttcatgctgatgagctggagcaactgctgtga

SEQ ID NO: 89842 - DNA, 1359 bp, Enterobacter aerogenes
atgttttccgattggccgtggcgccactggcgtcagttacgcggcgagtcgcaggcgctacgcctgaatgaccaggcgttgacctggcgtgagctatgcgcgcggattgacgcgctggcgtctggttttgccgcgcagggcgtaatggaaggtcagggcgtggcgctacgggcctacaaccagccggagacgctactcgcctggctggcgctgctgcagtgcggggcgcgggtgctgccgcttaatccgcagctgcctacggtattgctgcaggaactgctgcctgcgttaaccgtacagcatcaactggtgcttaacggtgatttgctgccggggaatttaccggcgttaactctgcaggcggcagaaggcgcctgtgccgtttgctggcatggcgaacggctggtgtcgatgacgttaacctccggctcaaccggcctgccgaaggcggcggtacatagcgccagcgcccatctggccagtgccgctggcgtgctggcgctgatgccgtttgccgcggaagacgactggctgctgtcgctgccgttgttccatgtctccgggcaggggatcatctggcgctggctgctggctggcgcgcggctgacggtgcgcgatagacaaccgctggagcaggcgctgctgggctgtacccatgcttcgctggtaccgactcagctatggcgcctgctaaatggcgatgtcgatgtttcactcaaggcggtgctgcttggcggcgcggcgatccccgtcgagctgaccgaaagggcgcgagcgcagggaatacgcagcttctgcggctacggcctcaccgaatttgcctccacggtctgcgccaaagaggccgacggagcggcggatgtgggcgaagcgctgccgggacgggaggtaaaaattgtcgccggcgagatctggctgcgggcggcgagcatggccgcaggctactggcgcgatggtcaactgctgccattaaccaacgatgaaggctggtttgcgacgcgcgatcgcggagcgttacgtgccggtcggctgtcggttattgggcggctggataatctcttttttagcggcggcgaaggcattcagccggaggaggttgagcgtgtgatactcgcccatccgcaggttcagcaggtgtttattgtgccgcaggatgatatcgaatacggccaacgcccggtggcggtggttgaatgcgaggatggctgcgaaatggccacgctggcggcatggagcgctgaacggttagcgcgtttccagcagccggtacagtggctacggctgccggaaacgttaaagaacggcgggattaagatttcgcgccgggcgctgcgcgaatgggtcaattcgccggtttag

SEQ ID NO: 89843 - DNA, 1518 bp, Enterobacter aerogenes
atggatacctggatctatctgtcgcagggtttcgccgtcgccatgacgccggaaaatctgcttatcgccctcatcggctgctttgtcggaaccatcgtcgggctactgcccggcctcgggccgattaacggcgtcgccattctgctgccgctggcctttgccctgcacctgcccgcggaatcggcgctgatcctgttggcgacggtctatatcggttgcgaatatggcgggcgtatttcgtctatcctgctgaacgtgcccggcgatgccgccgccatcatgacggcgcttgatggctatcccatggcgcagcaagggcgcggcggcgtcgcgctgtcgatttccgccgtcagctctttcttcggttcgcttatcgcgatcggcggcattattctgttcgcgccgctcctcgcccagtggtcgctggcgttcggcccagcggaatatttcgcgctgatggtgtttgccatcgcctgcctcggcagcatgatggcgcaaaacccgctgaagtcgttcctcgcggcgttaatcggtttgggcctggcgacggttggcgtggatgccaacaccggggtttaccgctttaccttcgacagcgtccatctctccgatggcgttcagtttatagtggtggttatcggtctgttctccgtttccgagattctgttgatgctggagagcaccagcggcgggcaaacgctggtgcgtaaaaccgggcgcatgctatttaacaccaaagaggccgcgcagtgcgtcggcgcgaccctgcgttcttccgtggtgggtttcttcgtcggtattctgcccggcgccggggcgaccatcgccagcgccatcacctatatgacggagaaaaaaatcagtggtaatagcgataacttcggcaagggggatattcgcggcgtagcggcgccggaagccgcgaataacgcctccgcctgcggttcgtttattccaatgttgacgctcggcgtgcctggttccggcaccaccgcggtcatgatgggcgcgctgacgctatataacattacgcccggcccggcgatgttcaccgaacagccggatatcgtctgggggctcatcgccgcgctgcttatcgccaacgtgatgctgcttattatgaacattccgcttattggcctgttcacccgcatgctgacgatcccgctatggttcctggtaccggccatcgccgccgtttccgccgtcggcgtctatgcggtgcacagcaccacctttgacctgttgctgatggttggcctcggcgtgctcggctacatcatgcgtaaaatgcactttccgatgtcgccgctgatcctcggttttgtgttgggcgagatgctggagcagaacctgcgccgcgcgctatcgatcagcaacggtaatctggctatcctctgggaaagcggcgtaaccaaaacattgctgatactggctgtcgccgtcctggtggtaccgccgctgctgcgtctgagacgtaaacagcgccagcgccgcgccgaggctaatatcggctaa

SEQ ID NO: 89844 - DNA, 432 bp, Enterobacter aerogenes
atgagcgatcgtatctttgccggagtctggctgttgttatgcattggcggcctgtttatcgcctggcagatccacagcgaatactcgtatgaacccgtcggcccgcgtcctttcccgttgggcattatcggcctgatgctactgtgttcagcgctgatgctgctgcgtcgcccggacgccatcgagtggccgggacgacatgtcctgcaacggctgttaaccatggtcgtggtgctggtggtctatgcctggggatttgaatggctgggctttccgctggcgaccgcgctgctgacggcggtgatcggcctgctattcggcgccacgctaccggcggcaggcattgccggcgtggtgatgggcgtctcgttatggtacgccttcgataccttacttgatgtgactctgccgcttggcgtctggttaaattaa

SEQ ID NO: 89845 - DNA, 981 bp, Enterobacter aerogenes
atgaaaacgccatttttccgccatcttagcgccatcgcgctgtgcctctgtacaaccaccgctttcgcggcgcaagccccgtcccgcaccgaatgtatcgcccccgccaaacccggcggcggcttcgaccttacctgtaagctaattcaggtgagcctgatggaaaccggtgcgatcgaaaaaccgatgcgcgtcacctatatgcccggcggcgtcggcgcggtggcctataacgccatcgtcgcccagcgcccggcggaagccggaaccgtggtcgctttttccggcggctcgctgctgaatttgtcgcaggggaaattcggccgctacggcgttgatgacgtacgctggctggccagcgtcggtaccgactacggcatgattgccgtgcgcgccgattcgccatggaaagacctgaagtcattcatgagcgcaatggagaaaaatcccgccactatcgtcattggcgccggggcctccatcggcagccaggactggatgaaagcggcgctgctggcgcaaaaagccaacgttgacccgcacaagatgcgctacgtcgcctttgagggcggcggcgagccggtaaccgccctgctcggcaaccatgtgcaggcggtctccggcgatctgagtgaaatggtgccgtacctgcagggaaataagatccgcgtcctggcggtcttctccaacgaacgtctgccgggcgcgctggctgatgttcctaccgctaaagagcagggctatgacctggtctggccgattattcgcggcttctttatgggcccgaaagtaagcgatgccgactaccagtggtgggttgatgaattcactaaactgcagcaaaccgatgagttcaaaaagcaacgtgaactgcgcggcctgtttgaattcaacatgaacggcaaggaactcgatacctatgtaaaacagcaggtcagcgattatcgcgaacaggcgaaagcctttggcctggctaaataa

SEQ ID NO: 89846 - DNA, 678 bp, Enterobacter aerogenes
atgcgtctcttattagccgaggataaccgtgagctggctcactggctggaaaaagcgctggtgcagggcggttttgccgtggattgcgtttttgatggccgggcggcggatcacctgctgcaaagcgaaaaatatgcgctggcggtgctggatatcggtatgccgggcttagatggtctcgaggtggtacagcggttgcgtaagcgtggacaaacgctgccggtgctgctgttgaccgcgcgcagcgcggtagcggatcgggtgaaagggctgaacgtcggcgccgacgattacctacccaaaccttttgagctggaggagctcgacgcccggctgcgggcgctgctgcgacgcagcgaagggcaggtgcatgaggtacagcagcttggcgagctggaatatcgcgatgaaggctattttctgctgcgtggtgagatgttgtccctgacgccgcgcgagctggcgctgttgaaagtgctgatgtttcgccgtacccgtccggtttcccgccagcagctatttgaacaggtgtttagcctcagcgacgacgtcagtccggaaagcatcgaactttatattcaccgcctgcgcaagaaactccagcagagtaacgtgcgtatcactacgctacgcgggctgggttatctgctggagtgtgagccgcatgaaatggggtaa

SEQ ID NO: 89847 - DNA, 1410 bp, Enterobacter aerogenes
atgaaatggggtaaaccgcagtcgctgtatgcccaactgctgctgttcctcggcctgccgctggcgctgttgtgggggctatcggcattcaatagctacgtgagcgcgctgcaggcggcgacgcaggcctacgatcgtacgctgctctcctcggcgcgcaccgtggcggagcggctggtagtgcgcggcggccatctggaggtcaatgtgccctgggtggtgctggacagctttgaactcaacatgaacgaccggctgtattacaaggtggtcgacccgcaggggaaagtgatctccggttttgacgatctgccggcgatgccgccggccacgtcacgaacccagctctatccggcgctggcatggttttatcataccgaataccgcggccaggccatccgcgtagcgcgcctgctgcagccggtcaacgaaggcggcatcgtcggaatggcggagatttatattgccgaaacgctgcagtcgcggcgctggctggccggacaactgctgttttcatcctgggtgtcacagggcttattagtgctgttgacgttggtactggcggggtggctactgcgccgcgttctgcggccaatgcgtcagctctcggcgctgatggtgcgccgcgaacccggcctgctgacgccgctaccggaattgctgccgtggtcggaaacgcggctgctgatcgtggcttttaaccgctatattgaccgtctgcgggtgatgatctcccggcaagagcgctttagcgccgatgcctcccatcagttaaaaacgccgctggcggtcctgaaaacccaggcctcggtggcgctggccagcgacgatccgcagctgtggcgcgagagtttgcaggccatgcgcgcgacgctggatgatacgattttactcaccgaacgtttgttgcaactggcgacggtgaaacgccgggagcagggcgagcaggcgtttgtcgcggtcgatctgcaggaggtcgtgcaccatagctgtttttcgcgtattgcccaggcgcgtagtaaaaacatcgatctgggttatgagggcgaacagtcgccggtgaacgttttgggggatggcgttttgttgggggaactgtgcgccaacctgctcgacaatgcgattcgctacactccggcacgcgggacggtgacgctgagcctgcatcgcgatggcgaagccgtcacgctgagcgtggaggatagcggcccgggcattgatgaaaacctgattaaccaggcgctgacgccgtttcgccggctcgataacgtcggcggcatacccggcgccgggctgggcctggcgctggtaaacgatattgcgcgtctacatcgtagccgcccgcagctgtcgcgcagcgaaagcctggggggattgaaggtgacgctgcgtctgttgaccgtggtttaa

SEQ ID NO: 89848 - DNA, 426 bp, Enterobacter aerogenes
atgcgtcaaaggacgattgtttgcccgctaatccaaaatgatggccattacctgttgtgcaagatggctgccgaccgcggggtttttcccggacagtgggcgctgtccggcggcggcgtggagccgggggaaactattgaagaggcgctgcgacgtgaagtccgcgaggagcttggcgaaaaattacagttgacccgcatcacgccatggagcttccgcgatgatacccgcgtgaaaacctatgccgatggtcgccaggaagagatctacatgatctatttgattttcgattgcataagcgccaaccgcgaggtcacgatcaacgaggaattcgacgattacgcctgggtgaagggcgaagacctgcaacattacgatcttaatgccgcgacccgcctcaccctcagccagaaagggctgctttaa

SEQ ID NO: 89849 - DNA, 543 bp, Enterobacter aerogenes
atgaaaaagagcatttttatggccctggccggggtaatgatggtttcctcggcggcccatgctattagcgttaccggcgaagccggcgagcactataccaacctcggcgttggcttcggaaccgaatccaccggcctggctatttccggcaactggttgcatagcgataacgacggcgacgccgcgggcttaggtctgggtctgaatattccgctgggaccattcctggcgaccgtgggcggcaaaggcatttacactaatccgaagcagggcgatgaaggttacgcggcagcggtcggcggcggcctgcagtggaaaatcggcgatagcttccgtctgtacggcgactattactactcgcctgattcactctccagcggcatcgatagctatgaagaagcgaacgtcggcgccagctggaccatcatgcgtccgcttagcatccaggcaggttatcgctacctgaacctggcgggcaaagacggcaaccgtgataacaccatcgccgacggtccgtacatcggcgccagcgccagcttctaa

SEQ ID NO: 89850 - DNA, 1200 bp, Enterobacter aerogenes
atgctacaagtggaaatgctgtccaccggcgatgaagtgctgcatgggcagattgtcgataccaatgccgcctggctggcggattacttttttaatcagggtttaccgttaacgcgccgcaataccgtcggcgatgacctcgacgcgctggtggctattttgcgcgaacgcagcgaacaggcggatgtgctgatcgtgaatggcggcctggggccgaccagcgacgatcttagcgcgctggcggcggcgacggcgaaaggcgaagggttggtcctcaacgctgaatggctggagacgatgacgcgattctttgccgagcgcggtcggccaatggcggaaagcaatcgcaagcaggcggaaatccccgccagcgccgaaatgatcaataatccggtagggaccgcctgcgggttcgccgtacagctcaaccgctgcctgatgtttttcacccccggcgtgccgtctgaatttaaagttatggtcgagcaggagatcgtaccgcgtttacgtgcgcgcttcacgcttccgtcgtcgcctgtctgtctgcgtttaactacttttggacgttcagaaagcgagctggcgcagagccttaatcacctgcagctcccccctggtgtggtgatgggctatcgctcgtcaatgccgattatcgagctaaaactaaccggtcctgccgaacagcgcgatgcaatgctggcgctgtggccagaagtgcgtaaggtagccggagagagccttatctttgagggcacggaagggttaccggcgcagatcgcgcgctgcctgcaggagcgtcagcttagcctgaccttgagcgaacagtttaccagtggcctgctggcgctgcagctgaggcgggcgaacgcgccgcttctcgccagcgaagtggtgccggcgcaggaggagaccttagcgcaatcggcgcgctgggccgccgagcggcgcgttaaccattttgccgggctggcgttgtcagtcagcggtcaggaggccgattacctgaactttgtgctggcgacaccggaaggtacgcacgcgctgcgggtcaagttcagcgtgaatcgccacgggctgtcggtgcggcaagaagtctgcgccatgatggcgctgaatatgctgcgccgctggctcgacggtaagccggtcagcggcgagcatggttggatcaacgtcgtcgagacgctgtttatcgactga

SEQ ID NO: 89851 - DNA, 1188 bp, Enterobacter aerogenes
atgaacgatacccgctttgaaagctgcataaaatgcacggtttgtaccaccgcctgcccggtgagccgggtaaatccgcgctatcccggcccgaaacaggcggggccggacggcgaacgtctgcgtctgaaagatggcgcgctgtacgacgatgcgctgaaatattgtattaattgcaaacgctgcgaggtggcctgtccgtctgatgtgaaaatcggcgatatcattcaacgtgcgcgtgcgcagtacagccagcaaacaccaaccctgcgcgatgccatcctcagccataccgatctgatgggcaccctttccacgccttttgcgccgctggtcaacgccacaacggggttaaaaccggtgcgccgcctgctcgacgcggcgctcaaaatcgaccatcgccgcacgctgccgaaatatggcttcggcacctttcgccgcgcttaccgccagctcgccgccgcacaggcgcagtacagcgagcaggtggctttcttccatggctgctacgtcaactataaccacccgcaattgggtaaggatctgattcgcgtcgtcaacgcgctgggtaccggcgtgcagctcttatcaaaagaaaaatgctgcggcgtcccgcttatcgccaacggcttttttgacaaagcgcgcaagcaagcgcacagcaacgtcgccgccatgcgcgaaaacagcttgccgatcatcgccacctcttcaacctgtacttttaccctgcgcgatgaatatccccatctcctggatatcgataacagcgatctgcgggatcgggtggagttagcgacccgctggatttggaaacagctcgatgccggcaaaacccttccattgcgcccgctgccgctgaaggtggtctatcacaccccatgtcatatggaaaaaatgggctggtcgctatacacccttgagcttctgcgccaaatcccgggcctacagctggaagtactggattcgcagtgctgcggtatcgccggcaccttcggttttaagtcggaaaactattcgtcggcgcaggcgattggcgcgccattatttcgccagattgaggagagcggcgcggacgtagtgattaccgattgcgaaacctgcaaatggcagattgagatgtccaccagcaagcgctgcgaacatcccattactctgctggcgcaggcgctgagcgcgcctgcctga

SEQ ID NO: 89852 - DNA, 1260 bp, Enterobacter aerogenes
atgaaatttgattgcgccatcgtcggcggcggactggccgggctgttgtgcgggctggcgctgaatcaacacggcctacgctgcgtgataatcagccgtgggcaaagcgcgctgcacttttcctccgcttcattagacctgctctcggcgctgccgaacggcgataccgtcactgatgtcgcacaaggtcttcagcaactggccgttcagcttcctgaacacccctactcccgcctcggcgccgacgcggtgctcgaatacgccagacagaccgaagcgctgctggctgcctgcggcgcgaatatgcaaggcgaagcgcgccgaccgcacctgcgggtaacgccgctggggacgttgcgaccggcgtggctgtcaccggaagaggttccgctggcgcccatcgcgcagcaacgcgtatgcatggtggggattagcggttttgccgattttcagccgcatctggccgccgccgccctcggacagagcggagtggatgccgccgcggcggagattgatttaccgctgcttgatgtgctgcgcgataaccctacggagttccgtgccgccaacatcgcccgggtgcttgatgatgaaaacctgtggcctgccctgcagtccgcgctgctgccgctggcgcaagagtacgagctgctgatgatgcccgcctgttttgggctcgcggataatcgcctctggcattggctacaagaacatctgccctgcccgctgcgcctgctgccgacgctgccgccttcggtgccggggatgcgcctgcatagccagcttcagcgccagttcatccgcaccggcggcacctggcttgccggcgacgaggtggtgaaaatcagccatcagcagggcaccgtcgaggccgtctggacgcgaaatcacggcgatatcgcactgcgtccgcgctttaccgtgttggcgagcggtagctttttcagtaacggtctcgtcgccacccgtgatagcgtgcgcgaaccgattctcggcctcgatctgcagcaaacgctggcgcgcgatagctggtatcagcgtgatttcttcgcatcacaaccgtggcagcgctttggtttgaaaactgaccccatgctgcgcccacacctgctcggccagccgctaacgaatcttttcgctatcggctcgctgctcggcggtttcgatgccattcaactcggctgcggcggcggcgtttgcgccgtcaccgcgctgcatgccgccagacagatccacgcccttgcaggaggccggtcatga

SEQ ID NO: 89853 - DNA, 1623 bp, Enterobacter aerogenes
atggccgagacgcaagaatttgatgcgctgattattggcggcggcgccacaggcgcgggaatcgcccgcgactgcgccctgcgcgggttacgtgtggcgttgattgagcggcacgatatcgccaccggcgccaccggccgcaaccatggtctgttgcacagcggcgcgcgctatgccgtcaccgatagcgaatccgcgcgcgaatgtatcagcgagaatcgcattttacgtcgcatcgcccgccactgcattgaacccaccaacgggctgtttatcaccctgcctgaagatgacatggcctggcagcaaacctttatccacgcctgtcagcaggccggtattgatgctaaaccgcttacccccgctgaagcattgcgtctggaacccgcggtcaaccctacgctgcttggcgccgtacaagtaccggacggcaccgtcgatccgttccgcctgacggcagccaatatgctcgacgcccgcgaacacggtgcgcagatccttaccggctgcgaggtcaccggcctgctgctccagggcgatcgcgtgtacggagtacagatctacgatcatcaacggcgcgaagcgcgtagcattcgcgcacaggtcgtcgtcaacgccgccgggatctggggccaacgcatcgcggagtacgccgatctgcgcatctccatgttcccggcaaaaggctcgctgctgatcctcgatcaccgcattaataaccaggtgattaaccgctgccgcaagccggcggatgccgatattctggtgcccggcgataccatttcgttgattggcaccacctcgacgcatattccttatgacgaaattgacgataaccgggtgacgacggaagaggtcgatacgctgctgcgcgaaggtgaaaaactggcgccgatcatggggcgtacccgggtgctacgcgcctactccggcgtccgtccgctggtcgccagcgatgacgatcccagcgggcgcagcgtcagccgcggtattgtgctgctcgaccacgccccgcgcgacggtatggaaggctttatcaccatcaccggcggtaagttgatgacctaccgtttgatggcggaatgggccagcgacgccgtctgccgcaaactcggcaatgctgagccatgccgcaccgcggagcgcccgctaccgggttcgcaggaagccacagaaaccacgctgaaaaagattatctcgctaccgacgccgctgcgcgggtcggcggtgtatcgccacggcgaccgcaccccggcatggcttggcgacagccgccagcaccgtagcctggtctgcgaatgtgaagcggtcacagccggagaagtgcagtacgcggtagagaatctggcggtgaagaatttgctcgacctgcgccgccgtacccgggtcggtatgggcacctgccagggtgaactgtgcgcctgccgcgccgccgggctgctacagcgctttaacgtcgccaccccggcgcagtcgttaactcagctgtcggaatttctcaatgagcgctggaagggcgttcagcccatcgcctggggcgacgcgctgcgcgaaagtgaatttacccgctgggtctacctcggcttatgcggactgcaaaaggagcatcaggatgaaatttga

SEQ ID NO: 89854 - DNA, 1347 bp, Enterobacter aerogenes
atgttaagtatttttaaacccgcagcgcataaagcgcgtttgccggcggcggaaatcgacccgttgtatcgtcgattacgttggcagatctttattggcatcttcttcggttatgccgcttactatctggttcgtaagaactttgcgctggcgatgccttatctgattgagcagggcttctctcgtggcgacctcggtttcgcgctttccggtatctctatcgcctacggattttcgaaatttatcatgggctcggtctccgaccgctcgaatccgcgcattttcctgccggcagggttaattctggcggcgctggtgatgctggtgatgggcttcgtgccgtgggcgacttccagcatcatgatcatgttcgtattactgttcctgtgcggatggttccaggggatgggctggccgccgtgtggtcgtaccatggtgcactggtggtcgcagaaagaacgcggcgggattgtctcagtgtggaactgcgcgcataacgtcggcggcggtattccgccgctgctgttcctgttagggatggcgtggtttaacgactggcacgcggcgctgtatatgccggccttcggcgcgatcctgctggcgatttttgccttcgcgatgatgcgcgataccccgcagtcctgcggtctgccgccgatcgaagagtataaaaacgactatccggatgactatagcgaaaagcacgaagaagagctgacggcgaagcagatctttatgcagtacattctgccgaacaagctgctgtggtacatcgcgatcgctaacgtcttcgtttatctgctgcgctacggcattctggactggtcgccgacctacctgaaagaggtcaaacacttcgcgctggataaatcttcctgggcctacttcctgtatgagtacgcggggatccccggtactttgctgtgcggctggatgtcggacaaagtgtttaaaggcaaccgcggcgcgaccggcgtgttctttatgaccctggtgacgattgccactatcgtttactggctgaacccgccgggtaatccgggcgtcgatatggcctgtatgatcgtcattggcttcctgatttacggcccggtgatgctgatcggtctgcatgcgctggaactggcgccgaaaaaagccgccggcaccgccgcgggcttcaccggtctgttcggttatcttggcggttccgtagccgcgagcgccattgttggctataccgtcgatttcttcggctgggatggcggcttcatggtgatgattggcggtagcgtactggcggtactgctgttgattatcgtcatgcttggcgagcgtcgccatcatcaacaactgaaacaagcctaa

SEQ ID NO: 89855 - DNA, 1068 bp, Enterobacter aerogenes
atgaaaatgaaactcaccgcgttaatgagcggaatgattttggccagttcggcgctgtgcttcagcgccgtcgcggcagagaaaattgtcatcgcccaccgcggcgccagcgggtatctgccggaacataccctgccggcgaaagcgatggcttacgctcagggggcggattaccttgagcaagacctggtgatgaccaaagacgaccggctggtggtgttgcatgaccactatctcgatcgggtgactgacgttgcgcagcgtttcccgcagcgggcgcgtaaagacggccgtttttacgccatcgactttaccctggccgagattaagtcgctgaagttcaccgaaggttttgagccgaaagatggcaaaaacgtgcaaacctatcctgggcgtttcccgatgggcaaatccgatttccgcattcatacctttgaagaagagattgagtttgtacaggggctaaaccattcgacgggtaaaaatatcggtatctacccggaaatcaaagcgccgtggttccaccatcaggaaggcaaagatattgccgccagcacgctgaaagtgctgaaggaatatggctacaccagcaagcaggataaggtttatctgcaatgttttgacgccaacgagctcaaacgcattaaggatgagctggagccgaagatggggatggatctcaatctggtgcagctcatcgcctataccgactggaatgaaacgcagcagaaacaggccgatggtaaatgggtgaactacagctatgactggatgttcaagccgggggcgatggcgcagattgcgcagtacgccgacggtatcggcccggattaccatatgctggtagcggaaggctcgaagccgggcgcggtgaagctgacggcgatggtaaaagaggcgcacgccagccatctgcaggtgcatccgtacaccgtgcgcgcggatcagttgccggagtacgccactaacgttaatcagctctatgacgtgctgtataaccaggcgggtgtcgacggcttgtttaccgatttcccggataaagcggtgcagttcctggacgcgaaataa

SEQ ID NO: 89856 - DNA, 255 bp, Enterobacter aerogenes
atgaagcggattttcttgaggatttctgacactcgccttgagtgtcaggatgaacatccttccctgttggccgcgcttgaatcgcataacatcgacgtggagtatcagtgccgcgaaggctattgcggttcctgccgcacgcgtctggtgtcaggccaggttgactggctgaccgaaccgctggcgtttatccagccgggagagattttgccctgctgctgccgggcgaaaggcgatattgagatcgagatgtaa

SEQ ID NO: 89857 - DNA, 1131 bp, Enterobacter aerogenes
atggcatacaccactttttcacagacgaaaaacaatcaactgcttgagccgatgttttttggccagccggttaacgtggcccgctacgatcagcaaaaatatgacatctttgaaaagctgattgaaaagcagctctccttcttctggcgcccggaagaagtcgacgtttcgcgcgatcgcatcgactatcaggcgctgccggaacatgaaaagcatatattcatcagcaacctgaaatatcagacgctgcttgattccattcagggccgtagcccgaacgtcgcgctgctgccgctgatttccatccccgaactggaaacctgggtagaaacctgggccttttccgagacgatccactcgcgctcctacacccacattattcgcaacatcgtcaacgacccggcgacggtgttcgacgatatcgtgaccaatgagcagatccagaaacgcgcggaaggcatctctcactattacgattctttgattgaaatgaccagctactggcatctgctgggcgaaggcacccacaccgtcaacggcaaaaccgtgaccgtgaatctgcgcgagctgaaaaagaaactgtatctctgcctgatgagcgtcaacgcgctggaagcaatccgcttctacgttagcttcgcctgctctttcgcctttgccgaacgcaagctgatggaaggcaacgccaaaattattcgcctgatcgcccgcgatgaagcgctgcacctgaccggcactcagcatatgctgaacctgctgcgctccggcagcgacgatccggaaatggcggaaatcgccgaagagtgcaaacaagagtgctatgacctgttcgtgctggcggcgcagcaggaaaaagagtgggcggactatctgttccgcgacggctcgatgatcggcctgaacaaagatattctctgccagtacgtcgagtacatcaccaatattcgcatgcaggcggtgggcctcgatctaccgttccagacccgctccaacccgatcccgtggatcaatacctggctggtttccgacaacgttcaggtcgcgccgcaggaagtggaggtcagctcttatctcgtcggccagatcgattctgaagtcgatgccgacgatctgagcaacttccagctgtaa

SEQ ID NO: 89858 - DNA, 2286 bp, Enterobacter aerogenes
atgaatcagagtctgctggtgacaaagcgcgacggtagcaccgagcgtatcaatctcgacaaaatccatcgcgtactagattgggcggcagaaggactgaataacgtttcgatttcccaggtagagctgcgttcgcatattcagttctatgacggcattaaaaccgccgacatccacgagaccattattaaggccgcagcggacctgatctcccgcgatgcgccggactaccagtacctggccgcgcgactggcgattttccacctgcgcaagaaagcgtttggccagtttgaaccgccggcgctgtacacccatgtggtgaacatggtcgaaaaaggtaaatacgatcatcatctgctggaagactacacggaagaagagttccagcagatggacggttttatcgaccactggcgcgatatgaacttctcctacgcggccgttaagcagctggaaggtaaatacctggtgcagaaccgcgtcagcggcgaaatctatgaaagcgcccagttcctctatattctggttgcggcttgcctgttctctaactatccgcgtgagacccgtctggactacatcaagcgtttctatgacgcggtgtccacctttaaaatttcgctgccgacgccgatcatgtctggcgtgcgtaccccaactcgtcagttcagctcctgcgtgctgatcgagtgcggcgatagcctggattcgatcaacgccacctccagcgcgattgtgaaatacgtttcccagcgcgccggtatcggtatcaacgccggccgcattcgtgcgctgggtagcccgatccgcggcggcgaagccttccacaccggctgcatcccgttctataagcacttccagaccgcggtgaaatcctgttcgcagggcggcgttcgcggtggcgcggccaccctcttctatccgatgtggcatctggaagtcgaaagcctgctggtgttgaaaaacaaccgcggcaccgacgccaaccgcgttcgccacatggactacggcgtgcagatcaacaagctgatgtacacccgcctgctgaaaggcgaggacatcaccctgttcagcccgtccgacgttcctggcctgtacgatgcgttcttcgccgatcaggacgagttcgaacgtctgtacactaaatacgaaaaagatgacagtatccgcaaacagcgtattaaagccgttgagctgttctcgctgatgatgcaggaacgcgcctctaccggccgtatctatatccagaacgttgaccactgcaacacccacagcccgttcgacccggttgtcgcgccggtgcgccagtctaacctgtgcctggaaatcgccctgccgaccaaaccgctggacgatgtgaacgacgaaaatggcgaaatcgcgctgtgcacgctgtcggcattcaaccttggcgccatcgatagcctcgatgagctggaggatctggcggtactggcggtgcgcgcgctggatgcgttgctggattatcaggattacccaatcccggcggctaaacgtggcgcgatgggtcgtcgtacgctgggtatcggcgttatcaacttcgcttactatctggcgaaacatggcaagcgctactccgacggcagcgccaacaatctgacgcacaaaacgttcgaagctattcagtactatctgctgaaggcctccaacgaactggctatcgaacaaggcgcctgcccgtggttcaatgaaaccacctacgcgcagggtattctgccgatcgatacttataagaaagacctggatgcgatcgtgagcgaatctctgcatttcgactgggagcagctgcgcgaatccattaagactcacggcctgcgtaactccacgctctccgcgctgatgccgtctgagacctcttcgcagatctccaacgccaccaacggcatcgaaccgccgcgcggccacgtgagcatcaaagcgtcgaaagatgggattttgcgccaggtcgttccggattacgaaaatctgcagaacgcctacgaactgttgtgggaaatgccgaataacgacggctatctgcagctggtcggcatcatgcagaagtttatcgatcagtcgatttccgccaacaccaactatgacccgacgcgtttcccgtccggaaaagtgccgatgcagcagttgctgaaagatctgctcaacgcctataaattcggcgtgaaaacgctgtactatcacaacacccgtgatggcgcggaagacgcccaggatgacctggccccgtcaattcaggacgacggctgcgaaagcggcgcatgtaagatctaa

SEQ ID NO: 89859 - DNA, 729 bp, Enterobacter aerogenes
atgaatgccgaaaaaccgtcggtggcccccaacgttgatcacaatgaaatcgccaaatttgaagccgtcgcctcgcgctggtgggatctagaaggcgagttcaaaccgctgcatcgcatcaacccgttgcgccttggctatattgccgaacgctccggcggcctgttcggcaaaaaagtgctcgatgtcggctgcggcggcggcatcctcgccgaaagcatggcgcgcgaaggtgcgacggtcactggtctggatatgggctttgagccgctgcaggtcgcaaaattgcacgcgctggagagcggcgttcaggtagagtacgtgcaggagaccgtcgaagagcatgcggcgaagcacgcccagcagtacgacgtcgtcacctgtatggagatgctcgagcacgtccctgacccacagtcggtagtgcacgcctgcgcgcggctagtgaagcccggcggccaggtcttcttctcgaccattaaccgcaacggcaaagcgtggctgatggccgtggtcggcgcggaatacgtgatgaaaatggtgccaaaaggtacgcatgacgttaagaaatttatcaagccggcggagctcatcggctggatcgatcagactcctctgaaagagcagcacattaccggcctgcattacaatccgctcaccaataccttcaagctggcgccgggcgttgatgttaactatatgttgcatacaacggcgaaaaaagcataa

SEQ ID NO: 89860 - DNA, 2634 bp, Enterobacter aerogenes
atgagcgaccttgcgagagaaattacaccggtcaacattgaggaagagctgaaaagctcgtatctggattatgcgatgtcggtcattgttggccgtgcgctgccggatgtccgagatggcctgaagccggtacaccgtcgcgtactatacgccatgaacgtattgggcaatgactggaacaaagcctataaaaaatcagcccgtgtcgttggcgacgtaatcggtaaataccacccgcatggtgataccgccgtttatgacaccatcgtacgtatggcgcagccgttctccttgcgttatatgctggtcgatggccagggtaactttggttctgtcgatggcgactccgccgcagcgatgcgttatacggaaatccgtatgtcgaagatcgctcatgagctgatggccgatctcgaaaaagagacggttgatttcgtcgacaactatgacggcacggagaaaatccctgacgtcatgccgacaaaaatccctaacctgctggtgaacggttcttccggtatcgccgtaggtatggcgaccaacattccgccgcataacctgacggaagtcatcaacggctgcctggcatacgttgacaacgaagacatcagcattgaagggctgatggaacacattccgggcccggacttcccgaccgccgctatcattaacggccgtcgcggtattgaagaggcctatcgtaccggtcgcggtaaagtttacattcgcgcgcgcgcggaagtcgaagctgacgcgaaaaccggccgtgaaaccatcatcgtgcacgaaattccgtatcaggtgaacaaagcgcgcctgattgagaaaatcgccgagctggtgaaagaaaaacgcgttgaaggcatcagcgcgctgcgcgacgaatctgacaaagacggtatgcgtatcgttatcgaagtgaaacgcgacgcggtgggtgaagtggttcttaacaacctctactcccagacccaactgcaggtttccttcggtatcaacatggttgcgctgcaccacggtcagccgaagatcatgaacctgaaggacatcattgcggcgtttgttcgtcaccgccgcgaagttgtcactcgtcgtactattttcgaactgcgcaaggcgcgcgaccgtgcgcatatccttgaagcgctggcgattgcgctggctaacatcgatccgatcattgaactgattcgccgcgcgccgacgccggcggaagcaaaggcgggtttaatcgcgcgttcatgggagctgggcaatgtctccgcgatgctggagcgcgccggcgataacgccgcgcgtccggaatggctggagccagagtttggcgtgcgtgatggccagtactatctgaccgaacagcaggctcaggcgattctggatctgcgtctgcagaaactgaccggtctggagcatgaaaaactgctcgacgagtacaaagagctgctggatcagatcgccgagctgctgcacatcctgggcagcgccgatcgtctgatggaagttattcgcgaagagctggagctggttaaagaacagtttggcgatgcacgtcgtaccgaaatcaccgccaacagcgctgatatcaatatcgaagacctgattaaccaggaagatgttgtcgtgaccctgtcgcaccagggctatgtgaaatatcaaccgttaaccgactacgaagcgcagcgtcgtggcggtaaaggtaaatcggcagcgcgtattaaagaagaagactttatcgaccgtctgctggtggccaacacccatgacacgatcctctgcttctccagccgtggtcgcctgtactggatgaaagtgtatcagttgccggaagccagccgcggcgcgcgtggtcgaccaatcgtcaacctgctgccgctggaagctgacgagcgtatcaccgctatcctgccggttcgcgagtacgaagagggcgttaacgtctttatggcgaccgccagcggtaccgtgaagaaaacggcattgaccgagttcagccgtccacgttctgccggtatcatcgccgtcaatctgaacgaaggcgacgaactgatcggcgtcgatctgacttctggccaggacgaagtgatgctgttctccgccgctggtaaagtggtgcgctttaaagaagacgccgttcgcgcgatgggccgtaccgcaaccggcgtacgcggtatcaagctggcgggcgaagatagcgtcgtgtcgctgattattcctcgtggcgaaggggcgatcctgaccgtgacgcaaaacggttacggcaagcgtaccgcggccgaagagtatccgaccaagtcgcgtgcgacgcagggcgttatctctattaaggtcaccgaacgtaacggttccgtggtcggcgccgtgcaggtcgatgattgcgaccagatcatgatgattaccgatgcgggcaccctggtgcgtactcgcgtttctgaagtgagcatcgtgggtcgtaatactcagggcgtgattctgatccgtaccgcggaagatgaaaacgttgtcggcctgcagcgcgtggctgaaccggttgacgacgaagaactggatgccatcgatggcagcgtagcggaaggcgatgatgatatcgcgccggaaaacgacgctgacgacgacatcgccgaagacgaagagtaa

SEQ ID NO: 89861 - DNA, 2853 bp, Enterobacter aerogenes
ttgaaatatcttgcctcgtttcatacgaccttaaaggtttctcgttatctgttcagagcgctggcggttctgctatggatgctgattgcttttgtttccgtgttttatatcgttaatgcgctgcatgaacgggaatcggaaattcgtcaggaactgaatcttaacgccgaccaggcccagcgctacatccagcgtaccgcggatgtcatcaaagagctgaagtacgtcgcaggcaatcgcgcggcgaccgggagcgagggtagtgcggcgctggccaatagtggcaatatcacaatccctaattttgaaccgctgtatccggattccgactgcggcgcaatgagcggcgcctggcgcaactcactgcaatcgctggcgtggttcatgcgctactggcgcgataatttctctgccgcctacgacctgaaccgtatttttttaattggcagagacaacctctgcatggctaacttcggcctgcgcgatatgccgctggagcgcgatcaggcgctgaaggtgctgcatcagcgtatcgaacaatatcgcgatgcgccgcaaaacgagcgcggcaataacctgttctggattagccagggcgtgcgtccgggcgttggttatttctacgccctgacgcctatttatatggctaaccgtctgcaggcgatgctcggcgttgagcagactatccgcatggagagcttctttacgccaggtagcctgccgatgagcgtgacgatcctcgacgataacggtcagcagctcatttcccttgccgggccggataacagcattaaaccggaaacccgctggatgcaggagcggatgtggtttggctacagctctggtttccgcgagctggtgctgaaaaagagcctgctgccatcatcgctgagcattgtctattcggtttccgtcgatcaggtgctggagcgtatcaggatgttgatcctcaacgctatcgtgctgaatatcctgaccggcgcgatcctgttcgcgctggcgcgtatgtatgaacggcggatctttataccggcggaaaacgacgctcagcggctggaggaacatgagcagttcaaccgtaagatcgtcgcctccgcgccggtcggaatctgcattctacgcacgcaggacggcaccaatatactgagtaacgaactggcgcataactatctgaatatgctgacgcacgaagaccgccagcggctcacgcagattatttgcggccagcaggtcaacttcgtcgacgtgttaaccagcaacaacaccaacctgcagattagttttgtacactcgcgatatcgtaatgaaaacgtcgcgatttgcgtgctggttgacgtttccgcccgtgtgaaaatggaagagtcgctgcaggagatggcccaggcggcagagcaggccagccagtcgaaatcgatgttcctcgccaccgtcagccacgagctgcgtacgccgctgtacggcattattggcaacctcgacctgctgcagaccaaagcgttgccgaagggagtcgatcgcctggtgacggcgatgaataactcctccagcctgcttttgaagattatcagcgatattctcgacttctcgaaaattgagtctgagcagctcaaaatcgagccgcgagagttttcgccgcgcgaggtcatgaatcatatttcggcgaactatctaccgctggtggtgcgcaagcagcttgggctgtactgcttcattgagccggatgtcccgcagacgatgattggcgacccgatgcgcctgcagcaggtcatttccaacctgctgagtaacgccattaaatttaccgataccggctgtatcgtgctgcatgtacggcgcgccggcgactatctgcaaataagcgtacgtgataccggcgaagggatcccggcgaaagaggttgtgcgcctgttcgacccgttcttccaggttggtaccggggtgcagcgtaatttccagggcaccggcctgggactggctatctgtgaaaaactcatcagcatgatggatggcgacattgacgtggaaactgaacccggcatggggagccgtttcaccattcgcattccgttgtacggcatgcagcagatgccgccgctgttggccgaacagcacagcaacagcacctgttggctggcgattcataatacgtcactggcgctgtttatcgaatcgttgctgcaatatcatggcctgacggtacggcaatttgctggccagacgccagccgctgacgatattttattaaccgatgatgaactcagcgagcgttggccgggaagcgctgcggtgatcttctgccgtcggcatatcggtatccccgttgagcgcgcgccgggagagtggttgcatagcgtcaccacgccgcatgaacttctgccgttgctgggacgactgctgcatctggcgctggcggtagaagagaatggtccggcgctgtcggcccacgacgcgccaacggtcagcaatgacgacatgatgattctggtggtcgacgatcacccgattaaccgccgcctgttggccgatcagcttggctcactgggttatcaatgcgtgacggccaatgatggcgtcgatgcgcttaacgtcctgagtaaacaacatattgatattgttctcagcgacgtgaacatgccaaacatggatggttaccgtctgacgcagcggatccgtcaactggagatgacgctaccggttattggcgtgacggcaaacgcgctggcggaagaaaaacaacgctgtctggagtcgggaatggatagctgtctgtcaaaaccagtgacgctggatatcctcaagcacacgctggccacctatgccgcgcaggtgcgtaaagccagaaaaacaagctga

SEQ ID NO: 89862 - DNA, 651 bp, Enterobacter aerogenes
atgaacaatatgaacgtaattattgccgatgaccatccgatcgtactgttcggcattcgcaaatcacttgagcagatcgagtgggtgaatgttgttggcgaatttgaagattccacagccctgattaacaaccttcctaagcttgacgcgcacgttctgattaccgacttgtcgatgcctggcgacaaatatggcgatgggatcaccctgatcaaatacatcaaacgccatttcccggagctgtcgatcattgtcctgacgatgaacaacaatccggcgatcctgagcgcagtactggatctcgacattgaggggatcgtgctgaaacagggcgcgccgaccgatctgccgaaagcgctggccgcgctgcagaaaggcaaaaagtttaccccggaaagcgtctcccgcctgctggagaaaatcagcgccggcggctatggcgacaaacgcctgtcgccgaaagagagtgaagttctgcgtttgttcgctgaaggcttcctggtcaccgaaatcgctaaaaagctgaaccgcagcatcaagaccatcagtagccagaagaaatcggccatgatgaagctgggcgttgaaaatgatatcgcgctgctgaactacctctcttccgtttctctgacctcaacggataaagagtaa

SEQ ID NO: 89863 - DNA, 2661 bp, Enterobacter aerogenes
atgacccaaaaaaaattctccctgatccccggtagcatcacccggttcttcatcttgatggttatcgtcttgctcgcgacgatgggcgtgatgatccaaagttcggttaatacgtggctaaaagaccggagttaccaggtggttgatatcagccacgctttacacaaacgcatcgatacctggcgttatgccacctggcagatttacgacaacattgccgccaccagctcaagtacctcaagcgatggtctgcaggagacgcgcctgaagcaggatgtctactatctggaaaagccgcgacgtaagaccgaagcgctgatcttcggctctcatgacagctcgacgcttgagatgacgcagaaaatttccaactacctcgatattttatggggcgcggaaaccattccctggtcgatgtattacctgaatgggttggataacagcctgattctggtctccaccctgccgctgaaagatctgtcttcgagttttaaagaatcgacgattagcagcgtggtggaatcccgccgcgccgaaatgctcctgcaggcaaacacgctggacgaacgggaaaccttctcttcactgcgtcacctgacgtggcaaaatggccattacttcacgctgcgtaccacttttaaccagccgggtcacctggcaacggttgtcgccttcgatttaccgattaacgacctcatccccccgagcatgtcgctggacagcttccgtctcgagccagatccggcgcaaaatggtgctagcagcgcagacaaagaagccgttgataacgttagcgtcagctttaatggcctgcgtattgagataaccaccgccatcaataccaccggcatgcggctggtgtgggtcgttccgttcagcactttgctaatggaatccttacagaatattttactgccgctgctgctcaccattggcctgctggcgttaaccctgtttggctttaccactttccgcaactatagcggccgccgtacccccggcagcgtaagcacggcccccaccgcggccaacagcgagctgcgcgctcagcgcgcaattaatgaagagatcgtctctttgctaccgttgggcctgttggtgcacgatcaggaagccaaccgcaccattattagtaacccgattgccgatcatctgctgccgcacctcaacctgcagaacatcaccaatatggccgatcagcatcaaggggtgattcaggcgacgatcaataatgaactttatgaaatccgccagtaccgcagccaggtggctcctcgcacgcagatcctgattattcgcgaccaggatagagaagtgatggtgaataaaaaactcaaacaggcccagcgtctgtatgagaaaaatcagcaggggcgcatcgcctttatgcagaatattggcgccgcgctgaaagaaccggcgctggcgctggcgcaggaggcggcgaccgtcgggattcatgaaagccgcaaactggcgcagcacgctgatgaactggttcatcttgtcgatgagattcagttggcgaacttactggaaagcgatacctggaaaaccacccccggtttgttctccattcagggcttaatagatgaagtggttcctgaagtcctgccgatggtgaaacgcaaaggacttcagctgttaatcaataatgcgctgccggccaatgagcagcgctacggcgaccgcgacgcgctgcgccgaacgctattacttctgattcaatacgcgatcaccaccacccccatcggtaaaattactcttgaggtgagcaaagatgaatctgccgacgatcgtctgaccttccgtatcctcgataccggcaatggcgtgagcggcaatgaaatcgataatatgcacttcccgttccttaatgagacgcaagccgaccagtacggcaaagccaacgccctcaccttctggctgtgcgaccggttaactcgcaagcttggcggacagcttaatattaaggcgcgggaatcgctcggcacccgctactcactacaccttaaaatggcggcgagcgaggaagagagcgactccggcgaacatctgctggacgatgtggtcgtgatgattgacatcaccgccaatgaagtgcgccgcatcgtgacgcgtcagttagagagctggggcgcaagctgtatcaccccggacgaaaggctcacaagtcaagagtatgatctctttttaacggataatccgtctaatcttactgcttcaggcttgcttttaagcgatgatgaggttgggatacgcaaaattggcccaggtcagttgagcgtcaattttaatatcagcactgcaatgcaggaagctatcctgcagctgattgagcagcagctggcgcaagaagaggttcagccctcctcaacaggaaatgaggggaatgcggaactccatgccagcggctattacgcgctgtttgccgacacggtaccggatgatgttcagagattgtatactgaattcaccaccagcgatttcgctgcgctggcgcagaccgctcaccgccttaaaggcgcgtttgctatgcttaatttgatacccggcaagcagttatgtgaagcgcttgagcatctgattcatgaacgagatactcaaggtatagaaaaatacatcagcgacattgacggttacgtcaagagcttgctgtag

SEQ ID NO: 89864 - DNA, 1131 bp, Enterobacter aerogenes
atgaaagttaaagtactgtccctcctggtaccagcactgctggtagcgggcgcagcaaatgcggctgaaatttataacaaagacggcaacaaattagacctgtacggtaaaatcgacggtctgcactacttctcttccgacgacagcgtcgacggcgaccagacctacatgcgtgtcggcgtgaaaggcgaaacccagatcaacgaccagctgaccggttacggccagtgggaatacaacgttcaggcgaacaacactgaaagctccagcgaccaggcgtggactcgtctggccttcgcgggtctgaaattcggcgatgcgggctctttcgactacggtcgtaactacggcgttgtttacgacgtaacttcctggaccgacgttctgccggaattcggcggcgacacctacggttccgacaacttcctgcagtcccgtgctaacggcgttgccacctaccgtaactctgacttcttcggtctggttgacggcctgaactttgctctgcagtaccagggtaaaaacggcagcgtgagcggcgaagatcagaccaacaacggtcgcggcttccagaaacagaacggcgaaggcttcggcacttccgtgacttatgatatctgggacggcatcagcgctggtttcgcgtactccagctctaaacgtaccgatgagcagaacagcgttaacactcgttatctggactccaacggtgtttcccgtcgcgtactgggtgaaggcgatcacgctgaaacctataccggtggtctgaaatatgacgccaacaacatctacctggcgactcagtacacccagacctacaacgcaacccgcaccggtaacatcggttttgctaacaaagcgcagaacttcgaagtggttgctcagtaccagttcgacttcggtctgcgtccgtccgtggcttacctgcagtctaaaggtaaagacatgggccgttacggcgaccaggacatcctgaaatatgttgacctgggtgcgacctactacttcaacaaaaacatgtccacctacgttgattacaaaatcaacctgctggacgacaacaagttcactaaagatgcaagcatctctactgacaacgttgtggctctgggcctggtttaccagttctaa

SEQ ID NO: 89865 - DNA, 1053 bp, Enterobacter aerogenes
atggataccacctttttccgcgccgcctttttcggcctctgcgttctgcttaccggctgtgattccgcgacatccccggccacgccaaaatccgccgccaccgtgctcgatggcaaaacgatggggacctactggcgcgttagcgtcgttgggttggatccggcgaaagccgaagatttacgccataaagttcaggcgcagctcgacggcgatgattggttgctttcgacctggaaaaacgactccgcgctgatgcgcttcaaccatgccgccaccaccgaaccgtggccagtgaacgaggcgatggcggatatcgtcactatgtcgctgcgtattggcgccaaaaccgccggagcgatggatattaccgtcgggccgctggtcaatttatggggttttggcccggataagcagccggtaaaaacgccgacggagcagcaaatcgcggcggcaaaagcgcgtaccgggctgcagcatctgacggtgattaaccgcgccgatcaacagtatctgcaaaaagatattgcggatttatttgtcgatctttccaccgtcggcgagggctatgccgccgatcatctggcgcgcctgatggagcaggaaggaattgcccgctatctggtatcggttggcggcgcgctggtcagccgcgggatgaacggcgacgataaaccgtggcgggtagcgattcaaaaaccgaccgaccgtgaaaacgccgtgcaggcgatagtcgatatcaacggccacggcatcagcacctccggcagctatcgcaactactacgagctggacggcaaacgtatttctcacgttatcgatccgcaaaccggccaccccatcaaccataagctggtatcggtgacggtgattgcgccgacggcgctggaagccgacggctgggataccgggctgatggtattagggccggaaaaagcgcaacaggtggcacacgagcaggggctggcggtctatatgatcgtcaaagagggcgatggctttaagacctggatgtcgccgcagttccgcaccttccttgtcggcgagcagaattaa

SEQ ID NO: 89866 - DNA, 1071 bp, Enterobacter aerogenes
atgaaaccgatgattgccgatatgactaacgatgaccgccgctggcaggcggtctgcgaacgcgacgccagcgccgacgggcagtttgttttcgccgtgttgaccaccggtgtctgctgccgtccctcgtgccgttcacggcgcgcgctacgggagaatgtccgcttttatgctgatgtcgaagccgcaaaggccgccggatatcgcccctgtaaacgctgtcggccggataatctcgacccggaccaacagcgggtcgagaaggtggccgccgcctgccgtctgctggagcaagaggcgccaatcacccttgaggcgctggcgcagcagctggcggtcagcccgtttcatttccatcgcatttttaaatccgtcaccggacttacgcccaaggcctggcagcaggcgtggcgcgcgcggcgcctacgcgaagcattaagccacggccagaacgtcaccagcgcggcattagccgccggcttccctgattccgccagctattatcgccaggcaaaggagacgctgggcatgaccgcccgccagtttaaacgcggcggcgcagatatattgattagctgggtttgcagcgatagcgcctctggccggtgcctggtggcgttcagcgaacgtggcgtatgcgccgtgttgctgggcgatgacgataaggcgttatatgcggagctggcgagcttgtttcccggcgcccaattacagccgggtgatgacacgtttaccgaacgcgtggcgcaggtggttgcccatctggacaacccgcagcaggcggtgaatttgccgctggatattcgtggtaccgctttccagcaacgggtctggcaagccttgcgccagatcccggcaggcgaaacccgcagctatcgcgaggtagcgcatagcatcggtcaaccgcgcgcggtcagagcggtagccggggcctgcgctgccaataaactggcgatagtcattccttgccatcgggtagtgcgtgagggcggggcgctttccggctatcgttggggaagcgaacgtaaagcgctgctgctggcgcgcgaagcaaaaatgcgggagaaataa

SEQ ID NO: 89867 - DNA, 660 bp, Enterobacter aerogenes
atgctcgatctgtttgccgatacgccgccctggcaggagccgctggcccccggggcgatgatattacgccgcttcgccgtgcagcgcgcgccggcgctgctgcaggccatcgccgcggtagccagcgcttctccgttccgccagatggtgacccctggcggttataccatgtcggtggccatgaccaactgtggccaactcggctggacaaccgatatgcacggctatctctatgcgccgggcgatccgttgaccggcgaacattggccgccgatgccattgatttttcagcaactggcggcggaggcggcgcaggaggcgggttatgcgcatttctccccggacgcctgtttgattaaccgctaccagccgggcgcgaagctgtcgctgcatcaggataaagacgagcgggatttgcgcgcgcctatcgtttcggtgtcgttgggactgccggcggtgtttcaatttggcgggttgaaacgtaacgatccgctgcgtcggctgctgctggagcatggcgatgtggtggtgtggggcggcgaatcacggctcttttatcacggcatccagccgcttaaaccgggggagcacccgctgaccggcgcctgtcgttataacctcacgtttcgcctcgcgggaggccggcaaaaacaaaaataa

SEQ ID NO: 89868 - DNA, 1644 bp, Enterobacter aerogenes
atggaattacttgttcttgtttggcgccagtaccgctggccgttcattgccgtcatggcgctcagtttgctcagcgcggcgctgggtatcgggcttatcgcctttattaacctgcgcctgatttcccttgtggatacctcgctcaccgtgctgccggagtttctcggcctgctgctgctgttgatggcggtcacgctcggctcgcagctggcgttaaccacgcttggccaccactttgtctatcgcctgcgcggcgaatttattaaacgcattctcgacacccaaatcgaaaagatcgaaaaaatcggcagcgcttcgctgctggcgggcttaactagtgacgtgcgtaacattaccatcgcctttgtgcgcctgccggaactggtgcaggggattatcctgaccttcgggtccgccgcctacctggcttttctgtcaggtaaaatgatgctggtgaccgcggtctggatggcggtcaccatctggggcggctttgtgctggtggcgcgcgtctataagcatatggcgacgctgcgtgagaccgaagataagctgtatcatgattatcagacggtgctggaagggcgcaaagagctgacgctcaaccgcgaacgcgccgaatacgtttttaatcagctgtatctgccggatgcccgcgactatcgccaccacatcatccgcgccgatacgttccacctgagcgcggtgaactggtcgaatatcatgatgcttggcgccatcggtctggtgttctggatggcgaatggcctcgggtgggccaataccgcggtggcggcgacctattctctgacgctgttattcctgcgcacgccgctgctgtcggcggtgggggcgctgccgaccttgctcagcgcccaggtggcattcaataaactgcatcagttcgcgctggcgccttatcgcgccggtttccccgagccgcaggcgcatccgcactggcagaccctggagctgcgcgacgtgtcgttccactacccggataacagttttgccgtcgggccgattaatctgacactcaaacgcggcgaactggtgtttctgattggcggcaatggcagcggcaagtcgacgctggcgatgctgctgaccgggctgtatcaaccgatctccgggcagatcctgctcgatggtcagccgctggcggcggaaaaaccagaagattaccgcaagctgttctcggcggtatttaccgatgtctggctatttgatcgtctgttagggccaaaaggcgaacgcgccgatccggcgctggtcgcgaagtggctggcgtatctgaagatggaccacaagctgcagctggaagaggggaaaatcctcgatctgaagctgtctaaagggcagaaaaaacgcgtggcgctgctgctggcgctggccgaagagcgcgatatcattttgctcgatgaatgggcagcggatcaggatccgcatttccgccgcgagttttatcaggtgttattaccgttgatgcagcaaatggggaaaaccgtgtttgctatcagccacgatgatcactatttccagcatgccgatcgcctgctggagatgcgcagcggcaagcttagcgagctcaccggcgttgagcgcgaactggcgacccgcgatgcggtcgcgcgtaccgcctga

SEQ ID NO: 89869 - DNA, 1437 bp, Enterobacter aerogenes
atgtccgttttgcataaaaaaagcgcccgattacgcgatgaagaacgcgcccgcctgatttggctattgagcactgataaagccgtcacctccgcgctgctggggaaactcaccctcgcggagcgctatgatgaagggacgctggccgatgacctggcggaagtggaagtgctggtgtcgcatctgccgccgccggacctcgccgatgccctggaagcgctgccctatgacgcgcgtaccgcgctgtgggggctggttgccgatgacaagcgcggcgaagtgctgctggaggcatcagagagcgtatggggcgatctcatcgacaagatgagcgatcacgacctgatatttgccctgcaatcgctggatattgatgaacaggtttacctgttgcagcacctgccgcgcgacttaaccggccgcctgctggcgacgctgccgccggataaacgtgcgcgcattcgtcagatgatgcgctacgccgataacaccgtcggcgcgatcatggagtttgaagtgattaccgtacgtccggaagccactctggcggcggtacagcgctatctgcgccgtctgggcaaaatgccggaaaacaccgacaaactgttcgtcaccacccgtaataaactgctgcttggcgagctggagctgcagactattctgctcaatgatgcgcaaaagcgcgtaggcgaagtgatggaaggcgatccggtgactttccagccgcaggaagaagcggaaaaagtagcgcgtaccttcgaacgcgacgacttactgagtgctgcggtgattgatgccgacggcaagctgatggggcgtttgaccatcgatgagatcgtcgatgtggtgtacgaagagaccgataacgacctgcgccggatgggcggtctgagcgaagatgatgatgtttttgcgccggtgagcaaagcggtgaaaacccgctgggcgtggctggcggtgaacctctgtacggcgtttatcgcttcacgggtgatcgacggctttgaacatacgatttcgcagctggtggccctggcctcgctgatgccgatcgtcgccgggattggcgggaataccggcaatcagacgatcaccatgatcgtccgtgcgatggcgctgcagcagatccagccgggaagttttaccttcctgatcctgcgcgagatgggcgtcgcgctgattaatggcctggtatggggcgggataatgggcgctatcacctggtggctgtacgatgacccgcagcttggcggggtgatgacgttggcgatgatgctcaacctgctgatggcggcgatgatgggggttatcatcccgatggtgatggtcaagctggggcgcgatccggcggtcggctccagcgtgatgatcaccgcgattaccgataccggcggcttctttattttccttggtctggcgacgctgtttctgatgtaa

SEQ ID NO: 89870 - DNA, 1209 bp, Enterobacter aerogenes
atgccctcaactttccgctctctctctccggcgttgataacacgcgagacccttgctggcgtgctgactgccctggcgttaattcctgaagtcatttcattttcggtcattgccggcgttgacccacaggtcagcctgattgcctcggtagtgctctgtctggcgatgtcggttcttggcgggcgcccggcgatggtgacggcggcggcaggttctgtcgccctggtgatcggcccgatggtacatcagcatggcgtagggtatattctgcctgctgtcattctggctggtattattcaaattttgtttgggatatgcggtatggcgcggttaatgcgctttatcccgccaccggtgatgaccgggtttgttaatgcgctaggcattcttatttttttcgcccaggttccccatttctggagcaggcagccgctcatcgtcggccttttcgttctgacgctgctcatcgtactgtgggcgccgcgttttatcaaagccgtgccggcgccgcttattgctatcgtcctccttactgcttataccgtcaccagcgggcagctcctgccgaccgtgggtgatgaaggcgctatgggcggcggtctgccgggcttcaacgcgctggcggtgccgctggatttaagcaccttaaaaattatctggccctgcgccctgagtatcgcctttgtcggcctgatggaatcgctgctgacggcaaagctggtggacgatctcacccatacgccgtcaaataagtcgcgtgagagcgcaggactggggatcgccaatatcctcgcgggctgctatggcggcatcgccggatgcgcgatgatcggccagactatcgttaacgtagaaatgggcaaggcgcgcagccgcctgtcgacgatagtggccggtatggtactgctgcttctggtgacggtgctgagccaggtgatggccaaaatcccaatggcggttctggccggggtcatggtgatcgtggcggtgaaaaccttcagttggcagagtattcgcccaaccgcgctggcgcgcaatccatggccggaaacggtggtcatggcagcgaccgttgtcgtgacggtcactaccagtaatctggcgatcggcgtactgacggggcttatcgcaatggcgctcatccctcgccgcctgcgcgtaaaagatcagcttacatcagaaacagcgtcgccagaccaaggaaaataa

SEQ ID NO: 89871 - DNA, 1635 bp, Enterobacter aerogenes
atgaagaaaaagatggccgtacccagctcacaggcggttggttccaatacaaatcggaccaacacccgccatgagcaagagacggatgtattgttgattggcggcggtatcatgagcgccacgttgggaacctggctgcaggaactggagccggattggtctattaccatggtcgagcagatgaccagcgttgccgaggaaagctcgaacggctggaacaatgcgggtaccggccatgcggcgctgatggagcttaactacacgccgcaaaccgccaatggaatcaatatcgacaaagcggtcgatatcaatgagtccttccatatttctcgtcagttttgggcccaccaggtgacccgcggcatcctgactaagccgaaatcttttattaacagcgtgccgcacatgagctttgtgtggggcgaagacaacgttaacttcctgcgcgcgcgctacgcggcgctgcagcagagcgagctgttccgcggtattcgctattctgaagatcatcagcagatcaaggagtgggcgccgctggtgatggaaggtcgcgatccgcagcaaaaagtggcggcgacgcgtaccgaaatgggcaccgacgttaactacggcgagatcactcgccagctgatcgccgggctacagacgcatgataatttttctctccagttgggtaccgtcgttcgccgttttaagcgcaatgcggacaacagctggacggtgacgctggcggatgccaacaatcgtcaccagaagcgaacgatcaaaaccaaatttatctttattggcgcgggtggcgctgctctgacgctgctgcaggaaaccggcattccgcaggcgaaagagtacgccggcttcccggttggcggacagttcctggtgtgtgagaacccggaagtggttaatcatcacctggcgaaagtctacggccaggcggaagttggcgcgccgccgatgtcggtgccgcatatcgacacccgtattatcgacggcaaacgcgtggtgctgttcgggccattcgcgaccttctcgacccgtttcctgaaaaatggatcgctttgggatctgctggcctcgacgaatacctcgaatattctgccgatgcttaacgtcggaatggataacttcgacctggtgaaatatctgattagccaggtattgcagaaagataaagatcgtcatgccgcactgtgcgagtactacccggaagcgcgcaaagaggactggcgcctgtggcaggccggtcagcgtgtacagattatcaaacgtgataagaagatgggcggcgtgttgcgccttggcaccgaagtggtgtgcgatgatgaaggcaccgtagccgcgctgctgggcgcttctcctggcgcgtcgacggcggcgccgatcatggtgcagctgttggagaaagtcttcaaagacaaagtacagacgccggcctggcaggcgaagatgaaagagatcgtgccgagctacggtatgcgtctggatggtaacccagccgctattgagcaggcgctgacgtggaccagtgaagtgctggggctacactacgagccgacgaccgcggcggacgaggtgccgcaggccgaactcaaaccgttgaccggcggcaaaccgatggcggatatcgcgctataa

SEQ ID NO: 89872 - DNA, 492 bp, Enterobacter aerogenes
gtgaaaaaaatcgctacgcttgctgtttctctgctggccgttgcctgtgtttccaccagcgccttagccgctgaacagccgctggagaaagtcgccccctatccgaaagcggaaaaagggatgaagcgtcaggtgattcagctgccgcagcagcaggatgaatccgcgttaaaagttgaactgatgattggccagacgctggaagtcgactgcaaccatcaccgcctgggcggtcaactggaaagcaaaaccctggaaggctggggctatgactactatgtctttgataagctgacgtccccggtttccaccatgatggcctgcccggacggtaagaaagagaagaaatttgttaccgctggtctcggcgatacaggcctgctgcgttacaacagcaagctgccgatcgtggtttatactccggccaacgtcgaagtgaaataccgcatctggaaagctgaagaaactatcggtaatgccgttgagcgttaa

SEQ ID NO: 89873 - DNA, 1110 bp, Enterobacter aerogenes
atgagagttaaaggacttaccaaaggattttttatccttattttactgatcgttaccctggccttttttgacgtactctccccttactattccgctatcctgtgggcagctatcctggcggtgatatttaatccggtaaaaaacaacatccgtacgcgcatcggtgagcgcaacggtatcgcggcgctactgaccgtcgtgattatctgtcttattgttttcaccccgttggcgattatcatttcgtcgctagccttcgaactcaacgtggtctacaccaagttacagcacaacgacacccagtttccgacggtggtcgccaacctgtttgcccatctcccgagctgggccagaagtttcctctccgagcacaatctcgatagcgcggaacagattcagcagcagctgtccgatgccgccctgaaaggcgggcagtatctggccggtagcgccttcctgattggtaaagggacctttggctttaccgtcagcttcggcattatgttatacctgctgttcttcttgctgaaggatggcccctatctggtacttctgatccttgaatccttgccgctatccaattacgtaaaacaacatctgtttgccaaattcgccgccgtcgcgcgggcgacggttaaaggcaccgttgccgtcgcgctggcgcagggggctctcggcggctttgcattctggattgtcggtcttgatggcagcattctgtggggcgctttaatggcctttctgtcgctcatcccggcggtgggctccgccatcatctgggtgccggcggcgatttacctgttcgccaccgggcaattgtggcaaggggcgtttattgtcggtttcttcgtgattgtcatcggcctggtggataacattctgcgtccgctactggtggggaaagataccaaaatgccggattatctgatcctgattgccacccttggcggcatggaaatctatggcatcaacggctttgtcatcggcccgctgattgccgccctgtttattgcctgctggaacctgttatcgggccgtgaacacgccgggaacgccgacttactggacgaagagtttattgaagaagccaaaaacagccgcgatgaatag

SEQ ID NO: 89874 - DNA, 1761 bp, Enterobacter aerogenes
atggtgactcttcgtcagccctaccgagaaaaagtctcccagatggtcagctggggacactggttcgccctgttcaacatgttgttggcaatggcgctcggcagccgctatctttttgtcgccgactggccaacgacgcttgccggacgagtattctcgtatgtcagcctcgttggtcatttcagttttctggttttcaccagctatgtactgattctctttccgctgacctttattgtcggctcgcagcggcttatgcgcttcctgtcggttatcttcgccaccgcggggatgacgctgctgctaatcgatagcgaagttttcactcgcttccacctgcacttaaatcccgtcgtctgggaactggtgattaaccccgatcagaacgagatggctcgcgactggcagctgatgtttatcagcgtaccgatcatcttcctgattgagatgcttttcgccacctggagctggcaaaagctgcgcagcctgacgcgccgccgccactacgcgcgccccgtcgcctggtttttctttatttcgtttatcagcagccacctgatttatatctgggcggatgccaatttttatcgcccgatcaccatgcagcgggccaacttgccgctctcttatccgatgaccgcccgccgcttccttgagaagcatggcctgctcgatgcgcaagactatcagcgtcgtctggttgagcaaggcgcgccggaagcggtttcggtgcaatatccgctgagcgatctgcgctatcgcgacctcggtacgggttacaacgtactgctcattaccgtggataaccttaactattcacgtttcgagaagaacatgccgcagctggcggcttttgcgaaagagagcgtcaactttagccagcatatgagctccggtaatagcaccgacagcgggatgttcggcctgttctacggcatatcgccgggttatatggatggcgtgctctcggcgcgtatcccggcggcgctgattaccgccctcaaccaacagggttaccagcttggcctgttctcatcagacggtttcagcagcccgctttatcgccaggcgctgctgtcggacttctcgctgccggcggctaaaacgcagagcgatgaacaaacggccgaccaatggatcggctggctggatcgctacgctctggacgagaaccgctggttctcgtgggtatcgctgaacggcactaatattgataacagccagcagcagaattttgcgcgcacctacggccgcgccgcaggcaacgtcgatacacaaattggccgcgtgctggacgcgctgcgtaaagcgggcaaactggataatacggtggtgataattaccgccgggcacggtatgccgctggataacaagcagggtaaattcgactggtcacggggcaatctgcaggtgccgctggttatccactggccgggaaccccagcgcaagagatcgcaacgctcacggataataaagacgtgatgaccacgctgatgcagcgtctgctgcacgtgtcgacgccagcgaatgaatattcgcagggcgaagacctgtttagcccggcacgccgccgcagctgggtcactgcggccaatagcgatactctggcgattaccacgccaacgatgaccgtggtgctcgaccacaacggcacctaccacacctggaacagcgatggtgagaagattaaagaccaaaaaccgcagctcagcctgctgctgcaggtgctgacggatgaaaaacgctttatcgctaactga

SEQ ID NO: 89875 - DNA, 264 bp, Enterobacter aerogenes
atgttgccctttcacgaacaaacagattttgagtttatgccacaaatatcccgctatagcgatgaacaggtcgagcagctgctcagcgagctaacgaacgtcctggaaacacacaaagcgccggttgacctgtcactgatggtgctgggcaatatggtgaccaatctgctcaacagtagcgtcgcgccggcgcagcgtcaggcaatcgcccgttctttcgcccaggcgctgcaatcgtccattaacgacgatcccgcgcactaa

SEQ ID NO: 89876 - DNA, 1008 bp, Enterobacter aerogenes
atgagtctggatatcgaccagattgccctgcatcagttgatcaaacgtgatgaacagaatctggaactggtgctacgcgagtcgctgctggaaccaaatgccactgtcgtggagatgatggccgaactgcatcgtgtctacagcgcaaaaagcaaagcctacggcctctttaatgaagagagcgaactggcgcaagcgttgcgtttacagcgtcagggtgaagaagaatttcttcctttcagccgtgcggcaaccggccgcctgcgcgatgagctggcgaagtatccatttgctgaaggcggcattgtgctgttctgtcagtatcgttacctggcggtcgagtatctgctggtggcggtgctcaataatctgagcagcatgcgcgttaacgaagagctggatatcagttccacccattacctggacatcaaccatgccgacatcgtggcgcgtattgatctgaccgagtgggaaaccaatcccgaatcgacccgttatctgaccttcctgaaagggcgggtggggcgtaaagtcgccgatttcttcatggacttcctcggcgccagcgaagggctcaatgccaaagcgcagaaccgcggtctgctgcaggcggtggatgatttcgccgctgacgcgcagctggataaatccgagcgccagaacgtgcgccagcaggtgtatgcctactgtaacgaacagctgcaggcaggcgaagagatcgagctggagtcgttgtcgaaagagctctcaggcgtcagcgaaaagagtttccaggagtttaccgccgagcagggttatgagctcgaagagagcttcccggcggatcgcagtacgctgcgccagctgaccaaatttgccggtagcggcggcggcttgaccattaactttgatgcgatgctgctcggcgagcgcgtattctgggatccggcaacggatacgttgaccattaaaggtacgccgccgaacctgcgcgatcagctgcagcgccgtacctcaggcggtaattaa

SEQ ID NO: 89877 - DNA, 762 bp, Enterobacter aerogenes
atgctcgccagccagagaaaacagcacatcctgcagatccttgccgcagaaaaacaggtgatgtcgggggagttgagtcagcgctttcaggtctcagaagactccattcgtcgcgatctgcgcgaactggcggcggaaggtaaactgcaacgggtccacggcggcgcgctgccggtatccgccgctatcgcgccaatcgaaagcagaaaaaacgtgcagatggcttccaaacaggcgatagcttgccgggcagcggcgcttatccagccagggcaggtggtcatcgtcgacggcggtaccaccaccacggcgatgatcgccgcgctacctgccgaccttgcttgtaccgtggtgacgcacagtccggggatcgccgtggcgctggtcgagcatccgcggatcgaagtgatcctgctcggcggtacattgtttaaacattccgtagttacggtcggcaccgggacgctggcggcgatggcgcggattcatgccgatctgttctttatgggggttaccggcgtgcacccgcaggcgggctttaccaccggtgattatgaagaggcgggcattaagcgcgcgctggcggccagagccgcagaaaccgtggtgatggcctctgccgaaaaaattaattccgcctccgcgtttgccatcggcgagcttaatcttgccagcacagtggttatcgatagcgaactggatgacaggttacgtcagaagcttaagcaaagcggcgtcgggattattcaggtagcaggttaa

SEQ ID NO: 89878 - DNA, 597 bp, Enterobacter aerogenes
atgcatgaagacgcaccgcgcgttcgccacgttcgcgaaacgctcttgtccgataactggtacacgctgaaaaaatatacctttgagctgttgcgccgggatgggcgctggcaggagcagagccgggaagcctacgaccgcggcaacggcgcggttattctgctctataaccgccacaagcagagcgtggtgctcatccggcagtttcgttttccggtgtggatcaacggtcacgacggctttctgatcgaagccgccgcgggattactggataacgcctcgccggaagagcgcattatcgccgaagcggaagaggagaccggatttcgcgttacccgcattgagccagtattcaccgcgtttatgagcccggggtcggttaccgagaagctgtacttctttattgccgaatactccgcggacgatcgccgtggcgatggcggcgggctggcggcggaaggagaggatattgaagtgctggagtggccgctggcgcgggcgttacaggccattcgcgatggcgaaatcgtggatgcgaaaaccattatgctgctgcagcacctggcgttaaatgccgatacgctccttgccggttaa

SEQ ID NO: 89879 - DNA, 1287 bp, Enterobacter aerogenes
atgataagaaaaccactggccctggcgttaattttggcggcgctgccggcggcggcaatggcgcaaaactgcggcggcctgacgctggatgtctgccccacgccttacgatcaaacgctacccgcggccaaagacatgctcacctgggatcagacttcacgcgtgattggctttcgtaatgactatcgcaactatgctggcgatgtattccgccacggcgcctcggtcccgctggagcgcgctgaaaagcaactgaccgatgcccgctatacgctcaacggccacacctggaatttgcaggattacctgaagcgcgaaaacgtcagcggtatgctggtgctgaaagacggtaaagtcgcctggaaatatctcgccgaaggtaataccgacaccacgttgtggacctcgcgctcggtgggcaaatcggtcgtctcgacgctggtcggcatcgctattcaacagggtaaaatccactccctcgacgacctgattaccgtttatgaacccgaactgaaaggcaccgcctgggacggcgtaacgctcaaacagctcattcaacataccagcggcgtagaatggaatgaagattacaccaacccacagtcgcacttcgcccgccttacccagtgtgaagctcagcccggcgcctatgattgcgtgcgtaaaattgtgtcgacgctgtcgcgtaaacacccggcaggcgagcagtggtcctactcttccggcggtgcatggctgctgggcgatgtgctggagcgcgcgaccggtatgtcgctggccgcctggcttgaacaatcactgtggcagcctgcgggtatggcccacgatggcgtctggcacgcctacaaaaaaggacaacatgatgtcggcgcccacggctttaacgccaccctcgaagactggggccgctttggcgagtttgtcgcccgcgatggccgcctgagcaacggtaaacagctggtgcccgctggctggttcgatcaagccgcaagctggacaaaagcgctgaactcggtttcagccgcgcatccggaaggtatctatggctatcaatggtggaataacgccattccggccaatgcgcaaaacgtacagccgacgccgcaggaagggctgaaaggctcgctgtgggcgctggggatctacggccaggtgattatggtcaaccgtgcggaacatctggtgatcgtgcagtggtcaacctggccacaagcggaaccgtcctttaacgcacagccgctggaagcggcgctgatgtacagcgccattgcccgcgaattgcgctaa

SEQ ID NO: 89880 - DNA, 888 bp, Enterobacter aerogenes
atgaaaaccctgcagtattcatttgcacagattgaagccttcgcgacgattgctgagaccggtagtctgtcgcgggcggcgatccgtttagggaaagaccgtacgacgcttcgcgatctgctggattacctggaagatgcgttgggctaccggctattcagccgtgcagggcgtagcctgactttaaccgccgagggcgagcagctttttcgccaggcgcacctgttgttgcgtcaggcgcaggctttcgagtcttttgcgcaaacgctgccgcaaacggcctggcaggaattacgcctggtgtacgattctttcgtgccgcgtgaatttctctgtttgctggccgatacgcttgcccggcggcagatccgtttaagctgctggagcgcttcgcgtcgcgaagccgagcaggcgttgagcgatggcgtcgcggatatggccatttgccaggcgaacaatcgtacgctgggtagcgaaatggagtggcgggcgctgggtaccgttgatttacgcttttacgccgcgcagcggttgttcgctggtaccgcaaggccgctgacgttgctgaatttatcgctcaccccgcagttagtcatgcaccggcgcagcgacgatcaaatcgcccgccggctgcagatatccggccatacgctgtatatgaatgaaatcaccatgttgcgccacgcaatggagcaggggcagggctggggttttttacccgatcatttacggcccgacgagtggcagggggttgctgaaattgccaccgaggtcggtaatcaggggcttaacgttaccatggtgatgctgtggttgccgggaatgaataaacaccgcgcgttgggagagattgttgacgacgcgccagggttatggcggcgcagataa

SEQ ID NO: 89881 - DNA, 285 bp, Enterobacter aerogenes
atgtttactatcaacgcagaagtacgtaaagagcagggtaagggtgcgagccgccgcctgcgcgcagctaacaagttcccggcaatcatctacggtggcgaagctgctccggttgctatcgaactggaccacgacaaactgtggaacatgcaggacaaagctgagttctacggcgaagttctgaccctggttgtcgatggcaaagaagaaaaagttaaagttcaggctgttcagcgtcacgcgttcaagccgaaactgacccacatcgacttcgttcgcgcttaa

SEQ ID NO: 89882 - DNA, 1758 bp, Enterobacter aerogenes
atgacttttacactacgtccctaccaaaaagaggccgttgacgccacgctcgcctggttccgccgtcaccatgagcccgccgccatcgtactgccgaccggcgccggcaaaagcctggtgatcgccgaactggcgcggttggcgcgcggacgcgtactggttctggcccacgttaaagaactggtggcgcagaatcacagtaaatactgtgcgcttgggctggaagcggatattttcgccgccggtctgcagcgtaaggagagccagggcaaggtggtcttcggcagcgtgcagtcggtggcgcgtaatcttgagcagtttcaaagcgaattctccttactgatcgtcgatgagtgccaccgtatcagcgacgatgacgacagccagtatcagcaaatcatcagccacctgcggcaggtgaatccacagctcaggctgcttggcctgaccgccacccctttccgcctgggcaagggttggatctatcagttccactatcacggtatggtacgcggcgacgagaaagcgctgttccgcgactgcatctacgagctgccgctgcgttatatgattaagcacggctacctgacgccgcctgagcgcctcgatatgccggtggtacagtacgatttcagccgcctgcaggcgcagagcaatggcctgttcagcgaagccgaccttaaccacgagctgaaaaaacagcagcgcatcacgccgcatatcgttagccaaatcgttgagtttgccgaaaaccgtaaaggcgtgatgatcttcgccgcgaccgtcgaacacgcgcgggaaattaccggcctgctgccgcccgcgcaggcggcgctgattaccggcgaaacgccggggccggagcgcgatcgcatcatcgaagcctttaaggcgcagcagtatcgctatctggtgaacgtcgcggtactgaccaccggctttgacgcgccgcacgtcgatcttatcgcgattcttcggccaaccgagtcggtaagcctttaccaacaaattgttggccgcggcctgcgtctggcgccgggcaaaaccgactgtctgatcctcgactatgccggcaaccctcacgacctgtatgcgccggaagtcggcacgccaaaaggcaaaagcgataatgtcccggtacaggtcttctgtccggcctgcggtttcgccaatactttttgggggaaaaccaccgccgacggcacgttgattgagcattttggccgccgctgccagggctggttcgaagacgacgacggccaccgcgaacagtgcgacttccgctttcgttttaaaaactgcccgcagtgcaacgccgagaatgacattgccgcccgccgctgtcgcgagtgcgatacggtgctggtcgacccggacgacatgctgaaggcggcgctgaagcttaaagacgcgctggtattgcgctgcagcggcatggcgctgcagcatggcggcgacgaaaaaggcccgtggctaaaaatcacctattacgatgaggacggcgccgatgtgagtgagcgcttccgtttgcaaacacccgcgcagcgtaccgcctttgagcagttgtttatccgcccgcatacccgtacgccgggcgtgccgctgcgctggataaccccggcggatatcattgcccagcaggcgctactgcgccatccggactttgtcgtcgcccggatgaaggggcaatactggcaggtgcgggaaaaagtgttcgattatcagggccgtttccgtcgcgctaatgagctacgttaa

SEQ ID NO: 89883 - DNA, 720 bp, Enterobacter aerogenes
atgcgacttgataagtttatcgctcagcagcttggcgtcagccgtgctattgccgggcgtgaaatccgcggcagccgcgttaccgtggacggcgacattgtgaaagatgcctcctttaagctccagccagagcacgaggtggaatatgacggcaatacgctgacccagcagcacggcccccgttactttatgctcaacaagccgcagggttatgtctgttcaacagacgatcccgatcatccaacggtgctttattttctcgatgagccggttgcccataagctgcacgccgccgggcgtctggatatcgacaccaccggtctggtactgatgaccgatgacggtcagtggtcgcaccgcatcacttcgccgcgtcatcactgcgaaaaaacctatctggtggagctggaaaatccgctggaagagggcgtcgccgagcagtttgccaaaggcgtgcagctgcataatgaaaaagatctcaccaaacctgcagtcctcgaagttatcactccgacagaagtgcgcctgaccatcagcgaaggccgctaccaccaggtaaaacgcatgttcgcggcggtgggtaaccacgtcgtgggattacatcgcgagcgtatcggcgacattaccctcgatgcgtcgctggaacccggcgaataccgcccgctgacggaagatgaaatcgccagcgttggcgccccacaagcacggagtaaaacgtga

SEQ ID NO: 89884 - DNA, 1197 bp, Enterobacter aerogenes
gtgacgacaaagcagaattcttcatttgggattgtgtttattcttggcctgttggccatgttaatgccgctgtcgattgatatgtatctgccggcgctgccggttatctcgtcgcagttcaacgtgccggatggcagcgcgcaaatgacgctcagtacctatattctgggctttgcgctggggcagttgctgtacgggccgatggccgacagcattggccgtaaaccggtgatcctcggtgggacgctgatattcgccgcggcggcggtggcctgcgcgttgtcgcagaccatcgagatgctgattactatgcgtttcttccacggcctggcggccgcggcggccagcgtggtgatcaacgccctgatgcgcgatatctacccgaaagaggagttctcgcgcatgatgtcatttgtcatgctggtcaccaccattgcgccgctggtggcgccgatggtcggcggcgcggtgctggtgtggttcagctggcacgcgattttctggatcctggcgctggcggcgctgctggcatcggcgatgatcgctttctttattagcgagacgctgccggtagaacggcggcagaaatttcatattcgcaccacgcttggcaacttcgccaccctattccgccacaagcgggtacttagctatatgctggccagcggctttagtttcgccggcatgttttcatttctcagcgcgggtccatttgtctacatcaacattaatcacgtgtcgccgcagcactttggctactattttgcgctgaatatcgtgttcctgttcatcatgaccatcattaacagccgctttgttcgccgggtcggcgcattgaacatgttccgcgccgggctgtggatccagctggcgatggcggtgtggatggtggtgtgtgcgctgcttgatgttggtttctggtcgctggtggtgggcgtggcggcgttcgtcggctgcgtatcgatggtctcctctaacgccatggcggtgatcctcgacgagtttccgcatatggcgggaaccgcatcgtcgctggccggaacatttcgctttgggattggcgcgattatcggcgcattgctgtcgatggccacctttaccaccgcctggccgatgctgatttctatcgcattttgcgccgttagctccattctcttctatctgtacgccagccggcgacgaaaagtcgcacattaa

SEQ ID NO: 89885 - DNA, 345 bp, Enterobacter aerogenes
gtgaatacacagcaactctctatcgtacaccgactgccgcagagctatcgctggctggccggttttgcgggttcaagagttgaaccgattccgcaaaacggcgctgagggcgaaaatagcctggtggcattaaaactgctcagcccggacggcgagaaagcgtggccggtgatgcgcacgctgagccaggcgctgagcgacatcgaagtggactgttccattcttgagtgtgaaggcgaaccgtgcctgttcgttaatatgcaggatgagtttgccgctacctgtcgtctgaaaaatttcggcgtggccattgccgagcctttctctggcaacaaccccttctga

SEQ ID NO: 89886 - DNA, 1590 bp, Enterobacter aerogenes
atgggccagccgttattagacattgacgacctctctatcgccttccgccagcaaggggcaagccaaacggtcgtcagcaacctgacgctgcggattgccgcaggtgaaacgctggcgttggtcggcgaatcaggctccggcaagagcgtctccgcgctgtcggtactgcgcctcctgccctctccgccggtcagctaccccagcggcgatattcgctttcacggtcaatcattgctgcacgccgatgaacgaaccctgcgcgggatccgcggcaaccgcatcgcgatgattttccaggagccgatggtgtcgctcaatccgctgcataatctggagaaacaactgtacgaggtgctttcgctgcaccgcggcatgcgcaaagaggcggcgcgcggcgaaatcctcgactgtctggatcgggttggcatccgcaacgcctcacgacggcttgccgactatccgcaccagctttccggcggcgaacgccaacgggtgatgatcgccatggcgctgctgacgcgcccggagctgctcattgccgatgaaccgaccaccgcgctggacgtctcggtacaggcgcagattctgcaactgctgcgcgaactgaagcgtgagctcaacatggggatgttgttcatcacccacaatctgagcatcgtccgccagcttgccgaccgggtggcggtgatgcaaaacggccgctgcgtcgaacaaaacggctgccgggagctgtttcaggcgccaacgcacccgtatacccgccgcctgctggatagcgaaccggccggcaaaccggtgccgctccccgccgacgcgcccatcctactgcaggcccgcgatcttaatgtcgccttcccaatccgcaaagggatcctgcgccgggtggtcgatcacaatcgagtggtcaaccatctgacttttaccctgcgggccggagaaacactggggctggtgggagaatccggctctggcaaaagcactaccgggctggcgctgctgcggctgattaactccagcggagaaatgcagtttgccggcgagtcgatccagggacgaaatcgccgccagatgctgccgctgcgccgacgcattcaggtggtctttcaggatccgaattcatcccttaacccgcgcctgagcgtcctgcagattatcgaggaaggattacgcgttcaccagccgacattgacgtccgcgcaacgtgaacaagcggtgattcaggtgatgcaggaagtggggctcgatcccgcgacgcggcagcgctatccggcggaattctccggcggccagcgccagcgtattgccattgcccgggcgctgatcgtcaaaccgcagctgattgtgttggatgaacctacctcatcgctggataaaaccgtacaggcgcagatcctggcgctactgaagacgctacagcaaaagcatcagctggcctatctgtttatcagccacgatttacgtgttgtacggacgctctgtcatcaggtgatagtgctgcggcagggagaagtcgtcgagcagggtgaatgcgagcgcgtatttacggcaccgcttcaggagtacacccgccagctgctggcgttaagctga

SEQ ID NO: 89887 - DNA, 1026 bp, Enterobacter aerogenes
atgtcatttctctcccccgttaatcaggcccgctgggcgcgttttcgccacaaccgccgcggctactggtcgctgtggatcttccttgcgctatttatttgcagcctgtgcgccgagcttatcgccaacgataaaccactgctggtgcagtatcgcggtagtctctacgtaccggtgctgaaaacctatagcgaaacaacctttggcggtgattttgccaccgccgccgactatcaggatccctggctgcaaaaacggctgacggaaaacggctgggtgctgtgggcgccggtacgtttcggcgccaccagcatcaatttcgccaccgacagccccttcccttcgccgccgtcccggcacaactggctgggtaccgacgctaacggcggcgatgtattcgcgcggatcctctatggcgcacggatctcattattattcggcctactgctgacgttcttctccagcgtgcttggcgtgcttgccggggcgctgcagggctactacggcggtaagctcgacctgtgggggcagcgttttattgaagtatggtccggcatgccgacgctatttttaattattctgctctcaagcgtggtgcaacctgatttctggtggctgctggcgattaccgttttatttggctggatgacgctggtcggggtggttcgcgccgagttcctgcgcacccgtaactacgattatattcgcgccgcacaggcgctgggggtcagcgatcgccatatactcctgcgccatatgctgccgaatgcgatggtcgctaccctcaccttcctgccgtttattttgtgcagttcgataaccaccctgacctcgctcgactttctcggctttggcctgccgataggctcgccatcgctgggcgaactgctactgcaggggaaaaataacctgcaggcgccgtggctggggatggcggcatttttgtcggtggcggtgctgctgacgctgctaattttcattggcgaagcggtccgcgacgccttcgatccgggtaaggcggtataa

SEQ ID NO: 89888 - DNA, 1095 bp, Enterobacter aerogenes
atgggcgcctacctgctccgccgactattactggtgatcccgacgctctgggccatcatcaccatcaatttttttatcgtgcagattgcgccaggcggtccggtcgatcaggcgatcgccgccgtggagttcggcgaccgcggcgggttgcccggcgcaggagatagcggtatgggcgccagccatgtgcgtaccggcgttggcaatatcagtgaaggccattatcgcggcggacgtgggctcgatccggaagtgattgccgaaatcacccaccgctacggcttcgataaacccattcacgaacgctactttaagatgcttggcgactatctgcgttttgattttggcgatagcctgtttcgcagcgcttcggtgctgcagttgattaaagacagcctgccggtatctattaccctcggcctgtggagcacgctgattatctacctggtgtcgataccgctggggatccgtaaagccgtcagtaacggcagccatttcgacgtctggagcagcacatttatcatcatcggttacgccatcccggcgtttctgttcgcgatattactgatcgtgatcttcgccggcggcagctatttcgatctttttccgctgcgcggcctggtctccgctaattttgatagcctgccgtggtaccagaagatcgtcgactatctctggcatatcaccttaccggtgctggcgacggtgatcggcggtttcgccgccctgacgatgctgactaaaaacagtttccttgatgagatccgcaagcaatatgtggtaacggcccgcgccaaaggcgtcggtgaaaaacagatcttgtggaaacatgttttccgcaacgccatgctgctggtgattgccggttttcccgccacctttatcagcatgttctttaccggttcgctgctgattgaggtgatgttctcgctcaatggtcttgggctgctcggctacgaagccaccgtgtcgcgcgattacccggtgatgttcggcactctgtatatcttcacgttaatcggcctgttattaaacattgtcagcgacatcagctatacgctggtcgatccgcgtatcgatttcgagggccgctaa

SEQ ID NO: 89889 - DNA, 1806 bp, Enterobacter aerogenes
atgtttgcgcgcatcggcctgctgctgctggctttatttagcctgagtagccaggcgcaaaccattaaagagagcgaagcgttcgctattatcggcgagccaaagtatgccgttgactttcatcacttcgattacgtcaatccggacgcacctaaaggcggcagtataacgcttgccgccattggcacctttgacaattttaaccgctacgccctgcgcggtaaccccggcgtacgcaccgatgcactgtatgacaccctgtttaccacctcggacgatgaaccgggcagctactacccgctgatagccgatcgcgcgcgctttgccgatgatttctcgtggatggaaattaccatcaacccgcgtgcccgctttcatgacggtagcccgattaccgccagcgacgttgctttcaccttccacaaatttatgaccgaaggggtaccgcagttccgtcttatctataaagggacgaccgtcaaagccatcgccccgctgacggtgcgcatcgaactggccaagccgggcaaagaaaatatgctcagcctgctgtcgctgccggtaatgcctgagtcattctggcgccatcataaactgagtgacccgctttcaacgccgccgctcgccagcggcccctatcgcatcagccgctggcggatggggcagtatattgtctattcgcgagtcgagaactactgggccgccgacctgccggtaaaccgcgggcgctggaacttcgacacgattcgctacgactactatcttgacgataacgtcgctttcgaagccttcaaggccggagcggtagatatgcgcgaggagagttcaacaaaaaactgggccacgcgctatatcgggcgcaactttagcaacggttatattgtgaaagacgatcgaacgaatacctcggcaaaggatacccgctggctggcttttaatattcagcgcccggtctttgccgaccgtcaggtacgtgaggccatcacccttgcatttgatttcgaatggatgaataaggcgctgttttacggcgcctacagtcggccaaacagctactttcagaacacagaatatgccgctcgtgattacccgaaggccgatgagctcgccctgctggcgccgatgaaaaaagaattgccgcctgaggtctttacccggatttatcagccgccagtttccagcggcgatggttttgaccgcgccaatttactcaaagcagatgccctattgaaccaggcgggatgggtgctaaaaaaccgtcagcgcgttaatgccaaaaccggcaaaccgctgcgctttgagctgctgctcgcctccggcggcaacgtcagttgggttctaccgttccagcataatttacagcgtttaggcgtgacgatggatatccgtcaggtggataactcccaggccaacagccgactgcggagccgcgattacgacatgatgccctcactgtggcgcgccaccgcctggccagatacgggcttacaggtttcgtgggcctcggactatattaactccagctataacgcgccgggagtgcagaacccggcggtcgacgcgttgattgcgcagatcgtgcgctggcagggcaacaaacagaagcttctgccgctgggccgcgcgctcgaccgggtgctgacctggaactattacatgctgccgatgtggtatatggcgcaggacaggacggcttactggaataaattttccttcccgcaaactcgccctacctactcctcaggctttgatggctggtggtacgatgttaacaaagccgccaggcttcctgcggaccgacgttaa

SEQ ID NO: 89890 - DNA, 1563 bp, Enterobacter aerogenes
atgctaacccgctacttttcaccccgacgtaaaatctggcttaccagtatttgtatcggcgttgccgtcgcgctactggccggcagcatccagtttatggttatctaccacaaccgctctgagcgtttcgatcagataatcaataacgtcagccactaccttaatagctatttcgctgatttaagcaaaaccattgatggcctgcagccgctgctcgatcagccctgcgaacatattgactccggcctcgccgccagcgccgcctttagtcccaacgtgcgcgccttcctgctggtgaaaaacggcaaagcgttctgctcatccgccaccggcgcaatggacacaccgtttaaacaattgataccgcagcttgataccaataaacctctggatatggccatcctccagggcacgccgatgatgccgaacaccgccgcgctggcaatgtgggtacaacgtcccggcgatcgagacagcggcatttttgtatccatcaatgccaatctgacgccttatatcctctataccgcacgacagaatgatttcagcggcattgcgctggccatcggccatacggcaatttcgaccttcagcagcaaaattatcgacccgctatcattgcccaatgagccgatacgccagattcaggttccggggctaccgctaaaagtgtatctcttttccaacagctggcttggcgagaatacccagttcgccctgttgctcggcgtggtatgcggcatgcttgccggcttgctcagctactacatcctgacgatcaaatccgatccgcggaaatcgatccaactggggatcaaaaacaaccagttctacgtggtctaccagccggtggtaaaggccgataccctgcagattagcggcgttgaagtgctgatgcgctggcggcatccggtggtaggtgaaatcccgcctgacgtctttattaatctggcggagacgcagcagatgatcgtgccgcttacccatcacctgttaatgttgattgcccgcgacgcgccgactctgcagcgcattttgccgcgcggtaccaagctcggtctgaatatctcgcctgcccacctgcatgccgccggatttcagcaagatatgcaacgttttgccgccgcgttacccgcaaactacttcgacgtcgtgctggagataaccgaacgttcgatgatcgataaaaaccagtcgatggccatttttgagtggctccatcagcagggcttcgaaattgctatcgatgattttggtaccggccatagcgcgctgatttatctggagcgctataactttgattatctgaagatcgatcgtggttttgtgcaggcgatcggtaccgaaaccgtcacctctcccgtcctggatgcggtgctaacgctaagccgccgtctacagttgaaaaccgtggctgaaggcgtagaaacgccggagcaggcggaatggctgcgtgctcacggcgtgaagtatctgcaaggttactgcttcagccgcccgctgccgctggataaactggtcgccgcccatgatgaaccggcaaattatttcacaagccgctga

SEQ ID NO: 89891 - DNA, 570 bp, Enterobacter aerogenes
atggtcaaatctcagccgattttgagatatatcttgcgggtcgcccccgcgattgcagttgcggttctgctttccgcgtgtagttcaacaagtaccgccaagaatatgcattctgagacgcatgctgtgggtagtggagatttatcatcactgcaagcttctcaggatgaatttgaaaaaatggtcagcaacctggacgtgaagtcccgtttgatggaccagtatgctagctggaaaggcgtgcgttaccgccttggcggcagcacccggaaagggatcgattgctcggcattcgtgcagcgtactttccgtgaacaatttggcctggagctgccacgctcaacttccgagcaacaggattccggcaaatcgatttcgcgcactcaactgcgtaccggcgatttagtgctgttccgcgctggctctacgggtcgtcatgttggtatctatatcggcaacaaccagtttgttcatgcctctaccagcagcggcgtcaccatctcaagcctggatgagccatactggaaaaagcgctataacgaagcgcgtcgcgttctgagtcgttcctga

SEQ ID NO: 89892 - DNA, 708 bp, Enterobacter aerogenes
atgactaaaaaccgtattccccttatcttgctgctgaacgtcgcgggcgtagccttattttgttcctggtatctaccggcaaatcacggtttctggttcccgcttgactcggctatttttcacttctttaaccagggcgtcagcgccaaccacgcgtatgcctggctgttagcgatcatcaacaatcgcgctttcgacgcctgctcgctgctggcgatgggctgtctgatgctcagtttctggatcaaagcgcagagcgctgaacgccgtcgtattatccttatggggctggtgatgttgctcgcagcggtaattatcaatcaacttgcccagcatctgatgccggtaaaacgcgccagcccttcgctgttctttacggatatcacgaaagtcagcgacgtggtctcattgcccaccaaagacgcttcaaaagatagcttcccgggcgaccacggcatgatgttgctcattttcgcctcgtttatgtggcgatatttcggccgccgggcatttaccatttcactgattatttttgtggtttttgctttcccgcgagtgatgatcggcgcccattggttcaccgatattgccgtaggttcactcagcgcggtgctgattggcgcgccatgggtattaatgacctcgctttccgataaggccatcgcctggttcgaccgttcgcttccgggtggaatagcaaaaaaataa

SEQ ID NO: 89893 - DNA, 978 bp, Enterobacter aerogenes
gtgaccaaaactaacctgatcacgggctttctcggcagcggcaaaacgacctcgattcttcatgtactggcccacaagcctgcaaatgaaaaatgggccgtgctggtcaacgagttcggcgaagtcggcatcgacggcgccctgctggcggaaagcggcgcgttgctaaaagagatccccggcggctgcatgtgctgcgtcaacggtctgccaatgcaggttgggctcaatacgctgctgcgccagggaaagcccgatcgtctgctgattgaaccaaccggactgggtcatcccaggcagatccttgataccctcaccgctgcggtctacgagccgtggatcgatctgcgcgcgacgctgtgcattctcgatccgcgccagctgttggaggagaagatcgtagccaatgataatttccgcgatcagctggccgcagccgatgtcatcgtcgccaataaaagcgatcgggcgacgccggaaagcgaggccgcttttaccaactggtggcaacagtacggcggcgagcgcctgcaggtgaacgccacccaaggaaatatcgagctcgcgctgctggatctgccgcgccgtaacaccgccccgctgccggcaagcccggaccacgtgcatagtcacggacaaaagcagggtctggcggcgttaaatctaccggcgcaccaacgctggcgtcgcagtgttaacagcggccagggataccatgcctgcggctggatttttgatgctgatacccaatttgacaccgttgggttgctggagtgggcgcgtctggcgccggttggccgggtgaaaggcgtgatgcgtattgctgaaggattggtgcgtatcaaccgtcagggactcgatctgcatatcgaaacgcaaaatgcgccgccgccggatagccgcatcgaactgatttgtgaatcagacgttgactggaatgccctgcagtcctcgctgttgaagcttcgtttaagttaa

SEQ ID NO: 89894 - DNA, 1467 bp, Enterobacter aerogenes
atgacaactatcgctaccgccgcgctgccagcaggcgtgcaacttccgcaatacgatcgccgccaattgcgctcgcgtatcgtgcaccttggttttggcgcatttcatcgtgcgcatcaggcgctgctaaccgaccgggtgcttaacgccagcggcggcgactggggaatttgtgaaatcagcctgttcagcggcgataagctgatgagccaactgcgtgcgcaagaccacctgtttacggtgctggaaaaaggcgctgagggtaaccaaccgatcgtggttggcgcagtacatgaatgcctgaacgccaaacttgattcgctggcagcaattatcgaaaaattttgcgaaccgcaggtggctatcgtttcgctgacgattactgagaaaggttattgcatcgatccggccaccggtaaactggatccagcccagccgcgcatcgttcacgatctggaaaacccgacgctgccgcagtcggctcccggtattttagttgaagcgctcaatcgccgccgcgaacgcggactcgcaccctttaccgtactctcctgcgacaatattcccgacaatggtcacgtcgtgaaaaacgccgtcctcggcatggctgagaaacgaagccaggagttggcaagctggattgctgaacatgtcagcttccccggcaccatggttgaccgcatcgtgccagccgccaccgaagaatctctggctgagattgcctccgtgctgggcgttgacgatccctgcgctatcagttgcgaaccgtttattcaatgggtagtggaagacaattttgtcgccgggcgcccggcctgggaaacggcaggcgtacagatgaccaacgatgtcctgccgtgggaacaaatgaaactgcgcatgctcaacggtagccactccttcctcgcctggctgggctacctggcggggcatgcgcacgttagcgactgcatgcaggacgatgttttccgccatgccgcccgtcgcctgatgcttgatgaacaagcgccaacgctatcgattaccggcgtggatttagttgcctatgccgacagcctgataacgcgcttcgccaatccggccttaaagcatcgcacctggcaaatcgccatggacggcagtcaaaagctgccgcagcgcatgctcgatagtatacgcgttcatctggcaaacgacagccgctggccactgctggcgctgggcgtggcgggctggatgcgttacgtaagcggcgtcgacgacgccgggcaagccattgacgtgcgcgacccgctagtcgacaaaatcaaacggttggttgacgccagccagcaagaggaacgcgtcagcgccctgcttggcctggaagagatatttggcaaagatctgccgggcaacccgcagtttgttgctgaaatcacttcagcctggcagcaactgacaacattcggctcccgccaggccgtggctaacgctctgcatagttaa

SEQ ID NO: 89895 - DNA, 1191 bp, Enterobacter aerogenes
atggagcaaacctggcgttggtatggaccgaacgatccggtatcgcttgatgatgtgcgccaggcgggcgccacgggtgtcgtgaccgcgttgcatcatattccgaatggccaggtctggccggtagaagagatccaacagcgtttagcgctactggcggaaaaaggcctgagctggtcggttgttgagagtatcccggtgcacgaggatatcaaaacccacagcggacaatatgagaagtggattgccaactatcagcagagcatccgcaatctggcggcctgcggtattgataccgtgtgctataacttcatgccgattctggactggacgcgtaccgatctggaatatcagctggctgatggctccaaagcgctgcgttttgaccagattgctttcgccgcttttgaactgcacatccttaaacgcccgggcgccgaagctgactatagcgctgaagaacagcagcaagcggacgtttactttaaggcgatgagcgcggcggatatcgacaagctgacccgcaatatcatcgccggcttgccgggagcggaagagggctataccctcgatcagttccgcgcacgtctggcggagtatgaccatatcgataaagcgcaattgcgtgagaacatggcttacttcctgcgggcgattgtgccggtgtgcgaagaagtcggcgtgcgcctggcggttcacccggacgatccgccgcgtccgatcctcggcctgccgcgtatcgtgtcgactatcgaagatatgcagtggttgaaagagacggtggacagcatttataacggctttaccatgtgtaccggatcctatggcgttcgcgccgataacgatctggtgaagatggtggaaaccttcggcgatcgtatccactttacccatttgcgctctacctgccgtgaagagaatcctaaaaccttccacgaggcggcgcacctgaacggtgacgtcaatatggtggcggtggttgatgcgattctgagcgaagagctgcgtcgtaagaaagcaggcgatctgcgtcccatcccgttccgtccggatcatgggcatcaaatgcttgacgatctgcgtaagaaaaccaaccccggttattcggcgattggccgtctgaaaggcatggcggaagtgcgcggcgttgagctggcgctgaagatgaccaaatatcctgagttgctgtaa

SEQ ID NO: 89896 - DNA, 573 bp, Enterobacter aerogenes
atgccaagagcgaatgaaattaaaaaaggtatggtgctgaattacaacggcaaactgctgattgttaaaaatattgatattcagtcgccaagcgcccgtggcgcagcaacgctgtataaaatgcgtttttccgacgtgcgtaccggcctgaaagtagaagaacgttttaagggcgacgacatcgttgataccgttaccctgacccgtcgttttgttgacttctcctacgtcgatggcaacgaatacgtgttcatggataaagaagactataccccgtataccttcaccaaagagcagatcgaagaagagctgcagtttatcccggaaggcggcatgccggatatgcaggttctgacctgggatggccagctgctggcgctggagttgccgcagaccgttgacctggaaatcgtagaaaccgcgccgggaatcaaaggcgcttccgccagttcgcgcaccaaaccggccaccatgagcaccgggctggtgattcaggttccggaatacctgaccagcggcgagaaaatccgcattcatatcgaagagtgccgctatatgggccgcgcggactaa

SEQ ID NO: 89897 - DNA, 255 bp, Enterobacter aerogenes
atggaatgtcgcccggactgcggagcctgttgcaccgcgccgtccatctcaagccccattcccggaatgcctgacggcaagccggctaacaccccatgcgtgcagctggatgaacatctgcgctgcaagatttttgcctcgccgctgcgccctaaagtctgtgcaggtttacagccggccgcggaaatgtgcggcagcacgcgtcagcaggcgatggcttatctcattcatctcgaagcgctgaccgcgccttaa

SEQ ID NO: 89898 - DNA, 1182 bp, Enterobacter aerogenes
atgcaaaacagtagcgccgcccttccccgccgcgggttcgacttaacctcctccgcttttcttatcgtcgcctttctgacggggatcgccggggccttacagaccccgaccctgagcctgtttttgaccaatgaggtgcacgtgcgcccggcaatggtcggcttcttttttaccggcagcgcggtcatcggcattctggtaagtcagtttcttgccgggcgttccgatcgtaaaggcgatcgcaagcagctgattgtcgcctgctgcctgctgggggtgctggcctgcgtgctgttcgcctggaaccgcaactactttattctgctgttcgtcggcgtcttccttagcagctttggctctaccgccaacccgcagatgttcgcccttgcccgcgagcatgccgataaaaccggccgcgaggcggtgatgttcagctcgattctgcgcgcgcaggtctcgctggcgtgggtgatcggcccgccgctggcctacgcgctggcgatgggttttggttttaccgtgatgtatctcagcgccgccgtggcgtttatcgtctgcgcgctgatggtctggttcttcctgcccagcatgcgtaaagagagcaaaaccgccggtggtcatcttgaagcgccgcgtaccaaccgccgcgatgcgctgctgctgttcagcatctgtacgttaatgtggggcaccaacagcctctatatcattaatatgccgctgtttatcattaatgaactgcatctgccggagaaactcgccgggctgatgatggggaccgccgccgggctggaaatccccaccatgctgattgccggttattacgcgaaacgttttggaaagcgcttgctgatgcgcattgccgcgcttgccggactgctgttttatgtcggtatgctgactgtccataccccggccctgttgctggcgatgcaggcgctgaacgcgatttacatcgggatcctggccggtatcggtatgctctattttcaggatctgatgccgggccaggcgggcgcggcgactacgctgtataccaataccacgcgcgtcggctggatcatcgccggctcgctggcgggcgttgtcgcggaaatctggagctatcacgcagtgttctggattgcgctggcgatgggaattatcgcccagggctgcctgtggcggattaaagacgtttaa

SEQ ID NO: 89899 - DNA, 1131 bp, Enterobacter aerogenes
atgttccagttatctgtacaggatatccatcccggccagcaggccgcgaataaagaagaggcaatacgtcagattgctggcgcgctggttagcgcgggtaatgtggctgacggctacgttaacggtatgcttgcccgcgagcagcagacctccactttcctcggcaatggcatcgctattccgcacggcaccaccgatacccgcgaccaggttctgaaaacgggcgtacaggtgtatcagttcccgcagggcgtgacctggggagaaggacaaaccgcttatgtggcgatcggtattgccgccagctccgacgagcacctcggtctgctgcgtcagttgacgcacgtcctgagcgacgactcggtggctgaacagttgagaaccgtcaccaccgcagaagaactgcgcgctctgctgatgggcgaaaagcaaagcgaagcgctgaagctcgacaacgaaacgttgagcctcgacgtggtcgccaacgatctgctgacgctgcaggcgctgaacgccgcgcggctgaaagaggcgggggcggtaaacgccgatttcgtcagccgcactattaacgatgtgccgcttaacctgggccaggggatctggttgaacgactgtgcggaaggcaacctgcgcagcgctatcgccgtgagtcgcgccgccaatgcgtttaccgctgacgggcagccggtggcgctgctgatcaccgtcgcgatggccgatgagcagccgaccgcggtgcttaatcgcctgagcaatctgcttattgataaaaaagcggagcatctgctgaaagccgacgccgccacgctgctggcgctgctgaccagcgacgacgccattgctgaagacgtgctgaacgccgagtttgtggtacgcaacgagcacgggctgcacgcacgtccgggcacgatgctggttaatacgattaaacaattctccagcgacattaccgttaccaacctcgatggttccggcaagccggccaatggccgcagcctgatgaaggtcgtggcgctgggtgtgaaaaaaggtcaccgtctgcgttttaccgcgcagggtgaagatgcgcaacaagcgctggatgcgattggcgaagcgatcgccgcaggccttggggagggcgcataa

SEQ ID NO: 89900 - DNA, 939 bp, Enterobacter aerogenes
atgagcagacgtgtagcaacgattacattaaatccggcatacgacctggtgggtttcaccccggaaatcgaacgtggcgaagtgaacctggtgcgcaccactggcctgcatgcggcaggcaaaggtatcaacgtggcgaaggtgctgaaagatcttggcatcgacgtcaccgtcggcggcttcctcggtaaagataaccaggatggcttccagcagctgtttagcgagctgggtatcgccaaccgcttccaggtggtgcaggggcgtacccgtattaacgtcaagctgacggaaaaagatggcgaagtgaccgatttcaacttctccggtttcgaagtaaccccggcggattgggagcgtttcgttaatgattctctgagctggctggggcagttcgatatggtttgcgtcagcggcagcctgccgtccggcgtgagtccggaagcctttaccgactggatgacgcgcctgcgcagccagtgcccgtgcattattttcgatagcagccgcgaagcgctggttgcagggctgaaagccgcgccgtggctggtaaaaccaaaccgccgcgagctggaaatctgggctggccgcaagttgccggagatgaaagatgttatcgacgccgcccatgcgctgcgcgagcaaggtatcgcccacgtggtgatttcgttaggcgaagagggcgcgctgtgggttaacgcctccggcgaatggattgccaaaccgccttcagtagaagtcgtcagcaccgtcggcgccggtgattcgatggtcggcggcctgatttacggcctgctgatgcgtgaatccagcgagcataccctgcgcctggcgaccgccgtcgccgccctggccgttagccagagcaacgttggcattaccgatcgtacccagttggccgcaatgatggcgcgcgtcgacttacaaccctttaattga

SEQ ID NO: 89901 - DNA, 1695 bp, Enterobacter aerogenes
atgaaaacgctgctgattattgatgccgggcttggccaggctcgcgcctacatggcgaagaccctgctcagcgccgcggcgcagaaagcgcaccttgagctgattgataacccgaacgatgccgaactggccatcgtactggggaccgcgctgccggccgatagctcgctgaatggtaaaaacgtctttctgggcgatattaaccgtgctgtcgcccatccggagctgttcctgggtgaagcgaaagatcacgctaagccgtacgttgcgccagcggcggtagccgttccggccgccgcccaggggcagaaacgcattgtcgccgttaccgcttgtccgaccggtgtagctcatacctttatggcggcggaagccattgaaaccgaggctaaaaaacgcggctggtgggtgaaagtagaaacccgtggctcagtgggggccggtaatgccattaccccggaagaggtggagcaggcggatctggtgatcgtcgccgccgatatcgaagtcgatctggcgaagttcgctggtaaaccgatgtatcgcaccactaccggactggcgctgaagaaaaccgcgcaggaactggataaagccgttgcggaagcaaaaccgtaccagccatccggcaaaccgcaggcgtccggcgaaggtaaaaaagagtcggctggcgcttatcgtcacctgctgaccggcgtctcctacatgctgccgatggtggtagcaggcggtctgtgtatcgcgctgtcgttcgcgttcggtattaaagcgtttgaagtgaaagacaccatggcggcggcgttgatgcaaatcggcggcggttcagcctttgcgctgatggtgccggtactggctggctttatcgctttctccatcgctgaccgtccgggtctgacgcctggccttatcggcggtatgctggccgtcagcggcggttccggctttatcggcggtattatcgccggtttccttgccggttatgtggcgaagttaatcagcactaagctgaaactgccgcagagtatggaagcgttgaagccgattctgatcattccactgatttccagcctgattgttggtctggcgatgatctacctgatcggtaaaccggtggcgggtatcctggcctggctcacccactggctgcaaaccatggggacggcgaacgcggtgctgctcggcgcgatccttggcggcatgatgtgtaccgatatgggcggcccggtgaacaaagcggcttatgctttcggtgtgggtctgttgagtactcaaacctatgcgccgatggcggcgattatggcggccggtatggtgccaccgctggcgcttggcctggcgacgctgattgcccgccacaagttcgataaatcgcagcgtgaaggcggtaaagcggcgctggttctgggtctgtgcttcattaccgaaggggcgattccattcgccgcacgtgacccgatgcgcgtactgccttgctgtatcgttggcggcgcggtgaccggcgctatctcgatggcggtaggcgcgaaactgatggcgccgcatggcggtctgttcgttctgctgatcccaggcgccatcactccggtgctgggttatctgctggcgattattgccggtacgctggttgcgggtctctcttacgcggtgctgaagcgcccggaagcgccggcggcggaagctgaaaaagcggcgtaa

SEQ ID NO: 89902 - DNA, 855 bp, Enterobacter aerogenes
atgaaatatattggagcgcacgttagcgcctccggcggtctggccaatgccgccatccgcgccgccgaaatcgaagcgaccgccttcgccctgttcaccaaaaatcagcgtcaatggcgcgccgcgccgctcaccgacgaagcgattgccgaattcaaagccgcctgcgaaaaatatcacttcggcccggggcaaatcctgccgcacgacagctacctgattaacctcggtcatccggtcgaagaagcgctggagaaatcccgcgaggcgtttatcgatgaattaacccgctgccagcagttgggattaacgctgctcaacttccatccgggcagccacctgcagcagatcccggaagatgaatgcctggcgcgtatcgctgaatccatcaacatcgcgctggcgaaaaccgaaggcgtgaccgcggttatcgaaaataccgccggtcagggcagtaacctcggttttaaatttgagcatcttgccgccatcattgacggcgttgaagacaaatcccgcgttggcgtctgcattgatacctgccacgctttcgccgccggctatgacctacgcagcgcggaggagtgtgaaaagaccttcgccgaattcgaacggatcgtcggcttccggtatctgcgcggcatgcacctgaatgatgccaaaagcgcttttggcagccgcgtcgaccgtcaccatagcctgggtgaaggcaatatcggccatgatgcttttcgttggatcatgcaggataaccgtttcgatggtatcccgctgattctggaaaccattaacccggatatctgggcggaagaaattacctggctgcgggcgcagcagaccgccgaagtggcctga

SEQ ID NO: 89903 - DNA, 1050 bp, Enterobacter aerogenes
atgacagcactcactttacccactaaacatcgcaccctgtggcatttcgtcccaggtctggcgctgaccgccgcgttgaccggcgccgccctgtgggcaggcagtttccctgctatcgccggcgcgggcttcagcgcgctgacgctggctattttgttcggcatggtggtcggtaataccgtttatcctaaaatttggcagtcctgcgacggcggggtgattttcgccaagcagtatctgctgcgcctggggatcattctttatggttttcgtctgacgtttgcccagattgctgacgtcggcgtcagcgggatcctgattgacgtactgacgctgtccagcactttctttatcgcctgtttcctcgggcagaaggttttcgggctcgataaacataccagctggcttatcggcgccggtagcagcatctgcggcgccgcggcggtcctggccaccgagccggtcatcaaagccgaagccagtaaagtgacggtcgccgtggcgacagtggttatcttcggtactatcgctatcttcctctacccggcgatgtacccgctgctggcgcactggttcactccggaagcctacggcatctatatgggctccaccatgcatgaagtcgctcaggtggtcgccgccggtcacgcggttagcccggacgccgaaaatgcggcggttatcgccaaaatgctgcgcgtgatgatgctggctccgttcctgctgttcatcgctgctcgtgtgaaacaactggcgccagccggtaacggcgaaaagagcaaaatcaccattccgtggtttgccatcctgtttattctggtggcggtatttaactccttccacctgctgccgaaagccgtcgtcgatatactggtcaccctcgataccgtactgctggcgatggcgatggccgcgctgggcttaaccacccacgtcagcgcactgaaaaaagccggtgcgaagccgctgctgatggcgctgatgctgttcgtctggctgattgttggcggcggcgcgattaacttcgctatccaccacctgattggctaa

SEQ ID NO: 89904 - DNA, 867 bp, Enterobacter aerogenes
atgcatatcacgctacggcaactggaagtttttgctgaggttttgaaaagcgggtcgacgactcaggcgtcacagatgctggcgctgtcgcagtcggcggtgagcgcggcgctgaccgatctggaggggcaactcggcgttcagctttttgaccgcgtcggtaaacggctggtggtcaacgagcatggccgcttgctctacccgcgcgcgctggccctgctggagcgcgccggagagatagaacagctgtttcgcggcgataatggcgctatccgcgtttatgccagtagcaccatcggcaactatattctgccggaaatcatcgcccgctaccgccgcgacttccctgaactgccgctggagctgagcgttggcaacagccaggatgtgattaatgcggtcagcgatttgcgcgtcgatattggcctgatcgaagggccgtgccacgcggcggatattatcgccgagccgtggattgaagatgaactggtggtgttcgccgcccctgattcgccattcctcgaaggcgaattgacgctgcaacggctggcggaagcgcagtggatcctgcgcgagcatggctccggcacgcgggagatcgtcgattatgtgctgttgtcgcatctgcccgcgttccagttaggcatggagcttggcaactcagaggcgattaaacatgcggtgcgccacggactaggcatcagctgcctgtcgaggcgagtcattgccgaacagctggaggccggaacgctggtggagctcaagctgccgctgccgcgcctgacgcgcacgttgtggcgtattcgccatcggcaaaaacacgtttccaaggcgctgcagcgctttatccgttactgcgaggtgtag

SEQ ID NO: 89905 - DNA, 507 bp, Enterobacter aerogenes
gtgaagaaaccagcaaaagttgctaacgccgaaccgcaggccactcgcgcacagcgaatctggcaacagctaaacgcatggcttatttttccggcgctaggggtttacgcgctctatttagcaaccgactatctgccattactgaaattacgcggttggccggacttcgcctccgtttccttactgaaggccaattttaccggctccgcgctgctctttttttcattcgcctggcggatgggcagagtgctgcgtggtaaaaccgtcgatggaagttatgaaaatcgcctgctgaccgctatcgccggatttacgctggcgctgctgatcgtcatcaacagcgccatttttaccttacattttacggtatacggctcgccgcgctacattcgctgctgggaacccgttcccatgggcagctggcattatgccagaaccccggagatctgcgtgcagcacggctacgcgccaataagggataccgctacacctcgcagtaacggataa

SEQ ID NO: 89906 - DNA, 468 bp, Enterobacter aerogenes
atggtttcccccactcgtcgcagcctggcccccgatgcctttctgctactggcgattttctgcctgtatctattcgttattggcctgtacgccagtatcacggtgctggaacactggttgcggctgccgaattacctgaccgataacagggagacttttcttgtcggcgcgcttcctcttgcgattgcggggctgctggggctactggcgggcgtcggagtgaaaaagcggctgatggttcggctatgcaaagtcttctgcgccttttctcttatctatattgcggctttcgcctggctggactggcgcacgatggaccactatcgggataacccgcagtacggcgtatgcaagcaatacagcaaacacaccatttatatgtacgtgtggaatagcgactggtgcgaccatttcgacaaaagggtgcaaaccccctcccccattgctaatagggagaataccccgtga

SEQ ID NO: 89907 - DNA, 1470 bp, Enterobacter aerogenes
atggtttcggaaactaaaaccacagaagcgcccacgctccgccgcgagctaaaagcgcgccacttgaccatgatcgctattggcggttccatcggtacaggtcttttcgttgcctctggcgcaacaatttctcaggcaggccccggcggcgcgctgctttcctacattctgatcggtctgatggtgtatttcctgatgaccagcctcggcgagctggcggcgtttatgccggtttcaggctcttttgcgacctacggtcagaactatgtagaagaaggctttggtttcgcgctgggctggaactactggtacaactgggcggtgactatcgccgttgacctcgttgcttcgcagctggtgatgagctactggttcccggatacacccggctggatctggagcgccttattcctcggcatcatgttcctgctgaactggatctcggtacgcggcttcggcgaagcggagtactggttctcgctgattaaagttgccaccgtgattatctttatcatcgtcggcattatgatgatttttggcattttcgaaggcgccaagccggcgggctggagcaactggggcattgatgatgcgccgtttgccggcggttttgcggcgatgatcggcgtggcgatgattgtcggcttctccttccagggtaccgagctcatcggtattgccgcgggcgaatcggaaaatccggagaagaacattccgcgcgcggtgcgtcaggtgttctggcgtatcctgctgttctatgtcttcgcgattttgattatcagcctgatcatcccgtataccgatccgagcctgctgcgcaacgacgttaaagacatttccgttagcccgttcaccctggtattcgagcacgccggtctgctctctgcggcggcgatcatgaacgcggttatcctgacggcggtgctgtcggcgggtaactccgggatgtacgcctctacgcgtatgttgtataccctggcgtgcgacggcaaagcgccgcgcattttctcgaagctgtcgagaggcggcgtaccgcgcaacgcgctgtatgcgactaccgtgattgcggcgctgtgcttcctgacctcgatgttcggcaaccagacggtttacctgtggctgctgaatacctccgggatgactggctttatcgcctggttgggtattgcgatcagccactaccgtttccgtcgtggttacgtgttgcagggtaacgatattaataacctgccgtaccgttccgggttcttcccgctggggccgatcttcgccttcgtactgtgccttatcatcacccttggccagaactatgaagccttcctcaaggacaccattgattggggcggcgtggcggcgacctacatcggtattccgctgttcctggttatctggtttggttacaagctggtgaaaggtacccgcttcgtgcgctacagcgaaatgaagttcccggaacgctttaaaggctaa

SEQ ID NO: 89908 - DNA, 1974 bp, Enterobacter aerogenes
atgttcaggttaaacccttttgcccgggcgggactgtgcgcgtccgtcgtagcattggcatttccggcgctggccgcaaatgatgacgaaacgctggttgtcaccgccgcggcgactgaacagagcgtcaaagatgcccccgccagtatcagcgtgatcacccaacaggacttgcagcgcaagccggtgcagaacctgaaggacgtgctgcgcgatgtgcctggcgttcagctcaccaacgaaggggataaccgcaagggtgtcagcatccgcggtctggatagcagctatacgctgatcctgatcgatggcaaacgcgtcaactcgcgtaacgccgtcttccgccataacgatttcgatctgaactggatcccggtggactccatcgagcggattgaggtagtgcgcggcccgatgtcttccctgtacggttccgacgcgctcggcggcgtggtcaatatcattaccaaaaaaatcggccagaaatggaccggtaccctcagcagcgatgccaccattcaggaacaccgcgatcgcggtgacacttataacggccagttcttcaccagcggcccgctgattgacggcgtgctggggatgaaagcctacggcagcctggcgaaacgtagtaaagacgatcagcaaccttccagcaacgctgcgggtgaaacgccgcgcattgaaggtttcaccagccgcgacggtaacgttgagttcgcctggacgccaacggagaaccaggacattaccgccggctacggtttcgatcgccaggatcgcgactcagactcgcttgataaaaaccgccttgaacgccaaaactactctttgacccataacgggcgctgggatgtcggcaatagcgaagtgaaattctacggcgagaaagtggataacaaaaacccggggcaggctgggaccattacctctgaaagcaatgctgtggatggtaaatatgtgatgccgctggggatgatcaaccagatcgtcaccctcggcggtgaatggcgccacgataaactcaaagatccggtaaacctgagcagcggcggcaaatcgacttccgccagccagtacgcgctgttcctcgaagatgagtggcggatctttgaaccgctggcgctgaccaccggcatccgtatggacgatcatcaaacctacggcgatcactggagcccgcgtgcgtacctggtctataacgccaccgataccgtgaccgtgaaaggcggttgggctacggcctttaaagcgccgtcgctgctgcaattgaacccggactggaccaccaactcctgtcgcggtagctgcagcattatcggtaacccgaatctgaagccggaaaccagcgaaagctttgagcttggtctgtattacagcggtgaagagggctggctggaaggtgttgaaggcagcgtgaccgccttccagaacaacgttgacgatatgatcgacatcctgcgcacctccagcgccagcgaggcgccgggttacccgaacttcgtcggctggaagaccgtgaacggtaagcgcgtgccggtgttccgctacttcaacgtcaacaaagcgcggattaaaggcgtagagaccgaagtgaaggtgccgttcggcgaagagtggaaactgacggtcaactacacctataacgatggtcgcgatctgagcaatggcggcaataaaccgctgcagacgctgccgttccataccgctaacggtaccctcgactggaaaccgctggaggattggtctttctacgtcacggccaactataccggcgagcagcgtgcggtaagcgcgacgggtaaaaccccaggcggttataccatgttcgatatcggcgccgcgtggcaggtcagcaaaagcgtgaaactgcgctccggcgtacttaacgttggcgataaagatctgagccgcgacgattacagctacaccgaagatggccgtcgctactttatggccgtcgattaccgcttctga

SEQ ID NO: 89909 - DNA, 435 bp, Enterobacter aerogenes
atgagtaatatcaccatctatcacaacccggcctgcggtacgtcacggaatacgctggagatgatccgtaacagcggtaatgagcccaccgttatttattaccttgaaacaccgccgactcacgatgagctggttaagcttattgcagatatggggatcgctgtgcgtactctactacgcgagaatgttgaaccttatgctcagttgggactcgcagaggacaagttcaccgacgagcagttaatagaatttatgctcgctcatcccatcctgattaatcgccctattgtggtcactgaacggggaacccgcttatgtcggccatctgaagtggtactggatatcctgcccgacccgcagcaaggcgcatttagcaaagaggatggagaaaaggtggtggatgaaaggggcaagcggctgatacctggcggatag

SEQ ID NO: 89910 - DNA, 1290 bp, Enterobacter aerogenes
atgttgttggccggtagtctctttttattcacgctggtgttggttatctggcagcccaggggcctcagcatcggctggagcgcgagtattggcgcaatactggcgctggccagcggcgttattcatctcagtgatattcccgttgtctggaatatcgtctggaacgcaacagcgacttttatcgcggtgattatcatcagcctgctgctcgatgagtcgggcttttttgaatgggctgcgctgcatgtctcccgctggggcaacgggcgcggtcgtctgctgttcacctggattatcctgttaggcgcgaccgttgcggcgctgtttgctaacgatggcgcagcgctcattctgacgcccatcgtcattgccatgctgctcgctctggggttcagcaaaaggacaacattagcctttgtcatggctgccgggtttattgccgataccgccagcctgccgcttatcgtttccaatctggtcaatattgtctcagctgatttcttccggcttggttttacgcaatacgcctctgtgatggttcctgttgatattgctgccatagcggccacgctgggcatgctgcatctgtttttccgccgggatattccagcaacttacaacgtcactttgctgaaaacacctgccagcgcgattaaagatcccgcaaccttcaaagccggctgggttgttttgcttttgttgctggttggtttctttgttcttgaaccgctggggctgcccgttagcgccatcgccgctgtcggagccgctgttctgtttgccgttgcgaaaaaaggtcacgccatcaataccggtaaagtattgcgcggcgcgccctggcagatcgttattttctcgctgggtatgtacctggtggtctacggtctgcgcaatgcgggcttaacggaatatctatcgggtatgctgaatatgctggcggataagggactgctggcggcaacgtttggcacgggcttcctgaccgctttcctgtcgtcggtaatgaacaatatgccaacggtcctggtgggcgcactgtcgattgaaggaagcaccgcttctggcgttattaaagaagcgatgatctacgccaacgtgatcgggtgcgatttaggccccaaaatcacgccaataggcagtctggcgaccctgctgtggctgcacgtactgtcgcagaaaagcatgaccatcagttggggatattacttccgcacaggcatcatcatgacgctacctgtgctgtttgtcactctggccgcgctggcgctgcggctctctctcactctataa

SEQ ID NO: 89911 - DNA, 339 bp, Enterobacter aerogenes
atgataatctggtcaaccatgataaagcctatccagctgtttaaaatcctgggggatgaaacccgtttagccatcatcatgttgctgcgtgagtccggcgaactgtgcgtctgcgatctgtgtgccgccaccgggcaatcccagccgaaaatatctcgccatatggcgatattacgtgaatctgaactggtactcgaccgccggcaagggaaatgggtccactatcgcctctcgccccatatgccggcctgggcggcggagatcattgccacgaccaggcagagcatgagggaagatattgacgaatggcgcaagaaaacagcgtgcgccacctgttga

SEQ ID NO: 89912 - DNA, 837 bp, Enterobacter aerogenes
atggaactgcttgaagaacatcgctgttacgagggtcggcagcagcgctggcgtcatcactccagtaccttgaattgtgcgatgacgttcagcatttttttaccgacgacgacggaaaccgccccgccgccggtgctgtactggctatccggtttgacctgcaatgacgaaaacttcaccaacaaggctggcgcccagcgtgtcgccgccgaacttggcatcgcgctggtgatgcccgacaccagcccgcgcggtgatgacgtcgccgatgatgcaggttacgatctcggtaaaggcgcgggtttttacctcaacgccactcaggcgccgtgggcggcgcattttcgcatgtacgactacctgcgcgatgagctaccgcagttgattaaccgtcaatttaaggtcgccgaccgttgcgctatcagcggccactcgatgggcggccacggcgcgctcatcatggcgctgaaaaacccagggcgctttaccagcgtctcggccttcgcgccgatcgttaacccatgcaaagttccatggggacaaaaagcgttcagcaactatctcggcaatgatgaagcgaactggcaggagtgggacagctgcgcactcatgcagacaagccaggccggggatgccattgccacattaattgatcaaggtgacgccgaccagtttctcggtacccagttgcagcccgcggtccttgcagaggcggcgcgacagaaacagtggccgctgagcctgcgtatccagcccggctacgaccacagctactatttcatcgccacctttatagaagatcatctgcgcttccacgcggagcatctgtttaagtaa

SEQ ID NO: 89913 - DNA, 669 bp, Enterobacter aerogenes
atgtcatcattgagtaaagaagccatactcgttcatgaagcgctggtcgctcgtgggctggagacgccgctgcgtccgccagtacaagaaattgataatgaaacgcgcaagcgtctgatcgccgggcacatgactgagattatgcagctgctgaatcttgatctcagtgacgacagcctgatggagactccgcatcgcatcgcaaaaatgtacgttgatgagattttctccggtctggattatgccagattcccgaaaatcaccgttattgaaaacaaaatgaaagttgacgagatggtgacggtccgcgatatcacgctgaccagtacctgtgaacatcactttgtgacgattgacggcaaagcgaccgttgcttatatcccgaaagattcggtaatcggcctgtcgaaaattaaccgcatcgtgcagttctttgcccagcgtccgcaggtgcaggagcgcctgacgcagcagatccttaccgcgctgcagactttgctcggtaccagcaacgtcgcggtatccattgacgcggtgcattactgcgtgaaagcgcgcggcatccgcgatgcgaccagcgccacgaccaccacttcgcttggcggtctgtttaaatccagccagaatacccgccaggagttcctgcgcgccgtacgtcaccacaattaa

SEQ ID NO: 89914 - DNA, 1158 bp, Enterobacter aerogenes
atggagagaaacgtcacgctggacttcgttcgcggcgtcgccatcctcggcattctgctactgaatatcaccgccttcggcttgccgaaggcggcctatctgaatccggcctgggccgggagtatttcgccgagcgacgcctggagctgggccatcctcgatctgtttgcgcaggtaaaattcctcaccctgtttgctctgctgttcggcgccggattgcaaatgctgctggtacgcggtaaacgctggatccagtcgcggctaacgctccttgccctgcttggttttattcacggtctctttttctgggacggcgatattctgctggcctatgcgctggtggggctgattgcctggcgcatggtgcgcgatgcccatcatgtcaaatcgctatttaataccggcgtcgtgctttatctcatcggtattgcggtgctggtattgttgggattaatttccggcaacggcgccagccggtcatgggtgcccgatgccgcgaatgtgcagtatgagcagttctggaagctcaaaggcggtctggaggcggtgagcaatcgcgcggatatgctgtccgataacctggtggcgcttggcgtgcagtacggctggcagctggcggggatgatgctaatgggcgcggcgctaatgcgctgcggctggttgaaagggcagtttagccttagccattatcgccgcgtcggggctgtgctgattattgccggaatgatggtaaatgtgccggccatcgccgcgcagtggtacttgcaatgggactaccgctggtgcggttttctgctgcaggcgccgcgtgaacttggcgcgccgctacaaaccatcggctatgccgcgctggcgtggggattctggccacaattatgccgctttcgtctggttggggcgattgcctgcgttgggcggatggcgctcagtaactatttactgcaaaccctgatctgcaccacgctgttctatcatctgggcctgtttatgaaatttgaccgtttacagctgctggcctttgtgccggcggtgtgggccgttaatctcctcttctcgcagttttggctgcgtcatttccgccaggggcccgttgagtggctatggcgtcagttaaccctgagagcctcagggacatcatccagagatacatctgtataa

SEQ ID NO: 89915 - DNA, 1023 bp, Enterobacter aerogenes
atgatcaccattcgtgatgtcgcccgtcaggcgggggtttccgtggcgacggtttcacgggttctgaacaacagcgcgctggtgagcccggatacccgggaggcagtgatgaaggcggtcgcgcaactgggctatcggccgaatgccaatgcccaggcgctggcgacccaggttagcgataccattggcgtggtggtgatggatgtgtcagacgcctttttcggcgcgctggtgaaagcggtggataccgtcgcgcagcagcatcagaaatatgtgctaatcggcaacagctaccatgaagctgaaaaagagcgtaacgccattgaggtgctgattcgccagcgctgttctgcgcttatcgtgcattcgaaagcgttaagcgatgccgaacttggcgactttatgcagcatattccaggcatggtgctgataaaccgcattgtgcctggttttgcgcaccgctgcgtgggtctcgataacgtcagcggtgcgctaatggctacgcggatgctgctcaataacggccatcagcggattggctatctctcttccaaccacggcattgaagatgatgaactgcgccgcgaagggtggagtaaagcgctgcaggagcagggcattatcgcgccggatagctgggtgggctcgggttcgccggatatgcagggcggtgaagcggcgatggtagaactgctggggcgtaatttaggcctgaccgcggtgtttgcctataacgacagtatggctgccggggcgttaaccactctcaaggataacggcattgccgtgccgcagcatctctcgctgattggttttgatgacattcccatttcccgttacaccgatccgcaattgactaccgtgcgctatcccattatgtcgatggcgaaattggctaccgaactggcgctacaaggggcggcagggaaactcgatagcgaggccagccactgctttatgcccacgctggtgcggcgccattcggtgacgcaaaagcaaagtgtggggccgatcactaactga

SEQ ID NO: 89916 - DNA, 999 bp, Enterobacter aerogenes
atgaataagaaggtcttagctctgtccgccgtcatggctggcatgctttttggcgccgcagcgcatgccgcggatacccgtatcggcgttacgatctacaagtatgacgacaacttcatgtccgttgtgcgtaaagcgatcgaaaaagacggcaaatctgcgccggacgtgcaactgctgatgaatgactcgcagaacgatcagtccaaacagaacgatcagatcgacgtgctgctggcgaaaggggtgaaggcgctggccatcaacctggttgacccggcggcggcgggtacggttatcgacaaagcgcgtgggcaaaatgtgccggtggtgttctttaacaaagagccgtcgcgcaaggcgctggatagctacgataaagcctattatgtgggtaccgactccaaagaatccgggattatccagggcgatctgatcgccaaacactggaaagcgaatccaaactgggatctgaacaaagatggtcagattcagtttgttctgttgaaaggcgagccgggccacccggatgccgaagcgcgtacttcctacgttatcaaagagctgaatgaaaaaggtcttaaaactcagcaactggcgttagataccgccatgtgggataccgcacaagcgaaagataaaatggacgcctggctctccggcccgaacgccaacaaaatcgaagtggtcatcgcgaacaacgatgcgatggcgatgggcgcggtagaagcgctgaaagcgcataacaagagcagcattccggtgttcggcgtcgatgccctgcctgaagcgctggcgctggtgaaatcgggcgcgatggccggtaccgtgctgaacgacgccaacaaccaggccaaagcgaccttcgatctggcgaagaacctggctgacggcaaagagcccgctgctggcaccaactggaaaattgagaataagattgtccgcgtaccgtacgtaggcgtagataaagacaacctcagccagtttatcggtaaataa

SEQ ID NO: 89917 - DNA, 1521 bp, Enterobacter aerogenes
atggtcagcaataatagcgtacagtcgggcgaatatttgttggaaatgagtgacatcaacaaatctttccccggcgttaaagctcttgataatgtcaatctgaaggttcgtccgcactctatccatgcattaatgggcgagaatggcgcgggtaaatcgacattattaaaatgcttatttggaatctatcaaaaagattccggcagtattctttttcagggaaaagaaatcgatttccattcggcgaaagaagcgctggaaaacggtatttctatggtgcaccaggaattaaacctggtacttcaacgttcggtcatggacaacatgtggctgggacgttaccccaccaaaggcatgtttgtcgatcaggataaaatgtatcgcgataccaaagcgatatttgatgagctcgatattgatattgatccgcgcgctcgtgtggggactttatcggtatcgcagatgcagatgattgaaattgcgaaggcattctcctatgacgccaaaatcgtcattatggatgagcctacctcatcgctgacagaaaaagaggtcaatcacctgtttaaaataatccgcaagctgaaagagcgtggctgcggtattgtttatatctcccataaaatggaggagatatttcagctatgcgatgagattacgatcctgcgcgatggtcagtggattgccacccagccgctggaggggctggatatggataagatcatcgcgatgatggttggccgttcgctgaaccagcgttttccggataaacaaaacaaaccgggcgaagtaatccttgaagttcgtaacctgacctcgctgcgccagccgtcaattcgcgatgtctcattcgatctgcataaaggtgaaatcctcggcattgccggactggtgggcgctaaacgtaccgatattgttgaaacgctgtttggcatccgcgaaaaggccagcggcacaattaccctgcatggcaaaaaaattaataaccatagcgctaacgaggcgataaaccacggctttgcgctggtgaccgaagagcgtcgctcgacgggaatttatgcttacctcgatattggttttaactcgctgatatcaaatatcaagaagtataaaaacaaggtcggtctgctggataattcgcggatgaaaagcgacacccaatgggttatcgattccatgcgggttaaaaccccaggccatcaaacgcaaatcggttcgctttccggcgggaatcagcagaaggttattatcggtcgttggttattaacccaaccggaaatattaatgcttgatgaaccgacccgcgggattgacgtcggggccaaattcgaaatttatcagctgattgccgaactggccaaaaaagataagggcatcattattatctcttccgaaatgccggaactgctgggaattaccgaccgtattctggttatgagtaacgggctggttgccggaattgttgagaccaaaaccacgacgcaaaatgaaattctgcgtcttgcatcattgcacctttga

SEQ ID NO: 89918 - DNA, 1011 bp, Enterobacter aerogenes
atgagtgcgttaaataaaaagagtttcctcacttacctgaaagagggtgggatttacgttgtacttttggtcttactggccattattattttccaggacccgaccttcttaagtctgttgaacttaagtaacatcctgacgcaatcctcggtacgtattatcatcgcgctcggcgtcgccggactgattgtcacccaggggaccgacctttccgccggacgtcaggtgggtctggcggcggtggtagcggctaccatgctgcaggcggtggataacgccaacaaggtgttcccggagatggcgaccatgccgattccgttggtgattctgctggtctgcgcgatcggcgcggtgattggcttgattaacggtatcgtcattgcctatctcaacgtgacgccgtttatcactaccctggggacgatgatcatcgtttacggtatcaactccctgtactacgactttgtcggcgcgtcgccgatttccggtttcgacagccacttctcgcagtttgcccagggctttgtcgctttaggttcattccgcctatcgtacattacattctacgcgctgatcgctatcttcttcgtgtggatcctgtggaataaaacccgtttcggtaaaaacatcttcgctatcggcggcaacccggaagcggcgcgtgtctccggcgttaacgtggcgctgaacctgctgatgatttatgccctgtccggggtgttttacgccttcggcgggctgctggaagccgggcgtatcggctcggcgaccaacaacctcggctttatgtacgaactggatgcgattgccgcctgcgtggtggggggcgtttccttcagcggcggcgtgggtacggttttcggcgtggtgaccggggtcattatctttaccgtcatcaactatggtctgacctacattggcgtcaatccatactggcagtacattattaaaggggcgattatcatcttcgccgtggcgctggattcactgaagtacgcgcgtaagaaataa

SEQ ID NO: 89919 - DNA, 717 bp, Enterobacter aerogenes
atgttaaagcgtgtgttatacagcctgttagtcctgctcggcctgctgctgttgaccgtgctgggtcttgaccgctggatgagctggaaaaccgcgccctatatttacgatgagctgcaggatctcccctaccgccaggtgggcgtggtgttgggcactgccaaatattatcgcaccggcgtgatcaatcagtattatcgttatcggatccagggcgcgctcaacgcctacaatagcggtaaggttaattatctgctgttgagcggtgacaacgccttgcaaagctataacgaaccgatgaccatgcgccgcgatctgattaaagccggcgtcgatccggcggatatcgtgctggactacgccggtttccgcaccctcgattcgatcgtgcgcacccgcaaagtgttcgataccaatgattttattattatcacccagcgcttccattgcgagcgcgcgctgtttatcgccctgcatatggggattcaggcacagtgctatgcggtgccttcgccgaaggatatgtggaccgtacgtcttcgcgagtttggcgcccgatttggcgcgctggcggatctctatatcttcaaacgcgaaccgcgtttcctcgggccgctgatccccattccggcgcagcagcatgaagttccggaggatgcgcaatcctacccggcggtcacgcccgagcagttactggagctacagaaagaaaaatag

SEQ ID NO: 89920 - DNA, 885 bp, Enterobacter aerogenes
atgcactctcgttttcaagctgctttgactaatctggcggcagacctgcaggcggccatcgccccgatgctcgcagacccgcacttcccggcgctgctcgaagccgatcaggtggcgacgctacaacaagcaacaggtttggatgaagacgcgctggcctttgcgctactgccgcttgccgccgcctgcgcccgcgccgatctttctcactttaacgttggcgctatcgcccgcggcgtgagcggtcgctggtacttcggcggcaacatggaattcctcggcgccaccatgcaacagaccgtccacgcggaacagagcgccatcagccacgcctggctgcgcggcgaaaaatccctgcgcgcgattaccgtcaactacacgccttgcggccactgccgccagtttatgaatgaactgaacagcggtctggcgctgcgcattcatctgccgggtcgcgaagcgcactccctgcagcactatctgccggacgcctttggcccgaaagacctggaaatcaaaactctgttgatggatgagcaggatcacggcttccctctcagcggcgatgcgctcacgcaggcggctattcaggcggcgaaccgctgccacgcgccgtacagcaactccccttccggcgtggcgctggagctgaaagacggcaccattttctgcggcagctatgcggaaaacgcggcgttcaatccgacgctaccgccgctacagggcgcgctgaacctgctgagccttaacggttacgactatccggatatccagcgcgcgctgttggccgagaaagccgatgcatcgcttatccagtgggatgcgaccgtcgcgaccctgaaagcgttgggctgtcagaatatcgaccgcgtgctgttaggttaa

SEQ ID NO: 89921 - DNA, 696 bp, Enterobacter aerogenes
atgatccatgaaatgtggtggtcgctaccgttaacgctgattgtctttttccttgcccgcaagctggcggcgcggtttaaatttccgctgctcaacccgctgctggtcgccatggtggtcattattcctttcctgctggtcaccggtatttcttatgaacgctattttgccggcagcaaaatccttaacgatctgctgcagccggcggtggttgcgctggcctttccgctatatgaacaactgcaccagatccgcgcgcgttggaaatccatcatcaccatctgctttatcggtagctgcgtggcgatgatcaccggtaccaccgtcgctctgctgatgggcgccaccccgcaaatcgccgcttccatcatgccaaaatccgtcaccacgccaattgccatggcggtcagcggcagtattggcggtattccagcgattagcgccgtgtgcgtcattttcgttggcatcctcggcgcggtgttcggccatacgctgcttaacgccatgcgtattcatactaaagcatcccgcggcctgtcgatgggtaccgcctcgcacgccctcggcaccgcgcgttgcgccgaactggactaccaggaaggggcgtttagctcgctggcgctggtactgtgcggaattattacctcgctggtcgcgccttttctgttcccggtgatcgtcgctgttgtcggataa

SEQ ID NO: 89922 - DNA, 432 bp, Enterobacter aerogenes
atgatgaatggcagttcatcaagggttattaccatgagtaagtcgctgaatattatctggcagtacgtgcgagctttcgtcctgatttacgcctgcttgtatgcaggcatttttatcgccgggctactgcccatcacgatccccggcagcattatcggcatgctgattttgttcgtgctgctggcgctgcaaattatgccgccgcagtgggtcaaccccggctgcaacattctgatccgctacatggcgctgctgttcgtgcctatcggcgtcggcgtaatgcagtactgggatttactgcgcgcgcagctgggaccggtggcggtgtcctgcgccgtcagtactttattagtctttttggtggtgagctggagctcgcatctggtccacggtgaacgcaaaatcatcgggcaaaaaggaagtaaaaaatga

SEQ ID NO: 89923 - DNA, 906 bp, Enterobacter aerogenes
atggcgaactggacgcaaaagttgaagctgcagcatttgaaaatgctggtggcgctgggtgagcaaggcaatctcacgcaggtcgcgaaaatgatgaatattacccagcccgcgctctctaagtggctgacgcaatttgaagaagaagtcggcatgccgctctttgagcgccacagtaagggcctgcgcccttcggaaggcggcaaactgctgcttcagcacgcccagcggctaatcaacgatatgtcgcgctcgcagtacgagatcgagcgctttaagcaaggcggactggtcggcagcctgatgatcggctgctctcccgtggcgacagactgcgtggcgcaggcgatcctcgccctgcttaaagagatgccgaccctgcatctgaatatcgaagaaaaagtgatgaccccactgctgcacgacctgctctccggcgtggtcgatgtggtcgtcggacgtgttggcggccgcgcgctggaactgccgctcaactatcgtgtgctctataccgaaccggtgtgcttcgtcgcccgtcccgaccacccgctggctagcatgccgcgtttgagctgggcggatctcgccgtctggcgctggatagtctggcctaccggcacgcccattcgtcagagcattgataacgcgctggtcgataacggcgtcatgctgccggagaatactatcgagtcagcctcaatgaatgtcaccagcaatttgctgcaaagcagcgatatgatctctattctttctttgcggctggcgcagcattacgccgaacatcggcagctgacgattctgaatttgccgcgtattgaacaaaaaggtagcgttggggtgttctggcgcaaaagcgaagtaccatcgctggcgctcactcgttttctgcactatctcgcagaataa

SEQ ID NO: 89924 - DNA, 1359 bp, Enterobacter aerogenes
atggctcaacgacgtgaactacagacgttacttaacgcagcgccggttggcgccctgcagtggcgtgtgattatctgctgttttctggtggtgatgcttgatggatttgacaccgccgccattggctttatcgctcccgatatccgtgttcactggcaattgagcgccagcgacctcgcgccgctgtttggcgccggactattgggattgaccgccggggcgctgctctgcggcccgctttccgaccgtttcggtcgtaaacgggtgattgagttttgcgtggcgctgtttggcctgtttagtctgctctccgcattctcgacgaatctagagatgctggtttttctgcgtttcctcaccggtctgggattaggcggggcgatgcccaacaccatcactatgacttcggaatatctgcccgcccgccgccgcggcgcgttagttaccctgatgttctgcggcttcacgctcggttcggcgctgggcggcgtggtgagcgcccaactggtggcgcatatcggctggcacggcattctggccttaggcgggatcctgccgctgctgctggccgtcgcgctgctgtgggcgctgccggaatcgccgcgctggcaggttcgtcgcgggctgccgcaggcgaccatcgccagaaccgtcagcgctatcaccggcgagcgctatcccgagacccatttctggctcgacgaaccggcagccgggccgaaaggcagcattagccagctgtttgccggccgacaactggcgatcaccttgatgctctgggtggtgttctttatgagcctgctgattatctatttgctctccagctggatgccgacgctgcttaaccatcgtggtatcgatttacagcacgcttcgtgggtgaccgccgcgtttcaggtgggcggcacgctcggcgcactgttgctcggcatcctgatggaccgtttcaatcccttctttgtactggcgctaagttattgcctgggcgcgttgtgcatcgtgatgatcggtttaagcgaaaacggattgtggctgatggcgctggcgattttcggcactggaattggcgtgagtggttcgcaggtgggcctgaatgcgctgaccgccaccctttacccaacccagagccgcgcgaccggggtcagctggtccaacgccatcggccgctgcggcgccatcgttggttcgctctccggcggcatgatgatggcgatgaatctctctttcgacacgctgttttacgttatagcggtaccggcggcgatcggcgcggtgatgctcatcatgctgatgctggcggttcgccgtcctggatctgtacccgacgcgctgccctctgcgggtgtcgcgaataaataa

SEQ ID NO: 89925 - DNA, 1038 bp, Enterobacter aerogenes
atgaccctatctactccgcaatcgaaccgcgaacgccagcagttctaccagcatattgccgggcagaatctgacaccgctgtgggaatccttgcaccacctggtcccgcaaacaccgaatgccaactgcgccccggcgtactggaactatcaggaaattcgcccgctgctgctggaaagcgggcagttaatcggcgctaaagaggcggtgcgtcgggtactggtgctggagaacccgcagctgcgcggccagtcgtccattaccgcgtcgctgtatgccggcctgcagctcatcatgccgggcgaggtggcgccgagccaccgtcacaatcagtcggcgctgcgctttatcgtggaaggccacggcgcgttcaccgccgtcgacggcgagcgcacgcaaatgcgccccggcgattttattctgactccgcagtggcgctggcacgatcacggcaatcctggcgatgaaccggtggtctggctcgatggtctcgatttaccgctggtcaactatctcggctgcggatttgctgaagattatccgcaggagcagcagccggtgacgcgtaaagagggcgactacctgccgcgctatgctgccaatatgctgccgctgcgccatcaggtgggaaattcctcgccgatttttaactaccgctacgaccgtagccgcgaggcgctgcacgacctgacccatcttggcgaggccgacgaatgggacggttacaagatgcgctacgtcaacccggtcaccggcggctatccgatgccctcgatgggcgctttcctgcaactgttgcctaaagggttccggtcgcgggtggcgaaaaccaccgatagcaccatctaccacgtagtagaaggtagcggccaggtgatgattggcgaacaaacctttgcattccaggcgaaagacatcttcgtggcgccaacctggcacggcgtatcgttcaacgccagcgaagagtgcgtgctatttagcttctcggaccgtccggtacaggaggccttaggcctgttccgcgaagcgcgttattaa

SEQ ID NO: 89926 - DNA, 705 bp, Enterobacter aerogenes
atgatgactcaatacgtttttgcaccccaggcgccgattagcatcccggttgttggcagcgatgagcagttcccggtacgccgcgtttactgcgttggccgtaactatgccgcccacgctcgtgaaatgggcttcgatccggatcgcgaaccacctttcttcttttgtaaaccggcggatgcggttgtgccggtggcggctggcgaaacgctggatctgccgtatccggcgcagaccgacaactatcactacgagattgagctggtggtcgccatcggcaaagcgggacgcgacatcccgctggagcaggcgcaggaatatatctggggctatgccaccggactcgatatgacccgccgcgaccgccagatggagatgcgccagatggggcgcccgtgggagataggtaaagcgttcgatctttccgctcctgtcgcgccgctgcataaagccgccgaggcgcgcgaggtgaatcaggccgggatctggctgcaggtgaatggtgaagatcatcagcgtagcgatatacgccacctcatctggtcggtaaatgaaaccatcagctatctctcgggcttttttgaactacagcccggcgatctgattttcaccggcacgccggagggcgtcggcgcggtggtaaagggggatgtgattaccggcaacgtagacggactgacgcctatcgccgtgcgcgtggtgtga

SEQ ID NO: 89927 - DNA, 645 bp, Enterobacter aerogenes
atgaagctgtacagtttttttaatagctctgcctcatatcgggtgcgcatcgcgctggccctcaagggcatcgattatcagagcgttggggtgaatatccgcatcggggcgcagaatgcgctggagtaccggcggctcaatccggttgggctggtgccgacgcttatcaccgatgacggtgaatcgctgggtcagtcgctggcgattgttgactggcttgaccgccactacccacaaatgccgctgctgccgcaggaggatcccgcgcggatgcgggtgctggagatggtctacgccatcgcctgcgatattcatccgattaataacatgcgggtcttgcgctaccttagcgatgagttgaaggtcagcgaagcggacaaaaaacgctggtatgcccactggatccagcaggggctgagcgcgctggagcaactgctgcgacaatcgaaatccggcgctttctgcatcggcgatagaccaacgctcgccgactgttgtctggtgccgcaatgggccaacgcgcagcggatggggtgtgatttgagccattatccgcgctgccaggcggtttacgacgcctgtacccggttaccggcgtttatcgccgccgcgccggaaaatcaacaagacaaaattccggcctag

SEQ ID NO: 89928 - DNA, 1194 bp, Enterobacter aerogenes
atggcgaaagtgacgcgagcaattatcgttggcggcggcattggcggcgcggcgacggcgctctctctggcgcgccaggggatcaaagtgatgctgctggaaaaggcgcatgaaatcggtgaaatcggcgccggtattcagctggggccgaatgcgttttcagcgctggatagcctcggcgtcggcgaagtggcgcgccagcgcgcggtgtttaccgaccatatcacgatgatggatgcggtgaatggggaagaggtagtgcgtatcgagaccgggcaggccttccgtgaccatttcggcggcccgtatgcggtgatccatcgggtggacattcacgccaccgtctgggaagccgcgctgacccatcccggcgtggaataccggacttcaactcaggtggtggatatccgccagaccgccgatgacgtgacggtctttgatgacaaaggcaacagctggaccgccgatattctgctgggttgcgacggcgtgaagtcagtggtgcgccagagtctgctcggcgatgcgccgcgggtcaccggccacgtggtgtaccgcgcggtgatcgaggccgccgacatgccggaagacctgcgtattaacgcgccggtactgtgggccgggccgcattgtcatttggtgcattatccgctgcgcggcggcaaacagtacaacctggtggtcaccttccatagccgcgaaagcgaagagtggggcgtgcgcgacggtagtaaagaagaggtgctctcttactttaaagggattcatccgcgcccgcggcagatgctcgacaagccgacttcctggcgccgctggtccaccgccgaccgcgagccggttgcaaagtggggcaacgatcgcattaccctggtcggcgatgccgcccatccggtggcgcaatatatggcgcagggcgcctgcatggcgctggaggatgcggtaacgataggtaaagcgctgcagcagtgcgacggcgacgccgctcgcgccttcgcgctatacgagtcggtgcgtattccgcgtaccgcgcgaattgtctggtcaacccgtgaaatggggcggatttatcacgcggcgggggtcgaacgtcaggtacgtaatcttctctggaagggcaaaacgcaggatgaattttaccgcggtatcgagtggctttacggctggaaagaggataactgcctcgaaccacgctaa

SEQ ID NO: 89929 - DNA, 933 bp, Enterobacter aerogenes
atgcgtgtattactggcgccaatggaaggcgtgctcgattcgctggtgcgcgagctgctgaccgaggttaacgattacgatctgtgcatcaccgaatttctgcgcgtggtggaccaactgctgccggtaaaatcgttctatagactgtgcccggaactgcaccatcaaagccgtactccgtccggcacccgcgtgcgcgtgcaattgttggggcaatacccgcaatggctggcggaaaacgccgcccgcgcggtggagcttggctcttggggcgtggatttaaactgcggctgtccatcgaagctggtgaacggcagcggcggcggcgcgacgttactgaaagatcccgagcttatctatcgcggggcgaaagccatgcgcgaagcggttcccgatcacctgccggtgacggtgaaagtgcgcctcggctgggacagcggcgaacggcgctttgaaatcgccgacgcggtacagcaggcgggcgccagcgagctggtggtgcatggccgcacgaaagaggatggttacaaagctgaacgcatcaactggcaggccatcggcgaaatccgccagcgcctgactattccggtggttgctaacggcgaaatctgggactggcaaagcgcgcaggagtgcatggccgctgccggctgtgattcagtgatgattggccgcggcgcgctcaacgtgccgaatctcagccgggtaattaaatacaatgaaccgcgtatgccgtggccgcaggtggttgagttactcaaaaaatatactcagctggaaaagcagggggataccggtttatatcacgtggcgcgcattaagcagtggctgggctatttacgcaaagaatacacggaagcgcttggcctctttaatgaaattcgcaccttgcaaacctcagcagagatagcgaaaacgattgcacgttattag

SEQ ID NO: 89930 - DNA, 834 bp, Enterobacter aerogenes
atgctaatcgccaaagtacttaataataacgtggtggtagtggtcaacgagcagcagcgcgaacaggtggtgatggggcgagggctggcctttcaaaagcgcgtgggcgactcgttggacgaaagtaaaattgaaaaagtcttcgccttacaaagcgatgaactggttggccgcttaggcgaattactcagtcagataccgttagaagtgatgactacctgcgatcgtatcatcgacctggcccgcgggcggttgggaaagttacaggaaagtttatatatcaccttaactgaccactgtcactttgccatcgagcggcagaaaaacggcgtcgcgattcgcaacgtgctgctgtgggagattaaacggctgtatccgaaggagttcgaactgggtcaggaggcgagggccatcatcgcccgccggctgggcgtcgagcttgccgaggatgaagccgggtttatcgctttgcatctggtgacggcgcagctcaacagcgaaatgccggaagtgatgcacgtgacgcgggtgatgcaggagatcctgcaactggtgaagtatcagctgcagcttaactatgacgaagagtcgctcagctaccagcgctttgtgacccatctgaagtttttcgcccagcgcatgttaacgcgaacggtagtgcaggatgacgacgtcacgctgcacagcgcggtgaaagataactacgccaaagcgtggaagtgcgcggaaacggtggcgaagcacttgcaaaagaattatcaacgggcgctgaccaccgaagagattatgtttcttgccattcatattgaacgggtaagaaaagaggggcgttaa

SEQ ID NO: 89931 - DNA, 1968 bp, Enterobacter aerogenes
atgatgcaggcaaaacctgagcgcgacgccaaccggcgtggttctcgggtttttttatttttaatactcagtcgccggttgtctgcgggcagcggcagtaaggaaaagagcatggaatataaagcactcgcgcaggatattcttaaccgcgtcggcggcaaagagaatattgtgagtctggttcactgcgcgacacgtctgcgtttcaaattgaaggataatgcgaaggccgatgccgaagggctgaaggcgaaccctggtgtgatcatggtagtcgaaagcggcggccagtttcaggtggtcatcggtaaccatgttcacgatgtctggctggcagtgcgccagcaggcggggttaagcgacgacaacgaaccggtaacacaggagaaagcggcaaaaagctcggtattaagtcaactcatcgacatcatctccggcatctttaccccttttattggcgtgatggcggcgacgggtctgctgaaaggtctgctggcgctggcgctaacctgcggatggctcacgccgcagcaggggacctataaaatctggtttgccgccagcgatgcgctgttctttttcttcccgctgtttcttggctacaccgccggcaaaaagtttggcggcaacccgtttatctcaatggtgatcggcggggcattaacccacccgctgatgattcaggcctttgaagccagtcagacgggggcgcccgtggagcacttcctcggtataccggtgacctatatcaattatagctcctcggtgatcccgattatcctcgcctcctgggtctgctgctggctggaacgtaagagtaacgcggtgctgccgtcagcgatgaagaacttttttaccccggcaatctgcctggcggtggtagtgccgctgacctttctggtgataggcccgctggcgacctggctgagccacatgattgccaatggctatcaggttatctacgtttttgccccatggctggcaggcgcagtgctgggcgcgctatggcaggtatgcgttattttcggcctgcactgggggctgataccgttgatgatcaataacatgaccgtgttggggcatgattctatgctgcccattatcctcccggcggtgattgcccaggtgggcgccgtgctgggaatactgctggccacgcgcgattcgcgtcagcggatgctggccggttccgcgttttccgccgggctgtttggcatcacggagcctgccatttatggcctgacgctgccgttacgtcgcccgtttatcttcgggtgtatcgccggcgcgattggcggcgcgatcaccgccttcagtaatagctacgcctattcctttggggtgccgaacattttctttccggcgcagatgatcccgcccggcggtattgattttagcgtgtggggcggattaatcggcaccggggtggctttcattctcgcctgcgtattgaccttcttcgccggcatgccgcgcagccaggctgaacaggcgatcgtcgtcgcgcctgcggcggaaaacgatattctggcgccgatgtccggcagcgtgctggccctcgaccaagtgccggatagcaccttcgccagcggactgctgggtaaaggcgtggccattattccagcggtgggcaaggtcattgccccgttttctggcgaggtcgcctcgctgtttcagactaaacacgccatcggcctgctgagcgacagcggcattgagctactgatccatgtcggcattgataccgtcaaactcgacggcgtaccgtttaccgcccatgtcaaagagggggataaagttcaggccggcgatttgctgctggagttcgaccgtcaggctattctggacgccggttacgacctggcgaccccgattattatcagcaacagcgatgaataccgtagcgttgagattgtatccgcgagcgtcgtggatgccggccagccgctgttgtccgtcagccattaa

SEQ ID NO: 89932 - DNA, 1395 bp, Enterobacter aerogenes
atgaaaacattcccacagggctttttatggggcggcgccaccgcggcaaatcaggtcgaaggggcgtatctggaagatggcaaaggtttatccacctccgacgtgcagccgcaaggggtattcggcgacgtcgtggagcgcgttgcgggcgacagcggtattaaagatgtggcgatcgatttttaccatcgttacccgcaggatatcgcgctgttcgctgagatgggcttcaactgtctgcgggtatcgatcgcctggacgcgtatcttcccgaacggtgatgacgccgagccgaacgaagccgggctggccttctacgacaagctgtttgccgagatggccgcgcataatatcactccgctggtgacgctatcgcactatgagatgccgtgggcgctggtaaaaaactatggcggctggggcagtcgcaaggtgattggctttttcgaacgctacgccagaacggtattcagccgctataaaaatcaggtcaaactgtggctcacctttaacgaaattaatatgtcgctacatgcgccaatgaccggcgtcgggctgccggccggtagcagcaaaggcgaagtttatcaggctatccaccaccagctggtggccagcgcgctggcggtcaaagcctgtcatgaactggtaccgcaagggaagattggcaatatgctgctcggcgggctgatgtatccgctgagctgcaagccggaagatgtctttgaaacgctgcagcaaaaccgcagctggcagttcttcggcgatgtgcagtgccgtggcgcctatccaggctacatgcagcgctatttccgcgaaaacgatattacgctgaccatcaccgacggcgaccgggaagcgctgaaagagaccgtcgattttatctcctttagctactatatgactggctgcgtcaccgccgatgaagcgctgaaccagcaggcgcgcggtaacattctcagcatggtgccgaatccgcatctggcaagctcggagtggggctggcagatagacccgctggggctgcgtaccctgttgaacgtactgtgggaccgctatcagaagccgttgtttatcgttgaaaatggtctgggggcgaaagataaaatcgaagccgacggcagcatcaacgatgactatcgcatcagctatctcaacgatcatctggtgcaggcgcgcgaagccattgctgacggcgttgaactgatgggctttaccagttgggggccaatcgatctggttagcgcgtcgaaggccgagatgtccaagcgctacggttttatctatgtcgatcgtgacgatcgcgggcaggggacgcttgaacggcgtaagaagaaaagcttcgcctggtatcaggcggtgattgccagtaacggcggtagcctgcaggaataa

SEQ ID NO: 89933 - DNA, 735 bp, Enterobacter aerogenes
atgagtcagaacatttatgacgatcccggtttctttgccggttacgccacccttgatcgttcggtgaaggggcttgacggcgcgccggagtggccagcaattcagcgcctgctgccacagttagacggcctgcgagtagtcgatctcggctgcggatacggctggttttgccgctgggcgcagcaacagggggcaaaacagataatcggtttcgatctctccagccggatgctagagcgcgcgcgggagatgaccaccggcgaaactatccaatatcgctgcgccgacctgcaaaccctgacgctgcccgccgagagctgcgatctggtctacagttcgctggcgctgcactatttaccggatgtcgcgccgctgttcgccacgctctatcaggcgctggttcccggcggtacgctggtcttctccgccgaacatcccatctataccgcgccgctgcagcagggctggcaggtagatgaaaaggggcagaaacgctggccggtcagccactatcagcaggaaggcgaacgtatcagcaactggtttgccgagggggtgattaaacagcatcgcaaactctcaagctggattaacgcgctcatcgccgccggttttgtgctggagcagcttgatgagtggggcccgagcgccgagcaaatcgccgcccaaccggcgctggaggaagagaaagagcgtccgatgatctttttactgcgcgccggtaaaccggcttaa

SEQ ID NO: 89934 - DNA, 1440 bp, Enterobacter aerogenes
atgaaccttacactgagcaaaagcgtgctggcggcactgccactggccatcgcgctggctggctgcgcgccatcccatgacattggcggccctttaaagcagcaaaccccggcatctcatgtttctatggatcttcccgccgccgtaaaaaatggctggccgcacaccgactggtggaaagactaccacgatgcccagctggataatctgattcagcgcgcgttagccaatgccccggacatgcaaattgccgcgcagcgcatcaaactggccgaagcgcaggcgcgaatgtcgcaggcgaatcttggtccggagatggatttctccgccgatatcgaacggcagaaaatgtccgcggaaggcctgatgggaccgttcgctaccgataccgacggcaacaccgggccctggtacaccaatggtacctttggcctgactgccggttgggatctggatctgtgggggaaaaaccgtgcgttggtgaaagcgcgtatcggcgaagtgaaagcccaggtcgccgagcaggcgcagacccgcgagctgctggccagcagcgtggcgcgcctgtactggcagtggcagaccgaagcagcggtgaaaacggtgctgcagcaggtcaaaagcgaacagaataatattgttagcgtcgataccgcgctctatcagcgtggcatcaccaactccgccgaaggggcggagaacgacattaacgtcagcaaaaccgatcagcagctggccgacgtggcgggtaatatgaaagagattgaagcgcggctgatggcgttaaccaacaaccagagccagtcgctcaatctgcgagcggcgccgctgcccgcagtcagcgcgcaaatgccgagcgaactgggttatgaactgctggcccgccgtccggatctgcaggaagcccactggtatattgaatcctcgctaagcgaagttgatgcggcgaaagcggcgttttatccggatatcaacctgatggcgttcctgcaacaggatgcgctgcatttaagcgatctgttccgccattcggcgcagcagatgggcgtcaccgccgggctgacgctgcctatctttgatagcggcaggctgaatgccaatctcgacatcgccagcgcgcagaacggcctgtcgatcgctaaatacaacaaagccgtggtcgatgcggtgaaccaggtagcgaaaaccgcaagccaggtagagacgctgatggagaaaaaccagcagcagcagcaggtggagaaagacgcgcagcgggtggtcaatctcgcccaggcgcggatgaatgcgggaatcttatccggttcccgcgtgagcatggcgaagctgcctgcgctacaggagcgaatcaccgcactgcgtctgcacggccaatggctggatgccagcattcagctgacttccgcactgggcggcggttatcaccagacgacaaaataa

SEQ ID NO: 89935 - DNA, 594 bp, Enterobacter aerogenes
atggatatcaatcacctgatttcccaatacggctacgcggcgctggttattggcagcatcgcagaaggtgaaaccatcaccatccttggcggcgtggcggcacatcagggtctattgaagtttcctttggtggtcatcgccgtggccttaggcggcatgatcggcgatcagctgttgtatttccttggacgtcagttcggcggtaagctactgcgccgcttctcgcggcaaaaggcgcgcatccgtaaagcgcagcgcctgattcagcgccatccctatctgttcgttatcggcacccgctttatgtacggctttcgggttatcggcccggtcttgatcggcgccagccgcttgccgccaaaaatatttctaccgctgaatatttttggcgccatcgtttgggcgctgatttttactacccttggctatcttggcggcgaagcgatcggcccgtggctgcaccatctcgatcagcacgttaaacactggatctggctgatcctcgtagtggcgctggtggtcggggttcatctgtggctgaaacgccgggaagcgaaaagaaaagaggaagatacagaggatgataatcaatag

SEQ ID NO: 89936 - DNA, 588 bp, Enterobacter aerogenes
atgaaccatgtctggggactcttcgctcatcctaatcaagagatgagcgtgatcaagagtgaaaatgagaccgtttcgcaccactacacgcaccatgtgctggtgatggcggcggttccggttatctgcgcctttatcggtacgacgcagctcggctggaacttcggcgacggtacggtgattaagctctcgctgatgaccgggttggtattagcggtactgttttacgccgtgatgttagcgggggtggcggtgatggggcgggtgatctggtggatggccagaagctatccgcagcagccgtcgctgaaacgctgtatggtctttgccggctacgtcgcgacgccgctatttttaagcgggatcgtggcgctctatccgctggtatggctgtgcgcgctgataggcaccatcgcgctgttttacaccggttatctgttgtatctgggtattccgaccttcctgagtattaataaggaagaggggctcagcttcgccagctcaaccctggctatcggggtgctggtgctggaagtgctgctggcgatcaccgtcgtgctgtggggctacgggtaccgactcttctaa

SEQ ID NO: 89937 - DNA, 951 bp, Enterobacter aerogenes
atgatgccgaattttcgaatttctttgctcagcctgactttgctgctggctgtgccttttgcgccccaggcgatagcaaaaaccactgcggtaaccgccgcttcacagccggacatcgcttccggtagcgcgatgatcgtcgatctggcgaccaagaaaatcatttacgccagccagcccgatttggtgcgcccgatggcgtctattaccaaagtgatgaccgctatggtagtgctggatgcgcatttaccgctggacgaaatgctgaccgttgatatcagccagacgccggagatgaaaggtatctattcccgcgtacgacttaacagccaaatcagccgccgcaatatgctgctgctggcgctgatgtcttcggaaaaccgtgccgccgccagcctggcgcaccactatcctggcggttataacgcttttatccgcgcgatgaacgccaaagcgcaggcgctgggtatgacccatacacgctatgttgagccgaccggcctgtcggtgcataacgtctccacggcgcgcgatctgactaagctgctgatcgccagcgaacaatatccgctgatcggccagctaagcaccaccaaagaagataccgccacctttgcgcatccggcgtataccttgccgttccgcaataccaaccatctggtgtatcgcgataactggaatattcagttgaccaaaaccggctttaccaacgccgccggccactgcctgattatgcgcacggtgattaatcaacgcccggtggcgctggtggtaatggacgcgtttggcaaatatacccactttgccgacgccagccgtttacggacctggattgaaaccggcaaggtgatgccggttccggcatccgcattgagttataaaaagcagcgtgaagcgcagatggcggaagcgatgctgaaaggcggcacgcagaccgcgcagaacgattaa

SEQ ID NO: 89938 - DNA, 555 bp, Enterobacter aerogenes
atgtccgccaaggataagttacaagacgccgacttagagatccgcgaagcgttgcctgatgacgcgcatgcgattgccgcgctgtacgtctggcacgtgcttaatggccgcgcctcgtttgaagagatcccgcctaccgtcgacgaaatgcgcaagcgaatcaaaaccgtgcgcgataacgggcttccgtggctggtcgcgctgtggcgcggcaccattgtcggctactgctacgccaccttttaccgccctcgcccggcctatcgctatacgctggaagagtccatatacgttgagtccggcatgggcgggcgcggcatcggcagcgcgctgctgacacgcctcatcgcgcaatgtgaacaggggccgtggcggcagatgctggcgattatcggcgacggacataacaacgccggctcgattgccatccataagaaatttggctttaccgttgccggacagctgcgcagcgtcggctataagatgggcgactggcgcgataccctaatcatgcagcgccagcttggcgacggcgactggacgttaccggagtga

SEQ ID NO: 89939 - DNA, 1734 bp, Enterobacter aerogenes
atgtcatctgcaacaacaataaataaccctccctttttggcggaactggcgcggctggttggctcctcgcatctgttaaccgatccggcgaaaacccagcgttaccggaaaggtttccgctccggccacggcgatgcgctggcggtggtgttccccggtaccctgcttgaattatggcgagttctcagcgcctgcgtccaggctgacaaaattatcctgatgcaggcggcgaataccggcctcaccgaaggctccaccccaagcggcaatgattacgatcgcgaaatcgtcattatcagcacgctgcgtctggataagctgcacctgctggataagggtgagcaggtgctggcctaccctggcaccaccctctattcactggaaaaagcgctaaaaccgctgggccgcgaaccgcactcggtgatcggctcttcctgcatcggcgcatccgtcatcggcggtatctgtaacaactccggcggatcgctggtgcaacgcggaccggcctataccgaaatgtcgctgttcgcgcagattgacgccgacggcaaactgaaattagtcaaccatctgggaatcgatcttggctcaacgccggagcaaatcctgagccgcctcgacgatgaccgtatcaacgatgccgacgtgcagcacgatggccgccacgcccacgatcacgattacgtcacccgcgtgcgcgacgtcaacgccgataccccggctcgctataacgccgacccggaccgcctgttcgaatcctccggctgcgccggcaagctggcggtcttcgccgtccgtctcgatacttttccggcggaaaagcgccagcaggtgttctatatcggcaccaatcagccggaagtgctcaccgaaatccgccgccacatcctcgctgaattcaataatctgccggtagccggtgaatatatgcaccgcgatatttacgatatcgccgaaaaatatggcaaagacaccttcctgatgatcgataagctcggcaccgacaaaatgccgttcttcttcaccatgaaggggcgcaccgacgcgatgctggaaaaagtctccctgttcaagccgcacttcaccgaccgctttatgcagaagctcggtcacgccttcccggcgcacctgccggagcgtatgaaaacctggcgtgataagtacgaacatcatctgctgctgaagatggccggcgacggcatcgaagaagcgcaaaagtggcttacggagtatttccagcaggccgaaggcgatttctttgtctgtaccgcggaagaaggcagcaaggcattcctgcaccgcttcgccgccgccggcgcggcgatccgctatcaggcggtacatgccgacgaagtggaagatattctggcgctggacatcgccctgcgccgcaatgacaccgaatggttcgaacatctgccggcggaaatcgacagccagttggtctacaagctttactatggccactttatgtgtcacgtcttccaccaggattacatcgtgaagaaaggggtagacgcgcacgaactgaaggaaaaaatgctggatctgttgaaagcgcgcggcgcgcagtacccagcggagcacaacgtcggccatctgtatgaagcggcggagagtgtaaaacgcttctatcgccagaacgatcccaccaacagcatgaatccggggatcggcaaaaccagcaaacaaaaatactggggcgaggtgcagaagccgacggaagcacaataa

SEQ ID NO: 89940 - DNA, 2298 bp, Enterobacter aerogenes
atgaaatggttgtgtactgttggcgtcgccgtgagcctggcgctgcaacccgcgctggcggatgaactgtttggtaaccatccgctgacgcctgaggcgcgagatgcgtttgttagcgaactgctgaaaaaaatgacggtcgatgaaaaaatcggtcagctgcgcctaatcagcgtcggtccggataacccgaaagaggcgatccgggaaatgatcaaagacggtcaggtaggggcgatttttaataccgtgacccggcctgatatccgcgtgatgcaggatcaggtgatgcagctaagccgcctgaagatcccgctgtttttcgcctacgatgtgctgcacggccagcgtaccgtcttcccgataagcctcggcctggcctcctcttttaatctcgacgcggtgaatacagtcggacgtatctcggcctatgaagcggctgacgatggtctcaatatgacctgggcgccgatggtcgacgtctctcgcgacccgcgctggggccgcgcctccgaaggttttggcgaggatacttacctgaccaccgtgatgggtaaagcgatggtggagtcgatgcagggtaagagcccggcagaccgctattcggtgatgaccagcgttaaacacttcgccgcctacggcgcggttgaaggcggcaaagagtacaacaccgtcgatatgagcccgcagcgcctgttcaacgactacatgccgccgtataaagccggtctcgatgccggcagcggcgcggtgatggtggcgctaaactcgctcaacggtaccccggccacttccgattcctggctgctgaaagacgtcctgcgcgaccagtggggcttcaaaggcatcaccgtttccgaccatggcgccatcaaagagctgattaaacacggtgtcgcctccgacccggaagacgcggtgcgcgtcgcgctgaagtccggtatcaacatgagcatgagcgatgagtactacagcaaatatctgccggggctggtgaaatccggcaaggtgacgatggctgaactggatgacgctacccgccacgtgctcaacgtcaagtatgatatggggctgttcaacgatccgtacagccatctggggccgaaagcatccgacccgcaggacaccaacgccgaaagccgtctgcatcgtaaagaggcgcgtgaagtggcgcgagaaagcctggtgctgctgaaaaatcgtctcgatacgctgccgctgaaaaaatccggcacgatcgccgtagtaggcgcgctggcggatagcaagcgcgacatgatgggcagctggtcggcggcgggcgtagccgatcagtcggtcaccgtgctgaccggcattaaagaagcgctgggcgataaaggcaaagtgatttatgccaaaggcgctaacgttaccgacgataaaggcattgtcgatttccttaacctgtatgagaaagcggtgcaggtcgatccgcgctcgccgcaggagatgatcgatgaagccgtggcggcggcgaaacagtccgacgtggttgttgcggtagtgggtgaagcgcagggcatggcgcatgaggcttccagccggaccgatatcaccctgccgcaaagccaacgcgatctgattagcgcgctgaaagcgaccggtaagccgctggtgctggtgctgatgaacgggcgtccgctggcgctggtgaaagaggatcagcaggcggatgcgctgctggagacctggtttgccggtactgaaggcggccatgcaatcgccgatgtgctgtttggcgattacaacccttccggtaagctgccgatgtctttcccacgttcggtggggcagatcccgacctactacagccatctgaataccggccgtccgtataatccggaaaagcccaataaatacacctcgcgttattttgatcaagcgaatggcccgctgtatccatttggttatggcctgagctacaccaccttcagcgtttcggatgttaaaatgtcggcgccaacgatgccgcgcgacggcagcgtgaccgccagcgtgcaggtgaccaacaccggcaaacgcgaaggggcgacggtgatccagctttatttgcaggacgtgaccgcgtcgatgagccgcccggtgaaaatgctgcgcggctttaagaaggtgaatcttaagccgggtgagacgcaaaccgtcagcttcccgattgatgttgaagcgctgaaattctggaaccagcagatgaaatacgttgctgaaccgggcaaattcaacgtctttattggggtggattccgcccgcgttaagcagagcgaatttgagttgctgtaa

SEQ ID NO: 89941 - DNA, 915 bp, Enterobacter aerogenes
atgatggcaacgaaatggtcaggcgcgttggcgctagtggcgctggtcagcctgccgctgcaggcggcggaaccggtgaaagtgggctcgaaaatcgatacggaaggggcgctgctcggcaatatcattttgcaggtactggaaagccacggcgtgaaaacggtcaataaagtccagcttggcaccacgccggtggttcgcggagcgattaccgccggtgagctggatatctatccggaatacaccggcaacggggctttcttctttaaagatgaaaatgacccggcgtggaaaaacgccaaacagggctatgaaaaagttaaaaagctggacgcggaaaaaaacaagctgatctggctgaccccggctcccgccaataatacctggactatcgcggtgcgacaggaagtggcggagcaaaatcatcttgcttcattggccgatcttagcgcctatctacagaagggcggcgattttaaactggcggcttccgcggagtttatcgagcgcgccgatgctctcccggcgttcgaaaaagcctatggctttaagctcaatcagaatcagctgttgtcgctggcgggcggcgataccgcggtgaccattaaagcggcggcgcagcaaacctccggcgtaaacgcggcgatggcctatggcaccgatggcccggtagcggctttggggctgcaaaccctgagcgatccaaaaggcgtacagcctatttacgccccgacaccggttgtgcgtgaagcggtgctgaaggcgtatccgcagatggcgcagtggctggaaccggtgtttgccagcctcgatgaaaaaacgttgcagaaattaaacgccagcattgccgttgaagggcgagacgcgaagagcgtagccgccgattacctgcaacaaaaagggctgctgaagtaa

SEQ ID NO: 89942 - DNA, 1158 bp, Enterobacter aerogenes
gtgactattcgttgttataaccgcgtggcgctgctgctcacgctactgctgttggccgtgacggcgctgccattcgtcacttatgcccctaatcgtctgctttccggtgaagcgcgctggctatggacgcagatgccgtggctggcggcggcgcagctggcgggcgcgctgctgctgttgttattgtgctggatcccaggccgtctggcgctgctcggtagcctgcttattgccgatttgctcctgccactactaatgtggggcgccggagacatcgcgctacagctggtgcaacagggctccccgctggcgcgtacctctcccggaagcggattatggctttcgctggcgctatgtctgctactcgccagcgatactatccgccgcctgactccgcacgctttatggcgttggctactgaatgcgcagctttggctgctaccgtgcctgctgctgtggcatggggcgctcgatcaactctctttgctgaaagaatatgctaaccgtgaggatgtctttaatgacgcgctgcgtcagcacctgtggttgttgttcgggacgttgctgcccggattattattgggtctatcgataggcttcgccctctggcggcgaccgcactggcaggcgccagtatttaccttccttaatgtgattcaaactattccttcggtggcgctcttcggtttgttgatcgcgccgttggccgggttgacgcgccattttccgctactgggcaaaattggcatttccggaaccggcctggcgccggcgctaatcgcactggtgctatatgcgttattgccgctggtacgcggggtggtgaccgggctgcaacaggtaccacgcgaggcgctggaaagcgcaaccgcaatgggaatgaacggctcccagcgttttcgccaggttcagttaccgttggcgctgccggtcctgttgcgcagcctgcgggtggtcagcgtacagactgtcggtatggcggtggtagcggcgttgataggcgcgggcggcttcggcgctttggtgtttcaggggctcctcagcagcgcgctggatttggtgctgctgggcgtcattccgacgattgcgttggcggtagtcgtggatgccgtgtttgcactgtggagcgcgttactaaaaggagaaacgcatgattga

SEQ ID NO: 89943 - DNA, 936 bp, Enterobacter aerogenes
atgattgagttcgacggggtgaataaagcctttgccgggcaacccgcggtgaaagatctcaacctgcatctgcgcgagggggcgttttcggtgctgattggtacttccggctccggaaaatcaaccaccctgaagatgattaaccaactggtggaacaggatagcggagtgatacgcttcgccggcgaggatatccgtcgacagccattgctggcgctgcgccgccgtatggggtacgccattcagtcaattggcctgtttccacactggacggtggcgcaaaatatcgccaccgtgccgcagttgcaaaagtggccgcgcgcaaaaattaccgagcgggttgatgaattgatggcgttattaggcctggagcctctactacgcgatcgctacccgcatcagctttccgggggccagcagcagcgcgtcggcgtggcgcgggcgctggcggccaacccggaggtgctgttaatggatgagccgttcggcgcgctggatccggtgacccgcgaagcgctgcagcaggagatgctgcgcattcatcgtctgtttgggcgcacgattgtgctcgtcacccatgatatcgatgaagcgctacgcctggcggatcatctggtgctgatggacggcggcgaagtggtgcagcagggagagccgttacagatgttgctggagccaaagaacgcctttgtcgaaaccttctttggccgcagtgaactaggggtgcggctgctctcgctacgcggcgtcggggattatttacgccgggatgagcggctggcgggcgatgcgctaaacgtctcaatgacgttgcgcgaggcgttgtcgcagtttgtcgctcaccgtcgcgacgttttgccggtggttgatgaacagggcgaagcgtgcggtacgttgcactttgctgatttgttacgtgatggaggtggggcgtga

SEQ ID NO: 89944 - DNA, 738 bp, Enterobacter aerogenes
gtgaaggcgcttcgcgatccgctgctgtggttggtggcgctgtttatcgcgctgctgctggtgttgccccatagcgcgccgctgtttagctggctatttccggaactgccgcgcccggtttatcagcaggagagttttctggcgctgacgctggcgcatttttggctggtggcgttatcaagccttgtcgcaacggttatcggtatcggggccggggttatcgtcacccggcccgccggacgagagtttcgtccactggtggagaccattgccgccatgggacagacatttccgccggtggcggtactggcgattgcggtaccggtgatgggcttcggctggcaaccggcgcttatcgcgctggcgctgtacggaatattgcccgtgctgcaggggacgttggctggattaagttcgatatcgcctggggtattgaacattgccgaggggatggggatgagcggctggcagcggttgtgcaaagtggagctgccgctggcggccccggtcatgctggccgggatccgcacttcggccatcgtcaatattggtacggcaaccattgcctcaacggtgggcgccaacacgctcggcacgccaattattatcggcctcagcggctttaataccgcttacgtgctgcagggggcgctgctggtggcgctggcggcgatcatcatcgatcgctttttcgaacggctaaaccagtgggtcagccgacaccaccgcgaacaataa

SEQ ID NO: 89945 - DNA, 732 bp, Enterobacter aerogenes
atggcgctgtatacgataggcgaagtggctcagctttgtgatatcaatcccgtgacgctgcgagcctggcagcgacgttatgaacttattaaaccgcagcgcaccgatggcggtcatcgattattcaatgacaatgaaattgagcgtattcgcgaaattaagcgctggattgatgccggcgtacaggtcagcaaggtaaaaaacctgctacctgaccgcgaagaggatgctgaagacggctggcgcgaacagcaggagatattgctcggttttctacaagaaggtcattaccaacgcttgcgcctatggctaaaagagcgcagccacagctattccgcgcaaacgctggtccattacctgattaatccgctccgccaccgcctgttaagcccgcagccaacgctactggcgctgcgcagcctgctcgacggcatcttgatcaatcatatcgcccaatgtctcgcccatgcctggaaacgccccggccatcacgcggtggtggttggctggaataccgatgacaccacccgactgtggctggagggctggaaagcctgcgagcaaggttggcgggtcgacgttgtcgcacattccctgaaccagatccgtccgcaactgtttcccgacagcaccctactggtgtggtgccccacaccgccaggtagtccacaggcagcacagcttcgcgattgggaacagcgggaaaacctgatctggctaaatagcaattaa

SEQ ID NO: 89946 - DNA, 1689 bp, Enterobacter aerogenes
atgtacgagttcgatctggtattgctgctgctccagcagatgtgcgtgtttctggtcatcgcctggctgatgagtaaaacgcggctgttcattcccctgatgcaggtcaccgtgcgtttgccgcataaattgctgtgctatgtcaccttctcgattttttgcattatggggacctatttcggtctgcatatcgaagattctattgcaaatacccgcgctattggcgcagtgatgggcgggctgctcggcggcccggtggtcggcggtctggtggggttgaccggaggcctgcatcgctattcgctgggcggaatgacggcgttaagctgtatggtgtctaccattgtcgaagggctgctcggtggcctggtacacagtatcttaattaggcgcggtcgcccggataaagtgttcagcccgcttaccgccggggcgattacctttttcgctgaactggtacagatgctgataatcctgctcattgcgcgaccctttcaggatgcgctgcacctggtacagagtatcgccgcgccgatgatggtcacgaataccgtcggcgccgcgctgtttatgcgtattctgctggataagcgggcgatgtttgaaaaatatacctcggctttttccgccaccgcgctgaaagtggcggcctctaccgaggggatcctgcgtcagggattcaacgaagagaatagtatgaaggtggctcaggtgctgattcaggaactggatatcggcgctgtagccattaccgaccgcgagcggctgctggcgtttaccggcatcggggatgaccaccatctaccaggtaagccgatctcatcatcctatacgcaaagggcgattgataccggcgaagtggtttatgccgacggcaacgaggtgccgtaccgctgttcaattcaccctggatgcaaactgggctcgacgctggtcattccgctgcgcggtgagaatcaacgggttattggcaccattaagatatatgaagcgaaaaaccgcttgttcagctcgattaaccgtacgctgggggaggggatcgcccagctactgtcggcgcagatccttgccggccagtatgaacggcagaaggcgttgctgacccagtcggaaattaaactgctgcacgcgcaggttaacccgcactttctgttcaacgccctgaacacgctgaaggcagtgattcgccgcgatagcgatcaggccggacaactggtgcagtatctatcaaccttctttcgcaaaaatctgaagcgaccaacggagatcgtcaccctggcggacgaaattgaacatgtgaatgcctatctgcaaattgagaaggcgcgattccaggataatttacagatacgtatgcaggttcctgcatcgcttgaacatctgcagctaccggcgtttacgttacagccgatagtcgaaaacgcgatcaagcacggcacttctcagcatcttggcgtgggcgaaattaccattcgcgccagtcagcatgagcgttggttacagctggatgtggaagataacgccggtctgtatcgggataaccctaatgccagcgggctcggaatgagtctggtggacagaagactgcgtacgcgcttcggcgccgactgcggaattagcgtcgcttgcgaagcggaacattttacccgcattacgctgcgactgcctctggaggagaatgcatgctaa

SEQ ID NO: 89947 - DNA, 720 bp, Enterobacter aerogenes
atgctaaaagttttaatcgtcgatgatgagccgctggcgcgggaaaatctgcgcattctgctggaggcgcaaagcgatattgatatcgtcggcgaatgcggcaacgccgtcgaggcgattggcgcggtgcataagctgcgtcccgacgtgctgtttctggacattcaaatgccgcgcatcagtgggttggagatggttggtatgctcgatccagagcatcgcccttatatcgtctttttaaccgccttcgatgaatatgcggtgaaggcctttgaagagcacgcctttgattatctgctcaagccgatcgaaaacgcccggctggagaaaaccctgagccgcctgcgccaggagcgcagcctgcaggatgtatccctgttggatgatgcccggcaggcgctgaagtacattccctgcaccggtcacagccgcatctggttgctgcagatggaagatgtggcttttgtgagtagccggatgagcgggatttacgtcaccgatagcgaaggcaaagaagggtttaccgaactgactttgcgtacgcttgaaagccgtacgccgctgttgcgctgccaccgtcaatatctcgttaacatggcgcatttgaaggagatccgccttgaggagaatgggcaggcggaattgttaatgcgcgccgggcaaacggtgccggtcagccgccgctatctgaaaagcctgaaggaggcgattggtctgtaa

SEQ ID NO: 89948 - DNA, 468 bp, Enterobacter aerogenes
atgatcagtaacgatattttacgtagcctgcgctacaccctgaaaacgaataataacggtctggtacgcatctttgcgctggcggatgcgccggtgagtgcggaacaactggtaccctggctgaaaaaagaagacgaagaagggtttgcgcgctgcccggatgtcgtgctgtcgaattttctcaatggcctgatttacgacaaacgcggcaaagacgaatcggcgccgccgctggcggttgaacgccgggtgaataacaatatcgtactgaaaaaattgcgtatcgctttctcgctgaagaccgacgatattctggcgatcctgactcagcaaaaattccgcgtgtcgatgccggaaatcaccgccatgatgcgcgcgccggaccacaaaaactaccgcgaatgcggcgatcagtttttgcgctatttcctgcgcggtcttaccgaacgcgagcacgccaaaggctaa

SEQ ID NO: 89949 - DNA, 465 bp, Enterobacter aerogenes
atgaaatttaaccgcaagatggctggcgtgctggccgtatctgttctgctggcggccctcgccggctgcgataataaaaaagaagagagtaaaacctttgcgctgaataccaacggcgtcgaactcagctttacctaccactatgacggcgacaaagtattgcgtcaggatgccgacaacaccattccctataaatcgatcggcgccgaaaataaagaacaggcgcgggccattattgagccgattagcagcgtgtatcgtaatctacagggcgtagaacagaccatcgactataaagattcctatgcgcttgagcatctgaccgtggattttagcaaagcgaaaatcagcgagctgtgcaaactgccgggctcgatgttcaccgactgctcacagcagtttgtttcactatcggtgtcaactaaattgctggaatcgcagggttttaaagaggtgaagaagtaa

SEQ ID NO: 89950 - DNA, 2043 bp, Enterobacter aerogenes
atgcccactatgactcaagtcgcgaaaaaaattctggtaacgtgcgcgctgccgtacgccaacggctctatccacctcggccacatgctggagcacatccaggctgatgtctgggtccgttaccagcgaatgcgcggccacgaagtcaacttcatctgcgccgacgacgcccacggcaccccgattatgctgaaagcgcagcagcttggcatcaccccggagcagatgattggcgagatgagtcaggagcatcagaccgattttgccggtttcgatatcagctacgacaactatcactcgacgcacagcgacgagaaccgcgagctgtcggagcttatctatacccgtctgaaagaaaacggttttattaaaaaccgcaccatctctcagctctacgatccggaaaaaggcatgttcctgcctgaccgtttcgtcaaaggcacctgtccgaagtgtaaatctccggaccagtacggcgataactgcgaagtctgcggcgcgacctacagcccaactgagctcatcgatccgaaatctgtagtatccggcgcgacgccggtgatgcgtgaatctgagcacttcttcttcgacctgccgtcctttagcgaaatgctgcaggcgtggacccgcagcggcgcgctgcaggagcaggtggcgaacaaaatgcaggagtggttcgaatccggcctgcaacagtgggatatttcccgtgacgcgccgtactttggctttgaaattcccaacgcgccgggcaaatacttctacgtctggctggatgcgccgatcggttacatgggttcctttaagaatctgtgcgacaaacgcggcgacaccaccagcttcgatgaatactggaagaaagattccagtgccgagctgtatcacttcatcggtaaagatatcgtgtacttccacagcctgttctggccggccatgctggaaggcagcaacttccgtaagccaaccaacctgttcgttcacggctatgtcacggtaaacggcgccaagatgtccaaatcacgcggtacctttatcaaagccagcacctggctgaaccatttcgacgccgacagcctgcgctactactacaccgctaagctctcttcgcgcattgatgatatcgacctgaacctggaagactttatccagcgcgttaacgccgatatcgttaacaaagtggtgaacctggcttcgcgtaacgccggctttatcaataagcgcttcgacgggatgctctccgccgaactggctgacccggcgctgtataaaaccttcaccgatgcagctgccgctatcggcgaagcgtgggaaagccgcgagttcggtaaagccatccgcgaaattatggcgctggccgacgtcgctaaccgctatgttgacgagcaggcgccttgggtggtagccaaacaggaaggccgcgacgccgacctgcaggcaatctgcaccatggggctgaacatgttccgcgtgctgatgacctggctgaagccagttttgccgggtctgagcgcgcgcgctgaagcgttcctcaacaccgagctgagctgggacgccatccagcagccgctgctggcgcacaaggttaacgccttcaaagcgctgtacaaccgcattgagatgaaacaagtcgaagcgctggtggaggcctctaaagaagaagtgaaagccgccgccgcgccggtgactggcccgctggccgatgatccgattcaggaaactatcgcctttgacgatttcgccaaggtggatatgcgtatcgcgctgattgaaaacgccgagttcgtcgacggttccgataagctgctgcgcctgactctcgatctcggcggcgagaagcgtaacgtcttctccggcatccgctccgcctacccggacccgcaggcgctcattggccgcctgacggtgatggtcgccaacctggcgccgcgtaaaatgcgcttcggcatctccgaagggatggtgatggccgccggccctggcgggaaagatatcttcctgttaagccctgacagcggcgcacagccgggtcagcaggttaaataa

SEQ ID NO: 89951 - DNA, 1110 bp, Enterobacter aerogenes
atgagttcgcaatcccaggccaaatcccccgaacgtctacgcgcgatggtcgccgggactctggctaatttccagcacccaaccttgaaacataacctcaccacgctaaaggcgctgcaccatgtcgcctggcttgacgataccgtgcatattgagatccaaatgccgttcgtctggacccgcgcgtttgaggcgttgaaggagcaatgcagcgccgagctgctgcgtatcaccggcgcgaaagccatcgactggaagctctctcacagtatcgccaccctgaagcgggtgaaaaaccagccgggtattaatggcgtgaaaaacatcatcgccgtcagttccggtaaaggcggggtgggaaaatcctctaccgccgtcaacctcgcgctggcgctggcggcggaaggggccaaagtgggtatccttgatgccgacatctatggcccgtcgattccgaccatgcttggtgcggaagacagccgcccgacatcgccggacggcactcatatggcgccgattatgaagtatggcctggcgacgaactccatcggatatctggtgaccgatgacaacgccatggtgtggcgcggcccgatggccagcaaggcgctgatgcagatgctgcaggagacgctgtggccggatctggattacctggtgctggatatgccgccgggaacgggcgacatccagctgaccctggcgcagaacattccggtaaccggcgcggtggtggtgacgacgccgcaggacatcgcgctgatcgacgccaaaaaaggcatcgtgatgtttgagaaagtagaagtgccggtcgtaggcatcgtggaaaacatgagcatgcatatctgcagcaactgtggccaccacgaacctatctttggcactggcggcgccgagaagctggcggcgaagtaccacactcagttgctaggccagttgccattgcatatcacgctgcgtgaagatctggataaaggtacgccgacggttattgcgcgtccggaaagcgagtttaccgatatctatcgccagctggcgggacgcgtggcggcgcagatgtactggcagggcgaggttatcccgagcgagatcgccttccgcgccgtttaa

SEQ ID NO: 89952 - DNA, 474 bp, Enterobacter aerogenes
atgacggcgagatcttctatcatcgctaagtcctcgacgcaggcgcaattgcgcattcgccccggtcgcgccagcgactaccctcgcctgcgtcagctgtttcttgacgcgcgtcttgcctcatggacatggcttaacggcgatcaatggcggctggaagattttgatgccgtggtgcaagacgaacagctatgggtcgccgaatgcggcgatgtgctggcaggattcgcctcggtgtgggttatcgacaacttcctgcataacctgtttgtggatccgcagtggcagcggaaaggcgtcggtagcctgctgctggaacaggttcagcgctcattcaagcgcagtggtacgctgaagtgtctgtcgcgaaatgaaaacgccctgcgcttctaccagcatcacggctggaaactcgaagcacagggcgcgtctcctgacggagattattggctgatgcgttacacccagccttaa

SEQ ID NO: 89953 - DNA, 318 bp, Enterobacter aerogenes
atgcgtaaaacaaaaatgatgcttctgggcgtacttcttgccagcgccagcgcaagctgggcggcgccggcctccgggattgaacagtatgcgatgaaagaattcaccgctgattttacccaatttcatattggcgataccgtgccggcgatgtacctcactccagagtacaacatcaaacagtggcaattgcgtaacctgcccgcgccggatgccggcagtcactggacctatatgggcggcaactacgttctgatcaccgacaccgaaggcaagatcctgaaagtgtatgacggcgagatcttctatcatcgctaa

SEQ ID NO: 89954 - DNA, 900 bp, Enterobacter aerogenes
atgttcaggctggaagatctgaccttatttgtccgcgcggcggcgttaggcagttttagcgaggcggcgcgggaggcggggcagcagccagcgcaggtgagcgcggcgatcaaacgcctggaaacgacgctcaacattcgcctttttgctcgttcgacccgtagcctgcgcctgaccccggagggcgaaacctggctgccctacgccacccagatgctcgataccctacaggccgggttacagaaaattcaggcgccgggggatgaagtccgcggcacgctgcaaatcgccgtgccatccgatcttggacgtaacctgctgctcaaggtgttttgcgcttttcgcgaacgtcacccggcgctgcgcctgcggctgcacttttccgatcatctgaccgacgtgtttaaagatccggtggatgtcgcttttcgctacggctaccacgaagacgcttcgtttatctcgctgcccgtcgcgccggaaaaccgtcgggtgttggtggcttcaccgcactgggttgcccgccacggtcaagtcagtagtctggaggagttatcccggcacagcgcgctgttgtacgtattacgcggccgcccttttgaccgctggccgctgatttcaggtaatgaagtgcataccgtggagatgaacggcgcgattatgagtgatgatgcggaggtgatccgtcggctggcggtagccggggaggggatcgcttataaatcgtttcttgatgtcagcgacgacctgcgggaagggcgtctggtgcggttgctgccggactttcagggcgatttaacgccgctgaacatgatttgtccgcaccgcaaacagctctctgccgcggtgcgtttgttatatcaagaggtgaaatcacattgtgaagcgcttagtgcttaa

SEQ ID NO: 89955 - DNA, 1344 bp, Enterobacter aerogenes
atggccgataacacacttcatacttctgcccgtagccactggctggagcgccgctttgcactgcactcacggggcggttcgctacgcaccgaatgcctggccgggatcaccggctttctcgccgccgcctatttactggtggtcattccagggctgctggcgattggcggaatggataaaggcgccgccaccaccggcaccatcctggtctttgtcgccggttcgttattaatggcgttttatgccaacctgccgtttatcgtcggtccgggcattggcggctcggtactggtgggggtgacactggcgggcagcgaaggtattggctggcagattggcctcgggattgcctgctggtcggggatcctcttcttcctgttgacccaattcggcctgcgcgaagtggtcacccgctcggtaccgcagtcaattaagctgggactcacggcctcgatcgggttattcgttgcggtgctcggctttcgcaatgccgggctggtgctggcgaatgccaaaaccaacgccctgatgctcggtgattttcttgcccccggcgcgctggtggcgctgtgcggcctgtttctggcgatagcgctacaggcgcgtaaagtgccaggcgcgatattgtgggccattcttttcgccaccctggtgggtattccattcggcgtaacaaagctaccgggcagctttattgatgttcctcactcgctggctccggtgttcgggcaaatcgatctgttgggggcattaaatatcgccttcctgccgttcctgttcgtctttttcgcgtccgagtttttctcgaccatgggtacgacgctggcggtcggcggcgaggcgggcttactggatgaagaaggcaacatgccgcagattaatcgcccgtttatggtcgattcgattgccgcagcgctgggcccgtgggtcggtattccggcggccacggcgctgattgaatcatccgcggcggcggaagccggcggcaagacaggcctcaccgcgctggcggcggcggtgatgttcctgctgatgttgctgtttacgccggtggcgctcatgatccctaaagaggccaccgcgccggcgttaattttgataggcctgaacatgtttagcggcctgcgcaaagtcgatctggggaactttaccgacggactgccggtgttaatgatggtgatgattacgctaatcgccaacagcttcggcaccggtattgccggcgggctgctgttttacattgtcattaaagcgatcgccggcaagtggcgtgaaattccgattggcctgtgggtgctggcgatcccgctaatctattacttcgcgaccttagttaagcactaa

SEQ ID NO: 89956 - DNA, 1812 bp, Enterobacter aerogenes
atgtccagcaatgctgaagtccgtcgtcgcgccgtgcaggccgcacgcggcgaatccccgtttgatctgttgctcgtcgatgcgcagatcgtcgatatggccactggcgaaatccgcgacgctgacgtcggcatcgttggggaaatgattgccagcgtgcatccgcacggcagccgcaccgacgcccatgaagtgcgctcgctgcagggcggctatctgtcgcctggcttgatggacacccacgtacaccttgaaagttcgcatctaccgcccgagcgctacgccgaaatcgtcctgacgcagggtaccaccgcggtgttctgggacccacatgaactggccaacgtgctcggcgtcgatggcgtgcgctacgcggttgatgccagccgccacctgccgctacaggtgatggtggccgcgccatccagcgtcccctctacgccaggtctcgaaatgtccggcgctgatttcgccggcgctgaaatggaaactatgcttggctggccggaagtacgcggcgtagcggaagtgatggacatgcatggcgtgctgaacggcagcgaacggatgcaggagattgtccaggccgggcttaacagcggcaaactgattgagggccatgcccgtgggctcagcggcgccgatttacaggcgtatctcgccgccggcgtcacctccgatcacgaactgacttcagcggccgatgcgctggaaaaactgcgcgccgggctgactatcgaaattcgcggctcgcacccctatctactgcccgatatcgttgcggcgttaaaaacgctgccgcatctctcctcgcaaatcaccgtctgcaccgatgacgtaccgccggatatgctgctggagaaaggcggcattatcgccctgctcaacctgctgattgcacacggtttgccaacggtcgatgtgctgcgtttcgccaccctcaatgccgctattcgcctgcagcgcaacgatcttgggctaattgccgcggggcgacgtgcggatctggtggtgtttgattcgctggagaaactcgaggctcaggaggtctatgtcggcggcaaacttatcgctcgtaacggtcacctgctaaccccccttgccgccgcgcccggcgtgacgccaccgcgtgataccttgcagttagcccccctcgatgcagaagattttattctgcgaattaagggcattcgccatggtgtcgcccgcctgcgccacatcagcggcgcgcgcttcacgaaatggggtgaagtagaagtacagatccgcgacggcgaagtacaactgcccgcgggctttagcctgatttgggtgaagcaccgccatggccgccatcaggcaacgccgcaaatcgccctgctcgaaggctggggcgagctgcgtggcgccattgccaccagctactcacatgactcacataacctggtggtgctcgggcgcgatgcgaatgatatggcgctggcggcaaatcagctgatcgcttccggcggcggaatggcgctggcgcaacagggcgagctcctggcccatgtggcaatgccgattgccggcatgctctccgatcttcccgccgccgagctggcgcggcagttccgcgagctgcgagatttaagcagtaaagtcgccgactgggagccgccataccgggtatttaaggcgattgaaggcacctgcctcgcctgtaatgccgggccgcatctaaccgatttgggtctcaccgacggcggcagtcgccagatagttgacccgttgatagcctgccgggagtctccggcgccaactcatcacaacaataatcctcagggagcctga

SEQ ID NO: 89957 - DNA, 912 bp, Enterobacter aerogenes
atgaacgaaccctggcaacgtctgcccgcgctctcactgaaacaactgcagtattttgtgaccctggctcagttgcgccattttaccgataccgccaatcggctggcgattagccaaccggcgctcagcagtgcgctacggcagattgaaagtgtgatcggcggcaagctggtcaatcgtaccgcctcggcggtgactctgacggaactgggggcggcgattttaccccatgcccagcggatactgagcgtggcccaggcttctttttttgatatgcagcagatcgtggaagcgggcggcgatggtacggtacgtatcgggctggtgccgtcggtgagctcgctgctgtttccgctgctgccgcagactctggcgcaagcctttccgcgtctgcgcatcgaatttcatgaccagaccaacgatgcgttaatgcgggcgctgcaaagcggtgagattgattttggtatcggcgcgatcgacagttcgctaccagctgagctactggtttatccgctacgcgaggatccgttcgtggtggtactgcaccgcgacgatccgctcgctgcgcagccaaatttaccgtggaagcagttggtaggccgtgatattgccgttttctcaaaggggaatattcagcggctggtggcggcgctggtggaaagccagcgtttgaccttaacgacgcgttaccaggtagactatatcgaaaccctttatgggctggtacgttcgcggctggcggtggccattctcccggcgctgtatacgacctatttgcacgatccggcgttaaaggtggcgcaactgcagcagccggcgctcacgcggacggtggccctgatgcgtgggccgcaggcgcttgcaccgttaatcgaagagtgtttttctctgttacagtccgcattgcgctag

SEQ ID NO: 89958 - DNA, 423 bp, Enterobacter aerogenes
atgaccgtttatcaccatgcgctggtactgattaatagcagccttgatggtgttccgttgctacaacacgccgccaggatggcgcaggaaaacgggatgcggattaccatcgcccacatcagcaccgactaccgggcgcttaattacgtgtccgacagcctgcagaatgatgaagtatcgcaagaggtcattcaggccaaagtcctgctcaacgagctggcgacgaccgtcgccctgccggtacagacgctatcgctggtgacgacccgccgttttgctgatgtcgaagagtgcgtacaacaacgccatatcgatttaattatcgccggacaccataaccggctgctgggggtgctgtcctcgcactcgctggagtacatcaaccatttgacggtggacgtactgataaaacacctgccctag

SEQ ID NO: 89959 - DNA, 1977 bp, Enterobacter aerogenes
atgaaattaaatcagatcgctaaacatctggctctggccggtgttttaacttcgctgtcgctttccgccttcgctgccgcccagcagcaggacgccaccccggcaactcagcaggcaaataacgcgctgtacaacaaactgccgtttgccgataaaactgatttcgataacgcgcataaaggttttatcgccgcgctgccgcagaccatgattaaaggcgagcaaggcaacgttatctggaacccggcaaaatatgacttcgtcaaagaaggtgaaaaagccccggataccgttaacccgagcctgtggcgccagtcacagctgattaatatcggcggcctgtttaaagtcaccgacggtgtttatcagatccgtaatctcgatctctccaacatgaccatcatcgaaggcgagaaagggatcaccgttatcgacccgctgctgagcgccgagccggcgaaagaagcgatggatctctactacgccaaccgcggtaaaaagccggttgtcgccgtcctgttcacccacagccatgttgaccactacggcggcatccgcggcgtggttgatgaagccgacgtgaaggctggcaaagtaaaaatctacgccccggccggattcatggaagaagcggtttccgagaacattatggccggtaccgcgatgagtcgtcgcgccagctatatgtacggcaacctgctgaagcctgacgccaaaggccaggtcggcgctggtcttggcaccaccacctctgcgggtaccgtgacgctgctccagccgaccaactacatcactaaaaccggccagcaggaagtgattgatggcctgacctacgacttcatgatggcgccaggttccgaagcaccgtcggaaatgctgtggtatgtcaaagagaagaaaatgattgaagcggcagaggatgttacccataccctgcacaacacttactcgctacgcggcgcgaaaatccgcgatccgctggcctggtcaaaatatattaacgccgctatcgaccgctggggcaacgatgctgaagtcattatcgctcagcaccactggccaacctggggtaatgacaacattatcaagctgatgaaaggtcagcgcgacatgtatcgctacatcaacgaccagaccctgcgtatggccaacgaaggcctgacccgcgatgaaatcgccgctaacttcaagctaccggaatcgctggaaaaacagtggtcgagccgcggttattacggctccgtcagccacgatgtgaaagcgacgtacgtttactacctcggctggttcgatggcaacccggcgaccctcgacgagctgccgccgcaacaggctgcgaagaagttcgttgaatacatgggcggcgccgatgccatcatgcagaaagccaaagccgactatcagcaggggaactaccgctgggtggcgcaggtgaccagtaaaatcgtcttcgccgacccgcagaatgccgatgcgcgtaacctcgaagcggatgccctggagcagttaggctaccaggcggaagccggtacctggcgcaacttctacctgaccggcgcgcaggaactgcgtaacggcgtacagaagctcccgacgcctaacaccgccagcccggataccgttcgtgcaatgactccggagatgttcttcgactacttgggcgtacatatcaacggccagaaagccggcgcggcaaaagcggtcttcaacatcgatcttggtaaagatggcggtaagtacaagctggaactggaaaatggcgtgcttaaccacaccgctaatgcggtagcagacaacgctgacgccagtattactctgaaccgcgataccctgaacaagatcattttgaaacaggaaacgctgaagcaggctgaagataagggcgacgtcaagattagcggcaatggcgctaagctcgatgaaatgctgagctacatggacaaatttgaattctggttcaacattgtcaccccgtaa

SEQ ID NO: 89960 - DNA, 636 bp, Enterobacter aerogenes
gtgaattttcaggatatccatagctattatcagcaactcaacattgatgccttttttccgcaaataattgcgcaaggggaagccctgacggttgcggctaataaaaaattagcaattcagccaggatatatttatttttgtactgaaggttcgctgtcaatattaatgccggatagtggccttcatattggtaattccattgagtatatgccgatagggcttatggaaaggtactgcccgctggcgaagtttgaatatatcggtagcgcagcggtgaagctggttaaagtcacttatgatgtctttgaccaaatctttttacacggcggccctgaacgcgtgcaggagctggcgaccattctgacctatatgtcgatctttactatcgatcttcataacgaacgccgacagatgaccagctatcagaccatcaggccgatgctgtttcgttatctttatcgccagagtacccatcagggggaaaacgaaggcctggcgctgtttattattaagcgtactaatctgtcgcgcacgcatgtttttcgggtgctggcggatctgaaagccgggggctatatcacgatgaagcgcggcaaactggtttctatcgaccgaccattgccggaagcctactag

SEQ ID NO: 89961 - DNA, 1977 bp, Enterobacter aerogenes
atgaaattgacccccatagtgaaaggattagccattgccggcttgctgtcatcgatcagcttgtcagcatgggcggaagtcgccgcaaaagaagcgaccgctgccaccaaacaagccaacgacgctctctataaccaactccccttctctgataacaccgatttcaccaacgcccataaagggtttattgccgccctgcccaccgagatcattaaaggagaacaaggtaacgtagtatgggatccgcaacagtactctttcatcaaagaaggtgaaaaagccccggataccgtcaacccgagcctgtggcggcagtcgcagctgattaacatcagcggcctgtttgaggtgaccgacggcgtctaccagatccgcaatctggatctttccaacatgaccatcatcgaaggtaaagagggcattaccgtcgtggatccgctggtgtcggcagaaaccgccaaagtgggcatggatctgtattacaaaaaccgcggtaagaaaccggtcgtcgccgttatctatacccacagccacgttgaccactacggcggggtgcgcggcgtagtagatgaagcggatgtgaaatccggcaaagtgaaaatttacgcgccgtccggctttatggaagcggcggtggctgaaaacatcatggccggtaacgtcatgagccgccgcgccagctacatgtacggcaacctgctgaaaccatcggccaccggacaggtcggcgccggtctgggcaccaccacctcggcgggtaccgttaccctgattgccccaactaatatcattgaaaaagacggtcagaaagaagttattgacggtctgacctatgactttatgctggcgccaggttcagaagcgccatcggaaatgctgtggttcatcgaagagaaaaaactgattgaatccgcggaagacgtaacacacaccctgcacaacacctattcgctgcgcggcgcgaaaatccgcgaaccgctgccgtggtcgaagtacatcaacgaagcgattgtacgctggggcgacaaggctgagattattatggctcagcaccactggccgacctggggcaacgaaaacgtggtcaacctgcttaagagccagcgtgacctgtaccgttacattaacgaccagaccctgcgtatggctaacgaagggctgactcgcgatgaaattgccgccaaattcaaactgccggatagccttgccaacacctgggctaaccgcggttactacggctctgttagccacgatgtgaaagccacctacgtgctgtatctcggctggttcgacggcaacccggccaccctcgacgaactgccgccggaagaagcggcgaagaaattcgtcgattacatgggcggcgccgatgccatcatgaagaaagcgaaagaggattatgaccagggtaactaccgctgggtagcccaggtggtcagcaaaatcgtcttcgccgatccgaaaaaccaggatgcgcgtaatctggaagccgatgcccttgaacagttaggctaccaggcggaatccggcccgtggcgtaatttctacctcaccggcgcgcaggaactgcgtaacggcgtggtgaaaggtcctaccccgaacaccgccagcccggataccgtgcgcgcaatgacaccagaaatgttcttcgactatctggcggtgcacatcaacggcgagaaagcgggtaacgcgaaatcggtctttaatatcgatctcggcagcgacggcggcaagtataagctggagctggaaaacggcgtactgaaccataccgctaatgcggaagcgaaagatgccgataccactatcgccctcaaccgcgccaccctgaataagatcatcctcaaagaggagacgctgaagcaggccgttgataacggcgatgcgaaaatcaccggtaacgccgataagctcaatgaaatgctgggctatatggacaagttcgaattctggttcgacatcgttacgccataa

SEQ ID NO: 89962 - DNA, 429 bp, Enterobacter aerogenes
atgatgaaagtgaaacacgtttctatgctgctgctggcactcagcgcagccatcgcgattggttgcagttcaccagcgcagcgtatggccgagtgcgaagcacaggggatcagtaaagatgcctgttatattgcggaacaaaacaaacaggctacggtgaacgccgcagcggagaaacaggcgctggaaaatgcgcaggctttatatcccgtgcagaaagcgcaatccagcaaaaaagtgaagatcttcaatggtatgaagctggtcacaaactcaaccgggctgacagttgatggcaaacccgcggccttagacgaaagcaatgctgacgcgaaaacctattctcagggtttatacgtttttattgtctaccaatcaggaaaaattgccgtcatgcaggacggtaaatttttaggctacgccaaatag

SEQ ID NO: 89963 - DNA, 525 bp, Enterobacter aerogenes
atgacggtatgcaaattagccattatgatggcgctttctacaaggatcataagggattatgaagtggatactgttgaacaaattagtgggtacttctataaaggatactggaatctgaaaccagaggagttattcctgttgattctcatcgatgcgatgagtcagcatcttgaaattgaggcaacagccgcaactgctatcttaaccggacaaccctggataccgacgcgaacaaaaccaggtacagcaattaaaggaacgagtattgcttccataatgtctcgtaagctactcagtaatgtacgtttgccggttggtatctcgttaatcactcctatgggtaaaagtctgaaagactttcattggtcgaaaactaacaagctaggcgcggttataggccgctacataccatggatagggtgggcaatggcattttattatgctagagcaatactaattgatactggtgaaacttttaataagatggttaaaccagaacataaagttgcatggacatatttctaa

SEQ ID NO: 89964 - DNA, 774 bp, Enterobacter aerogenes
atgcatcaaccgctaaatccggcgcatatcgcgcacctgcagcagcttttccgcacctcttcgccgcttgttcactgtatgaccaacgatgtggtccagactttcaccgctaacgtcctgctggctattggcgcctcgccggcgatggtgattgatcctacggaagccgcgcagtttgccgccattgccgatgcgctattgattaacgtcgggaccttaaccgctgagcgcgccaacgcgatgcgcgcggcggcgcagagtgcccgccaggcgggaaaaccctggactctggatccggttgccgtcggcgcgctgacgctacgcactgatttttgtcgcgaattactggaactgcggcctgcggcgattcgcggcaatgcctcggaaatcatggcgctggcggggagcagcggcggcgggcgcggcgtggacacgaccgatagcgtagctgcggcgttacccgcagcccaggtgctggcgcgcaagctcaataccgtggtcgcggtgacgggcgaggtggattacatcagcgacggtgatcgcacgcttgccgtgagtggcggtgatgtcctgatgacgcgggtggtagggaccggctgcgcgttatccgcggtggtggcggcaagcgccgcgatgcccggcgatcggctgcaaaacgtggcagccgcctgcggcctgatgaaaatggcgggaggtgaagcggcgcgacacggcggccccggcagttttatcccggcattcctcgacgcgttatacgcggaggtgccggcatga

SEQ ID NO: 89965 - DNA, 801 bp, Enterobacter aerogenes
atgaagcggattaacgccttaaccatcgccggcaccgatcccagcggcggcgccgggatccaggccgacctcaaaaccttctccgcactcggcgcttacggctgctcggtgatcaccgcgctggtggcgcagaatacccgcggcgtgcagtcggtataccgcattgagccggacttcgtggcggcgcagctggattcggtgtttagcgacgtgcgaatcgatactacgaaaatcggcatgctggcggaaaccgatatcgttgaagcggtggcggaacgtcttgctcgctatcaaattgccaacgtggtgttggataccgtgatgctggcgaaaagcggcgatccgctgttatcccactcggcaattgcgacgctgcgccagcgcctgctgccgcacgtttcactgatcaccccgaatttgccggaggccgcggcgctgctcgatgcgccgcatgcgcaaagcgagcgcgagatgctggaacagggcagagcgctgttggcgctaggctgcggggcggtattaatgaagggcggacatctggacgacgccgaaagcccggactggctgtttacccgcgaaggcgaacagcgctttaccgcgccgcgcgtgcagaccaaaaatacccacggtaccggctgtacgttatctgccgcgctggcggcgctgcgtccgcgctatgccggttggggacaaacggtcgccgaagcgaagggctggctgtcggcggcgctggcgcaggccgattcgctggaagtggggcacggtatcggcccggtacatcatttccacgcctggtggtaa

SEQ ID NO: 89966 - DNA, 1053 bp, Enterobacter aerogenes
atgactgatattacgcagttgcttggcaaagatgccgacagccttttacagcaccgttgtatgactattccagccgaccaactctatttaccgggagcggattacgtcgaccgggtgatggtggataacaaccgcccgcctgcggtgctgcgtaatatgcagaccctctacaacaccgggcgtctggcgggaacggggtacctctccattctgccggtcgaccagggcgtagagcactcggcgggcgcgtcgttcgccgccaacccgctctacttcgatccgaagaatatcgtggaactcgccatcgaagccggttgtaactgcgtggcttctacctatggcgtactggcctcggtatcgcgccgttacgcgcaccgcattccattcctcgttaagctcaaccataacgaaacgctgagctacccgaccgagtatgaccagactctgtacgccagcgtcgagcaggcgttcaacatgggggcggtcgccgttggcgcgacgatctatttcggctccgaacagtcgcgtcggcagattgaagagatctccgccgccttcgagcgcgcgcacgagctcggcctggtcaccgtgttgtgggcctatctgcgcaacccggcattcaaaaaggatggcgtcgattaccacgtttccgctgacctgaccggccaggccaaccatctggccgccaccattggcgctgatatcgtgaagcagaaaatggccgagaataacggcggctataaggcggtgaacttcggttataccgacgatcgcgtctacagcaagctgaccagcgataacccgatcgatctggtgcgctatcaactggcgaactgctacatgggccgcgccggattgattaactccggcggtgcggcgggcggcgaaaccgatcttgccgatgcggtgcgcacggcggtgatcaataaacgcgccggcggcatggggctgatcctcggtcgtaaagcctttaagaaatcgatgagcgaaggcgtgaagctgatcaatgcggtacaggatgtctatctggacggcaaagtcaccatcgcataa

SEQ ID NO: 89967 - DNA, 1140 bp, Enterobacter aerogenes
atgtcacagcccctcgatctcaatcagttagcgcagcaaatcaaacaatggggcaccgagcttggcttccagcaggtcggcattaccgataccgatctcagcgccagcgaacctaaactacaggcatggctggataaacaataccatggcgaaatggaatggatggctcgccacggcatgatgcgcgcccggccgcatgaactgctgcccggtacgctacgcgtgattagcgtgcgcatgaactacctgcccgccaatgctgctttcgccagcactctgaaagatcccacgctgggttacgtcagccgttatgccctggggcgtgattatcataagctgctacgtaaccgcctgaaaaaactcggcgagatgattcaggaacagtgtgcttcgctcaattttagaccgtttgtcgattccgcgcctatcctggagcggccaatcgctgaaaaagcgggccttggctggacaggtaagcactcacttatcttaagccgcgaggccggatcgtttttcttcctcggcgagctgcttattgatcttccgctaccggtagaccagccggttgccgaagagtgcggacgctgtgtcgcctgtatgactatctgccccaccggcgccatcgtcgagccctataccgttgacgcgcgacgctgcatctcctatctgaccatcgagctggaaggcgccatcccggaagaatttcgtccgcttatcggcaaccgtatttacggctgcgatgattgccagttgatatgtccgtggaaccgtttttcgcagctcaccgatgaagaggacttcagcccgcgtaaagcgctacatgcgccgcagctgattgagctgttcgcctggagcgaagcctggttcctgaaagtcactgagggatcggcgatacgccgtatcggtcacttacgctggttacgcaatatcgccgtcgcgctcggtaatgctccctggaatgaagccaatctggtcgcgctggaaagtcgccgaggtgagcacccacttctcgatgaacacattgaatgggcggttgcgcagcagatcgaaaagcgaaacgccaacgttatcgaagtgcagttgccgcagaaattacgcctggtcagggtggtcgagaaaggattaccgcgcgacgcctga

SEQ ID NO: 89968 - DNA, 1524 bp, Enterobacter aerogenes
atggaccatacaatgacgaaaaaccctgacagtataccacacatcgtatggccagcggagacgctgcgccaggcggaaagagaggcggcggatagtctcgggctgacgctttttgaattgatgcggcgtgccggcgaggcggcgtttcaactggcccgaagcctttatcccgccagccagcactggttgattctttgcggccacggcaataacggcggcgacggctatgtcgtcgcgcggctggcgcaggcgcagggcatcgcggtaacgctactggcgttggaaagcgataagccgctgccggaagaggcgcaggccgcgcgggaagagtggctcaatgccggcggcgtcatccacgccgccgatagcggctggccggatgatatctcattgattattgacgggctgctcggcaccggcctgcatagcgcgccgcgcgctaacgtcgccgggctgattgaactggcgaatgcctatcccgcgccggttattgcgcttgatatcccctccgggctgaacgcgcaaaccggcgcgacgcctggcgcggtaatccacgccgcccataccctgacgtttatcgcgctaaaacccggactactgaccggcaacgcccgcgacgtcgtcgggcgcttacatcatcatgcgctcgggctggagcgctggcttgccgggcaaaacaccgctattcgccgtttttccgcagcgcaactggcaggctggttgccgccgcgtcgcccgacgtcgcataaaggctcgcatggtcggctggtgattatcggcggcgatcgcggcaccgctggcgccattcgtatggcaggtgaggccgcgctgcgtgccggcgcgggtttagtacgcgtgctgaccagggcggaaaatatcgcgggcattgtgactgccagaccggaattgatggtccatgagctgaacggtgactctcttgccgagagcctggagtgggcggatgtcgtggcgattggtcccggtcttgggcaaagcgaatggggtaaagcggcgctgcggcaggtagagaattttcgcaaaccgatggtctgggatgccgacgcgttgaacctgctggcaatcaatcccgataaacgtcacaatcgcgtgttaaccccgcatcctggcgaagccgcccgtttattgaatatcagcgtggcagaagttgaaagcgatcgcttacattctgtacaacgtctggtaaaacggtatggcggcgtggtggtgctaaaaggcgcaggaaccgtcgtggcgaataacgcgggggaaattggtatcattgatgccggtaatcccggaatggccagcggcgggatgggcgatgtgctcaccggcattatcgccgcactgttggggcaggggctgaccccatatgatgccgcttgcgcaggctgcgtggcgcacggcgaagccgcagaccggctggccgccacagatggcgcccgcgggatgctggcgaccgatcttttttgcacgctgaggcgtgttgttaacccggatgtgattgacctagaccatgattaa

SEQ ID NO: 89969 - DNA, 462 bp, Enterobacter aerogenes
atgattaaccgtgtgattcctttacccgacgagcaggcgacattagaccttggcaaccgcgtagcgcaggcctgtagcggcgcgacggttatctatctgtatggcgatttaggcgcgggtaaaaccaccttcagccgcggttttctgcaggcccttggccaccgcggcaatgtcaaaagcccaacgtatacgctggtggagccttacaccctcgacaatctgatggtgtatcacttcgacctctaccggctggcggatcctgaggagctcgaatttatggggatccgcgattacttcgctaacgatgccatctgcctggtagaatggccgcaacaaggcgcgggtgtactgcctgacccggatgtcgaaattcacctggattatcaggcgcaagggcgtgaggcgcgcgtaacggcggtctcttcattgggtgagtctttattggcgcgtttagccatttag

SEQ ID NO: 89970 - DNA, 1353 bp, Enterobacter aerogenes
atgaagtatcgtataaccagttggctggccgccgctctgatgctgctcggcactcaggcatccgcggcaagtttatccgatatccaggtctcaaacggcgatcggcaggcccgcatcacgctaagttttgtcggcgatcctgaatattctttcaccccgcaaggtaagcgggcggtggcgttggatatcaaacaaaccggcgtacttcaggggctgccgctgcagtttagcggtaataatctggtcaagagcattcgttccggctcgcctcaggatacgcaatcgctgcgtctgttggtcgatctgacggaagatggtaaaacgcgggcggtgaagcagcaaaatggcgccaactataccgtcgtctttaccattaacgccgatgtgccgccgccacctccgccgccgccagtgatagcgaaacgggtcgaagcgccggtagtggcgtcgcgtccgagcacgccgccgcgcaatccgtttaaaaactctggcagcgacagaaccacggtggtgaccagcagtcagccggcgatgaccaacaaccagaccatcagccgtccggcggcgcgtaccgtctcttctgacgataaaattattatcgccattgacgccggtcacggcggccaggatcctggcgccatcggaccgggcggcaccaaagagaaaaacgtcacgattgctatcgcccataaactacgggcgttgctcaacgacgatccgcagtttaaaccggtgcttacccgcaacggcgactacttcatctcggttatggggcgttcggacgtggcgcgcaaacaaaacgccaatttccttgtctctatccatgccgatgcggccccgaaccgcgacgcgaccggcgcatcggtgtgggtgctctctaaccgccgcgcgaatagcgaaatggccggctggctagaacagcatgagaaacaatccgaacttttgggcggtgcgggcgatgtgctggcgaatagccagtcggatccttatctgagccaggcggtgctggatttacagttcggccattcccagcgcgtcggttatgatgtggcgacggatgtactaagccagctgcagcgggtcggtaatctccataaacgccgcccggagcatgccagccttggcgttctgcgctcgccggatattccgtcgatcctcgtcgaaaccggctttatcagtaataacggcgaagagcgcctgctgggtagcgatgattaccaacagcagattgcagaggcgatttataaagggctgcgtaactattatatgcagcacccgctgcaatcagcgccgcgcggcacggctgcgcaaaccgccagcgccagttcgcctggcgggacgttgattaactaa

SEQ ID NO: 89971 - DNA, 1863 bp, Enterobacter aerogenes
atgccgattcaggttctaccgccgcagctcgccaaccagattgccgctggcgaggtggtggaacgtccggcgtcggtagtgaaggagctggttgagaacagccttgatgccggcgcaacccgtatcgacattgatatcgaacgcgggggcgcgaagcttatccgtattcgcgataatggctgtgggatcaaaaaagatgagctggcgctggcgctggctcgtcacgccaccagtaaaatcgcctcgctggatgaccttgaggcgatcatcagccttggctttcgcggcgaagcgttggccagtatcagttccgtcgcccgcctgacgctgacttcgcgtaccgcggagcagcacgaggcatggcaggcttatgctgaagggcgcgaccaggcagtgacggtgaaaccggcggcgcatccgataggcaccacgctggaagtcctggatctgttttacaacacccccgcgcggcgcaagttcatgcgtaccgaaaaaaccgagtttaatcatattgatgaaatcgtccgccgcatcgcgctggcgcgtttcgatgtaacgattaatctcagccataacggcaaaatgatgcgccagtatcgcgcagtggcggaaggcggcccgcgtgaacgccgcctcggctcgatttgcggcgcggcgtttctggaacacgcgttggccattgagtggcagcatggcgatctgacgctgcgcggctgggttgccgatccgttgcataccaatccggcattagcggaaatccagtactgctacgtcaacgggcgtatgatgcgcgaccggctgatcaaccatgccattcgccaggcctgtgaagacaagctgggcgctgaccagcagccggcgtttgtgctgtatctggagattgacccgcatcaggttgatgtcaacgtgcatccggcgaagcacgaagtacgtttccatcaatcgcggctggtgcatgattttatctatcaaggcgtactgagcgtgctgcagcagcaactggatgcgccgttggcggaagaagacgaagcgcccgcgtcgcggccggtgccggaaaatcgcgtagcggcgggcgctaaccatttcgctcgcccatcgcctgcccgggaaccggcggcgggttatgatacccgcgcgccgcgggaacctgccgccggcggcggctatagcgcaggcggcgccaactggccccacgcgcagccgggctatcaaaaacagcagggggcgctttaccgtcaactgctgcaaaccccggcggcggaaaagccacccgttgcgccggcgcctgcggaaagcctggcagcccatagccaaagctttggccgggtgctgactattatcggcagcgattgcgcgctgctcgagcgcggcggcacattggcgttgctggcgctgccggtggcggagcgctggctgcgtcaggcgcagctaacgccgggcgcggaagcggtttgcgcgcagccgctgctgatcccgctgcgtcttaaagtgagtgaagcagaacgtaaggcgctggaaaaggcgcagccggcgctggcgcaattgggtatcgatttacaagcagatgctcagcacgtgacggttcgcgcggtgcctttacccttaagacaacaaaatttacaaatcttgattcctgaactgataggctacctggcgcagctaacggcattcgacgtcggcgacattgcccagtggacggcgcgtaatctgacgagcgagcacgcgcagtggagtatggcgcaggcgatttccgtgctggcggacgttgagcgtttatgtccgcagctgattaaagcgccgccgggtggtctgttacaacctgttgatttacattcggcgatgacagccctgaaagatgagtga

SEQ ID NO: 89972 - DNA, 906 bp, Enterobacter aerogenes
atggggccgacggcctccggtaaaaccgcattagctatcgccttgcgtaaagttttgcccgtagagttgattagcgtcgattccgccctcatctatcgaggaatggatatcggcacggccaaacccgatgccgcggagcttagcgctgcgccgcatcggttgctggatatccttgatccggcagagtcgtactcggcggcggattttcgccgcgatgcgttggcggaaatggcggatatcgtcgcagccgggcgcatcccgctgctggtcggcggaacaatgttgtacttcaaagcgttgttggaagggttatcgccgctgccttcggcggatcccgcagtcagggccagaattgagcaacaagcggcagagcaggggtggcacgcattgcaccggcagttacaggagatcgatcccgtggccgccgcgcgtattcatccaaatgatccgcaaagactttcccgagcactggaagtttttttcatttcgggtaaaactttaactgaactgacgcaaacgtcaggagaggctctgccgtatcaggtgcatcagttcgccatcgccccggcgagccgtgaactgctacatcaacgcattgagcagcgttttcatcagatgttggcttcaggttttgaagcagaagtgcgggcgctatttgcccgtggagatttgcatacggatatgccttccattcgttgtgtcggataccgccagatgtggtcataccttgaaggcgaggtcccgtatgatgaaatggtttatcgaggtgtttgcgcgacgagacagttagctaaacgtcaggtcacctggctgcgcggttgggaagatgttcactggttagacagtgagcaacctgaacaagcgctcaacaaagtattacaggttgttggtgctagccagaactga

SEQ ID NO: 89973 - DNA, 309 bp, Enterobacter aerogenes
atggctaaggggcaatctttacaagatccgttcctgaacgctttgcgtcgggaacgtgttccggtttctatttatttggtgaatggtattaagctgcaagggcaaattgagtctttcgatcagttcgtgatcctgttgaagaacacggtcagccagatggtctataagcacgcaatttctactgttgttccgtcccgcccggtgtctcaccacagcaataatgctggcggcggtgcaaacaactatcaccacggtggtagcgcgcaaggttcttctgcgccgcagcaagacagcgacgacgccgaataa

SEQ ID NO: 89974 - DNA, 1281 bp, Enterobacter aerogenes
ttgtttgaccgttatgatgccggtgagcaggcggtactggtacacatctatttttcgcaagacaaagatatggaggatctccaggagtttgaatccctggtctcttccgccggtgtcgaagcaatgcaggtgattaccggtagccgtaaagcaccgcacccgaagtattttgttggtgaaggtaaggctgttgaaattgcggaagccgtaaaagcgaccggcgcctcggtcgtgctgttcgatcatgccttgagtccggcccaggaacgtaacctggagcagctttgcgaatgccgggttatcgatcgcaccggtctgattttagatatttttgcccagcgagcgcgtacccacgaagggaaactgcaggttgagctggcgcagctgcgccatctggccacccgtctggtacgcggctggacccaccttgaaaggcagaagggcgggattggtttgcgcggaccgggtgaaacccagctcgaaaccgaccgtcgattgctgcgtaaccgtattatgcagatcctgtcgcgactggaaaaagtagaaaagcagcgcgagcaaggtcggcggtcacgcgctaaggccgatatccctaccgtctcgctggtgggatataccaacgctggaaaatcaacgctgttcaaccagataaccgaagcggaagtctatgccgcggaccaactgttcgccaccctggacccaacgctgcgccgtattaacgtcaccgacgtcggcgaaacggtactggctgacaccgtaggctttattcgtcatctgccgcacgatttggtggcggcgtttaaagcgacgctgcaggagacgcgtcaggcgacgctgctgctgcacgttatcgacgcggcggatgtccgcgtgcaggaaaatattgatgcagtaaatacggtccttgctgaaatcgaggccgatgaaatcccgtcattgctggtgatgaacaaaatcgatgtgcttgacgattttgaaccgcgcatcgatcgggacgaagagaataaaccgattcgggtctggctctccgcccagaccggagttggcgtaccactgctttttcaggcgttaacagaacgtctttccggcgaagtggctcagcatacgctgcgtttaccgccgcaggaaggtcgtctgagaagccggttctatcagcttcaggcgatagaaaaagagtggatggaggatgacggcagcgtaagcctgcaagtgcgcatgcccatcgtggactggcgtcgcctctgcaaacaagagcctgcgttggtcgactacgtggtttga

SEQ ID NO: 89975 - DNA, 1263 bp, Enterobacter aerogenes
atggcgtggaatcagcccggtaataacggacaggaccgcgacccgtggggaagcagcaagaatggcggcaactctgagggaaatggcaacaaaggcggtcgcgatcaggggccgcccgatctggatgatatcttccgcaagttaagcaaaaaacttggcggtctcggcggcggtaaaggcggccagggtggcggtaatgtgacgcaggggccgcgcggcccgatgggcgggcgcattgtcggcatcgttgctgcagcggcggtgattatctgggcagccagcggtttctataccatcaaggaagcggaacgtggtgtggtgacacgctttggcaagttcagccatctggttgagccaggtctgaactggaaaccaacctttgtcgataatgtgcaagcggtgaacgtcgagtcggttcgtgagctggccgcatctggtgtgatgctgacttccgatgagaacgtcgtgcgcgttgagatgaacgtacagtaccgggtgaccgatccggagcgctacctgtttagcgtgaccagcgccgacgatagtttgcgtcaggccaccgacagcgccctgcgcggcgtcatcggtaagtacaccatggaccgtatcctgaccgaaggtcgtaccgttatccgtagcgatacccagcgcgagctggaagagaccattcgtccgtacaacatgggtattaccctgctggacgtcaacttccagacggcgcgtccgccggaagaggtgaaggccgcgtttgatgatgccattgccgcgcgtgagaacgagcagcagtacatccgcgaagcggaagcttataccaacgaagttcagccgcgtgcgaacggtcaggcgcagcgtatcctcgaagaggcgcgtgcgtataaaacccagaccgtactggaagcacagggtgaagtcgctcgctttgcgaagatcctgccggaatataaagccgcgccggaaattacccgcgagcgtctgtatatcgaaaccatggaaaaagtgctgagccatacccgcaaagtgctggttaatgacagcaagggcggcaacctgatggttctgccgttggatcagatgctgaaaggcgccactggtgcgccggcaaagagcgatagcagtggcgcaagcgatctgctgcgcctgccgcctgcgtccagctcaagcagcgccagcacctcatcaacctcgagttcaactgggggtaccattatggaccaacgccgcgccaacgcgcagcgtaacgactaccagcgtcagggggaataa

SEQ ID NO: 89976 - DNA, 1005 bp, Enterobacter aerogenes
atgcgtaaatctgttatcgcgatcattgtcgtcgtgctggtagtgctctacatgtctgtcttcgtggtgaaagaaggcgagcgtggcattacgctgcgctttggcaaagttctgcgcgacgatgagaacaagccgctggtgtatgcgccgggtctgcacttcaagatcccgtttattgaatccgtgaaaatgctggatgcgcgtatccagaccatggacaaccaggctgaccgctttgttactaaagagaagaaagacctgatcgtcgactcctatatcaagtggcgcatcagtgacttcagtcgttactatctggcgaccggcggcggcgacgtctcccaggccgaagttctgctgaagcgtaagttctctgaccgtctgcgctctgagattggtcgtctggacgtgaaagacatcgtgactgattcccgcggtcgtttgaccctggaagtgcgtgatgcgctgaactccggttctgcaggtacagaagatgaagtctcgacgccggcagccgatgacgctatcgctaaagcggcagaacgggtagaagctgaaactaacggtaaggttcaggtaatcaacccgaacagtatggcggcgctgggtattgaagtcgttgacgtacgtatcaagcagatcaacctgccggctgaagtgtctgaagcgatctacaaccgtatgcgcgccgagcgtgaagcggttgctcgtcgccatcgttcacaaggtcaggaagaagcggaaaaactgcgcgcgaccgcggactatgaagtgaccaagaccctggcggaagccgagcgtcaagggcgtattctgcgcggtgaaggcgatgccgagtcggcaaaactgtttgccgatgcattcagtcaggatccgggcttctatgcctttatccgtagcctgcgcgcctatgagaagagcttccagagcaaccaggacgtgatggtcctcagcccggatagcgatttcttccgttacatgaagtcaccggattctgtgcgtaaataa

SEQ ID NO: 89977 - DNA, 198 bp, Enterobacter aerogenes
atgaatgcaacaatttggctggcactggcgctggttttagttctcgaaggtcttggcccactgctttatccccgcgcctggcgcaagatggtagcgaccatgagccaactgccggataatttattgcgtcgctttggcggcggtcttgtggtagctggtatcgtcatctactacatgttgaggaaatcgattggctga

SEQ ID NO: 89978 - DNA, 1299 bp, Enterobacter aerogenes
atgggtaacaacgtcgtcgtactgggcacccaatggggtgacgaaggtaaagggaagatcgtcgatctcctgactgaacgggctaaatatgttgtgcgctaccagggtggccataacgcaggccatactctcgtaatcaacggtgaaaaaaccgtcctccatcttattccatcaggtattctccgtgagaatgtaaccagcattatcggtaacggtgttgtgctgtctccggctgcgctgatgaaagagatgaaaggtctggaagaccgtggtatccctgttcgtgagcgtctgctgctgtccgaagcctgtccgcttattctcgactatcacgttgcgctggatgttgcgcgtgagaaagcacgcggtgcgaaagctatcggtacaaccggtcgcggtatcggcccggcttacgaagataaagtcgcccgtcgcggcctgcgcgttggcgacctgtttgataaagccaccttcgctgacaaactgaaagaagtgatggaatatcacaacttccagttggtgaacttctataaagcagaagcggtcgactatcaaaaagtgctggacgatgtgatggcgattgccgacatcctgaccagcatggtcgttgacgtctccgatctgctggatcaggcgcgtcagcgcggcgacttcgtgatgttcgaaggcgcgcagggcacgctgctggatatcgaccacggtacctatccgtatgtaacttcctccaacaccactgctggtggcgtggcgaccggctccggcctgggcccgcgttatgtggattacgttctgggtatcatcaaagcttactctactcgtgtaggcgcgggtccgttcccgaccgagctgtttgatgaaaccggcgagttcctgtgcaagcagggtaacgaattcggcgccactaccggccgtcgtcgtcgtaccggctggctggacgctgtcgcggtacgccgcgcggtgcagattaactccctgtccggcttctgcctgaccaaactggacgtcctggacggcctgaaagaagtgaaaatctgcgtcggctaccgtatgccggacggccgtgaagtgaccaccactccgctggctgccgacaactgggaaggtatcgagcctatctacgaaaccatgccgggttggtccgaaaccaccttcggcgtgaaagagcgcagcggtctgccgcaggcagcgctgaactatatccagcgtattgaagagctgaccggcgtgccggttgatatcatctctaccggtcctgaccgtactgagactatgattctgcgcgacccgttcgacgcgtaa

SEQ ID NO: 89979 - DNA, 435 bp, Enterobacter aerogenes
gtgcagttaacgagtttcaccgattatggattacgtgcgctgatttatatggcgtcgttgccggatgaccgaatgaccagtatttccgaggtgacggatgtctatggcgtttcccgtaatcatatggtcaaaataatcaatcagttaagccgtgctggctacgtgacggccgtgcggggaaagaatggggggattcgccttggcaagccagctaaaatgattcgcgtgggtgatgttgtgcgcgatcttgagccgctatcgctggtgaattgcagcagcgaattttgccacattactcccgcttgccgcctgaaacaggcacttgccgaagccgcgcaaagtttcctgaaggaactggataactacacgctggccgatttggttgaaaagaatcaaccgctatataaattattactggtggaagaaaagcgctga

SEQ ID NO: 89980 - DNA, 2442 bp, Enterobacter aerogenes
atgtcacaagatccattccaggaacgcgaagctgagaagtacgcgaatccaatcccgagccgggaatttatcctcgaacatttaaccaaacgcgaaaaaccggccagccgtgatgagctggcgattgagttaaatattgagggcgaagaacaaaccgaagcgctgcgtcgtcgcctgcgtgcaatggaacgtgacggccagttggtcttcactcgtcgtcagtgctatgcgctgccggaacgtctcgatttagtcaaaggcgtcgttattggccaccgcgacggctacggctttttacgcgtcgaagggcgcaaagacgacctgtatctttcatctgagcagatgaaaatgtgtatccatggcgatcaggtgctggcccagccgttgggtgccgatcgtaagggtcgtcgcgaagcgcgcatcgttcgcgtgctggtgccgaaaaccagccagatcgtcggccgttatttcaccgatgccggtgtaggcttcgtggtgccggatgacagccgtcttagcttcgatatcctgatcccgcctgaagagatcatgggcgcgcgtatgggctacgtggtggtggtcgagctgacccagcgtccaacccgccgtaccaaagcggtcggcaaaatagttgaagtgctgggcgacaatatgggcaccggcatggccgttgatatggcgctgcgtacccatgagatcccttacgtctggccgccggcggtggaaaaacaggtttccggcctcaaagagcaggtgcccgaagaagcaaaagccgggcgcgtcgatttgcgctctctgccgctggtcactattgacggcgaagatgcccgcgacttcgatgacgcggtgtattgcgagaaaaaacgcggtggcggctggcgactgtgggtggctatcgccgacgtgagctactacgtgcgccccggtacaccgctggacggcgaagcgcgcagccgcgggacgtcagtctacttcccttcgcaggtcgtaccgatgctgccagaggtgctgtccaacggcctgtgttcgctgaacccacaggtcgatcgcctgtgtatggtctgcgaaatgacgatctcgtcaaaaggccggctgaccggctttaaattctatgaagcggtgatgagctctcacgcccgtctgacctacaccaaggtatggcatatgctgcagggcgatcaggagctacgcgagcactatgcgccgttggtgaagcatattgaagagctgcataacctctacaaggtgctggatggcgcccgtgaagagcgcggcggtatctcatttgaaagtgaagaagctaaattcatcttcaacgccgagcgccgtatcgagcgtattgaacagactcagcgtaacgatgcgcacaagctgattgaagagtgcatgatcctggcgaacatctccgcggcgcgtttcgttgagaaagcgcaggagccggcgctgttccgtattcacgataagccaagcaccgaagcgattaccgccttccgtaccgtgctggcggaactggggctggaactaccgggcggcaacaagccggagccacgcgattacgccgagctgttgacttccatcgccgatcgcccggatgcggaaatgctgcagacgatgctgctgcgttccatgaagcaggcggtctacgatccggaaaaccgcggccacttcggcctggcgttgcagtcatacgcccacttcacctcgccgatccgtcgttatcctgacctgtcgctgcatcgcgctattaagtatttactggcgaaagagcagggacataaaggcaatagcaccgagaccggcggctggcactacagcatggaagagatgctgcagctgggcgagcactgctcgatgaccgagcgccgcgccgatgaagcaacgcgtgaagtgtcagactggctgaagtgcgacttcatgcaggatcaggtgggcaacaccttctccggcgtgatcgccagcgtcaccggctttggcttcttcgtccgcctgaacgatctgtttatcgatggtctggtacatgtctcctcgctggataatgactactatcgcttcgaccaggtaggacagcggctgattggcgagtccggcggccagacttaccgcctgggcgaccgcgtggaagtgcgcgtcgaagcggtcaatatggatgagcgtaagattgatttcagcctgatttccagtgaacgcggcccgcgtaatgtcggcaaaaccgcacgcgaaaaagcgaagaagggcgcgccgggtaaaaacggcggcggccgtcgtcgccaggttggcaagcaggtaaacttcgagccggatagcgccttccgcaaggaaaaagagaaagctaaagccaaaccgaaaggcgagaagaaagcgaaaaagccatcggcgaaaacgcaaaaaatcgccgcggcaaccaaagccaagcgcgcggcgaaaaagaagaacgccgagtga

SEQ ID NO: 89981 - DNA, 732 bp, Enterobacter aerogenes
atgagtgaaatgatttacggcatccatgcggtgcaggcactgctggaacgcgcacctgagcgttttcaggaagtttttattctgaaaggccgtgaggataagcgtctgctgccgctgattcatgcccttgaagcgcagggcgtggtgattcaggttgccagccgccagtttctcgatgagaaaagcgaaggcgcggtgcaccagggcatcattgcccgcgtgaagccgggacgtcagtatcaggaaaacgatctgccggatctgctggcgcagttcgaacaaccgttcctgctgatcctcgacggcgtcaccgatccgcacaacctcggcgcctgcctgcgtagcgccgacgccgccggcgtgcatgcggtgatcgtgccgcgcgatcgttccgctcagctcaacgctacggcgaagaaagtcgcctgcggcgcggcggaaagcgtgccgctgatccgcgtcactaatctggcgcggaccatgcgtctgctgcaggaagaaaacgtgtggatcgttggtaccgccggcgaagccgaccatacgctgttccagagcaaaatgaccggcccgatggcgctggtgatgggcgcggaaggcgaaggtatgcgtcgcctgacccgcgaacattgtgatgaactgatcagtatcccgatggcgggtagcgtctcttcgctgaatgtctccgtcgccaccggtatttgcctgtttgaagcggtgcgccagcgcagctaa

SEQ ID NO: 89982 - DNA, 1296 bp, Enterobacter aerogenes
atgcacaccgccagcacaacatcggcagcgcaaaaacgcgcgctgatcgccggttctatcggtaactttattgaatggtacgagttcgcggtctatggctttctggcgaccgtaattgcgaaaaattttttccaaatgactggagaagcgccgctgaccgggctgattctgacttacgcctctttcgcgatagcgttcttctttcgcccgctgggcgccatcgtttttggccgtctcggcgaccgcatcggccgcaagccgacgctgattatcgtattggtgctgatgacgctcgccaccacggcaatcggactggtgccggtttacgccagcatcggtattgccgcgccgcttattctgaccggattacgtattcttcagggattgtttgccggcggcgaatacggaggtgcggtgtcgctgatgaccgagttcgcccctaaaggtaagcgtggtctgtatggcgcatggcagtcttttaccgtcgcgctggggctgctggcaggcgcaggcgtggtcgcgctgatttccgccgcgcttagccccgaatcgctgcatgactggggctggcgcatccccttcttcctcgccataccgatgggcatcgtcgcgctgtggctacgcgttaaaatggaagagacgccgggctttttacgccagcagcaggctacgccgcccgcggaaacccgtgccagtttgcgccagacgctcaaagcgattctcaccggcattggccggctgatggtatggtcggcggcgggttatacctacctggtgatcatgccctcataccttcagtccgcgctgcacaccggttttaatcaggcactgctgattgcggtgatctccaatattggcttcgccatcaccatcttgcctgccgggatgctcagcgataagtgggggcgtcggcgggtgatggtcgcggctgcggtattgctgctggtactggcgctaccgctgctgaaaatattgcaggcggaaagcagtacgctgctggtgaaaggtatcgtggtgctgattgcgggtggcctggtggggattctggccgggcctgggccggcgatgctggcggagatgttcccaaccagagtgcgttataccgggctggggttagcctattcgctttcgaatgctgtcttctccggctgtgccgggttgattattaccggcctgattaaacagaccggtaatctggatattccggcgtactacgtgatggcgacggccgtcgtcagtattgccgcgctgatgacgctcaataagaacgatcatttgcgggcgctggacgactaa

SEQ ID NO: 89983 - DNA, 1638 bp, Enterobacter aerogenes
atgcactggcaaacgcataccgtattcaatcaaccgacgccgttgtgtaacagtaatctgtttttgtccgataccgcgctttgtgaggcagtgacgcgtgaaggcgccggctgggatagcgatctgctcgccagcatcggccagcagttaggcacggcggaatcgctggagttggggcgtctggccaatagtaatccgccggaactgctacgctatgacgccaccggcgcccgattggatgacgtgcggtttcaccccgcctggcatttgctaatgcagggactgtgcgccaaccgggtgcataatcttgcctggcaggaggatgcccgcgcgggttcgtttgttgcccgtactgcccgctttatgctgcatgcccaggtggaggcgggaacgttatgcccgataaccatgaccttcgccgcaacgccgctgctacagcgcgcgctgcccaccgtctttagcgactggctgccgccgttgctcagcgaccgctatgacccgcatctggcgcccggcgatcagaagcgtgggttgctgattggcatgggaatgaccgaaaaacagggcggttcggacgtgctcagcaataccacccgagcggaaaaaacggcggaaggattctatcggctggtggggcataaatggttcttctcggtgccgcagagcgatgcgcatctggtattaggccagacgccgggcgggctctcctgcttctttgtgccgcgctttttacccgatggccaacgcaatggcgtgcgcctggagaggctgaaagataaattaggcaaccgctctaacgccagtagcgaagcagaattctttgacgcctgcgggtggctgataggcgaagaaggcgacggcgtgcggcaaattctcaagatgggcgcgctgacccgcttcgactgcgccgccggcagccatgccctgatgcgccgcgcttactcggtggcgctgtatcatgcgctgcagcgtcaggcgttcggcaagaatctggccgatcagccgatgatgcgtcaggtgctgggccagatggcgctgcgtcttgaaggacaaaccgcttttctgttccgtttggctcgcgcctgggatcggcgcgacgatgcgcatgaagtgctatgggcccggttatttaccccagccgccaaatttgctatctgtcgcgccggtataccgtttgtcgccgaggcgatggaagcgctgggcggtatcggttattgcgaagagagcgagctcccacgtttataccgtgagatgccggtgaatagtatctgggaaggctccggcaatattatgtgtctcgacgtgatgcgggtgcttggcaagcagccggcggcgctagaaatgctggcggcggagtgtgcggaagtcaaagggcaaaatcgccattacgatcgcgcgtggcgacagcttcagcaacttttacggcggccggttgaggcgcagggacgagaaatagcgcgtctggtgtattgcctgggggcgggtgcgcagatgctgcgctttgcgtcgccgccgctggcccaggcatggtgccgaatgatgctggatacgcgaggaagtgtccgcctggacgctcaactgcttgacgatgcgctgctgcgagcaatggggcgcggacgacagccgtctcaggcgtag

SEQ ID NO: 89984 - DNA, 276 bp, Enterobacter aerogenes
atgaaacgatcactgaccttacccagcctgttgctgaccaccgcgacggccaatacttccgctcagtcagccgaattcgccagtgcggattgcgtcaccggcctgaacgaaattggtctgatttccgtcaataatatctccggcagtcagcaggatgtcgagcacgccattgccgtaaaagccgatgagcagggcgcttcctggtatcgtatcgttcagatgtatgaagagccgcagccggatagctggcgggtgcaggccattctctacgcctga

SEQ ID NO: 89985 - DNA, 309 bp, Enterobacter aerogenes
atggtcatgcgtaggtttacaccgtggttactggctctcgccttaagcggatgtagcgtcctgcagggtacgccggaggcgccgccgccggcaagcgatcatccgcaggagattcgtcgcaatcagactgagggcctgcaaaagataggtaccgtcagcgtgctaatgtacggttcgccgatggatgtcgagaccgcgttgaaagccaaagcagaagccgccaaagcggattactacgtcatcgttatgatcgatgacaccatggttcccggccagtggtattcgcaagcgattctgtatcataaatag

SEQ ID NO: 89986 - DNA, 717 bp, Enterobacter aerogenes
atgataacactcgaaatgcgcaatctggcgggcggtgaagtgattcacgcctgtccggctgggatggcggagaaaccgctgccggttatcgtcttctatcacggttttacctcttccaaactggtctacagctactttgccgtcgcgctggccgaagccggcttccgggtgattatgccggatgccgccgaacatggcgcgcgttttcacggcgatgatgccgggcgaatgcagcgcttttggccgatcctgcgacaaaactttgttgagtttgccgcactgcgggaagcgattatcgctgaggggtggctggaagacgagcggctggcggtggccggcgcatcaatgggcggcatgaccgcgctcggcatcatgactcatcatcctgagcttaaatgtgtggcctgcctgatgggctcgggctatttcagcacccttgcacagacgttgtttccgtcgcccgaattcgatacggcaagcctggcggagtgggacgtcactcatcagctggcggcagtggctgataagccgttgctgctgtggcacggcgatgccgatgatgtggttccgcccggcgacactttccgcctacagcaggcgttaacgcagagcggcctggcagctaatctgacctgtcactggcaaaagggcgtgcgtcatcgcattaccccggaagcgctggacgcgaccaccgccttttttctgaggcatctttaa

SEQ ID NO: 89987 - DNA, 756 bp, Enterobacter aerogenes
atgactgaagcgcaaagacatcaaattttactggatttgctggcgcaaacgggattcgtcaccgttgaacaggtaatttcccgtctcggcatctctccggcgacagcaagacgcgatatcaataagctggacgaaaacggcaagctgaaaaaagttcgtaacggcgcggaagccatcagcgaacagcgcccacgttggtcgccaatgaacattcatcaggcgcaaaaccatgatgagaaagtgcgtattgcccacgccgcctcgcagcttgtgtcgccgggcgaaagcattgttatcaactgcggctccaccgccttcctgctcggccgcgaactatgcggcaaaccggtgcagatcatcaccaactacctgccgctggccaactacctgattgaccaggagcatgacagcgtcatcattatgggtgggcaatataaccacagccacttcatcaccctcagcccacagggcagcgaaaacagcctgtatgccgggcactggatgttcaccagcggcaaagggttaaccgccgagggattgtacaaaaccgatatgttgaccgcgatggctgaacagaaaatgctgaatgtcgtcggtaagctggcggtactggtcgatagcagtaaagtcggtgagcgcgccgggatgctgttcagccaggccagccaaatcgacctggttatcaccggtaagcaggccgatgaaacgatcctcaagcagcttgaggatcagggcgtgcaggttattcgcgtttaa

SEQ ID NO: 89988 - DNA, 1065 bp, Enterobacter aerogenes
atgagtaaagtgcaaaccatcacccgtgaatcctggattttgagcactttcccggaatggggcagctggctgaatgaagagatcgaacaagagcaggttgcgccgggcacctttgccatgtggtggctgggatgcaccggtatttggcttaaatcggaaggcggcgctaatatttgcgtcgatttctggtgcggcaccggtaagcagagccacggtaatccgctgatgaaaaccggccaccagatgcagcgcatggccggggtgaaaaaactacagccgaacctgcgcactacgccattcgtgctcgatcctttcgccatccgccaaattgatgccgtgctggcgacgcacgatcacaacgatcatatcgacgttaacgtcgccgccgcggtgatgcaaaactgcgccgccgatgtgccgtttatcgggccaaaaacctgcgttgacctgtggattggttggggcgtgccggcagaacgctgcatcgtcatgaaaccgggcgatgtggtgaagatcaaagacattgagatccacgcgctcgacgcattcgatcgtactgcgctcattaccctgccagccgagcaaaaagccgccggcgtgctgccggacggaatggaccagcgcgcggtcaactatctgtttaaaacgccgggcggcaacctgtaccatagcggcgactcccactactccaactactacgcgaagcacggcaacgagcatcagattgacgtcgccctcggttcctacggggaaaacccgcgcggcatcaccgacaaaatgaccagcgccgatatcctgcgcatggcggaatcgctgaataccaaagtggttatcccgttccatcacgatatctggtccaacttccaggccgacccgcaagagatccgcgtactgtgggagatgaaaaaagatcgtctgaaatacggcttcaagccgtttatctggcaggtcggcggtaaatttacctggccgctggataaagacaatttcgagtaccactacccacgcgggttcgacgactgctttaccattgagccggacctgccgttcaaatccttcttgtaa

SEQ ID NO: 89989 - DNA, 1401 bp, Enterobacter aerogenes
atggagatcctctacaacatctttaccgtcttctttaatcaggtaatgactaatgccccgctgctgctgggtatcgtgacctgccttggctatatcttgttgcgtaaaagcgtcagcgtgattatcaaaggcacgatcaaaaccatcattggtttcatgctgttacaagccggctccggcattcttaccagcacctttaagccggtggtggcgaaaatgtcagaggtttatggcatcaatggcgcgatttccgacacctacgcctcaatgatggcgaccatcgaccggatgggtgaagcctatagctgggtggggtatgcggtgctgttggcgctggcgctaaatatctgttacgtcctgctgcgccgcattaccggcatccgcactatcatgctgactggccatatcatgtttcagcaggcggggctgattgcggtctctttcttcatcttcggctgctccatgtggacgaccattatctgtaccgcggtactggtctccctgtactgggggatcacctccaacatgatgttcaagccgactcaactggttaccgacggttgcggcttctctatcggacaccaacagcagtttgcctcgtggattgcctataaagtggcgccgtatctggggaaaaaagaggagagcgtcgaagacctcaagctgccgggctggctcaatatcttccacgacaacatcgtctctaccgcgattgtgatgaccattttctttggcgccattctgctctcctttggcatcgacgttgtacaggcgatggcgggcaaaacccactggacggtctatatcctgcagaccggtttctccttcgccgtggctattttcatcattacccagggcgtgcgtatgttcgtcgccgagctgtccgaagcctttaacggcatctctcagcgcctgatccccggcgctgtgctggcgatcgactgcgccgctatctatagcttcgcgccgaatgccgtggtctggggctttatgtggggcaccatcggccaactgattgccgtgggtattctcgtcggcgttggttcctccatcctgatcatcccgggctttatcccaatgttcttctctaacgcgacgattggcgtctttgctaaccacttcggcggctggcgcgcggcgctcaaaatctgtctggtgatgggcatgattgaaatcttcggctgcgtgtgggcggtgaagttgaccggaatgagcgcctggatgggcatggcggattggtcaatcctggcgccgccgatgatgcagggcttcgcctcgatagggctggcgtttatggccgtcattattctgatttcactggcttatatgttcttcgccggccgcgcgctgcgcgccgaggaagacgcggaaaaacaactggcagaagcctctgctcaataa

SEQ ID NO: 89990 - DNA, 306 bp, Enterobacter aerogenes
atgaccgtacgtattctggctgtgtgtggcaatgggcaaggtagttccatgatcatgaaaatgaaggtggaccagttcctgacgcaatcaaacatcgaccacacggtgaacagctgcgcggtaggtgagtataaaagcgagctaaacggcgcggatatcattattgcctcgacccacatcgcaggcgaaatcaccgtcactggcaataaatatgtggttggcgtgcgcaatatgctgtcgcctgcggatttcggcccaaaactgcttgaagtgatcaaagcccacttcccgcaggatgtgaaataa

SEQ ID NO: 89991 - DNA, 468 bp, Enterobacter aerogenes
atgaaacttcatgattctctggcgcagaaccactccatacgcctgcaggcggaggcggaaagctggcaggaggcggtgaaaatcggcgtcgatctgctagtggccgccgacgtagtggaaccgcgttactaccaggcgatcctcgatggcgtcgcgcagcatggcccctattttgttatcgcgccggggctggcgatgccgcacggccgtccggaagagggcgttaagaaaaccggctttgcgctggtgacgctcaaaaaaccgctaattttcaatcacgaagataacgacccggtcgacattctgatcaccatggcggcagttgacgccaccacccaccaggaggtgggcatcatgcagatcgttaacctgtttgatgacgaagccaatttcgaccgtttacgcgcctgccgcaccgagcaggaagtgctggatttaattgaaaacgccactgcggcggctgtttaa

SEQ ID NO: 89992 - DNA, 654 bp, Enterobacter aerogenes
atgtctcagttaccaatgttgcaggttgcgctggataaccaaaccctgtctcacgcctatgagaccacccggctgatcgccgaagaggtggatatcattgaagtcggcactattctctgcgtcgccgaaggggtgcgcgcggtgcgcgatctgaaagcgctgtatccgcataaaatcgtgctggcggatgccaaaatcgccgatgccggtaaaatcctgtcgcggatgtgctttgaagccaacgccgactgggtgaccgtgatctgctgcgccgatatcaacaccgccaaaggggcgctggatgtcgctaaagagttcaatggcgacgtacaaattgaactgaccggcttctggacctgggagcaggcgcaggcgtggcgtgatgcgggtattcagcaggtggtctatcaccgcagccgcgacgcgcaggccgcgggcgtggcgtggagcgaggcggatatcagcgcgattaagcgcctttccgatatgggcttcaaagtcaccgtgaccggcggactggcgctggaagacctgccgctgttcgccggtatccctattcacgtctttattgccgggcgcagcatccgcgatgccgcctcgccggtggaagcggctcgccagtttaaacgctctatcgcccagctgtggggttaa

SEQ ID NO: 89993 - DNA, 855 bp, Enterobacter aerogenes
atgttgtcgaaacaaattccgctcggtatctatgaaaaagcgctccccgccggggagtgttggctggagcggttacagctggcgaaagcgctgggttttgattttgttgaaatgtcgcttgatgaaaccgatgcccgtctcgcccggctggactggagccaggagcagcgcctcgcgctggtcaaggcggtagccgaaaccggcgtccgggtaccatcgatgtgccttagcgcccatcgtcgttttccgctcggcagcgaagatgacgcggtgcgcaagcaggggctggacatcatgcgtaaagccattcagctggcgcaggatgtggggattcgggtgatccagctggcgggctacgatgtttattaccagcaggcgaatgatgaaacgcgccgccgttttcgtgaaggcctgaaagagagcgtcgagatggccagccgggcccaggtcacgctggcgatggaaatcatggactatccgctgatgaactcaatcagtaaggcgctgggttatgcccactacctgaataatccgtggttccagctttatccggatattggcaatctgtcggcgtgggataacgacgtacagatggaattgcaggccggcatggggcatatcgtggcggtacatgtcaaagatacgaagcccggcgtctttaaaaacgtgccgtttggtgaaggggtcgtcgattttgaacgttgcttcaaaacgctcaagcagacgggctactgcggtccgtatctgattgagatgtggagcgaaaccaccgatgacccggcggcggaagtcgcgaaagcccgtgactgggtgaaagcgcggatggcccgcgcaggcctgacggaggcggcataa

SEQ ID NO: 89994 - DNA, 687 bp, Enterobacter aerogenes
atgcagcagcttaaacagcaggtatttgcagctaatatggatctgccgcgccacgggctggtgacctttacctggggcaacgtcagcgcaattgaccggcagcgtgggctggtggtgattaagcccagcggcgtagcctacgagtcaatgaccgtcgatgatatggtggtggtcgatttgcagggcaacgtggtggaagggcgctggcgtccctcttctgataccgctacccaccttgcgttataccgccgttattccggccttggcggggtggtgcatacccactcgacgcacgctaccgcctgggcgcaggcggggctggcaatcccggcgctcggcaccacccacgcggactacttcttcggtgatatcccctgcacccgggcgctcagcgcacaggaggtggaagaggcctatgagttgaacaccgggaaggtgattatcgaaacgctgggcgaggccaacccgttacatacgccgggaattgtggtgtatcagcacggacccttctcctgggggaaagatgcccacgaggcggtgcacaatgcggtggtgatggaagaagtggcgcgaatggcgtggatcgcccgcggcattaatccgcagctacagcccatcgacatctggctaatggagaaacattttctgcgtaaacacgggcctgacgcctactacgggcagaagtaa

SEQ ID NO: 89995 - DNA, 1194 bp, Enterobacter aerogenes
atggtcccgcgtttcgcgacgttaggtcgcatcccgaaaggagtttgggtgctcggcggtgtcagcctgctaatggatgtctcatccgagatgatccacagcctgctcccgctgtttatggccaccacgctcggcgccagcgtcattattatcggtcttatcgaagggctagccgaagccaccgccttaattctcaaagtcttctccggcgtcattagcgactacgttggcaaacgcaaagggctggcgctgcttggctacgggctgggggcgctgagtaaaccgctgtttgccctcgcgccgagcgccggggtggtatttagcgcccgcatgatcgaccgcgtcggaaaaggtatccgcggagcgccgcgcgatgcgctggtcgccgacgtaacaccaccggagatccgtggcgctgcctacgggttacgccaggcgctggataccgtcggcgcctttctcggcccgctgctggcggtgctgctgatgttcatctgggccaacgattttcacgctatcttctgggtggcggtcattcccgccgtactatccattgctctactgggctttggcctgcaggagccgaaatccgccatcgcgcacaaacgtagcaatccgctgaagcgcgaaaacctgaaaaagctctccgccgcctactggtgggtggtggcgatcggcagtatcttcaccctcgcccgcttcagcgaagcttttttggtactgcgcgcccagcagatggagatcccgctgtttactattccactggtcatggtcgcgatgaacctggtctacagcctcacggcttacccgttcggtaagctctctgacagcatgagccacagtaaactgctgcaatgggggctgctggtgctgatcctcgccgatatcgtgctggcgctcagcggccactggagcacgctgctgatcggcgtcgcgctgtgggggattcacatggggatgactcaaggcctactggcggccatggttgcgcataccgcgccgccggaactacgcggtacggcattcggcatgttcaacctgatgagcgggctggcgctgctgctggccagtaccggcgcggggatactctgggaaagcttcggcgccgcatcgacgttttacgccggcgcggttatctgtctgctgacgctcatcggcatgcgctgtatgccatcggcctatcgtcagggttaa

SEQ ID NO: 89996 - DNA, 276 bp, Enterobacter aerogenes
atgaaaagcattatcatcgccgttatggctgcgctactccttagcgccaacgcgctggcagccatcaaaatcgatgggcgtcaggctcgcaacatggacgatgtgcagagtctgggcgtaatttatatcaaccataatatggctagcgagcaagaggccgaccaggccctgaaccaggaaagcgatgccctgggagcgaagtacttccagccaatcctgattcacgaaccgcagagcaatggccttattcatgccagcgccgctatttaccgctaa

SEQ ID NO: 89997 - DNA, 396 bp, Enterobacter aerogenes
atgcgtcattacgaaatcgtttttatggtccatcctgaccagagcgaacaggttccgggcatgatcgaacgttacactggtgcaatcactgcagcagaaggtacgatccaccgtctggaagactggggccgccgtcagctggcttatccgatcaacaaactgcacaaagctcactacgttctgctgaacgttgaagcgccgcaggaagcgatcgatgagctggaaactaacttccgcttcaacgacgccgttatccgcagcatggtaatgcgtactaagcacgctgttaccgaagcatctccgatggttaaagcgaaagacgagcgccgtgagcgtcgtgaagatttcgctaacgaaaccgcagatgattctgaagctggggattctgaagagtaa

SEQ ID NO: 89998 - DNA, 315 bp, Enterobacter aerogenes
atgaccaaccgtctggtgttgtccggcaccgtgtgcaggatgccccttcgaaaggtcagcccgtcaggaattcctcattgccagttcgtgcttgagcatcgttctgtgcaggaggaagccggttttcaccggcaggcgtggtgccaaatgcccgttattattagcggacacgagaaccaggccattactcacagtataacggtcggtagcgcagtcaccgttcaagggttcattagttgccataaggcaaagaacggcttgagtaaaatggttctgcatgccgagcagattgaattgatagattctggagactag

SEQ ID NO: 89999 - DNA, 228 bp, Enterobacter aerogenes
atggcacgttatttccgtcgtcgcaagttctgccgtttcaccgcggaaggcgttcaagagatcgactataaagatatcgctacgctgaaaaactacatcaccgaaagcggtaagattgtcccaagccgtatcaccggtacccgtgcaaaatatcagcgtcagctggctcgcgctatcaaacgcgcacgctacctgtccctgctgccgtacactgatcgtcatcagtaa

SEQ ID NO: 90000 - DNA, 450 bp, Enterobacter aerogenes
atgcaagttattctgcttgataaagtagcaaacctgggtagcctgggtgatcaggtaaacgttaaagcgggctatgctcgtaacttcctggtaccacagggtaaagctgttccagctaccaagaaaaacgttgagttcttcgaagcgcgccgcgctgaactggaagccaaactggctgacgttctggccgctgctaacgcacgtgctgaagcaatcaacgcactgggcaccgttaccatcgcgtccaaatctggcgacgaaggtaaactgttcggttccatcggtactcgcgacatcgctgacgctgtttctgcagctggcgttgccgttgcgaagagcgaagttcgcctgccgaacggcgttctgcgcaccaccggtgagcacgaagtagacttccaggttcacagcgaagtcttcgctaaactggttgttaacgttgtagctgagtaa

SEQ ID NO: 90001 - DNA, 936 bp, Enterobacter aerogenes
atggacgcttcctttccgaccccctcgatttttgccaataaaaaagtagcttatgtctgcgcgaccctatgctgtctgctgtggggcagttcttatccggcgattaaaaacggctatgagcttctgcacatcgccaccgatgatgttccctcaaaaattgtttttgccggatatcgcttcctgtttgcgggcttattgttgctgctgtttgcgctcgcgcagcgcaaacccatcgcccggctcaatggccgccagtgcgggcagctggcgatgctggggctgacgcagaccgctatccagtacgccttcttctacgtcggcctggcattcaccaccggagtgaagggatcgattatgaatgccaccgggacgttcttcagcgttctgctggcgcattttatctaccagaatgaccgactcagctataacaaaactatcggctgtgtgctgggcttcgttggcgtgatgttggtgaacttcaacgcctcattgggcgattttaattttgtctggcagggggatggatttgtcgtgctggcggcgttcatcctctcggcggcgacgctctacggcaaacgcatctcacaaaccgtcgacccaacggtgatgaccggctggcaactggccttcggcggcctggtgctggtggcgggcgggtatttgaccggcggggagctacggatgcacagcctgaccgcagcgatgatccttggctatttaactctgctgtcgtcgatagcttttgcgctatggagcgtgctgctcaagcacaaccgcgtcagtatgattgcgccgtttaactttgttatcccggtggccgggacggtgctgtcggcgatctttcttggcgagaatatctttgagtggaagtacgcgatcgcgctggtgctggtgtgtgtagggatccgctgggtgaacaaaagccaggcgcgttag

SEQ ID NO: 90002 - DNA, 672 bp, Enterobacter aerogenes
atgcccgggcgctttgaattgacatctaccctggcgaagatctggcacgccccggatcaacttcgtctcatggatccgctaccgcccatgcatcgccgcggcatcatcgccggcttcctgctggtcattattggtttcctgctcccctccggtgataatagcacgccggcccaggccagccgcgaagctaatctcgatctgcagtcccagtctcagccgcaaggttcgggcaatcaggctgtgccgcttccgccaattaccaatacaccgacggtcagcgatgccgaccaggttgcgcctgtggcgcctgaagccattcaggatgaacagccagaccagacgcaaaccgcttcctcttctcagccgtatcaacaaccggcgcagcagcagtctgctccgggcatcgaacagcagtggcgcacctaccggattgaatccggcaaaacgctggcgcagctgttccgcgaccacggtctgccagccactgacgtctatgccatggcgcaggtcgaaggcgccggcaaaccattaagcaccttgcaaagtggacaaacggtgcaaattcgccagaacgccaacggcgtcgtcaccggccttactatcgataccggcaacggccagcaggtgctgttcacccgccagtcgaacggcagcttcgtgcgcgcgcgataa

SEQ ID NO: 90003 - DNA, 621 bp, Enterobacter aerogenes
atggcaaccccgacttttgacactatcgaagcgcaggcaagttacggtatcggcttgcaggttggacaacaactgagcgaatccggcctgcaggggctgctgccggaagcgctggttgccggcattgccgatgcgctggaaggtaatcagccgcaggtgccggttgaagccgtacaccgcgcgctgcgtgaaatccatgaacgcgctgacgccgtgcgtcgcgagcgcttccaggcgatggccgctgatggccagaaatacctcgatgaaaaccgtgaaaaagaaggcgtgaacagcactgaatccggcctgcagttccgcgtactgacgcagggcgaaggcccgattccggcgcgcaccgaccgcgtacgcgttcactacaccggcaaacttatcgacggtaccgtgttcgatagctccgtggcccgcggcgaaccggctgaattcccggtgaccggcgtgatcggcggctggatcgaagcgctgaccctgatgccggtaggttccaaatgggaactgactattccgcacaacctggcttatggcgagcgcggcgcgggtgcttctatcccgccattcagcaccctcatctttgaagttgagctgctggacattatttaa

SEQ ID NO: 90004 - DNA, 1404 bp, Enterobacter aerogenes
atggtagatcaggtcaaagtcgttgccgacgagcaggagacgactgaacaatcgctacggcgaaatctcactaaccggcatattcagcttattgctatcggcggggcgatcggcaccgggctgtttatggggtctggcaagaccatcagtctcgccgggccatccattatttttgtttatatgatcatcggttttatgctgtttttcgtcatgcgtgccatgggcgaattactgctgtcgaacctcgaatataaatcattcagtgacttcgcctccgacctgttagggccgtgggcggggtattttaccggctggacctactggttctgctgggtggtcaccgggatggcggacgttgtcgccatcaccgcctacgcgcagttctggttccccgggctttctgactgggtcgcttcgttagcggttatcctgctgctgctgggcctgaacctcgcgaccgtgaagatgtttggcgaaatggagttctggttcgcgatgatcaaaatcgtcgccatcgtggcgctgatcgtggtcggcctggtgatggtgatgatgcactttaaatcgccgaccggcgttgaagcttcattcgcgcatctgtggaatgacggcggctggttcccgaaaggcctcagcggtttctttgccggcttccagatagcggtattcgccttcgtggggattgagctggtgggtactaccgcggcggaaaccaaagacccggaaaaatcactgccgcgggcgatcaactccatcccgctgcgtatcattatgttctacgtcttcgcgctgattgtgattatgtcggtgacgccgtggagctccgtcgtgccgagcaagagcccgttcgttgagctgtttgttctggtcggcctgccggctgccgccagcctgatcaacttcgtggtactgacttccgccgcctcttccgctaacagcggagtgttctccaccagccgtatgctgttcggtctggcgcaggaaggccaggcgccgaaaatgttcgccaagctgtctaaacgcgcggtgccggcgaagggcttaaccttctcctgcatgtgcctgctgggcggcgtggtgatgctgatggtcaacccgagcgtgattgccgcgttcaccatgatcaccacggtgtcggcgattctgttcatgttcgtctggaccatcatcctctgctcttacctggtctatcgtaaaaagcgtccgcagctgcacgagaagtccatctataagatgccgctgggtaaagtgatgtgctgggtgtgcatggccttcttcgtcttcgtactggtgctgttgacgctggaagatgatactcgcgaagcgctgatggttaccccgctgtggtttgttctgctgggcgcgggctggctgtttgccggtaaaaaacgtctggcgaaataa

SEQ ID NO: 90005 - DNA, 666 bp, Enterobacter aerogenes
atggctttccgtgaccaacctttgggcgagctggcgctgagcatcccgcgcgcctccgcgctgttccgtaaatacgatatggattactgctgcggcggcaaacaaaccctggagcgcgcggcgacgcgcaaagcgctggatgttgcggtgattgaagccgagctggcgaaactggccgagcagccggtcgagcgcgactggcgcgccgcgccgttcgccgacatcatcgaccacatcatcgttcgctatcatgatcgccaccgcgaacagctgccggaactgatcctgcaggcaaccaaggttgaacgcgtccacgccgataagccgaacgtaccaaaaggactaaccaaatatctgaccatgctgcaccaggaactctccagccacatgatgaaagaggagcagatcctgttcccgatgatcaagcagggcatgggcgctcaggccggtggtcctatcagcgtaatggaaagcgagcatgacgaagcgggcgaactgctggaagtgatcaagcacatcacccataacgtgacgccgccgccggaagcctgtactacctggaaagcgatgtacaacggcattaacgagatgattgacgacctgatggagcacatcagtctggaaaataacgtgctgttcccgcgtgccctcgccggaaaatcataa

SEQ ID NO: 90006 - DNA, 975 bp, Enterobacter aerogenes
atgattagcggcgtgttgtatgccctgctggcggggttaatgtgggggctgattttcgtcggcccgttgctggtgccggaatacccggcggtgctgcagtcgatggggcgctatctggcgctgggacttatcgccctgccgctggcgtggctcggccgcgcgcgtctacgccaactgaacggcaaggactggtggaccgcgctggcgctgaccatgatggggaacctgatttattacttctgtctggccagcgccattcagcgcaccggcgcgccggtatcgacgatgattatcggcaccctgccggtggtactgccggtgtgcgccaacctgctttatagccagcgtgatggcaagctgccgtggcggcggctatttccggcgctaatctgtattgcgctggggctggtatgcgtcaacgtagcggagctgcagcacgggcttcctgatttcagcccgtggcgctatggttcgggcattcttctcgcgctgatctccgtcgtctgctgggcgtggtatgccctgcgcaacgctcgttggctgcgtgaaaacccggataagccgccaatgatgtgggctaccgcgcaggcgttggtcacccttccggtctcgctggtcggttatatcgccgcctgtgggtggctgcagagccagcatatcgacttcccgctccccttcggcccgcgcccggcggtgttcatcgtcctgatgctggcgatcgccgtactctgttcatgggtcggcgcactgtgctggaatattgccagccagcgtctgccgacggtgatcctcgggccgctgatcgtcttcgagacgctggccggtttgctgtacaccttccttctccgccagagcctgccgccgctgctgacgctcagcggtatcctgctgctggtgctcggcgtggtgtcggcggttcgcgcccgcccggagaaaccggtcctgcaggaactgcgcgttgagccaaaaaaatag

SEQ ID NO: 90007 - DNA, 825 bp, Enterobacter aerogenes
atgcagggcgtaccaccacaatttagcgatgaaaaagaccacgcgcgctttcgccatctcgaacaactccccggcgttgagctctatcacgcccatatttcccgctatgcctttgaaccgcatactcacgaagccttcggcatcggcgtgattgaacaaggcgccgaacgctttcgctatcgcggtagtcagcacgtcgcctcagccaattccatcgtcaccatgaatccggatgagctccataccggcgaggcggaaaccgccgaaggctggcgctaccggatgatttatctggagccggatcggctggaggccttcaccggcgttcgccactggtggttcagcgaggtcgtgcgccaggagccgcagcgcgcccggcaaatcggccaactgatttacggcctgtggcacgcagacgatccgctggcgcagcaggggatactgctcgacctggttgataccttccgcccgctggctcaccattcgccaatggcgccggaagcggcgcatcgcttcgatcgggtacgcgactacctgcacgataactatatgcgcgccgtcagccttgatgaactggcgcaggtcgcggcgctcagcccctatcacttccagcgccagtttaaagcccactttcacgttaccccgcaccagatgctgatggcgattcgcctgtggcgcgccaaggcgtttttgacccacggcatgcccgccgccgaagtggccatcgccgccgggttaaccgaccaatcacacttaacccgcgccttcccccgccgctacggcattacgccggtgcgttatcaaaagcaggtcgccgggcgctaa

SEQ ID NO: 90008 - DNA, 849 bp, Enterobacter aerogenes
atgatcgcgattaccggcgctaccggccagcttggccagcacgtactgcatgatctgttaaaaaccgttcccgccagccagattgtggcgattgtccgcaacccggcaaaggcgcaagcgctcagccagcagggcgtcgtcgtgcgccaggccgagtacggcgatgaagccgcgcttaccgccgcgctgcagggggttgataaactgttattaatctcttcaagcgaagtcggccagcgcgccgttcagcaccgtaacgtcattaacgccgctaaagccgctggggtgaaatttatcgcctataccagcctgctgcatgccgatacctcaccgctgggcctggccggtgaacatatcgaaaccgaacaaatgctggccgattccggtattccttacgcgctgctgcgcaacggctggtataccgaaaactatttggccagcgcgccgccagcgctggaacacggcgtgtttatcggcgccgccggcgaaggtaaaatcgcctccgccacccgtgccgattatgccgccgccgccgctcacgttatcgccggtgagggccatgccgggaaagtttacgaactggcgggagataacgcctggaccctgagcgaactggctgccgagctgagcaagcaaagcgggaaaaatgtggtttatcaaaacctcagcgaagccgatttcgccgccgcgctgaaaaacgtcggcctaccggccgggcttgccgatatgctggcggattccgataccggcgcgtcgaaaggcggactatttgacgacagccgcaccctgagcaaactgattggccgcccgaccacgtcgcttgccgatagcgtgaaaggcatcatctaa

SEQ ID NO: 90009 - DNA, 372 bp, Enterobacter aerogenes
atggccgaaccgacgctgagcgacaaactgcgcaacgggaatctgtttgctgaacagtgcccgtcgcgtgatgtgctaaaacacgtgaccagccgctggggcgtgttgattctggtggcgctacgcgaggggacccaccgctttagcgatctgcggcgcaaaatgggcggcgtcagcgaaaagatgctggcgcagtccttacaggcgctggaacaggatggctttatcgaccgtgtttcatatccggtggtgccgccgcatgttgaatatagcctgacgccgctcggcctgcaggtgagcgagaaggtggcggcgctggcggactggatcgagctgaatctccccgcggtgctggctaaccacggggagtga

SEQ ID NO: 90010 - DNA, 1944 bp, Enterobacter aerogenes
atgattaagtttagcgcaacgctgctggccacgctggtggcggccagcgtcaacgcggcgacggtcgacctgcggatcatggaaaccaccgatctgcacagcaatatgatggatttcgattactacaaagatgccgcgacggaaaaattcggcctggtcagaaccgccagcctgattgaaaaagcccgcgcggaagcgaaaaacagcgtgctggtggataacggcgatgttattcagggtagcccactgggcgactatatggcggcaaaaggactcaaagagggggatgtgcacccggtttataaggcgatgaacactctgaattacgccgtcggcaacctgggcaaccatgaattcaactacggtctcgacttcctgcacaaggcgctggccggagcgaaattcccctacgttaacgccaacattatcgatctcaaaaccggcaaaccaatgtttacgccctacctgattcaggatacccaggttcaggatagcgatggtcaatcccatacactgcgcatcggctatatcggttttgtgccgccgcagatcatgacctgggataaagccaacctcaacggcaaggtgaaggtcaacgacatcactgaaaccgcgcgtaagtacgtgccggagatgcgcgcgaaaggcgctgatgtggtggtcgtggttgcgcattccggcctctctgccgacccctatcaggcaatggcggaaaactcggtctactacttaagccaggtgccgggcgttgacgccattatgttcggccacgcccacgcggtgttccccggtaaagacttcgctaccattaaaggcgcggatatcgccaaaggtacgctaaacggtattccggcggtgatgccgggaatgtggggcgatcatctcggggtggtcgatttggtgctgaataacgacagcggcaaatggcaagtaacgcaggccaaagccgaagcgcggcctatttatgacccggtggcgaaaaagtcgctggcggcggaagatagtaaaatggtggcggtgctgaaagccgatcacgacgccactcgcgaattcgtcagcaagcctatcggcaagtccgccgacaacatgtacagctacctggcgctggtgcaggacgacccaacggtgcaggtggtcaacatggcgcaaaaggcctatgtcgaacactacatccagggcgatccggatctggcgaagctgccggtgctttccgccgccgcgccgtttaaagtcggcggacgtaaaaacgatccggcaagctttgtcgaagtggaaaaaggccagctcaccttccgtaacgccgccgacctctatctctacccgaacacgctggtggtgatgaaggtaagcggtaaagaggtcaaggagtggctcgaatgctccgccgggcagtttaatcagattgacaccgccagcagcaaaccacagtcgctgattaactgggacgggttccgcacctataacttcgacgtgattgacggcgtaaactatcagatcgacgtgagtcaaccggcgcgctacgatggcgaatgccagatgattcacccgcagtcagagcgcatcaaagacctgacctttaacggtaagcctatcgatccgcaggccaccttcctggtcgccaccaataactatcgcgcctacggcggcaaattcgccggtaccggcgacagccatatcgcttttgcctccccggacgaaaaccgttcggtgctggcggcgtggattggcgcgcagtcgaagaaagatggcgcgatccatccggcggcggataacaactggcgtctggcgccgattcacagcaaaacgccgttggatattcgctttgagacctcgccaggcgacaaagccgcggcgtttatcaaagagaaagcgcagtatccgatgcggcaggtagcgaccgatgatatcggcttcgctatttatcagctggatttgagtcagtaa

SEQ ID NO: 90011 - DNA, 744 bp, Enterobacter aerogenes
atgttagaacaagtatgtcagcttgcacggaccgcgggcgatgccatcatggatgtctacgatgggaaccagccgatggatgtgagcagcaaaaaggatgattctcccgttaccgcggcggatatcgccgcgcataaagtcattgtcagcggcctgcaggcgctggatgcagcaatcccgatcctctccgaagaggatccgccggcgtgggaagtgcggcagcactggcagcgctactggctggtcgatccgctggacggcaccaaagagtttatcaagcgcaacggcgaattcaccgttaatatcgcgctgattgaaaacggcaaaccgacgctgggcgtggtgtacgcgccggtgatgaaagtgatgtacagtgcgcaaaatggcaaggcgtggaaagaagagtgcggcgtgcgcaagcagattcaggttcgcgatgctcgcccgccgctggtggtgattagccgctcccatggtaacgatccggagctgcaggagtatctggagcaactgggcgagcaccagaccacctcaatcggttcgtcgctgaaattctgcctggtggcggaaggccaggcgcagctctatccgcgcttcgggccgaccagcacctgggacaccgccgccggtcatgcggtcgcggtagccgccggggcgcacgttcacgactggcagggtaaaaccctcgactacacgccgcgtgaatccttcctcaaccccggcttccgcgtctctatttattaa

SEQ ID NO: 90012 - DNA, 558 bp, Enterobacter aerogenes
atgaccctacgtaagttgctggcggtttccgccctcctgttgccgttaatggcttcggcacataattttgtcgacggtcaacgcgtcgcgccggtaggcatcgccgaccgcggagaactggtactgagtaacgataagtttagctacaaaaactggaatagctcgcagctggcgggaaaagtgcgcgtcatccagcatattgccgggcgtacctcggcaaaagagaaaaatgccaatttgattgaggcgattaaggcggctggcctaccgcacgaccgctatcagaccactaccatcgtcaataccgacgacgctatccccggctccgggatgttcgtgcgcagcagtattgagagcaataagcagctctatccgtggtcgcagtttatcgtcgacagcaacggcctcgcgcgcaaagcctggcagctcgatgaaggcagttcggcaattgtggtgttagataaagacgggcgtgttcagtgggcaaaagacggcgcgctgacccagcaagaggtgcagcaggttgtcggcctgctgcataagctgcttaataaatag

SEQ ID NO: 90013 - DNA, 207 bp, Enterobacter aerogenes
atgaaaattttccaacgctacaatccgctgcaagtggcgaagtacgtgaagatcctgtttcgtggacggttgtacatcaaggacgttggcgcttttgaatttgataagggcaaaatccttatcccgaaggttaaggacaagctgcacttctcagtgatgtccgaggtcaatcgtcaggttatgcgtctgcaaacagagaccgcataa

SEQ ID NO: 90014 - DNA, 1353 bp, Enterobacter aerogenes
atgttaaacagtattttagtaatacttttccttattgccgtcagtgcatttttttcgatctctgaaatctcactggccgcatcacgtaaaatcaaactcaaattgctggctgatgaaggcaatgtgaacgcgcagcgcgttctcaaaatgcaggaaaaccctggcaccttcttcaccgtcgtgcagatcggccttaacgccgtggccattctcggtggtatcgtcggcgatgccgccttttcgcctgctttccacagcgtactgagccgctacatgtcgccggagctttccgagcagctgagctttattttctccttcaccctggtcaccagcctgttcatcctgtttgctgacctgacgccgaaacgcatcggtatgattgcgccagaagccgtggctttgcgcatcatcaacccgatgcgcttctgtttactggtcttccgcccgctggtgtggctgtttaacggcatggcgaacaacatcttccgcctgtttaaaatcccaatggtgcgtaaagacgacatcacctctgatgatatttacgcggtggtggaagccggtgcgctggccggggtactgcgtaaacaggaacacgaattaattgaaaacgtctttgagctggagtcccgtaccgtcccctcttcgatgactccgcgtgaaaacgtgatttggttcgatctgcacgaagacgagcagagcctgaagaataaagtggcggaacatccgcactccaagttcctggtatgtaacgaggatatcgatcacatcatcggctacgtcgattccaaagacctgctgaaccgcgtactggcaaaccagagtctggtgttaaccggcggcgtgcagatccgcaatacgctgatcgtgccggataccctgaccctctctgaagcgctggaaagctttaaaaccgccggcgaagacttcgcggtaatcatgaacgaatacgcgctggtggtggggattatcaccctcaacgacgtcatgactaccctgatgggcgacctggtcggccaggggctggaagaacaaatcgtcgcccgcgatgagaactcctggctgattgacggcgggacgccgatcgacgacgtgatgcgcgtgctggatatcgatgagttcccgcagtccgataattacgagaccatcggcggctttatgatgttcatgctgcgtaagatcccgaaacgcaccgatgcggtgaagttctccggttacaagtttgaagtggtggatatcgataactaccgtatcgaccagctgctggtcacccgtatcgataacaaaccaacggtgctggtaccgaaactgcctgatatcgaagaagcggcgaaaaaagagaaaggtgcggcgtaa

SEQ ID NO: 90015 - DNA, 639 bp, Enterobacter aerogenes
gtgagtctatttgataaaacgcatcttgtcgcccaggcggatgcactaccggggcgcaacacgccgatgccggtagcaacgctccacgccgttaacggccactcaatgaccaatgttcctgaaggaatggaggtcgcgctgttcgcgatgggctgcttctggggcgtcgagcgtctgttctggcaattgccgggggtctacagcaccgcggcgggctataccggcggctacacgccaaatccaacctatcgcgaagtctgcagcggcgacaccgggcacgcggaagcggtgcgtgtggtgtatgacccgcaggtcatcagctatgaacaactgctgcaggttttctgggagaaccacgatccggcgcaagggatgcagcagggtaacgaccacggcacgcagtaccgttcagctatctacccgctgacgccagagcagcttgaagcggcgcaggccagcatgctgcgttaccaggcagcgatgcgcgacgccaacgacacccgcgagatcaccaccgaaatcgccacggcgaaaccgttctactatgccgaggacgatcatcagcagtatctgcacaaaaatccgtacggctactgcggtatcggcgggattggcgtttgcctccccccgcaggcgtaa

SEQ ID NO: 90016 - DNA, 1734 bp, Enterobacter aerogenes
gtgcaacaaatccgccagatatgcgttaccagccttttgctggtcagcggggtcgccagcgcagcgaatgtgcgtttgcaggttgaggggttatccggggaactggaaaaaaacgtccgcgcccaactatccacgatccagagcgatgaggtcacgccggaccgtcgctttcgcgcgcgcgtcgatgacgccatccgcgagggcctgaaagcgctgggttattatgaacccactatcgatttcgatctgcgtccgccgcccaaaaaagggcgtcaggtactgattgccaaagtaactcccggcgagccggtgcgcattggcggtaccgaggttatcctgcgcggcggcgcgcgcaccgaccacgattatctggacctgctgaaaacgcgtccggcaattggcacggtacttaatcacagcgattatgacggcttcaaaagctcgctcaccaaggtggcgctgcgtaaaggctatttcgatagcgagttcaataaaagccagctcggcgtgtcgctcgaccgccatcaggctttctgggatatagattacaacagcggcgagcgctaccgctttggtccggtaagttttaccggttcgcagatccgcgaagagtacctgcaaagcctggtgccctttaaacagggtgattattacacctcgcaggatttggcggagctgaaccgccgcctggcggcgaccggctggtttaactcggtggtcgtcgcgccgcagtttgataaatcacgcaaaaccaaggtgctgcctctgcagggcgtcgtttcgccacgcaaagagaacaccgtggaaaccggggtcggctattcgacagacgtcgggccgcgcgtgaaagcaacgtggaaaaagccgtggatgaactcctacggccacagcctgagctccagcatcagcctctccgcgccggaacagcagttcgatttcagctacaaagtcccgctgttaaaaagcccgcttgagcagtattacctgatgcagggcggttttaagcgtaccgaccttaacgataccaaggccgactccaccaccctggcgctgtcgcgctattgggagatgtcgagtggctggcagcgcgcgattaatttgcgctggagtctggaccactttacccaggcgaacgtcaccaataccaccatgctgctttatcccggcgtctcggtaaaccgcacccgctcccgcggcggcctgatgccgacctggggcgattcccagcgctattcggtggactactccaacaccatgtggggctcggacattaactttatcgtcatgcaggcgcaggacgtgtggatccgcaccctctatgaccgccaccgcttcgtggtgcgcggcaaccttggctggattgaagccgatgacttcagcaaagtcccgccggatctgcgtttcttcgctggtggcgaccgcagcattcgtggttataaatacaagtcgatctcgccgaaagacgacgacggcaagctgatcggtgcgtcaaagctggcgacaggctcgctggagtatcaatacaacgtcaccggaaaatggtggggggcgatgtttattgacagcggcgaagcggtgagcgacatccgtaaaagcgattttaaaaccggcgcgggcgtcggcgtgcgctggcaatcgccggtcgggccgatcaagctggatatcgccagacctatcggcgacaaagaagaacacggtttacagttttatatcggtctggggcctgaattatga

SEQ ID NO: 90017 - DNA, 3777 bp, Enterobacter aerogenes
atgagtttatggaagaagataagcctcggcgtattactctttttagtgttgctgattggcgcggtcggctttttagtcggcactactaccggtttgcatctggtactgaaagcggcggaccgctgggtgccggggctggagatcggcaaggttaccggcggctggcgtgacctgaccttacagaacgtgcgcttcgaacagccgggcgtggcggtgacggccggccagttccatctcggcgtcaagctgcgctgcctgtgggatagcagcctgtgcgtaaacgatatctcgctgcgtgatatctacgtcgctatcgataccaaaaagatgccgccttcggcgccggtagaggaagaggattccggcccgctgaacctctcgacgccataccccattaccctcagccgcgtggcgctgcataacgtcaatgtcaaaatcgacgacaccgccgtttcgctgcgcgatttctccaccggcctgaactggcaggagaaaaacctgactctgacgccgacttcgctccagggcttgctcatcgccctgccgaaggtggcgaaagtggcgcaggagcaggtggtggagccgaaaattgaccatccgaaaccggaagagaagccgcttggcgagacgatgaaagatctgttctcgcagccggtgctaccggagatggtcgatgtgcatctgccgctgaaccttaatattcaggagttccgcggcgaacagctgcgcctgaccggcgacaccgatatgaccgtctacaacctgctgctgaaggtgagcagcatcgacgggcagatgaaacttgatgcgctggacgtcgattccgaccagggcaaggttaccgcttccggcaccgcgcaactgcaggataactggccggtcgacatcaccctcgacagcacgctgaacatcgacccgctgaaaggcgagaaggtaaagctgaaagttggcggcgaactgcgtaaaaaactgcaggtcggcgttgatttagccggctcggtggccatgaccctgcgcgccgaagcgcagctggcggaagccggtctgccgctgaatatggaagtgaagagtaagcagctgtactggccgtttaccggcgagaaacagttccaggcggatgatctgcatctgaaattcagcggcaaaatgaccgactacaccatggcgtttagtaccgcggtgaaaggacagtcgctgccgccggctaaaattacccttaatgctaaaggcaatgaacagcaggtgaacctggataagctgaccgtagcggcgctggaggggaaaaccgaactgaaagcgttgctcgactggcagcaggcgatcagctggcgcggcgaattgaccctcgatggcattaataccgccaaagaggtgccggactggccgtcgaagctgaacgggattatcaaaacccagggtagcctgtatggcagcagctggcagatggcggttcccgagctgaaaattaccggcaacgtgaaacagaataaagtggatgtccacggttcgctgcagggtaacagctatatgcagtggaaagtgccgggactgcatctggcgcttggcccaaacagcgccgatgtgaaaggcgagctgggggtgaaagacctcaatctcgacgccaccatcgatgcgccgcatctcgataacgcgttgccggggctcggcggtacggcgaaaggtctgctgaaggtgcgcggcaccatcgatgcgccgcagctgctggcggatatcaccgctcgcgctttacgctggcaggaactgacggtagctcaggtcaacgtcaaaggcgacgtcaaatccagcgaccagattggcggtaatcttgacgtacgcgtcgatcgtatcagccagccgggcgttaacatcagcctggtgcagttgaatgccaaagggactgagaagcagcatgatttacagctgcgcgtacagggcgagccggtgtcgggccagttgacgctggcgggcagcttcgatcgtaaagaggagcgctggaagggcaccctgagcaatacccgtttccagacgccggtcgggccggtggcgctgacgcgcaacattgcgctgaattaccgtaatcaggaacagaaaatcagcatcgggccacattgctggagcaacccgaatgccgagctgtgcgtaccgcagaccatcgatgccggcgccagcgggcgcgcggtggtcaatctcaaccgtttcgatctggcgatgctgaagccgtttatgccggaggcgacccaggcaagcggcgtgtttagcggtaacgccgatgtgagctgggataccaccaaagaggggctgccgcagggcaaagtcaccctcagcgggcgcaacgtcaaagtcacccagacggtcaacgacgcaccgctgccggtggctttcgatacgcttaacctcagcgccgacctgcataacaaccgggcgcagttgggctggctgatacgcctgaccaacaacggccagcttgatggccaggtggaggtgaccgacccgcaggggcggcgtaacctgggcggcaacgtcaacattagcaacttctcgctggcgatgattaacccgatcttcgctcgcggcgagaaagcggaaggcaagcttaatgcccgtctgcgtctgggcggcaacttacagagcccgcaactgtttggtcagatgcagttgagcggcgttgatatcgacggcaactttatgccgtttgatatgcagccgagccagctggcgatgaacttcaatggaacgcgttcgaccctgcaggggacggtgaataccaaacaggggcagattgcgctgagcggcaacgccgactggacgcaaatcgacaactggcgcgcgcagattgcggcgaagggtagccgggtgcgcattaccgtgccgccgatggtccgcctggatgtttctccggatgtggtgtttaccgccacgccaagcctgtttaacctcgatggccgcgttgacgtaccttgggcgcgtattgtggtgaacgaggtgccggagagcgcggtgggcgtctcttctgatgaggtgatgctggataaagatctgaagccgattaagccgcagagcgccggtattccgatcaacagcaacctgacgattcacgtcggcaacaacgtgcgtctggacgctttcggcctgaaagcgcgtctgaccggcgatctgaaagtggcgcaggataagcaggggctggggctcaatggccagatcaatattccggaaggtcgtttccacgcttatggtcaggatctgatcgtgcgtaaaggcgagctgctgttctccgggccgccggatcagccgctgctcaatatcgaagcgattcgtaacccggaagccaccgaagacgacgtgatcgccggcgttcgcgtcaccggttctgccgatcagccgaaggccgagatcttctccgacccggcaatgtcgcagcaggaagcgctttcttatctgttacgcggtcagggtttaggcagcgaacagagcgatagtgcggcaatgacctcaatgcttattggaatgggggttgcacaaagtggtcaggttgtgggtaaaatcggcgagacgtttggcgtaagcaatttggcgctggatacccagggggtaggcgactcctcccaggtggtggtcagcggctatgtgctgccgggtcttcaggtaaaatacggcgtcggcatcttcgactctttggcgacgcttaccctgcgttatcgcctgatgcctaagctatatatggaagcggtgtctggcgtagaccaggctctcgatttgctctatcagtttgagttttag

SEQ ID NO: 90018 - DNA, 342 bp, Enterobacter aerogenes
atgcgaatatttgtttacggcagtttacgacgcaaacaaggcaacagccactggatgaccaacgcccagttgctgggcgctcatagtgtcgacgattatcagctgtacagcctgggccactatccaggcgcggtgccgggcgagggcacagtacatggtgaagtgtatcgtatcgacgcatcgacgctggccgagctggatgcactgcgcaccaagggcggtgaatacgcgcgccatctgatccaaacgccttacggcagcgcgtggatgtatgtctaccagcgctccgtcgaggggtttgcgcggattgagagcggaaactggttggacagagaccagtaa

SEQ ID NO: 90019 - DNA, 531 bp, Enterobacter aerogenes
atgagcttactcaacgtacctgcgggcaaagagctaccggaagacatctacgtcgttatcgaaatcccagctaacgcagacccaatcaaatacgaagttgacaaagagagcggcgcactgttcgttgaccgtttcatgtccactgcgatgttctatccgtgcaactacggctacatcaaccacaccctgtccctggacggcgacccggttgacgtgctggtcccgactccgtacccgctgcaaccaggctcagttatccgctgccgtccggttggcgtactgaaaatgaccgacgaatccggtgaagatgccaagctggttgcggtaccgcacaccaagctgagcaaagaatacgatcacatcaaagatgtgaacgacctgccggaactgctgaaagcccagatcactcacttcttcgagcactacaaagatctggaaaaaggcaagtgggttaaagtcgacggttgggacaacgctgaagcggctaaagctgaaatcgttgcttccttcgagcgcgctaaacagaagtaa

SEQ ID NO: 90020 - DNA, 957 bp, Enterobacter aerogenes
atgtggaagcgcttacttctcgtcaccgcggtttcggcagctatgtcgtctatggcgatggccgccaacctgaccgtaggattttcgcaggtcggctctgaatcgggctggcgcgcggccgaaacgaatgttgctaaggaagaagcggcgaagcgtggcatcaccctgaagattgccgatggtcagcaaaaacaggaaaaccagattaaagccgtgcgctcattcattgcccagggcgtggacgcgatctttatcgcgccggtggtggcgaccggctgggagccggtgctaaaagaagcgaaagaggccaatatcccggtgttcctcctcgaccgttcgatcgacgttaaagataagtcgctgtatatgaccaccgtcaccgccaacaacgtgctggaaggccaactgattggcgactggttggtgaaaaccgtcgatggcaagccgtgtaacgtcgtggagctccagggcaccgtgggcgccagcgtcgctatcgatcgtaagaaaggcttcgccgaggcgattgccaaagcgtccaacatcaagattatccgctcgcagtccggcgacttcacccgcagtaaggggaaagaggtgatggagagctttatcaaagcggagaataacggcaagaacatctgcatggtctacgcccataacgatgacatggtcatcggcgcgattcaggccatcaaagaggccgggctgaagccgggcaaagatatcctcaccggttctatcgacggcgtgccggatatttataaagcgatgattgccggcgaggcgaatgccagcgtcgagctgacgccgaatatggccggtccggcgtttgatgcgctggaaaaatacaaaaaagacggcaccctgcctgagaagctgaccatcaccaaatcgaccctctacctgccggatacggcaaaagaagagttagagaagaagaaaaatatgggctactaa

SEQ ID NO: 90021 - DNA, 1503 bp, Enterobacter aerogenes
atgaccaccgaccaacatcaggaaatcctccgcaccgaaggattaagcaaattctttcccggcgtcaaagcgctggataacgttaatttcagcctacggcgcggcgaaatcatggccctgttgggcgaaaacggcgccggaaaatcgacgctgataaaagcgctcaccggtgtgtaccatgccgaacgcggggcgatttggctggaagggcagcaaatatcgccgaaaaacaccgcccacgctcagcagttgggtatcggcaccgtttaccaggaagttaacctgctgccaaatatgtcggtggcggataacctgtttattggccgcgagccgaagcgctttggtctgctgcggcgcaaagagatggaaaaacgcgctaccgcgctgatggcctcttacggcttctcgctcgacgtgcgcgaaccgctgaaccgtttttcggtggcgatgcagcaaatcgtcgccatctgccgggccatcgacctgtcggcgaaagtattaatcctcgatgaaccgaccgccagcctggacactcaggaagtggagatgctgttcaccctgatgcgccagctgcgcgataacggcgtcagcctgattttcgtgacccactttctcgaccaggtctatgccgtcagcgaccgtattaccgtgctgcgcaatggcagtttcgtcggctgtcgggagacccgcgagctgccgcaaatcgacctggtcaaaatgatgctggggcgcgagctggaccatcaggcgctgcagcgcgccgggcgcacgctgcttagcgataagccggtggcggcatttgaagattttggcaagaagggcacgattgcgccgtttactctgcaggtgcggccgggcgagatcgtcggcctggccgggctgttgggatccgggcgcaccgaaacggcggaggtcatttttggcatcaagcctgccgacagcggtaaagcgtggatcaagggcaagccgcaaacgctgcgctcgccgcatcaggcttcctgcctcggcattggcttctgtccggaagatcgtaaaaccgacggcatcatcgccgctgcttcggtgcgggaaaatatcgtgctggcgctgcaggcgcagcgcggctggctgcggccgatcccgcgccgtgaacagcatgagatcgccgaacgctttattcgccagctaggcattcgcactcccagcgctgaacaaccgatcgaatttctctccggcggcaaccagcagaaggtattgctgtcgcgctggctgctgaccaaaccccagttcctgatcctcgatgagccgacgcgcggtatcgatgtcggcgcccacgccgagattattcgcctgatagaaaccctctgcgccgatggcctggcgctgctggttatctcctccgaactggaagagctggtgggctacgccgaccgggtgatcatcatgcgcgatcgccagcaggtggcggaaatcccgcttgccgagctatcggtcccggcgatcatgaacgcgattgcggcataa

SEQ ID NO: 90022 - DNA, 1023 bp, Enterobacter aerogenes
atgcccagaaccgtaccacaaagcggacagccaaaacggcgctttagctggccgaaagggatgccgcaaattatcgctctcctgctggtattagcggtggatagcctggtggcgccgcatttcttccaggtgctgctgcaggatgggcggctgtttggtagcccgattgacattctcaaccgcgcggcgccggtggcgctgctggcgattggcatgacgctggtcatcgccaccggcggcatcgatctgtcggtcggtgcggtgatggctatcgccggggcgaccgccgcctcaatgaccgtcgccgggcacagcctgccggtggtgctgctcgccgcattgggcgcaggcgcgctggccggcctgtggaatggcattctggtggccgtgctgaagatccagcccttcgtggccacgcttatcctgatggtcgccgggcgcggcgtcgcgcagctgattacctccgggcagatagtcacctttgattcaccggcgctttcctggctcggcagcggatcgctgctgttgctaccgacgccggtgattatcgccgtcgcaacgctgctgctgttctggctgtttacccgcaaaacggcgctcggcatgtttattgaggcggtggggatcaatatccgtgcggcaaagaatgccggggtgaatacccgcatcgtggtgatgctggcctatgtactaagcggtatttgcgcggcgattgccggcattatcgtcgcggcggatatccgcggcgccgacgccaacaacgccggattgtggctggagctggacgccatcctggcggtggtgatcggcggcggttcgctgatgggcgggcgcttcaatctgctgctgtcggtggtgggggcattgattatccaggggatgaacaccgggattttactctccggtttcccgccggagctcaaccaggtggtgaaagcggtggtggtgctgtgcgtactgatcgttcagtcgccgcgctttatcggtctactgaaaggggtacgcggccgtgataaaacgtaa

SEQ ID NO: 90023 - DNA, 999 bp, Enterobacter aerogenes
gtgataaaacgtaatttacctttgatgatcaccctcgcggtattcgtgctgggctatctctactgcctgacccagtttccgggttttgcttcgacgcgggtgatttgcaatatcctgaccgataacgctttccttgggatcatcgccgtcggcatgaccttcgtgatcctcagcggcggtatcgatctgtcggtcgggtcggtgattgccttcaccggcgtgtttcttgccaaagcgatcggcttttgggggatctcgccgctgctggcctttccgctggtactggccatgggctgcgccttcggcgcgtttatgggattgctgatcgatgcgctgaaaattccggcatttatcatcaccctcgccggtatgtttttcctgcgcggcgtgagctatctggtctcggaagagtcgattcctattaaccatccgctgtatgacactctgtccgggctggcgtggaccatccccggcggcggccgcctgagcgcgatggggctgctgatgctgctagtggtggtgctgggaattttcctcgcccatcgtacccgctttggcaaccaggtctacgctatcggcggcaacgccacgtcggctaatttgatgggcatttcgacgcgtagcaccaccattcgcatctatatgttgtcgaccggtctggcgacgcttgccggcatcgtcttctctatctacacccaggcgggctacgcgctggcgggcgtcggcgtggaactggatgctatcgcttcggtggtgataggcggcacgctgcttagcggtggcgtcggaacggtcctggggacgctgttcggcgtggcgattcaggggcttattcagacctacatcaactttgacggtacgctcagttcatggtggacgaagatagccatcggcatcctgctgtttatcttcattgcgctgcagcgcgggctgacggtgctgtgggaaaatcgccagaatgcggcggtgactcgcgtgggtggggcggtgaatcgctga

SEQ ID NO: 90024 - DNA, 999 bp, Enterobacter aerogenes
atgaaaacgttaggtgaatttattgtcgaaaagcagcacgagttctcccacgctaccggtgagctgactgctttgttgtcggcaataaaattgggcgccaagatcatccaccgcgatatcaataaggccggtctggtcgatatcctgggtgccagcggtgcggaaaacgttcagggtgaagttcagcagaagctggacctgttcgcgaatgaaaaattaaaagctgcactgcgcgcacgtgatatcgtcgccggtatcgcctcggaagaagaagatgaaatcgtggtcttcgaagggtgcgaacacgccaaatacgttgtgctgatggatccgctggatggctcctccaacattgacgttaacgtctccgtggggactatcttctctatctaccgccgcgtcacgccggtcggtacgccggtcaccgaagaagacttcctgcagccgggtaacaaacaggttgccgcgggttatgtggtttacggctcctccaccatgctggtctacaccaccggctgcggcgtgcacgcctttacctacgacccgtcactcggcgtcttctgcctgagccaggagcggatgcgcttcccggagaaaggcaaaacctactccatcaacgaaggtaactatatcaagttcccgatgggcgtgaagaaatacatcaagtactgtcaggaagaagataaagagacccagcgcccgtacacctcgcgctatatcggttctctggtggccgacttccaccgtaacctgctgaaaggcggcatctacctgtatccaagcaccgccagccacccgcaagggaaactgcgtttactgtacgaatgcaacccgatggcgatgctggcggaacaggcgggcggcaaagccagcgatggtaaagagcgtattctcgatatcatcccggaaagcctgcaccagcgccgttcgttcttcgtcggcaacgaccacatggtagaagacgtcgagaacttcattaaagagttcccggacgcttaa

SEQ ID NO: 90025 - DNA, 1374 bp, Enterobacter aerogenes
atgcgcattcatattttaggaatctgtggcacgtttatgggggggctggcaatgctggcacgttccctcgggcatcaagtaaccggctcggatgctaacgtttatccgccaatgagcaccctgctggaaaaccagggcatcgatctgattcagggctatgacgccagccaactggacccgcagccggacctggtgattatcggcaacgctatgacccgcggtaatccgtgcgtcgaagcggtactggaaaacaacattccgtacatgtccggcccgcagtggctgcacgacttcgttctgcgcgaccgctgggtgctggccgtcgccggtactcacggtaaaaccaccaccgccggcatggcgacgtggatcctcgaagcctgcggctataagccgggcttcgttatcggcggcgtaccggggaacttcgatgtttccgcacgcctgggcgacagcccgttcttcgtgattgaagccgacgaatatgactgcgccttcttcgacaagcgttccaagttcgttcactactgcccgcgcacgctgatcctcaataaccttgagtttgaccatgcggatatctttgacgacctgaaagcgattcagaaacagttccaccacctggtgcgcatcgtgccgggcaaaggcaaaattattctgccggagagcgacatcaacctgaagcaggtgatggcgatgggctgctggagcgaacaggagctggtgggcgaacaggggcactggcaggcgaagaaactcaacgccgatgcctcgcagtgggaagtcctgctcgacggcgaaaaagtcggcgaagtgaactgggcgctggtcggcgaacataatatgcacaacggcctgatggcgattgccgcggcgcgtcatgtcggcgtggtgccggcggatgccgctaacgcgctgggcagctttatcaacgcccgccgccgccttgagctacgcggcgaagccaacggcgtgaccgtctacgacgattttgcccaccatccgacggccattctcgcgacgctgcaggcgctgcgcggcaaagtcggcggcaccgcgcgtattctggcggtgctggagccgcgttccaacaccatgaaaatgggcgtctgcaaagacgatctggcgccgtctctcggccgcgccgatgaagtcttcctgctacagccgcagcatatcccgtggcaggtggcggaagtggcggaagcctgcgtacagccggcgcactggagcgccgacgtcgatacgctggtggacatgatcgtgaaaaccgcgcatccgggtgaccatattctggtgatgagcaacggcggcttcggcggcattcatcagaagctgctggataaactggcgcaaaaagcggccgcggcagaataa

SEQ ID NO: 90026 - DNA, 522 bp, Enterobacter aerogenes
atgctgacctgtgaaagagtactttctaccgactcgccccatttcgccacgcttgacgcgctgtacgcccgcgcctttccgtggcacgaacagcgcgaaagcgacgccaaacttcaggcgctgagcaacccgcactatgcgttggaagcgtggtttgatgacgggggatttattggcctgagcggctgctggcagtttgccggttatagctatatcgaacatctggcgattgacgacaccctgcgttcgcgcggttatggcaaacagttgctggcgcagatcctgacgcgcgcgccgctgaccattctggaaatcgatccgctcaccagcgaaatcgcccataaacggctgcgcttttatcagtcgatgggattccatgccaatgcctgggcgcaccgccatccgacttatcatcaaggaatcgacgatcatgaactgctggtgctgagctatccgcagccgatcgatgtggcgcagtatcagcagtttgcccgcgatttagggcgaaaggtgatggggtaa

SEQ ID NO: 90027 - DNA, 552 bp, Enterobacter aerogenes
atgacaaagcagcccgaagactggctcgacgacgtgcccggtgatgacgttgaagatgaagatgatgaaattatctgggtcagcaagagtgaaattaagcgcgatgcggaagaactgaagcgtcttggcgcggaaatggtagaccttggtaagaacgcgctggataagctgccgctcgataccgacctgcgcgacgccattgaactcgcccagcgtatcaagaaagaaggccgccgccgccagctgcagctgattggtaaaatgctgcgtaaccgcgacgtcgatccgattcgccaggcgctggataagctgaagaaccgtcacaaccagcaggttgcgctgttccataagctggaacaaatccgcgatcgcctgattgataatggcgatgatgcggtcgtagaggtattgaacctgtggccagacgctgaccgtcagcagctgcgctcactgattcgcaatgccaagaaagagaaagaaggcaacaagccgccgaaatccgcgcgcctgatcttccagtatctgcgcgaactggccgaaaacgaaggctag

SEQ ID NO: 90028 - DNA, 1353 bp, Enterobacter aerogenes
atggcattagcaatgaaagtcatctctcaagttgcacagcagcgtaagacgctggaagaagccgttagtacggcactggaactggcggcaggcaaatccgacggtgcggaagtctccgtcagcaagaccaccggcatcggcgtcagcacccgctacggtgaggtggagaatgttgaattcaatagcgacggcgcgctgggcatcaccgtttatcaccaaaaccgtaaaggcagcgcctcgtcgaccgacctgagccctgacgctatcgcccgtaccgtgcaggcggcgctggatatcgcgcgttacacctcgccggacccgtttgccggcgtggcggataaagaactgctggcctttgacgccccggatctggacctgttccatccggcggaggtctctccggatgaagccatcgagctggccgcccgcgccgagcaggccgccttgcaggccgacaaacgtattaccaataccgaaggcggcagcttcaacagccactatgggattaaagtttttggtaatagctacggcatgctccagagctactgctctacccgccattcgctctccagctgcgtgattgccgaagaaaatggcgatatggaacgcgactatgcctacaccattggccgcgctatcggcgacttacagaccccggagtgggtcggcaacgaatgcgcccgtcgcactttgtcgcgcctggcgccgcgtaagctttcgacgatgaaagcgccggttatcttcgccaacgaagtggccaccgggctgtttggccacctggttggggcgatcgccggcggcgcggtctaccgtaaatcgaccttcctgctcgactccctcggcaaacagatcctgccggagtggctgaccatcgaagaacacccgcatctgctgaaggggctggcctccacgccgttcgacagcgaaggcgtgcgcaccgaacgtcgcgacattatcaaagacggcgtgctgacccagtggctgctgactaactactccgcgcgcaagctgggtatgaaaagcaccggccacgccggcggtatccataactggcgcatcaacggccgcggcctgagttttgcaaagatgcttaaagagatgggcaccgggcttgtggtcaccgaattgatggggcagggtgtcagtggcgtgaccggcgactactcgcgcggcgcatccggtttctgggtagaaaacggcgaaattcagtatccggtcagtgagatcaccatcgccggaaatctgaaagaaatgtggcgtaatattgtcaccgtcggcgacgatatcgaaacgcgcagcaatattcagtgtggttccgtgctgctgccggagatgaaaatcgccggtcaatga

SEQ ID NO: 90029 - DNA, 387 bp, Enterobacter aerogenes
atgcgtaaaaaactgttagcgatgctggccgtctctgcttttgcgctcggttcggcatcggcgttcgccgaccttggcgaagacatggacacccttgcggaaaacctgcaggtggtacaaaaaacctctgacattggcgagctgaaagcggcgctgaataagatgcgcaccgctgcggttgacgcgcagaaagagacgccgccaaaactggaaggcaaagcggccgatagcccggagatgaaagatttccgccacggtctggaaacgctggtcggccagatcgacggcgcgctgaagttagctgacgctggtaagctgaaagaggcgcaggctgccgcggaggacttcaaaactacccgcaatacttaccataagaagtatcgctaa

SEQ ID NO: 90030 - DNA, 339 bp, Enterobacter aerogenes
gtgaataacggagcggtaataaacgacgtaggggagcaggcggcgcagaccgaacgcctggctgacaagatgttacagcaggtattcgccctgttaagccgtcacgacatcgtccctaacgacgttcaggagcaaatgctgacttcccacgtgcgggccatggcccaccggtcaatcagcggcgaaccgctaccggaagtggatgccagtctgttcgaagaaatttctgaagattcaatgatgctggcccgcgaagtggtcgcacagttcggcaacctgcctgatgaagaggcctggttgttgtccgtccacttcgaagtcgcaaaagaaaacctgtaa

SEQ ID NO: 90031 - DNA, 363 bp, Enterobacter aerogenes
atggaacaaatcaccgtagttattggcgaccgtctgggtaaaggacaaaaagtcgcggcaggcgcagaaaaagccggcgcacgtgcagtggtcgtccctggcgttgctgcagatatgaaacttggcgacatgatgaaagcggaaaacgcctctttcggcatctccttctgcggtagcggcggcgcaggcgccatcaccgcgcagaccaagtacggttacaaagcaaaatacggcatgcgttctattgaagagggcgtcaccgccatcaacgaaggctgcaacgtgctgggcttcggcttcatggataaagaagagctgggcgagcgcctggttgaagcctggaaaaagaaatacggcgcataa

SEQ ID NO: 90032 - DNA, 300 bp, Enterobacter aerogenes
atgaaagagcaattcaccaccacggtgagggttgcaggcaaaggcgaaagcaaatcacgggccttcgccgatgccctgaaccatgtgcaggctgcggtgatgaaatcatcatcgcgcatcctactgcgtattgagccacaggacgtgacggttgttcatgcgcgcgaagcggtacgaaaagaggcgtttctgttcatctttttgcgccgtgaacgacggacctacagcgtggagctggacgtcaccgtcaacgtgaccgccatcgatctcgataaagtggatttcgtcacgcaaacctga

SEQ ID NO: 90033 - DNA, 777 bp, Enterobacter aerogenes
atgttcctgataattttaataaaatcgctcatcatcggcggcctggtcggcgtcggcgtgggcgccggagcggcacgcatgtttcacgcgcccaccacgcaagggatgggggcgtttcgtaccttgggcgagctgaattcctgcgaaggcgatccggcttctcacttctcttttggtctcggcttcttctttaacgcctgggcctcttccgttgcagcaggctccttcactcaggacgttgaccaccgcattatcccgaactggggcgcggcggcgttgatggtgaaaaatcgtaacgttggcgaaacgctacacgatccgaaaaaaatggccattgcctgcggcatcatcggcatgatcgtcgtcgccttccttaacctgaccgcctcttccgtaccggaagcgctgcaggtcaccgccgttaaggtattggttccggcggcaaacctgctggtgaacaccgtgatgccggtgattttctggctggcggctatcgatgccggtaagaaatcaggcttctgggcgacgatttttggcggcgcggcgcagctgattatggggaacgccgtaccgggtctggtactggggatcctgatcggtaaaggcgtagaagagagcggctggaaccgggtaaccaaagtgatgatgatcgccattgtcgcgttgttcgtcctcagcggcttcttccgcggcttcgacatgaagatgctcgaatccttccatctgaccgtgccgaactggctggacatgatccacaactcactcagcggcaagtaa

SEQ ID NO: 90034 - DNA, 645 bp, Enterobacter aerogenes
atggaacagaataaaggtttttggtatgccgactggtcgttcccgatctttgttggcctgctctcctccggcgtcttcgccgggacgcacatgtactatctgtacggcatcggcgcctttaacgaagtggccttcgtggcgatgttgaaggcagggattgataccggcgcgtacggcgcggtggcggcattcggcgcgagcttcctgttcgcccgcatcatcgaaggttcgctggtggggattctggatatcggcggcgccattcagaccggtatcggcctcggcgtaccggcgctgctgctcggcgcgggctttgtcttcccggtggcgaacttcgccgcgtcgctggcaaccggcctgatcctcggcctggcggtcggctacatcatcattctggcgcgtaagttcaccatcaaccagagcgattccacctacggcgccgacgtgatgatgggggccggtaacgcctccggccgcttcctcggtccattgatcatcctcagcgcgatgacggcgtctattcctatcgggattggttctttggttggcgcactgctgttctacatctggcagaaaccgatcaccggcggcgccatcctcggcgcgatgatcctcggttccatcttcccgattgcgattagctaa

SEQ ID NO: 90035 - DNA, 1134 bp, Enterobacter aerogenes
atgtttgatttactcctgcgccgtgcgcgcctcgtcgacgataccctgactgatatcgccatccaggacgggaaaatcgcggcgctgggcgagattagcgcgccctcccgtaaaaccatcgagctgaacggcaaggtttacgtcagcgctggctggattgactctcacgttcactgctacccgaattcaccaatttatcacgatgagccggatagcgtcggcatcgccaccggcgtcaccaccgtgattgatgccggtagcactggcgccgacgacgtcgatgacttctatcaactgacccgtaaagcggcgacggaagtttatgcgttgctcaatatctcccgcgtcgggctgattgcgcagaatgagctggcgaatatggctaatatcgacgccgccgcggtgaagcaggcggtgcaacgtcatcctgattttatcgtcggcctgaaggcgcggatgagcagcagcgtcgtcggcgaaaacggcattacgccgctggcgcgcgccaaagccattcagcaggaaaacggcgatctgccgttgatggtgcacatcggcaataacccgccgaacctcgatgaaatcgccgatctgctgagcagtggcgacatcattacccactgctataacggcaagccgaaccgtattcttaatcctgccggcgagctgcgcagctccattactcgcgctctgcagcgcggcgtgcgcctcgatgtcggccacggtaccgccagtttcagctttgaagtggcgcggcgggcgattgcgatgggcattctgccgcacaccattagctccgatatttactgccgtaaccgtatcgacggcccggtgcgctcgctggcgctggtgatgtcgaaattcctcgccatcggcatgaccctgccgcaggtcattgactgcgtgaccgttagcgccgccgaggggctgcgtctgacgcggaaagggcgcctggaagtgggcttcgatgccgatttaacgctatttagcctgcagcatcagcccacgttgctggtagatgccgaaaaagagagcctgcaggctgacaacattctggtgccgctggccgcgattcgcgcgggcaagggctatctgaccgaacaagggagcgcggaacatgccttcgatttttga

SEQ ID NO: 90036 - DNA, 1119 bp, Enterobacter aerogenes
atgccttcgatttttgagaaataccatttaaaacaagttattaacacctctggccgaatgacggcgctgggcgtttccacgccgcgcccggaagtggttgaagccgcgatggccggtatgaaccagtactttgaaatgaaagacctggtgaataaaaccggcgagtacatcgccaaactgctggatgtggaaggggcgaccgttgtctcctgcgcgtcggcggggattgcccagtcggtagcggcggtgctggtgaaagacagcgactggctgctggaaaacctgcacgttaccccgattgaaaataacgaaatcgtgctgccgaagggccacaacgtcaacttcggcgcgccggttggcaccatggtggcgctgggcggcggtaagctggtggaagcgggctacgccaacgaatgttctgcccaacagctggcggcggcgatcactccgcgcaccgcggcgattctgtacatcaaatcccaccactgtgtgcaaaaaagcatgcttaacgtcgcgcaggccgcggaagtggcgcgccagcataacttgccgctgatcgtcgatgcggcggcggaagaagatttgcagtgctactaccgcatgggcgccgacctggttatctacagcggcgcgaaagcgattgaagggccgaccagcgggctggtcatcggcaaaacgcagtacgttgagtgggttaagcgccagtcgatggggattggccgggcgatgaaagtgggcaaagagggcattctcggcctgacctgcgccattgaacactacctgacggcgaccaaagagagcggccagcagatggtggacaagatgacgccgtttatcgaacagctcaacactctcaacggcgtgaccgcgcgggtggtgtgggatagcgcgggccgtgatatcgcccgcgccgaaattaaatttgatgaagcgaccaccggcgtgaataccggtgatctggttaacgccctgaagcagggcgaatacgccatttacttccgcggctataaagcgaatgaaggcattatcgaagccgatgtccgcagcgtgaacgcgcagcagctagaggtggtcgctcgccgcatcgcagaagttctgaataaggagaaaaaagcatga

SEQ ID NO: 90037 - DNA, 741 bp, Enterobacter aerogenes
atgaaactgaccccaaacttttaccgtgaccgcgtgtgcctgaacgtactggcgggcagcaaagacaacgcccgtgaaatttacgaggcggcggaaggtcacgtactggtcggcgtgctctccaaaaactatccggacgtcgccagcgcggtggccgatatgcgtgaatacgcgaagctgattgataacgcgctctcagtcgggctgggcgcaggcgatccaaaccagtcggcgatggtaagcgagatttctcgccaggtgcagccgcagcacgtcaaccaggtcttcaccggcgtggctaccagccgcgcgctgctcgggcagaatgagaccgtggtgaatggcctggtctcgccgaccggcaggccgggaatggtgaagatctcaaccggcccgctgagcagcggcgcggcggatgggattgttccgctggaaaccgccatcgcgctgttaaaagatatgggcggcagctcaatcaaatacttcccgatgggcggcctgaagcaccgcgccgagtttgaagccgtcgccaaagcctgcgccgcgcacgatttctggctggaaccgaccggcggtatcgatctggaaaactacagcgagatcctgaaaatcgccctggatgccggcgtgagtaaaatcatcccgcatatttacagcccgattatcgataaagccagcggcaacacccgcccggccgatgtgcgccagttgctggagatgaccaaacagttagtgaagtag

SEQ ID NO: 90038 - DNA, 1152 bp, Enterobacter aerogenes
atgccaaccgctcgtcacctgcttgttgcttcactgtctttgcttgccgccggcgccgccgcgcaaacccactacgcctggattggtacctataatcctaatggcgaaggtctgtatcgctttaccgtcgatgccaaaaccggcgcactgcgcgataaggcgctggtgagctcgttgccgaacgtcgcgcagctaaccgtatcgcgcgatggcaaaacgctgtatgccgccagtgaagtcgaaaaaggcgtggtgcaggcgtggcgaattgacaagaacggcgagctggcggaactcaaccaagttgcctccggcggcgccgggccggtgtatctctccctgacgccggatggtaaatatctgttggtggccaactatgttagcggcagcaccgccgtgctaccggtgaaagaagatggtagcctgggcgaggcggtggatgtgcatcaggatgaaggtccggccggcgccgaacgtccggcggcggccgtcgagggcagctttgccattagcgatcacaatggctcgcacgcccatatgatcgccgccgatcccagtgggaagtttgtttactccaccgatctcgggctggatcggatctatcagtaccggctggatagcgccagcggtaagctgacgccgaacgatccgccgtttatcgccgcctcgtcgccgggagccggcccgcgccacttcgtctttacgccaaagggcgatggtttgtggctgattaacgaagaagcgtcgacgctgaccttctatcatctggataagcaaagcggcctgctgcgcgaaggcaaaaccgtctccgcgctgccgaaagagtataagggcaccagctttgccgcgggccttgtgttgagcaacgatggcaaacagctatatgtcgccaaccgcctgcataacagcattgcccactttagcgtgctggctgacggcagcctgagccaccaggaggatatctggacgcgtggggattacccccgtacgctgacgctggataatcaggggcagtggctgtacgtcatgaaccagcgtagcgataatattacccgttttagcgtggcgccgaaggatggcaaattaacctttgccccagactacacgccggtcggtagcccatcgcagatggtgatatccgcccaaccctga

SEQ ID NO: 90039 - DNA, 1911 bp, Enterobacter aerogenes
atgcgatttcccaaccaacgcttagcgcaactcttcaccctgctgcgaaatgaaacgctgccgcaggatgaactggcgcagcggctgtcggtttctacccgtaccgtgcgcgccgatatcaccgcgctgaatgcgctgttggcgcagtatggcgcgcagtttacgctcaaccgcggtagcggctatcagctgaaaattgacgatcggtcgcgttttcaggcgctggaggagacggcgccgaagacgcagcacgtgccgcgtaccgcccaggagcgcatccactttttgctggtgcgtttcctgacctcggcgttctccatcaagctggaagatctggccgatgagtggttcgtcagccgcgccacgctgcaaaatgatatggtcgaggtgcgcgagcgcttccagcgttatcagttgactcttgaaacccgcccgcgccacggcatgaagctgttcggcagcgaggtatcgattcgcgcctgcctgaccgatttactgtgggagctgacgctgcagggcggcatgaatccgctgattagcgccgaggcgctggaagcggatgttcctgcgcaactggaaccggtgctgcaggagacgctcacccggcatcatattcgcctcaccgatgtcggcgagcgctttatctgcctgtacggcgcggttgtggtacgccgcgtgagtgaaggctacccgctggccgattttagcgccgaagatgtggcgcaaaacgtccgcgacgcggcgcgcgatttggcgggggagctacagcggttggccggaaaacccttctcgcccgccgaggaagagtggctgtgcgtgcatatcgccgcccgccaggtacaggatgtcgatccggaaaccatcagcgccgacgatgacgaagcgctggtcaattacattctgcgttacatcaacagccagtataactacaacctgctggacgacgcccagctgcacgccgatctgctgacccacattaaaaccatgatcacccgcgtgcgctatcagataatgatccctaatccgcttctcgataacatcaaacagcactatccgatggcatgggatatgacactcgccgcggtatcgagctggggcaaatacacgccttataccatcagcgaaaacgaaatcggctttctggtgctgcatattggcgtcgggctggaacgccactacaacatcggctaccagcgccagccgcacgtactgctggtgtgcgataccagtaatgcgatggtgcggatgatcgaagcgatcctgcagcgtaaatatccgcagttggcgatcgccgctaccatttcccagcgtgaatatgagcagcgggaggcgatcgatgaggattttgttatctcaacggtacggatcggcgaaaaagacaaaccggtggtgaccatcgcgccgttcctcaccgattaccagttagatcagattggcaagctggtgctggtggatcgcacccgtccgtggatgttgaataaatacttcgatgccgcccatttccgggtgatcgataagccgatagatcagcaaacgctgttcgccgagctgtgtcagcagctgcagcaggaaggcttcgtcgatgcagaatttcatgattcggtggtcgagcgtgaagcgattgtcagcaccatgctgggcgacggtattgcgctgccgcacgccctcggcctgttagcgaaaaagacggtggtctataccgtgatcgccccgcagggtatcgcctggggcgacgaaaccgcccatatcatcttcctgctcgctatcagcaagagcgagtatgaagaggcaatggcgatctacgatattttcgtgactttcctgcgcgagcgcgccatgagccgccttgccgcgacccgtagcttcgatgagtttaaaacggtggcgatggagtgcgtcagccggttttga

SEQ ID NO: 90040 - DNA, 465 bp, Enterobacter aerogenes
atgaattatcaccagtattaccccgtcgacatcgtcaacggccccggcacccgctgcaccctgtttgtctccggctgcgtccacgaatgccccggctgctacaacaaaagcacctggcgggtaaattccggtatgcctttcacaaccgggatggccgaccgcatcattgccgacctcaacgatacccgcattaaacgccaggggctttcactctccggcggcgatccgctgcatccgcaaaacgtcgcggagatcctcaatctggtgcagcgcgtacgcgccgaatgccccggtaaagatatctgggtctggaccggctataagattgacgaactgaacgccgagcagatggaagtcgtgaacctgattaacgtgctggtcgacggtaagtttgtgcaggatttaaaagacccggcgcttatctggcgcggcagcagcaaccaggtcgtgcatcatttgcgttaa

SEQ ID NO: 90041 - DNA, 2139 bp, Enterobacter aerogenes
atgacaccgcatgtgatgaaacgtgatggctgtaaagtgccgttcaagtcagagcgcattaaagaagcaattctgcgtgcagctaaagcagcgggagtcgatgacgcagactattgcgccaccgtcgcagaagtcgttagccagcaaatgcagggccgcgcgcaggtcgatatcaacgacatccagaccgccgtggaaaaccagttgatgtccggcccgtggaaacagctggcgcgcgcctatatcgaatatcgccacgatcgcgatgtcgagcgtgaaaagcgcggccgtctgaaccaggaaattcgtggtctggtcgagcaaaccaactcatcgctgctcaacgagaacgccaacaaagacagtaaagtgatcccgacccagcgcgatctgctggccggtatcgtggccaaacactatgcccgtcagcacctgctgcctcgcgatgtggtgcaggcgcacgagcgcggcgagatccactaccacgatctcgactattcgccgttcttcccgatgttcaactgcatgctgatcgacctgaaaggcatgctgactcacggctttaaaatgggcaatgccgaaattgagccgccgaagtctatctctaccgccaccgcggtcacggcgcagattatcgcccaggtcgccagccatatttacggcggcaccaccattaaccgtatcgatgaagtgctggcgccgttcgtcaccgagagcttcaaaaagcatcgtaaaattgccgaagagtggcagatcccggatgccgaaggctatgcccgtacgcgtaccgagaaagagtgctacgacgcgttccagtcgctggagtatgaggtcaacacgctgcataccgccaatggccagacgccgttcgtcacctttggttttggcatcggcaccagctgggagtcgcgcctgatccagcagtcgattctgcgcaaccgcatcgccggcctcgggaaaaaccgcaaaacggcggtattcccgaaactggtcttcgccattcgcgacggcctgaaccataagttcggcgatgcgaactatgacatcaaacagctggccttagagtgcgccagcaagcgcatgtacccggatattctcaactacgatcaggtagtgaaagtcaccgggtcgtttaaaacgccgatgggctgccgcagtttcctcggcgtgtgggaaaacgagaacggcgaacaggtacacgatgggcgcaacaacctcggcgttatcagcctgaacctgccacgtatcgcgctggaagcgaaaggcgacgaagccgccttctgggcgctgctggacgagcgcctgctgctggcgcgcaaagcgctgatgacccgtatcgcccgtctggaaggggtgaaagcccgcgtcgcgccaattctgtatatggaaggcgcctgcggcgtgcgtctgaaagccgacgatgacgtcgcggaaattttcaagaacggccgcgcgtccatttccctgggctacatcgggattcacgagaccatcaacgcgctgtacaacaatcagcatatgtacgatagcgcagcgctgcgtgaaaaaggcatcgccatcgttcagcgtctgcgcgacgccgttgagcaatggaaggaagagaccggctacggcttcagcctgtacagcacgccgagcgaaaacctgtgcgatcgcttctgccgcctcgataccgccgaattcggcgtggtaccgggcgtgaccgaaaaaggctactacaccaacagcttccatctcgacgtcgagaagaaggttaacccgtacgacaagatcgattttgaagcgccgtatccgccgctggccaacggcggctttatttgctacggcgaatatccgaatatccagcataacctcaaggcgctggaagacgtgtgggattacagctatcagcacgtaccgtattacggcaccaatacgccgatcgatgaatgctacgagtgcggatataccggcgagttcgagtgcaccagcaagggctttacctgcccgaaatgcggcaaccacgacgccgcccgcgtatcggtgacccgccgggtttgcggttatctcggcagcccggacgcgcgtccgttcaacgccggcaagcaggaagaagtgaagcgccgcgtgaagcacctgggcaatgggcagattggttaa

SEQ ID NO: 90042 - DNA, 744 bp, Enterobacter aerogenes
atggatatcgtaggtcaactacaggacggattggtccgctttagcgctcaggagtcgcgcgtcgccgcctttattctggaaaatcttagctttaccgccagcgcctcgattgacgaactggccgccagcgcgggggtcagcccggccaccatcacccgcttcgcccgttcggtaggttgtgatgatattcgtgatttacgcaaacagctggcgcaggccagcgaacggcgcgccagctggctcactccggatagcgccaccctgcccgtcgcctggcgcgacaaacttagcagcctcggcgatacgctaacccgtcagctcggccacaccgccgaagcggcggtggagaagtgcaaatcgcgcctgctgagcgcccgcgcggtgcattgcttcgccctcggcacccaggatgtggcgctggcggcgctgctgcagcaccagctgctgccatccggtatcgcgattaatctctgccaggatgcggcgctgatgcgaatgaccgccagtacccttaatgacgatcatctgctgctggtgctggccaccgccgaagccaatgccgtattacagagcgcgacgctgcaggcgcgtacgcagggggtgacgattatcgctctgaccccggaacagcacgcgctggcggatatggccagcgccgtgcttcccctgcccgtcaacccgcagcatgcccgctacgccctgctgctgcttgtcgatctgcttaacgatacattgattgcctga

SEQ ID NO: 90043 - DNA, 309 bp, Enterobacter aerogenes
atgccacgaatcgtactctgttgtgccgcaggcatgtcgaccagcatgctggtgaacaaaatgaaagcggaagcccagcagcgcgcgctggcgctggaaatctatgccgtagcggtggcggaatttgaacgcgaactgccgaacgccgacgtcattctgctcgggccgcaggtcaaatacgaagccggccgcctgaccgcgctggcggcgccgcagggtaaagcggtggcggtgatcgatatggccgactacggtatgatgcgcggcgccgcggtgctggataaagcgctggccctgctcgaacgctaa

SEQ ID NO: 90044 - DNA, 1308 bp, Enterobacter aerogenes
atgcaagcactgaaaatcgccgttatcggcggcggcagcagctacacgccggagcttattgaagggattatcgttcgttatgaacagcttccggtcaccgaactggcgctggtggatgtcgaatccggcagggaaaaggttgagatcattgccgcgctggcccggcggatgttgaaacataaagggctggagcaggtggcggtcagcgtccactttacgctcgatgaggcgatccgcggcgccagctttgtgctgacgcagctacgcgtcgggcaactggcggcgcgcgccgcggatgaacggctgggtctcaaatatcatctattgggccaggagaccaccggcgtcggcgggttcgccaaggcgctacggacgatcccggtgatcctcgaagttgcgcgcaaagtggaacagctggcgccggaagcgttcattcttaactttaccaacccggcggggatcgtcaccgaggcggtcagccgctacagcaaggcgaagatcatcggcctgtgcaacgtgccgatcaacatgcagcacatgatcgtcgggatgttaggcgcgcaggagtccgaagtgaaattgcgctttgccgggctcaaccatatggtctgggtgcataaggtgctacaggggcgcgaggatgtcaccggcaaagtgatcgatatgctctgcgacggtaaggcgctgtcgatgaacaacattaaagaactgccgtggccggcggaattcctccgcgcgctaaaggcgattccgtgcccttatcatcgttatttctggctgacgccggcgatgctggcggaagagatcgccgcagcgaaaaccaaaggcacccgcgccgagcaggtgatgaaggtcgagcaggagctgtttgcgctgtacgccgacccgcagctggaagaaaaaccagagcagctgagctttcgcggcggcgcttactactcggaagtggccgttgagcttatcaatgcgattcacaacaacctgggcgcggagatggtggtaaacacccgcaacaacggcgcgattcacggcctggatgatgatgcggtggtggaaaccaacagcattatcgatgcgcaaggggcgcggccgctggcgttcggcccgctgccgccggcgatgaacggcctgacgcagcaggtgaaggcctttgaacggctgacgattgaagccgcggtacacggctgccgcgagagcgcgctgctggcgctggtggctaacccgttggtcggtaacgtcaccgatgcccaggcgctgctggatgaagtgttaacgataaaccgtcaatggctgacgcaatttaactga

SEQ ID NO: 90045 - DNA, 1353 bp, Enterobacter aerogenes
atgtcgaatacaagctggattgaacgttacgtcatgccggcggcgctgaaaatcgccgggcaaaagcacgtcctgtcggtacgcgatggcatcattctgaatatgccgtttatgctgattggctcgtttttcctgattttcgcctacctgccgatccccggctatgccgacatgatgagcggcctgtttggcgaggtctggcgcgataaaatgctgtacccggtgaaagcgacctacgacattatggcgctgatttccagcttcggcatcgcttatcggctggcggagaagtaccgcaccatcgacccgctgagcgccggggcgatgtcgctggtggcctttgtgatgactatcccgcagaacaccctctttaccccggtacacggcgcggcggaggtgattaaaggagtgatcccggtgagcatggtcggcagccaggggctgtttgtcgctattgtcatttcgctgctgtcgacggagatttatcgtttggtcgccagccgcaatctcgttatccgcatgccggacggcgtgccgccggcagtggcgaaatctttcctcgccctgatccccggcttctgtgttctggcggtggtgctggcgctgcgcctggcggttgaggcctcgccgtttggcgacatcaacagcatgatcgccactttgatcggtattccgatgcatcacgtcggcggtacgctgccggggatgattatttcggtgatagtgatcggtattttgtggacgctgggcctgcacggcgacgcgattgtgctggtatttattcagccggtgtggctgtcgaatatgtcagagaacctgacggcctttcagaacggccagccgatcccgcatatcattacccagcaattttacgatctgtggattgcgcccggcggcaccggcgcgctgctggggctggtgatatttatgttgctgcgcagccgtagtcagcagatgaaacagctggggaaaattgccgcgccgggagcgttgtttaacatcagcgagccgatggtgttcggcatcccgctggtgatgaacccgtacttcttcctgccgtttattttaacgccggtgctgctggtgatcgtgtcctataccgcaatggcgaccgggctggtggcgccgccggccggaatcgcgctgccgttcactacgccgatcttcatcagcggctatctggcgaccggcggccatatttccggcaccatactgcaggtcgtgaatttaactatttcgctggtggtttactatccgttcttccgcgcctgggatcggctgaaggccaaagaggagcacgcctcagcgcagccgcaggagagcgttatccttcctgacgctgaccgcgcgtaa

SEQ ID NO: 90046 - DNA, 1656 bp, Enterobacter aerogenes
atgaatacccttccccgctggtggcaaaacggcgttatttatcaaatctacccgaagagttttcaggacaccaccggcagcggtaccggcgatttacgcggcgtcaccgcccgtctcgactacctgcaaaagctcggcgtcgatgctatctggctgacgccgttctacgtctcgccgcaggtggacaacggctatgacgtggcgaactataccgctatcgatccctcatacggcacgctggaggattttgaccaactggtcgccggagcgaaagcgcgcggtatccgcatcgtgctggatatggtgtttaaccatacctcgacggaacacgaatggttccgccagtcgttaaataaggcgagcccgtatcgccagttctatatctggcgcgacggcgagccgggagcattgccgaataactggcgttcgaaattcggcggtaacgcctggcaatggcatgcggaaagcgaacagtattatttgcatcttttcgccaccgagcaggcggatctcaactgggaaaacccgacggtacgcgccgagctgaaaaaagtctgcgagttctgggccgatcgcggcgttgatggcctgcgcctcgatgtcatcaatcttatctccaaggagcaggacttcctctccgataccgttggcgatggacgccgcttctacaccgatggcccgcgggttcacgagttcctgcaggaaatgagccgcgatgtctttacccctcgtggcctgatgaccgtgggcgaaatgtcttccacttcacttgaacactgccaacagtacgccgcgctggacggccgcgaactgtcgatgacgtttaattttcatcacttaaaagtcgattatcccggcggtgaaaaatggaccctcgcccgtccggactacgtggcgctgaaagcgctattccgccactggcagcaagggatgcataaccgggcgtggaatgcgctgttctggtgtaaccacgatcagccgcgcatcgtgtcgcgcttcggcgacgagggcgagtaccgggtgccggcggcgaagatgctggcgatggtactgcacggcatgcagggcacgccctatatctatcagggcgaagagattggcatgaccaacccgcatttcagcaacatcagcgattatcgtgacgtggaaagccataacatgtttatcgagcgcgcggcgcagggacaaagcccggatgaactgctggcgattctggccagcaaatcgcgcgacaatagccgcacgccgatgccgtggcacgatggcgagaacggcggcttcagcgatggagaaccctggatcgcgttgggtaataactatcgcgagattaacgtcgaggcggcgctggcggatccggaatcggtgttttacacctatcagcagctgatcgcgctgcgaaaaaccacgccggtgctgacctggggggattatcaggatctgctgccggaccatccgtcgctgtggtgttatcgccgccagtggcaggggcagacgctggtggtggccgccaacctgagccgtgagttccagccgtggcagccgccagagatgtctggcgactggcgggcgctgattggcaactatgcggaaacggccaaccgtccggcggcaatgacgctgcggccgttcgaagcggtatggtggttgcaggcataa

SEQ ID NO: 90047 - DNA, 1419 bp, Enterobacter aerogenes
atgagcaaagtaaaccagcaggacatcgataaactgatcgaactggtgggcgggcgcggcaacattgccaccgtcagccactgtattacccgtttgcgctttgtgctgaacgatccggccatcgccaaaccgaaagagattgagcagttgcgcatggtgaagggatgcttcactaacgccgggcagttccaggtggtcatcggcaccgaagtcggcgattactataaggcgctgctggccaccaccggtcaggcgtccgccgacaaagagcaggccaaacaggccgcgcggcaaaatatgaagtggcatgaacggttgatctcgcactttgccgagatctttttcccgcttctgccggcgctgatcagcggcggtctgatcctcggtttccgtaacgtcatcggcgatctgccaatgagcaacggccagacgctggcgcaaatgcacccgtcgttgaaaacgatttatgacttcttgtggctgattggcgaggctatcttcttctatctgccggtggggatctgctggtcagcggtgaagaaaatgggcggcacgccgatcctcgggatcgtgcttggcgtcacgctggtctctccacagttgatgaacgcctacctgctcggccagcaggtgccggaagtatggaacttcggcctgtttaccattgcgaaagtcggctatcaggcgcaggtgatcccggctctgctggcggggttggcactgggctttatcgaaacacgtctcaagcgtatcgtgcctgactacctctatctggtggtggtaccggtgtgctcgttgattctggcggtgttcctcgctcacgcttttatcggcccgtttggtcgtctgattggcgacggcgtggccttcgcggtgcgccatttgttaaccggcagcttcgcgccgatcggcgccgcgctgttcggcttcctctatgcgccgctggtgatcaccggcgtacatcagaccaccctcgctatcgatatgcagatgattcaaagcatgggcggcacgccggtatggccgctgattgcgctgtcgaatattgctcaggcgtcggcggtggtcggcattattattgccagccgtaaacagaatgaacgcgaaatatcggtacccgcggcgatctccgcctatctcggggtcaccgaaccggcgatgtacggcatcaacctgaagtaccgcttcccgatgctgtgcgcgatggtcggatccggcctcgcgggcctgctgtgcggcctgaacggcgtgctggcgaacggtatcggcgtcggcggcctgccgggcatcctgtcaattcagccaagctactggcaggtctacgccacggcgatggccatcgccgtggtagtgccgattatcctcaccaccgtggtttatcaacgcaagtaccgtcagggcaccttgcagattatctaa

SEQ ID NO: 90048 - DNA, 948 bp, Enterobacter aerogenes
atgcaaaaccggctaacaatcaaagatatcgcccgcttaagcggcgtcggaaagtcgacggtgtcgcgcgtgctgaataacgaaagcggcgtcagcgagcgcacccgcgaacgggtggaagcggtgatgcagcagcacggtttctccccttcccgctccgcccgcgccatgcgtggtcagagcgataaggtggtggcgattatcgtcacgcgtctggattcgctgtcggaaaatttagcggtgcagaccatgctgcccgccttttatcagcagggctacgatccgatcatgatggagagccagttttctccggcactggtggaagaacatctgggcatgctcgcccggcgcaatatcgacggcgtggtgctgttcggctttaccggtattagcgaggagatgcttgcgccgtggcgcgaaacgctggtgctgctggcgcgcgatgcccccggcttcgcttcggtgtgctatgacgatcatggcgcgatcgagttactgatgcagcgtctctatgagcgcgggcaccggcatataagcttcctcggcgtgccgcacagcgacgtcaccaccggggaacgccgtcatcaggcgtatctcgatttctgcgcgcaaaagaagctcacgccaaccgctgctttgccggggctggcgatgaagcagggttatgaaagcgtcgccagcgtgctgacgcccgagacccgcgcgctggtctgcgccaccgatactctcgctctcggcgccagtaaatatctacaggaacagcgtatcgacacgctacaactcgccagcgtcggcagcacgccgctgatgaagtttctgcatccggagatcctcaccgtcgatcccggctacgccgaagccggacgccaggcggcacagcagctgatcgaccagatcgccggccacgccgaaccccgccaaatcgtcattcccgctgccctgaattaa

SEQ ID NO: 90049 - DNA, 2709 bp, Enterobacter aerogenes
atgctgaaaaattttacccggcagctgttcgcgcagcttagccgccatttaccacatcgtttgatccagcgcgatccgctgcccgatgcccgcaatctggccagcgcgccgatcccggattcactcggcaagcgctgcctggacgtggcggccatggatgagcaggagatctggcgcgcgttcgatagccaccctgaagggctgaacgacgccgaagtggcggcgaaaatcgccctgcacggcgataaccaaatccccgcacagaagccgtcgccgtggtggattcatctgtggacctgctatcgcaacccgttcaacctgctgttgacggtgctcggcatcgtctcctattccactgaagatttgttcgccgcgggcgttatcgcgctgatggtcggcatctcgacgctacttaacttcatccaggaagcgcgctcgaccaaagcggcggatgcgctgaaggcgatggtcagcaataccgccacggtgctgcgggttatcaacgagcagggcgagagccgctggctcgaactacccatcgaccaactggtgccgggcgatattgtcaggctatcggcgggagatatgatcccggctgacctgcgcatcattgtggcgcgcgacctgtttgtcgctcaggcctcgctgaccggcgaatcgctgccgattgaaaaagtcgcgcgcacccgcgatccgctacaaaccaatccgctggaatgcgacaccctgtgctttatggggaccaacgtggtgagcggctcggcgcaggccatcgtctacgccaccggcggcaacacctggttcggccagcttgccgggcgcgtcagcgagcaggaaagcgagccgaacgcctttcagaaaggcattagccgggtcagcatgctgctgatccgctttatgctggtgatggcgccggtggtgctgttgatcaacggctacaccaaaggcgactggtgggaagcggcgctgttcgcgctgtcggtggcggtcggcctgacgccggagatgctgccgatgatcgtcacctcgacgctggcgcgcggggcggtgaagctgtcaaaacaaaaggtgatcgtcaaacacctcgacgccattcaaaactttggcgcgatggatatcctctgcaccgataaaaccggcaccctgacccaggataaaatcgtgctggagaaccataccgatgtttccggtaaatccagcgagagagtcctgcacaccgcctggctcaatagccattaccagaccgggctgaaaaacctgctcgacaccgcggtgctggaaggcgtggagctggatgccgctcgcggtctcgcggagcgctggcagaaggtggatgagatcccgttcgacttcgaacgccgccgcatgtcggtggtggtaaaagagcaggacgacgcgcatcagctgatctgtaaaggggcgctgcaggagatcctcaacgtctcgactcaggtgcgctacaacggtgaaatcgtaccgctggacgacaccatgctgcgccgtatccgccgggtgaccgataccctgaaccgtcaggggctgcgggtggtggcggtggcgaccaaatacctgccggcgcgggaaggcgactatcagcgtgcggatgaatccgacctgatcctcgaaggctacatcgccttcctcgatccgccgaaagagaccaccgccccggcgctgaaagcgttaaaggccagcggcattacggtaaaaatcctcaccggcgacagcgaactggtggcggcgaaagtgtgtcatgaagtggggctggatgcgggcgaagtggtgattggcagccagattgaagccatgagcgacgacgaactggcagcgctggcgaaacgcaccacgctgttcgcgcgcctggcgccgctgcataaagagcgcatcgtgacgttgctgaaacgcgaaggccacgtggtgggctttatgggcgacggtattaacgacgccccggcgctacgcgcggcggatattggcatttccgttgacggggcggtggatatcgcccgcgaggcggcggatatcattttgctggaaaaaagcctgatggtactggaggagggggttatcgaaggccgccgcaccttcgccaacatgctcaagtacatcaaaatgaccgccagctccaacttcggcaatgtcttcagcgtgctggtggccagtgccttcctgccgttcctgccgatgttgccgctgcacctgttgattcagaacctgctgtacgatgtctcccaggtggcgattccgtttgataacgtcgacgatgagcagatccgtaaaccgcagcgctggaatccggccgatctcgggcgttttatggtcttcttcgggccgatcagctcgattttcgatatcctcacctttggcctgatgtggtgggtgttccatgccaacagcgtcgagatgcagaccctgttccagtccggctggtttattgaagggctgctgtcgcagacgctgattgtgcatatgatccgtacccgccgcatcccgttcatccagagccgcgccgcgtggccgctgttcgcgatgacgctgctggtgatggcggtggggatcgcgctgccgttctcgccgctggcgggctacctgcagctgcaggcgctgccgctcagctatttcccatggctggtggcgattctggcgggttacatggtgttgacccagaccgttaaaggcttctacagccgccgttacggctggcagtag

SEQ ID NO: 90050 - DNA, 2394 bp, Enterobacter aerogenes
atgattaacaccgtgcgttacagtctgctgaccagcggaatattactgagcagcatggcgcttgccgccccggcgggcgatctgccgctgatgccgtggcccgcccatgtggagcgcccgcaggcgcagggggcgttggcgctaaataatcagctgacgatcaacgtcagcggcgacgatctgggcgaggcggcaactcgctggcgtgaacgtcttgcgcggcaaaccggctggacgctacagccgcagacggcgccggcaaaaagcccaaccattaacgtgatcgtcaataagaaagtgcctttcctgccgcagcctgatagcgacgaaagctatcagctaaccgttaacgccgaaggcgcgaccctgaaagccaatacgcgttttggcgcgctgcgcggcatggaaacgctgctacagctggtacaaaacggccctgacggcaccaccattccttatgtcgccattgacgatgcgccgcgcttcccgtggcgtggactgctgctggattccgcccgccactttatgccgctgtcggcgatcaagcggcagattgatggtatggcggcggcgaagcttaacgtactgcactggcatctgaccgacgatcagggctggcgcttcgcctccagccgctatccgaagctgcagcagcaggccagcgacggcctgttttatacccaggcgcagatgaaagacattgtgcgctatgccgccgaacgcggtattcgcgtggtgccggaaatcgatatgccgggccacgcctcggcgatcgccgtggcttatccggaactgatgagcgcgccggggccttacgcgatggagcgccactggggcgtgctgaaaccggtactcgacccaacaaaagaggccacctacgcgtttgccgaggcgatggtcagcgaactggcggctatcttccccgatccgtatctgcatatcggcggtgatgaagttgatgacagccagtggcgcgccaatccggccattcagaaattcctcaaagagaaggggctggcggacagccacgcgctacaggcgtacttcaaccggcgcctggagacgttgctcgaaaaacatcaccggcagatggtcggctgggatgaaatctaccaccctgatttaccgaagagcattctgattcagtcctggcaggggcaggacgcattaggcgacgtcgccaaacacggctatcgcggcattctctccaccggtttttacctcgaccagccgcagtacaccgcctatcactatcgtaatgagattatcccgcaggggcttaacggcgtggatacgattaccgataacgacagcgcccagagctggcagttttcgatgccgcgcctgaagggcagcgcggttgagggcagctttacgctggtaaaaggcgatagtggctggcgtggatttattgattttaaagggaaatcacggcgtgccgtgcaggagattgaatggctcggcgacaatcaggtcacgttccgcgtcgatacctggatgggcgagacccgcccggtgctaaccattaacgacgacaagctcgcaggctacttcctgcttggcaacacccgttatcctattgacggcaagcggctggatgccgtgccgcagggcattcagccgacgctgcccgacgcgcagcaacagaagaatctgctcggcggcgaggcggcgctgtgggcggaaaacgtcgccgcgccggtcatcgatatcaagctgtggccgcgggcttttgcggtggcggagcggctgtggtcggccgaagacgtccaagacagcgacaatatgtatcagcgcctgcaagcgatggacagctggtcaacggtctccgtcggcctgcagcagcatactcagcagctggagcagttcacccggctggcgaacagcagccatacgctggcgttgcagatcctcgccgaggcgctggagccggcgcattactacacccgtcagcatctcaagttccaggcgaacaattaccatcaatttgaaccgcttaaccggttggccgatgcgttaccggctgagagtgacaccgtacgcagcctgaaccagtgggcggagcggctgatcagcgatgccgaggatactgagagcgccgatgcgctgcgccacgtctttacccgctggcagaacaacagcggcgatgcgctggcgctgaccgacaataactatcagctggcggcgattaaaccggtggtgcagcaggttgataagctggcgagcctcgggctgcgcttgaccgatctggtggcgcggcagggaacgctggacgataaagagtacgcctcaatccaggcgcagctggatacggcggcgaaaacccaggatgagctggtgattgcggcggtctatccgctggagaaactgctgcgggcaacgaagataaaatag

SEQ ID NO: 90051 - DNA, 387 bp, Enterobacter aerogenes
atgagcaaaactattgcgacggaaaaggcaccagcagctatcggcccatatgtacaaggcgttgatctgggtagcatgatcatcacttccggccagatcccagtagacccgaaaaccggcagcgtgccggaagatgtcgccgcgcaggcgcgtcagtccctggacaacgtaaaagctatcgttgaagccgctggcctgaaagtgggcgatatcgtgaaaaccaccgttttcgtgaaagatctgaacgatttcgccaccgtgaatgccgcgtatgaagcgttcttcaccgagcataacgccactttcccggcgcgttcctgcgtagaagtcgcgcgtctgccgaaagacgtgaagattgagattgaagctatcgcgatccgtcgctaa

SEQ ID NO: 90052 - DNA, 462 bp, Enterobacter aerogenes
atgacacacgacaataaactgcaagtagaagccattaaacgcggcaccgtgatcgaccatatcccggcccaggtcggcttcaagttgttaaccctgttcaagctgaccgaaaccgaccagcgcatcaccatcggcctgaacctgccgtccggcgagatgggccgtaaagatttgattaaaatcgagaacaccttcctgaccgatgagcaggtcaatcagttggcgctgtatgcgccggacgcaacggttaaccgtattgatgattacgaagtggtgggcaaatcccgcccgagcctgccggagcgcatcaacagcgtgctggtctgcccgaacagcaactgcatcagtcacgctgagccggtttcgtcgagtttcgcagtgaaaaaacgcgccgatgacatcgcactcaaatgcaaatactgtgaaaaagagttttcccattatgtggtgctggccaactaa

SEQ ID NO: 90053 - DNA, 936 bp, Enterobacter aerogenes
atggctaacccgctatatcaaaaacatatcatttccataaacgatttcagccgcgaagacctcgaactggtgctggcgacagccgcaaagctgaaagccaatccgcaacccgagctgctgaagcataaggttatcgccagctgtttctttgaagcctccacccgtactcgcctctcttttgaaacctccatgcaccgcctcggcgccagcgtggtcggcttctccgacagcagcaacacctcgctcggcaagaaaggcgaaaccctggccgacaccatttcggttatcagcacctacgtcgacgctatcgtaatgcgccatccgcaagagggcgccgcgcgtctggcaaccgaattctccggcaacgtaccgattctcaacgccggcgacggcgccaatcagcatccaacgcaaaccctgctcgacctgttcaccattcaggaaactcagggccgccttgagaacctcaatgtcgcgatggtcggcgacctgaaatatggccgtaccgtacactcgctgacccaggcgctggccaaattcaacggcaaccgcttttacttcatcgccccggacgcgctggcgatgccgcagtacattctcgatatgctggatgaaaaaggcatcgcctggagcctgcatagcgccatcgacgaagtgatggcagaggtcgatattctgtatatgactcgcgtgcagaaagagcgccttgacccatcggaatacgccaacgtgaaggcgcagttcgtgctgcgcgccgcggatctcgaaggcgcccgcgtcaacatgaaggtgctgcacccgctgccgcgcgttgatgaaatcaccaccgacgtcgataaaacgccgcacgcctggtacttccagcaggccggtaacggcatcttcgcccgccaggcgttactggcactggtattgaatagcgagctggcacaataa

SEQ ID NO: 90054 - DNA, 453 bp, Enterobacter aerogenes
atgattatcggcaatattcatcatctgcaatcctggctgccggacgcgctgcgtcaggcgattgagcatgttaaagcccacgttagcgagtcgacgccgctcggcaagcacgacatcgacggcaataatctgttctatctggtttctgaagacagcaccgaagcgcaggccgagcgtcgcgccgagtatcacgcccgctatctggatattcaaattgtacttcgcggtcaggaagggatgaccttcagcaccttaccggcaggcgagccgcagatcgactggctggcggacaaagacatcgccttcctcgccgagggcgcgcaggagaaaaccgttatccttaacgagggcgattttgtggtgttttatccaggcgaagtgcataaaccgctctgtgcggtcggggcgccggcgaaggtgcgcaaagcggtggtgaaggtgttgatggcttaa

SEQ ID NO: 90055 - DNA, 1005 bp, Enterobacter aerogenes
atgtccgcgttatatcagaagcatttcttgagattactggattttactgctgcagaaattaccggccttgtcgacctggccgcgcaattaaaagccgataagaaaaacggcatcgaagcccagaaactgaagggcaaaaacatcgcgctcatcttcgaaaaagactcaacccgcacacgatgctctttcgaagttgccgcttacgaccagggcgcccgcgtgacctatctcggttccagcggaagccaaatcggccacaaagaatccatgaaagataccgcccgcgtgctgggtcgcatgtatgacggtattcagtaccgcggctacggtcaggagctggtagaaaccctggcggagtacgccggcgtgccggtgtggaacggcctgaccgatgaattccacccgacacagctactggccgacctgctgaccatgcaagagcacctgccgggtaaggcatttaatgaaatgacgctggtctacgccggcgacgcgcgtaacaacatgggtaattccatgctggaagccgccgcgctgaccgggctggacctgcgcctggtggcgccgaaagcctgctggccggaagagggtttagtggcggaatgcactgcgctggcgaaaaagcacggcggcaatattaccctgacggaagatatcgccgcgggcgtaaaaggcgccgatttcatttataccgacgtgtgggtatcgatgggcgaggcgaaagagaaatgggcggagcgtatcgccctgctgcgcggctatcaggtgaataaagccatgctgcaattaaccggcaacccgcaggtgaaattcctgcattgtctgcccgcgttccacgatgaccagaccattctcggcaaacagatggcggcggagtatggactgcacggcggtatggaagtgaccgatgaagtctttgaatccccagcgagcatcgtcttcgatcaggcggaaaaccgtatgcacaccatcaaagcggtgatggtggcgacgcttggaaaataa

SEQ ID NO: 90056 - DNA, 426 bp, Enterobacter aerogenes
atggcaaacccggaactactggaagaacagcgtgaggaaacgcgtctgattatcgaagagctgctggaagatggcagcgatccggacgcgctgtataccattgagcatcatctctctgccgacgatttcgaaacgttggaaaaagtggcggtagaggccttcaagatgggttatgaagtcaccgagccggaagagctggaagtcgaagaaggcgaagtggtgatctgctgcgatatcctgagcgaaagcgcgctcaacgccgatctgatcgacgcccaggttgaacagctgatgaacctggcggaaaaattcaacgtcgagtacgacggttggggtacctactacgaagacccgaacggcgaagacgatgacggcgaagatgacgaagatttaattgacgaagacgataacggcgtacgccactaa

SEQ ID NO: 90057 - DNA, 765 bp, Enterobacter aerogenes
atggattacccgcaaatactttccccgattttagcattcctgcactgcccaacgccgcaggcgtggattgacgaagcccgtaaaccggaaaacctgccgctgctgttgaccgaccatatggtatgcgagctgaaagcggcgcaaaacgccatgctgctggtacgccgctacgtcgccgataaagatggcgccgacgagctactggaatgcctgaaaccgtacgaagactttacctatcgccgtgggccggagccggattttgtcgctctgcataaacggatcaacaaaagcgccatgccgcgaaccaacgacccgtggggcagccagttgctcgacagcatgattctgcttatcaaggaggagctgcaccacttctggcaggtgcgtgagatcatgctggcgcgggatatcccttacgtcaaaatcaccgccagcaactatgcccgcggtatgcgccgggaggtgcgatcccatgagccggtgatgctaatcgataagctgatttgcggcgcttatatcgaagcgcgctcctgcgagcgatttgccgcgctggcgccgtggctggatgatgatttacagaagttttatctgtcgttgctgcgctccgaggcccggcattatcaggattacctggacctggcgcagaagatagcggggggagatatcagcgagcgcgtacgtcagcttggcgaggcggaagcggcattgatcctccgcccggagcccgagttccgcttccacagcggcgtaccgacggcgccgtag

SEQ ID NO: 90058 - DNA, 504 bp, Enterobacter aerogenes
atgaatacgagcgcaaccctaacgctatccctgcgccgcatcacggccactgataatccggcgattgccaatgttatccgccaggtctccgcggaatacggtctgaccgccgataaaggctatacggtcgctgacccgaatctggatgaactctatgagctctatagccaacctggctccgcttattgggtggttgagcaaaatggcgaagtggtcggcggcggcggcgtggcgccgctctcgtgtagcgagtccgatatctgtgagctacagaaaatgtactttatgtcctcggcgcgcggcaaagggctggcgaaaaagctggcgctgatggcgatggattacgcccgcgagcagggttttaaacgctgctatctggaaaccaccgcttttttgaaagaagcgattggcttgtatgagcatctcgggtttgagcatattgacgagccgctgggctgcaccggccacgtcgattgtgaagtgcggatgttgaaaacgctgtaa

SEQ ID NO: 90059 - DNA, 2856 bp, Enterobacter aerogenes
atggaaaagacatacaacccacaagatatcgaacagccgctttacgagcactgggaaaagcagggctatttcaaaccgaatggtgatgaaagccaggagagcttctgcatcatgatcccgccgccgaacgtcaccggcagtttgcatatgggtcatgccttccagcaaaccatcatggataccatgattcgctaccagcgcatgcagggtaaaaacaccctgtggcaggccggtaccgaccacgcgggtatcgctacccaaatggtggttgagcgtaagattgccgctgaagaaggtaaaacccgccacgactacggccgcgatgccttcatcgataaaatctggcagtggaaagcggaatccggcggcaccattacccgccagatgcgccgcctcggcaactccgtcgactgggagcgcgagcgcttcacgatggatgaaggcctgtccaacgcggtaaaagaagtcttcgttcgcctgtacaaagaagacctgatttatcgcggcaagcgcctggtcaactgggacccgaaactgcgcaccgccatctctgacctggaagtagagaaccgcgaatcgaaaggttccatgtggcacatccgctatccgctggccgatggcgcgaaaaccgctgacggtaaagattacctggtggtcgccaccacccgtccggaaaccctgttgggcgataccggcgtggccgttaacccggaagatccgcgttacaaagacctgatcggtaaattcgtggtgctgccgctggttaaccgccgcattccaattgttggcgacgaacacgccgacatggaaaaaggcaccggctgcgtgaaaatcaccccggcgcacgactttaacgactacgaagttggccgccgtcatcagctgccgatgattaatattttgacctttgatggcgacatccgcgaaagcgcggaagtctacgataccaaaggcaacgaatccgacgtctattccaacgagatcccggctgaattccagaagatggagcgttttgccgcgcgtaaagcgatggttgccgccgtcgacgcgttgggcctgctggaagagatcaaaccgcacgacctgaccgtgccttacggcgaccgcggcggtgtggttatcgaaccgatgctgaccgaccagtggtacgtgcgtgcggacgtgctggccaagccggcagtcgaagccgttgagaatggcgacattcagttcgtgccgaagcagtacgaaaacatgtacttctcctggatgcgcgatattcaggactggtgtatttcccgtcagttgtggtggggtcaccgcatcccggcatggtacgacgatcagggcaacgtctacgttggccgcaccgaagacgaagtacgccaggaaaataatctcggcgccgacgtcgcgctgcgtcaggatgaagacgttctggatacctggttctcttccgcgctgtggaccttctccaccctcggctggccggaaaacaccgacgcgctgcgtcagttccacccgaccagcgtgatggtgtccggcttcgacattatcttcttctggatcgcccgcatgatcatgatgaccatgcacttcatcaaagatgaaaacggcaagccgcaggttccgtttaagaccgtctacatgaccggccttatccgcgacgacgaaggccagaagatgtccaaatccaagggtaacgtcattgacccgctggatatggttgacggcatcaccctgccggagctgctggagaaacgtaccggcaacatgatgcagccgcagctggcggaaaaaatccgtaagcgcaccgagaaacagttcccgaacggtatcgagccgcacggcaccgacgccctgcgtttcaccctggcggcgctggcctctaccggccgcgacatcaactgggatatgaagcgtctggaaggttaccgtaacttctgcaacaagctgtggaacgccagccgcttcgtactgatgaataccgaagatcaagattgcggtttcaacggcggcgagatggtgctgtccctggccgaccgctggatcctggctgaattcaaccagaccgtgaaagcgtaccgcgaagcgctggataacttccgcttcgatatcgccgcgggcatcctgtatgaatttacctggaaccagttctgcgactggtatctcgaactgaccaagccggtcatgaacggtggcagcgaagcggagctgcgcgggactcgtcatactctggtgaccgtgctggaaggtctgctgcgcctggcgcacccgattattcctttcatcaccgagaccatctggcagcgcgtgaaagtaatctgcggtatcaccgccgataccatcatgctgcagccgttcccgcagtacgaggcttctcaggttgatgaagcggcgctagccgacaccgaatggctgaagcaggcgatcgtcgccgtacgtaacatccgtgcggagatgaacatcgctccggggaaaccgctggaactgctgctgcgcggctgcagcaaagatgccgagcgtcgtgttaacgacaaccgcagcttcctgctgaacctggcgcgtctggaaagcatcaccgtgctgcctgccgatgataaaggtccggtttctgtgaccaagattatcgacggcgccgagctgctgatcccgatggcgggtcttatcgacaaagaagccgagctggcgcgtctggcaaaagaagtggcgaaagtcgaagcggaaatcggccgtatcgaaagcaagctgtccaacgaaggctttgtggcccgcgcgccggaagcggttatcgccaaagagcgtgagaagctggaaggctacgcggaagcgaaagcgaaactgattgaacagcaggcagtgatcgccgcgctgtaa

SEQ ID NO: 90060 - DNA, 444 bp, Enterobacter aerogenes
atgaaaaacgcaacgttctatcttctggacaatgacaccatcgtcgacgagctcagcgccgtcgagcagctggtgtgtgaaattgccgcagaacgttggcgcaacggcaagcgcgtcctgatcgcctgtgaagatgaacagcaggctattcgcctcgacgaagcgctgtggacgcggccgccggagagctttgtgccgcataacctggcgggcgaaggcccgagaggcggcgcgccggtagaaattgcctggccgcaaaaacgcaacagcagcccgcgggatattcttatcagcctgcggctaaactttgcagattttgccaccgctttcacagaagtgatagactttgtcccttacgaagattctctgaaacaactggcgcgcgaacgctataaagcgtaccgcatggctggtttcaacctgaacacggcaacctggaaataa

SEQ ID NO: 90061 - DNA, 1512 bp, Enterobacter aerogenes
atggagttcagtgtaaaaagcggtagcccggagaagcagcggagtgcctgtatcgtggtcggcgtcttcgaaccacgtcgcctctcccccatcgccgaacaactcgataaaatcagcgacggttacatcagcgccctgctgcgtcgcggcgagctcgaaggcaagccaggccagacattgttactgcaccatgtgccgaacatcctgtctgagcgcattctgctcatcggctgtggtaaagagcgcgaactggatgaacgtcagtataaacaagttattcagaaaaccattaatactctgaatgacactggctcgatggaagccgtctgcttcctgaccgaactgcacgttaaagggcgcaacaactactggaaagttcgccaggccgttgaaaccgccaaagagacgctgtacagcttcgatcagttgaagaccaacaaaagcgagccacgtcgcccgctgcgtaaaatggtctttaacgtgccgactcgccgcgagctcaccagcggcgaacgcgccattcaacatggcctggcgatcgccgccggtatcaaagcggcgaaagatctcggcaatatgccgccgaatatctgtaacgcggcttaccttgcttcccaggcgcgccagttggccgacacttacagcaagaacgtcatcacccgcgtgatcggcgagcagcagatgcgcgagctggggatgaactcctatctcgccgtcggcaacggctcgcagaacgagtcgctgatgtcggtcatcgagtataaaggcaacccgtctgaagacgcgcgccctatcgtgctggtcggtaaaggcctgaccttcgactccggcggtatctccatcaagcctgccgaaggcatggacgagatgaagtacgatatgtgcggcgcggcggcggtctacggcgtaatgcgaatggttgccgagctgcagctgccgctaaacgtcatcggcgtgctggcaggctgtgaaaatatgcctggcggtcgcgcgtatcgcccgggcgatgttctgaccaccatgtccgggcagaccgttgaagtactgaataccgacgccgaaggccgtctggtattgtgcgatgtgctgacctacgttgagcgcttcgagccggaagcggttatcgatgtggcgacgctgaccggcgcctgcgtgattgccctcggccatcacatcaccggcctgatgtcgaaccataacccgctggctcatgagctgatcggcgcctccgaactggccggcgaccgcgcatggcgtctgccgctggccgacgagttccaggatcagctggagtccaactttgcggatatggccaacatcggcggccgtcctggcggcgcgattaccgctggctgcttcctgtcacgcttcactcgcaagtacaactgggcgcacctcgacatcgccggtaccgcctggcgttccgggaaagccaaaggcgcgaccggccgcccggtggcgctgctgtcgcagttcctgctcaatcgtgcgggttttaacggcgaagagtga

SEQ ID NO: 90062 - DNA, 1098 bp, Enterobacter aerogenes
gtgataatcataagatatctggttcgtgagacgctgaaaagccagttggcgatcctattcatcctgttactgattttcttctgtcagaaactcgtcaggatcctgggcgccgcggtagatggcgatatcccgaccaacctggtgctctcgctgttagggctgggcgtaccggaaatggcgcagctcattctgcccctgagtcttttcctcgggctgttgatgacgctgggcaaactgtataccgaaagcgaaattacggtgatgcacgcctgcggcttaagtaaagccgtattgattaaggcggcaatgatcctcgccctgtttaccggcgccgtcgcggcagtcaacgtgatgtgggcggggccgtggtcgtcacgccatcaggatgaagtgctggcggaagccaaagccaaccctggaatggcggcgctggctcagggccagttccagcaggccagcgacggcagcgcggtgttgtttatcgaaaacgtgaacggcaaccgctttagcgacgtgttccttgcgcaattgcggcccaaaggcaacgcgcgtccttccgttgtggtggcggattccggcgaactgtcgcagaaaaaagacggatcccaggtggtcactatgactcaggggacgcgttttgaaggcacggcgatgctgcgtgatttccgtattaccgacttcaaaaactaccaggcggtaattggccatcaagcggtagcggccgatcccagcgacaccgaacagatgaatatgcgcaccctctggaagaccgataccgcgcgcgcgcgcgccgaactgcactggcgatttacgctggtggcggcggtgttcatgatggcgctgatggttgtcccgcttagcgtggtgaacccgcgtcagggccgcgtgctgtctatgctgccggcgatgctgctgtatctggtgttcttcctgctgcaaacgtcgatcaaatcgaacgcgggtaaaggcaaaatggaccccgctatctggatgtggggcgtgaacctgctctacttcgcgctggcggtgctgcttaacctgtgggatacggtgccgatgcgtcgtttccgtgcccggtttaataaaggagcggtgtga

SEQ ID NO: 90063 - DNA, 1083 bp, Enterobacter aerogenes
atgcaggcgtttggcgtacttgaccgctatatcggtaaaaccattttcaacaccatcatgatgacgctgttcatgctggtgtcgctctccggcattattaagtttgtcgaccagctgaaaaaagccggacagggcagctatgatgcaatgggcgccgggctttataccattctcagcgtaccaaaagatgtgcaaatcttcttccccatggcggcgctgcttggcgcattgctggggctggggatgctggcgcagcgcagcgaactggtggtgatgcaagcttccggttttacccgtatgcaggtggcgctggcggtgatgaaaacggcgatcccgctggtgttgttaaccatggcgatgggtgagtgggtggcgccgcagggcgaacagatggcgcgtaactaccgtgcgcagcagatgtacggcggttcactgttgtcgacccagcaggggctgtgggcgaaagacgggcataattttgtctacattgaacgagtaaagggcaatgatgaactaggcggcgtgagcatctatcagttcaacgataatcgtcgtctgcaatctgtccgttacgccgcttccgcgaagtttgataatgaagctaagatctggcgcctgtcgcaggtggatgaatctaatctgaccgatccaaaacaggtcaccggtacgcaaatggtgagcggcacctggaagaccaagctaacgccggacaaactcggcgtggttgcgctggatccggatgcgctgtcaatcagcggcctgcataactacgtgacctatctgaagtccagcggccaggatccgggccgttaccagctcaatatgtggagcaaaatcttccagccgctgtcggtggccgtgatgatgctgatggcgctgtcgttcatttttggcccactgcggagcgtggcgatgggcgtgagagtggttaccgggattagcttcggcttcatcttctacgtactcgaccagatatttggcccactaacgttggtttacgggataccgccgataatcggcgcgctgctgccaagcgcaagtttcttcctgataagcctttggctgatgatgagaaaagcgtag

SEQ ID NO: 90064 - DNA, 1503 bp, Enterobacter aerogenes
atgagctcacccctgctgattgcgcgcacgctggataaacaactgcatctgctgcctgcaatggctaaccgtcacggcctaattaccggcgccaccggcaccggtaaaaccgtaactttgcagaaactggcggagtcattttccgagatcggcgtaccggtctttatggccgatgtgaaaggcgacctgaccggtatcgcggaagcaggccagagctctgagaaacttcaggcgcgtctggaaaaaatcggcgttaccgactgggagccgcatgccaacccggtggttgtttgggatatctttggtgaaaagggccacccggtgcgcgccacagtgtcggatctcggccccctgctgctcgcccgcttgctcaacctgaatgaagtacaaagcggcgtgctaaacattattttccgtattgctgacgatcgcggcttgctgctgctggactttaaagatctccgcgccatcacccagtttatcggtgataacgccaaagccttccagaaccagtatggcaacatcagcagcgcgtcggtcggcgctatccagcgcgggctgttaaccctggagcagcagggcgcagagcacttcttcggcgaaccgatgctggatattcaggactggatgcgtgtcgatgccagcggtaaaggggtaattaatatcctcagcgctgaaaagctctatcagatgccgaagctgtacgccgccagcctgctgtggatgctctccgaactctacgagcgcctgccggaagccggcgacctcgaaaaaccgaagctggtgttcttctttgacgaagcccacctgctgtttaacgatgcgccgcaggtactgctggataaaatcgagcaggtgatccgtcttatccgctctaaaggggtcggcgtctattttgtctcgcagaatccgtcggatatcccggatgccgtgcttggccagttgggcaaccgcgtgcagcatgccctgcgcgcctttactccgaaggatcaaaaagcggtgaaaaccgccgcccagaccatgcgcgccaacccggcattcagtaccgagcaggccattcaggagctcggtaccggcgaagcgctgatctccttcctcgacgagaaaggcagcccgtcggtcgtcgagcgcgcaatggttatcgctccctgctcgcggatggggccggtcaccgatgatgagcgaaatggcctgattaaccactcggcgctgtacggcaagtatgaagaagagattgaccgcgagtcggccttcgaaatgctgcaaaaaggggtgcaggtcgccacagagcagcagtcggcaccgccggcaaaaggtcaacaaaacggtgatgatgacgggctactcggtggactgaaagatattctgttcggcactaccggcccgcgcggcggtaaacgagatggtatcgtgcagaccgcggccaaaagcgccgtacgtcaggtaaccaaccagatcgtccgcggcatgctgggaagcctgctcggcggaaggcgccgttag

SEQ ID NO: 90065 - DNA, 822 bp, Enterobacter aerogenes
atggccattgccctgcagcgtttctgtatcaatcgtaaaattgcgccatcgcttagcattgaagcgtttttccgtctggtaagcgaactcgggctgcataaggtcgagctgcgtaatgatttacccggcggtaaagtcaccgatgagctaacccaccagcaggtgcgcaagctggccgaccgataccagcttgaaattctgacgatcaacgccgtctatcccttcaactgccacagcgctgaagtacgtcagctgacggagtcgctgctaaaagaggcgcaggctattggcgccaaatcgctggtgatgtgcccgctaaatgatggcaccgttgtagcgccgcaagaaacgcttgccgctatgcgcgagctggcgccgttgttcgaacaatatggcgttcagggcctggtcgagccgcttggcttcccacaaagttcgctgcgctcggcggcgcaggcgcaggcgcttattcgcgacgcccaggtaccgtttaagctgttaattgatactttccatcatcatctttatccacaagctgaagaggaattcagccagctggacgttgctgagataggtctggttcacctctccggcgttgacgatccctgcccgcgcgaacagttgaccgacaacgagcgcatcatgctgacaccacaagataggctgctgacctgccagcaggtaaaacatctcgaagcccgcggataccagggagattacgccttcgagcctttcgctccgcagttggcatcatggcgcgaagaggatattcgccgcgagattgaacagagcatcgcgctgattcagcgccactgcgcctga

SEQ ID NO: 90066 - DNA, 1506 bp, Enterobacter aerogenes
atgactatcacaggtaactttattggtgggaaaacggtaaccagcagcagccgggaaacgatgccggtgtacgacccggccactggcgatgtggttcgcgaagtcacgctttccaccgcgcaggaggtttccgacgcaatccaggtcgctcgcgacgcttttgacagctggtcccgtaccacgccgctgcgccgcgcccgcgtgctgttcaattttaaaatgctgcttgaacagcacgtcgatgaactggcgggaattatcgttagcgagcacggcaaagtgtggtccgatgcgttgggcgagctgacccgcggcatggaagtggttgagttcgcttgcggtattccgcatctcattaaaggtgagttttcttccgacgtgggtaccggcgtcgacagctattcgctcatgcagccgctgggcgtggtggcggggataacaccgtttaatttcccggctatggtgccgatgtggatgttccccatcgcgctggcctgcggcaacagcttcgtgctgaaaccaccggcgctggcgccgaccgcggcggtacgcatggctgaattactgaaagaagccggtctgccggacggcgtttttaacgtcattcattgcagcaatgaagatgccgagcagctttataccgacccgcgtattgccgccgtcagctttgtcggctcctccggcgtggcggaatatatctataaaaccgccagcgctcacggaaaacgcgtccaggcgtttggcgcggcgaaaaaccatgccatcgtgatgccggacgccgatcttgatgcgacagtgaatgccatcatgggcggtgcgtatggttccgcaggcgagcgctgtatggctctgccggtagtagtggccgtcggtgacgagaccgcagataaattaatcgcccgcctgaaaccattagtcgagtcgttgaaagtgggccctggttgcctgcgcggcaaagacgaaaacgaaatggggccggtagtatctgaagcgcatcagaaaaaagtacttggctatattgataagggcgtcagcgaaggggcgtcgttggtggtggatggccgcaggctgcgcgtggccgggcatgaggacggatattacgttggcggtacgctgtttgaccatgtcactccggaaatgaccatctggcgtgaagagatttttggcccggtgctggggatcgtccgcgttgctgattaccaaagcgcgctggcgctggtaaacagccacgaatttggtaacggcagcgccgtctttaccagcaatggccataccgcccgcgagttcgttcatgatgtacaggccggcatggttggcgtcaacgtaccggtgccggtgccgatggccttccatagctttggcggctggaagcgctcggtatttggcgcgctgaacgtccacgggcctgacggcgttcgcttctatacccgtatgaaaactgccaccgtgcgctggccgcaggggcagcaaaccgtatctgaattcagtatgccgacgttaggttaa

SEQ ID NO: 90067 - DNA, 801 bp, Enterobacter aerogenes
atgtcgttattggctaaagcgcaaaaagagggacatatccagcacatcaccccgcagagcgcggggtggcattatattggctttgatgtctggatgttaaaacaggggcaaaccgtgaccctggagagcggtgatcgtgagctatgtctggttctggtctccgggctggcctcgatcaaaactcagcacgccgattttcccgaccttggtaaacgcatgtcgccattcgagcgtacgccgccgtggtcggtctatgtgccgccgcaagataaggtcgaggtcactgcagattccgatcttgagctggcggtttgcagcgcgccgggcaaaggcagcttcccggcgcgagtgatacggcctgaggatgttggcgtagaacatcgcggtaaagggcgtaaccagcggctggtacataatattctgccggataatgcgcaggcggattgcctgctggtagtggaagtctacaccgaagaaggggcgaccagttcctggccatcgcacaagcacgataccgcgctgccggggcaggaaacccagctggaagaaacctactaccaccgtttcgatccgccgcaaggttttgcctttcagcgagtgtacaccgatgaccgcagtctggatgcctgtatggcgccctataaccatgatgtggtgatggtgccgcgcggctaccatccggtagcggcgatcgccggttacaacagctattacctgaacgtgatggcggggccggatcgtaagtggctatttacctgggaagacgatcacgcctggatcaacagcgatcgctattcatag

SEQ ID NO: 90068 - DNA, 855 bp, Enterobacter aerogenes
atggctaataatccgacccaactgaccatcctgcaggatgaaatcagacggcgctacgacacgctcagcaaacgtctgaagcaggtggcgcgctatatactggataacagtaatagcgttgctttcgataccgtagcctccattgcgcaacaggctgacgttccgccctcaacgctgattcgcttcgctaacgcctttggcttcagcggctttaacgaaatgaagcagatgttcaggcagcatctgatggaagagaccgccaactacaccgagcgcgcacgtctgttccgccagactactaacgacgaaacaacgccgccggaaacgccgacggaaatcctcaacatgttcagcatggtcaatacccaggcgctgcagcaactggcaatgcagacctccggcgaagacctcaaccgggcggtagatttactggcggatgcggaaaatatctatgttatcggtctgcgtcgctcgttcagcgtcgcctcttacctgacctacgcactgcgccatctggatcgcaaagccttcctgatcgacggcctcggcgggatgttcaccgagcagctcagtctggtggggccgaaggatgtggtcgtggcggtgagcttctcgccttatgcccgtgaagtggtggagctggttgagcttggcgcccagcgcaaggcgcgacaaatcgccattaccgatagccaggtaagcccgcttgccgccttcagtgatgtgtgctttgtggtgcgtgaagcgcaggtcgatggtttccgttcacaggtggcctcgctgtgcctggcgcagacgctggcggtatcgctggcattgaatagcagcaaagagccgcagcagcaccgcgcctga

SEQ ID NO: 90069 - DNA, 1914 bp, Enterobacter aerogenes
atgaatgcagcagttaagcggctcgacgtcatctgtattggccgggtggccgtcgatctctacgcccagcagataggggcaaggttggaagatgtggccagtttcgccaagtatctcggcggatcttcgggcaacgtcgcctttggtaccgcgattcagggattaaaatcggcgatgctggcgcgggtgggcgatgagcacaacggccggtttctgcgtgaaaccctcagccgcgcaggtgtcgataccgaatatctgatcacggataaagaacggctgaccgcgttggtgatgctgggcattaaggatcaggataccttcccgctgattttctaccgcgacaactgcgccgatatggcgctgacgcctgacgatatcaatgaggagtacatcgcctcttcacgcgctctggcggtgaccggcacccacctttcacacgccaatacccgagacgcggtactgaaggcgctggaatacgcccgccgccacggcctgcgtaccgcgctggatatcgattaccgtccggtgctgtgggggcttacttcgctgggcgacggtgaaacgcgtttcattgagtcgggtccggtgacccgtcagttgcaggaagttctgcacctgttcgatttagtcgtcggcactgaagaggagtttcatatcgccggcggcagcaccgataccctcaccgcgctgaaaaacgttcgccatgccaccaaagcgacgctggtctgcaagcgcgggccgatgggttgcgtggtgctggagggcgccatcccggatagctgggacgaagtgccgttgcagcaaggcgttcgcgtcgaagtactcaacgtgctcggtgccggcgatgcttttatgtccgggctactgcgcggctggcttaacgatgagggctgggagcaggcctgccgctacgccaacgcctgcggcgccttagtggtttcgcgccacggctgcgcgccggcgatgccgacaaaagtagagcttgatgattatttatcgcgggccgatgccgttccgcgcccggatatcgacgcgcggttaaatcatttgcaccgggtgaccagccggcgccagccgtggccggaactgtgtatcttcgcctttgaccatcgtaaacagctggcggatctggcattagaaaccgggcgtgacccggcctgtattcccgaactcaaactgctgctgttggccgccgccgaggcggccgccacagaggccgggctggatcggcgcagcggcatcctcgccgatggtacctatggtcaacgttcacttaacgccattaccggtaaaggctggtggatcggtcggccgattgagctccccagctcgcgtccgctacgtcttgaacatggtaatattggctcacagctgatcgactggccgcttgagcacgtcgtcaaatgcctggtcttttaccacccggatgacccggcggcgctgcgcgccgagcaggatgcgctgctgctggaagtctggcaggcctgcaataagtccgggcacgagctgctattggaagtgatcctgccggagaacggaccggacaaagatgaacgccactaccacactatgctggagcacttctatcagttgggcatccagccggactggtggaagctgccgccgctggccagcgcccagtgggagcggatctcagcgcttatcgagcgcgaagatccgtggtgccggggcatcctgctcctggggctggatgcgccatcggatcgattgcgttcaggtttcgccgaagcggccgggcacccgatgatcaagggttttgccgtcggccgaaccatctttggccagccttcgcgccgctggatgcagggcgaactggatgacgcagcgctaatcgatgaagtgaagcgtaactatttgcggctcatcggctactggcgcgaagcgcgcggctaa

SEQ ID NO: 90070 - DNA, 1941 bp, Enterobacter aerogenes
atgggcaaactgagactgacaatggcgcaggcgctggtgaaattccttgataaccagtatctggaggtggacggcgaagcgcagaaattcgtgaaagggattttcgctatttttggtcacggcaacgtgttgggcttaggccaggcgctggaagagaacagcggcgaactgcgggtttaccaggggcgtaatgaacaaggcatggcccatgcggccaccggctttgcccgtcaatcactgcgccggcagatcattgcctgcacttcttccatcggtcccggggcggccaacatgatcaccgccgcggcgacggctacggccaaccgtatcccgctgttattactgccgggcgatgtattcgccacccgccagccggacccggtactgcagcaaatcgaacagagccacgatctgagtatcacgactaacgacgcatttcgtgcggtgagtaagtactgggatcgtattacccgcccggaacagctcatgagcgcctgcattaatgccatgcgcgtgctgacggatccggcggaaaccggcgccgttaccttgtgtctgccgcaggacgtgcagggtgaagcctgggattatcccgagtccttttttgcccgccgtgtccaccgtctggatcgccgtccgccaagcgcggcgcagctggcggatgcggtagaggcaattaaagccagccgtaaaccgctcatcgtctgcggcggcggcgtgaaatattccgcggcaggcgaagcgctggtgagcttcgccgaacgttacgacatcccgtttgcggaaacgcaggccggaaagggcacggtggtttcatcgcatccgctgaacgtcggcggcgttggcgaaacgggctgtctggctgccaacctgttagcgaaagaggccgatctggtcatcggtatcggcacgcgctttagcgattttaccacctcctcgaaatggatattccaatccccgggcgtgcgcttccttaacgttaacgtcagtaattttgatgcctggaagctggacggtatcccaatgctggcggacgcccgcgaggcgttaagcgcgctcagcgccgcgctggagaacgagtcctggcaggcaggatggggcgcgcagattgcaagcgtgcagagccggcagatgaaagagacccagcgcgtctatcaggcggtctggcaggaaacggatttcgtaccagaaattgacgaccatattgaccgtgaatcggtttatcgcgaattccgtcaaatcacggattccaccctgacgcaaagcagcgttcttggcctgctgaacgagtcgctggcggcggatgcggtcattgtggcggcggcgggcagcctgccgggggatttacaacgcgtctggcgcaaccgcgcgccgaatacctatcacgtcgagtacggctactcgtgcatgggctatgaggtcaacgccgccctcggcgttaagctggcgcagccgcagagcgaagtctattcgctggtcggcgatggctccttcatgatgctgcactctgagctggtcacctccctgcaggagcgggcgaagatcaacgtcattctgctcgacaacatggcgaacggctgcatcaacaacctgcagctggaacacggtatggatagctttggcaccgagtttcgctaccgctcggcggaaaacggccagctgcagggcgggctggtaccggtggatttcgccacgatcgcttccggctacggctgcaagacctggcgggtcaccaccctcgatgagcttcgccacgcgctggatgccgctcgccgtgaaaccgtcagcacgcttatcgacattaaagtactgccgaaaaccatggtccacaaatacggtagctggtggaacgttggcgtggcgcagacggcgctgtcggaacgtatccgtaaagtcgctgaaatgattaatgaaaaacgcgcccaggcgcgggattactaa

SEQ ID NO: 90071 - DNA, 1014 bp, Enterobacter aerogenes
atgtcactcaaattaggtgtcatcggcgcaggcgccatcggtaaagaacatatccgtcgctgcacccaggtcttacagggggcgaccgtggtcgccgtttccgatatcaacgccgaaaacgcccgtgcggcagtagcgctgccgggcgtgcaggcggaagtctacgccgacggtcatgatgtgattaaagccagcgacgttgacgccgtgctggtgacctcctgggatccaacccatgaagagtacaccctggcggctattgaggccggtaagcccgtcttttgcgaaaagccgttggcgatgagcgcggaaggctgccgccgcatcgttgatgctgaaatgaaagccgggcgtcgcctggtgcaggtcggctttatgcgcccgtacgatgaaggctatctggcgctgaagaaagtcattgatgacggcgatatcggcgcgccgctgatgctgcgctgcgcccaccgcaaccagtcggtcggcgagaactacaccaccgatatggcgatcaccaacaccctgatccacgagctggacgtgctgcgctggctgctaaatgacgactaccgctccgtacaggtacgcttcccgcgctcgacctcccatacccatgcgcggctgaaagaccctcagatagtctcgttcgaaacgaaaaagggcaccctgatcgacgtcgaagtcttcgtaaattgccagtacggctacgacattcagtgtgaggtggttggcgaaacgggcattgcgcgcctgccggaaccgtcggcggtggagatgcgtaaagccgccagcctgtcgacagccatcctcaccgactggaaagaccgtttcatcaaagcctacgacgtcgaactgcaggcatttatcaatgatgtgaaagccggcaagctgcagggcccctccgcctgggacggctatgcggcatcggttgccgccgacgcctgcctgaaggcgcaggagtgcaacgaaccggtagctgtgtcgctgcctgagtgcccggcattctaccaacgctaa

SEQ ID NO: 90072 - DNA, 885 bp, Enterobacter aerogenes
atgaaaattgcttttgatgtcgatgtgattcgagatctcgggatcaccagaatggtccagcaggtggcggagtggggctacaaatacattgaacagtcgccgcacccgcagattaacccattctacaaacatccacgcgccagccgggagatcatggccgagtataagcaggcgctgcgtgacaacggcgttgaactctcctcgttcatctgcgtttatcgctggtccggcccggatgagctgcgccgtcaggcggcggtgaagaactggaagcggctaatcgaagtagcggtagagatgggcgtgcaggttatcaacaccgaattttctggcgatcctaaccagccggaaatttgcgaagagatgttctaccgctcgatggaagaactgctgccgatattcgaacgtgaagggatccgcgtcgaaatccaggcccacccgtgggacttctgcgaagaaaacaacgagacggtggatatcgtgaagtccttccgtagcgacaacgtgaagtacgtctacagcgtgccgcacaccttcttctacgacaaaggtaaaggtgaagtcgagaagatgctgcgctatgccggtcaggacctgtctcacgtgctgattgccgatacccgcaatcacaccaaacactgccgctatatcgttaatccgccgggcgttgacgccgccgtacaccagcacgtcggcgtcggcgagggggatgtcgatttcgatgctctgttccgcaccctgcgcgatatgcgtttcgctgaacagaccttcaaagttggcggtgaaccgatcgtctgcacctcgctgtttggttacccggaaaagatgaaataccaggccgtggaaacgcgtgaacttatcgaacgtgaactgctgcgccggtaa

SEQ ID NO: 90073 - DNA, 900 bp, Enterobacter aerogenes
atgaacaaagacaacgtcaaactggctatcgcccctatcggttggactaacgacgatatgcctgagctggggagcgaaaacaccttccagcaaacggtcagcgaaatggcgctggccggttttaccggcagcgaagtcggcagcaaatatccgcgcgatccggcggtgctgaagccgatgctggatattcgcggcatgcagatttgcaacgcctggttcagcaccttcttcgcgaatggccaaagagaaaaaaccatcgatgaattcgttaaccacatgaatttcctccatgcgatgggcgcaaaggtgattggttgctctgaacaaagcggcagtatccaggggctcgataaaccgattctcggcgatgtaaaaccgtgctttagcgacgaagagtggcagcgggtagctgaaggttataacgcgcttggcaagctggcggcagagaaggggatgcaggtttgcctacaccaccatatgggcaccggcattcagactaccgcggagatcgacaagtttatgtcgctggtggacgaacgcgtcttcctgctctacgacaccggtcacgcctggtattcagagggcggcgaggcgccgatgctggcgatcctgaaaaaatatctgccgcgcattaaccacgtgcatctgaaagacgtccgccccgcggtaattgagcaggtgcgccgcgaagggctctcattcctcgacggcgtcaagaaaggcacctttaccgtaccgggagacggcgaaatagatttccgcccggtcttccagttgctggatgactatggctacaaggggtggatggtagtggaagccgaacaagaccccgcgctggcgaaccccttcgaatacgccgtaaaggcgcgtaagtacatccgcgaaacggcaggaatctga

SEQ ID NO: 90074 - DNA, 1497 bp, Enterobacter aerogenes
atgtcacaggaacaatatctcacactcaataaagcgtcggggccgaatagcgacgccccggcaacgccgtttgttaagatcgttgcgttgattgcgaccttaggcggtttactctttggctacgacaccggggtgatttccggcgccctgctgtttatgggtaaggaactgcacctcacgccgtttaccaccgggctggtgaccagctcgctgctgttcggcgccgcattcggcgcactgctttctggccatctggccagcgccgcaggcagaaagaaaatcatcctctggctggcggtgatcttcgctatcggcgcggtgggtacttccctcgcgccggacgtcaactggatgattttcttccgcctggttctcggcgtagcggttggcggcgcggcggcaacggtgccggtatatatcgctgagatggcgccggccaacaaacgcgggcaactggttacgctgcaggaactgatgatcgtctctggccagctgctggcctatatctctaacgccaccttccatgagctgtggggcggtgaaagtacctggcgctggatgctggcggtggcgacgctaccagccgtgctgttgtggtttggcatgatgtttatgccggataccccgcgctggtatgcgatgaaaggccgactggcggaagcgcgccgggtgctggagcgtacgcggcgtaaagatgatgtcgaatgggagctaatggagattacggaaactctcgacgagcagcgcaatcttggtaagccaaaaattcgtgaaatcatgaccccgtggctgtttaagctgttcatgatcggtatcggcgtggcggttattcagcagcttaccggcgttaataccattatgtactatgcgccgacggtgctgacctcggtcggtatgaccgataacgccgcgctgttcgcgaccattgccaacggcgtggtttcggtgctgatgacctttgtcggtatctggatgctggggaagataggtcgtcgcccgatgaccatgatcggccagttcggctgtaccgcctgcctggtgtttatcggcgcggtgagctacctgctgccggaaacggtcaatggtcagccggatgcgctgcgcgcctatatggtactggcgggaatgctgctgttcctgagcttccaacagggggcgctgtcaccggtaacctggctgctgttatcggaaattttcccaacccggatgcgcgggatgtttatgggcggggcggtgttctcaatgtggattgccaacttcctgatctcgctgttcttcccgatgctactgtcgtgggtcggcctctccggaaccttctttatctttgcggcaatcggtatcttcggcgcgatcttcgtgatcaaatgcgtgccggaaacacgcaaccgcagccttgagcagatcgaacactatctgcgcgagaagctggataccagcccggcgggaaaagcctacgcgcgtaaatcctgggcttcgtcgcaggcggataaaatctaa

SEQ ID NO: 90075 - DNA, 1311 bp, Enterobacter aerogenes
atgtttaaccccctcaccgccctgacggttgggctcagcctcgccctgagcggcgcggcgctggcgaaagagaaaatagacttcatgttcccggctccggtagacggcaagctgacgatggagatgacacgcgtcattaaagcctttaacgagtcgcagcaggatgtcgaagtgcgcggcatcttcaccggcaactatgacaccaccaagatcaaagccgaatccgcacagaaggccgggcaacccccggcgctggtgatcatgtccgccaacttcaccaccgatctggcgctgaaggatgagatcctgccgatggatgagctgtttaaatacggcgatcaaaaggctggcgattttctgcaaaaagaattctggcccgcgatgcataagaacgcccaggtgatgggcaccacctacgcgatcccgttccataactcgacaccgatcctctactacaacaagacgctgttcgatcgggccgggatcgcgcaaccaccgcagacctgggccgagctgctgtctgatgccaaaaagctgaccgatgagagcaaaggccagtgggggatcatgctgccgtcgaccaacgacgactacggtggctggatcttctcggcgctggtgcgcgccaacggcggtaaatatttcaatgaagactatccgggtgaggtttattacaactcgccgaccgctatcggcgctctgcgcttctggcaggatctgatctacaaagacaaagtgatgccttccggggtactgaattcgaagcagatcagcgcttcattcttctccggcaaacttggcatggcgatgctcagcaccggcgcactgggctttatgcgcgaaaacagtaaagattttgaactcggtgtcgccatgctaccagccaaagagcagcgcgcggtgccaattggcggcgccagccttgtgagctttaaaggcatcaacgacacgcagaagaaagcggcctaccagttcctgacttatctggtgagcccgcaggtaaacggcgcgtggagccgctttaccggctacttctcgccgcgtaaggcttcttacgatacgccggagatgaaagcttatctgcagcaggatccacgagcggcgatcgcccttgaacagttgaagtacgcgcatccgtggtattccacctgggagaccgtcgccgtgcgtaaggcgatggagaaccagctggcggcggtggtcaacgatgctaaagtaacgccggaagccgcggtacaggcggcgcagaaggaagctgacgcgctaatgaaaccttatgttgataagactgcgctgggagaagtgaagtag

SEQ ID NO: 90076 - DNA, 1074 bp, Enterobacter aerogenes
atgctcagtctgcaaaacatcagtaaacatttcgaaggtaaaccggcgctcagcgcgctgtcgcttgatattcacgaaggtgaattcgtggtgctggtcggcccgtcgggctgtggtaaaagcaccctactgcgcctgcttgccgggttggagcaggtcagcgaaggcgaaatctggctgcatgatgagaacatcaccgacaccacgccgcgcgaacgcaattttgcgatgatcttccagaactatgcgctgtttccacatctctcggtgcgcgacaacatcaccttcggcatgaaggtacgcaaggaagaaaaaagcggctggcagccgcgggtagataaagtcgcgcacatgctgcagctggaggcgctgctcgatcgcaaaccggcgaagctctccggtggccaacggcagcgggtagcgatggcacgggcgatcgtacgtaatccgcggctgttcttaatggatgaaccgctgtccaatctcgacgctcgtctgcgcagcgaagtccgcgacagcattatggacctccaccagcagttaaaaaccagtaccgtctacgtcacacacgatcaaaccgaggccatgtcgatggccgaccgcatcgtggtgatgaacggcggtcacgtgcagcaggtggggcggccagagtatctgtatgccaacccggccaatctgttcgcggccggatttatcggttcaccggcaatgaatctgctatcgctgccctgcgttgacggcaacgttcagcttggcgaactacgccatccgctaccgccgcgccaccgcagccagacccgcgtctggctgggcattcgcccggaacatattaccgaccgcgtggagcaaggccatctgcgcctgccgggcaccgtcctgcaacgagaactgatgggagccgattatctgctccacgtcagcacgccgatcggcaccctgcgctttagccgccgccaccgcggcacggtacctgaaaaaggcgaatcgatgatcctcggcttctcgcctgccgatgtgcatctttttcatgctgagacccagcataatttactgatggagtgtaatcatgtttaa

SEQ ID NO: 90077 - DNA, 825 bp, Enterobacter aerogenes
atgctgttagcgcacatttccgatacccatttccgcagccgcggcgagaagctgtacggctttatcgacgtcaacgccgccaatgctgatgtggtttctcaacttaacgcgctgcgcgaacgcccggatgcggtggtggtgagcggcgatatcgtcaactgcggccgtccggaggagtatcaggtcgcccgccagatcctcggcagcctgaactatccgctgtatctcatccccggtaaccacgatgataaagcgctgtttctggagtacctgcagccgctgtgcccacagctcggtagcgatgccaataatatgcgctatgcggttgacgacttcgctacccgcctgctgtttatcgactccagccgcgccggcacttcaaaaggctggctgaccgacgagaccattagctggctggaagcgcagctgttcgacggcggcgacaaaccggcatcgatctttatgcaccacccgccgctgccgctgggcaacgcgcagatggacccgattgcctgcgaaaacggccaccgtctgctggcgttggtagagcgtttcccgtcgctgacgcgcatcttttgcggtcataaccatagcctgaccatgacccagtatcgccaggcgctgatctccaccctccccggcaccgtccatcaggtgccttactgccacgaagacactcgcccgtattacgatctctcgccggcttcgtgcctgatgcaccgccaggtcggcgagcaatgggtgagctaccagcactcgctggcccactacgccgggccgtggctgtacgacgaaaacatcagttgtccaacggaagagcgctaa

SEQ ID NO: 90078 - DNA, 888 bp, Enterobacter aerogenes
atgagcgctgaaatctcgccgctgatggtccgctcgcccgccgcttcgcgtccgctgtggttgcgcctgcgtcgctcacagccctttaccctgacggtaatcatgtgctgcctggcgctgctatgggtgagcccgtttatctggatgctgacgacctcgttcagcgccaccaccttcggcgaagatatggcctcattgctgcctcgcctgccgctgaccctcgataacttccgcgacgcctgggacagcgccgactggctgagcctgtacgccaacacccttatctttaccttcggcactttcttcgtgcagctactcaccatcaccaccgccggctacgttttcgcctgccacgaatttcgcggcaagaaaacgctgtttctgctgtttctcgtccagctgatgatcatgccggtggtgatgatggtgccgaacatgctgacactgaaaaccttcggcctgctcaacactttgaccggcgtgatgatgccttactttacctcggcgttcggcgtgtttctgatgcgccaggcgttcctcgccatcccgaaagagctggaagaggcggcgctgatggagggatgccgctggtggcaggtgttattccgcgtactgctgccgatgtcctggccatcggtgctggccttcgccaccgtcagcattacctaccactggaacgagtacctgtggccgctgatgatgctcaacgatcccgataagcaggtgctgacggtcgggctggtctctttcgccatgggcgctgaatccggcggccagtggggcaccatcggcgccgggacgctgatggtctgcctgccgctgatgctggcgttcatccttttccagaaacagttcctgcgaagcttcggcttctccgggatcaaataa

SEQ ID NO: 90079 - DNA, 873 bp, Enterobacter aerogenes
atgaataagcgctggctcccctggctgatactgtcgccttccctgttgtttttactgctgtttacctggtttccgcttggccgttcggtctatgacagcctgtttgatacccgcatggccagcgacggcgcacagtacgtcgggctggataacttcgcccgcctgtttgccgacggcgttttctggcaatccctggtcaataatctgctctatatcctgctgacagtggtacccggcgtgacgctcgctctgctgctggcggtggcgctgagcgagaatcaccacgtcaaccgctggctgcgcaccgcctttttcttcccgatgattatcccgatggtcagcgccgccgcgttgtggctgtttatttttatgcccggcctcggcctgctcgatcactatctggcgaagctatttggcccgctgaacaacaactggctggggcgcagcaacagcgcgctgctggcgctggcgctgattggcgtgtggaagttcgccggctactacatgctgtttttcctcgccgggctgcagagcattccggcctcaacgcgggaagcggcgctgatggaaggggccagccgcacccaggtgttttttaaggtcacgctgccgctgctgcgcccgacgctgagctttgttatcaccaccgcgctgatttactccattacccagattgatcacgtcgcggtgatgacgcgcggcgggccggataacgccacgaccgtgctgctctattacatccagaatctcgcctgggatacccatgacctcggcaaagcctccgccgccaccttcctgacgctggccgggctgtttgccttctcgctgattaacctgaaattgctggaaaaaggagcccactatgagcgctga

SEQ ID NO: 90080 - DNA, 1020 bp, Enterobacter aerogenes
atgagcatcattaaaagttacgccgccaaagaagcgggcgccgatctgtcgctgtgggagtacgatgccggcgaactgttgccggaagatgttgaagtcgaggtggagtactgcgggatttgtcattcggacctgtcgatgatcgacaacgaatggggcatgtcgagctacccgctggtcgccggtcacgaggtgattggccgggtggcggcgctgggcagcgcggcgcaggataaagggctgaagattggtcagaaggtcgggatcggctggacggcgcggagctgcggccactgcgacgcctgtatcagcggcaaccagatcaactgcctggaaggctctgtgccgaccattatgaaccgcggcggcttcgccgataagctgcgcgccgactggcaatgggtgatcccgctgccggagagcatcgatctggcttccgccggcccgatgctgtgcggcggcatcaccgtcttcaaaccgctgctgacccaccacgtgaccgccaccagccgcgtcggcgtgattggtatcggcggcctcggccatatcgcgattaaactgctgcgggcgatgggggcggaagtgaccgctttcagttccaacccggctaaagagcaggaagtgctggcaatgggcgccgaccgcgtggtgaacagccgcgatccgcaggcgttaaccgcgctggccggtcagttcgatctgatcatcaacaccgtggcggtggaccttgactggcagccgtacttccaggcgctggcctacggcggcaacttccacaccgtcggcgcggtaatgaagccattcccggtaccggcctttacccttatcggcggcgaccgcagcatctccggctcggcgaccggtaatccgtccgaactgcgtaagctgatgaaattcgccgggcgtagcaaagtggcgccaaccaccgaactgttcccgatgtcgcaaattaacgaagcgctgaaacacgtgcgcgaaggcaaagcccgctatcgcgcggtactaaaagccgacttctga

SEQ ID NO: 90081 - DNA, 1470 bp, Enterobacter aerogenes
atgaatactcttcgtcaggactctctcgcaggcattgtcgtcttccttgtcgccctgccgctgtgcctcggcatcgcccaggccagcggcttaccgccctttgtcggtctgctaaccggcatcatcggcggcctggtcgtcaccgccctcagcccttcccgcttcgccgtcagcggccccgccgccggactggtcaccatcgtcgtcgccgccattgaatccctgggttccttctccgtcttcctgatggcgctggtgttggccggcgtgctgcagctgctgtttggcattctgcgggccgggcgctttatctcgctggttcccgccagcgtcatcaaaggtatgctggcggcgatcggcatcctgctgattatgcagcagattcccgtcgcgcttggcagcgcagaagagaccgggctcgccgatatagcgcagggcaacgccaccttctccctcagtgctatcgccgtcgccctgggcggcctgctggtgctatggctgtggggttcgccgcttatccgccgggtgaagagcctgcgctggatccccggcccgctgatcgctgtcctgctcggttgtgccaccaccgtattaatgacccaggccgcgccgcagcagcttgcctccctgccgcgcattaccctgccggagttcggtagcctcggcgatctgctgggcgagctggagtctcctgcgtggagcgcgtggcgtaatccgtcggtgtgggtggtggcgctaaccctcgcgctggtcgccagcctcgaaaccttgctcagccaggaggcgctgaaaaaactacgtccgcaaaatccgccgccttcgccgaaccgcgaaatggtcgcccagggcgtcggcaacctgctctccggcgtactcggggcgatgccgatcaccgcggtcatcgttcgcagctcggtcaacgtcagcaacggcgcgcagagcaaactgtcgatctttatccacggcgtgctgctactgatctgcggactgtggtttagcggcctgctgacgttaatcccactcgccagcctcgccgccgtgctgctgtacaccggctataagctggcgacgccgcggctgttcattgaacagttccgccagggcgccgcacagtacgtccccttccttgccaccattggcgggattatcggcttcggcatgctggcggggatcgggattggcctcgccacccaggtggcgttcagcatctggcgtagccatcgccattcgctgcagctggcgcgctacgacgaccactacgtgctgcgcatccagcagaacctgacctttttacacaatccacatctgctggcgctgctggcgaaaattccggaaaagagcgtggtgatcgtcgagcacgataacgtcggctatcttgacccggatgtgcaggcggtgctggatgattttgccgagagcgcgccgcagcgcggtatccacctcaatcagtggccgcttgccagccgctga

SEQ ID NO: 90082 - DNA, 639 bp, Enterobacter aerogenes
gtgactaccttaaaacctttactggcgcgtaaccgcagctgggcgctgcagaagtgccagcatgacccggaatattttgaaaaactggtagccgggcagcggccacattcgctgtggattggctgctccgatagccgcgttcccgccgaagtactcaccggcagccatcccggcgaactcttcgtccaccgcaatatcgctaacatgattgaccccgccgacgacaactttatgagcgtactgcaatatgccctccactatctcgaggtcgaacgggtggtgctctgcggccactacggctgcggcggcgtacaggcggcgctgtcgttgccggagatgccgctggcccacgagtcctcggcgctggcccgccgcatcggctcgctgcgcgataccctgcagggtgatatcgctgctctgacggccgctgacactgacgccgacgcgaccgcggcgctcaatgccctggtggaggccaacgttcgcgcccagttcagccgcctgcttgactgtgaccctgtacagacgctgctcgccagcggacggccgctcagcctgcacggctgcgtctacgatctggcatccggccatctgaccactctcgtcgaacacctctcacctcaggagcatgccccatga

SEQ ID NO: 90083 - DNA, 1251 bp, Enterobacter aerogenes
atggctctcaccgatatcaaagttaggactaccaagccctccgacaaacccttcaaactcacagatgggcagggtatgcacctgctgatcaatcctaacggctcgaagtactggcgattacagtaccgtttcgacggcaaacagaaagttttagcattgggtgtttatccaatggtctctcttggtgaggcccgcaggaagcgagatgaagccaaaaagttggtatctgatggtatcgacccttctgagaagaaaaaagccgacaaaatcgagcagagcgaagctcttacttttgaatctgttgccagggactggcataaggcttgtaaaagaaaatggtcagattcccacagcgagagagttctaaaaagcatggaagatggtctctttactgcaatcggtaaaagaaaaatatccgagcttaataccagagatcttcttgcacctatcaaggctgttgaagcttccgggcgattggaagttgcttcccgcctacagcaaagaacaacagcagtaatgcgatatgcggtccagaatggactgatagattacaaccctgctcaggagatggcaggagctattgccgtagccaaaagaacccacaggccagctttgccattcgaacgattctcagaactcttagaacgaattgataacttcaaaggtaggaaactcacgaagttagccgtaaagctgacattgctcattttcattcgttccagtgaactcagatttgcaagatggtcggaaatcgatttcgagaatgctatgtggactattccctctgaacgagaaccattaccaggagtgaagcattcgcaccgtggttctaaaatgcgaactccacacctagttcctttgagttgtcaggcattggctgtgttgacggaaattaaagagatcagcggtgatcatgaactcgtgttcattggcgaccatgatttcagaaagcctatgagtgaaaatacggtaaacaaggctttgaggtctatgggctatgacacaaccgtggaggtctgtggacatggattcagggctatggcttgtagtgccttgattgaatccggtttgtggtcgaaagatgctgttgaacggcaaatgagccatcaggagcggaactcagttcgtgctgcctacatacataaagcagagcaccttgatgagagaaagcttatgttgcagtggtgggccgattaccttgacatccttagaatacgacaagtttcaccatttgattttaaaaagacttaa

SEQ ID NO: 90084 - DNA, 810 bp, Enterobacter aerogenes
atgaaagtagtaagcccttatgaagaattaaaaagctggtttagtctcgaaaactatgagcagttaaaatcacttacaatcaaagaactgcatactgagcttgcctttagagaagcgattttcgacagtgtaaattttggatgggaagatgataatcaaaatttaaggtctatccttgaaggtaatcctattttaagcagacaagataataatcatggtcattttggcaagggtcaaagacatgttgcgcaggttagctttggtgatataaaaaaattagagaacaagttaatgatgtttagcatggatttttttgaagaaaatggcgatttcaaaaaagaattgaaaaagaaaccaataacaaaaactatgagagacttttttttgaaccaaaatagcagcaagatgtatgtttcatttgatttaggaatgtccagcgatgaagaaattataacagccttacaaacgatgctacccattctcaggaaagaatatgaaattgagccagtcaaaacagaaaaaattggactggcaaagataagaaaacttgtcgattacaatattatcccaatgatggatctattgatttgggcaaaatttaaaaaagtaaaaatctcaaatatggtcttgtctcgtgtcttgtatcccgactttacaagtgagatcagaggagaagatcacattaaagatacagacaggcctgttgcagagaagtcattgaatggagaaacaacccgtagtctcgaatactttatcagcaaaaacagccatctcctcaacataccgatttctgaactcggctctttctag

SEQ ID NO: 90085 - DNA, 207 bp, Enterobacter aerogenes
atgaatacaaccaatcaaagcttaattcgtttaccagaagtcttgaaacgaactggtttcggcaaggcctggatctatcgtctgattagtgaaggtcggtttccggcaccagtgaagatcggagttcgtgccgttgcttttgtcgagagtgaagttgacgagtggattcaatcagttatcgaaacaagcagaattaaagttgcttaa

SEQ ID NO: 90086 - DNA, 300 bp, Enterobacter aerogenes
atgaatatcgaagaatttgtgagtgaagataaccatatgtgcaatttatgcggagatctgttttacaagatctttgacccagaagtgatttatgacttacccaataacgagtttaataaagaaatcatttactggctcagtcagtaccttgtaggaaatttgagagaacctttagactcgatctctgagcttaatgcttccaaacagatatatgtttacgagacctggttctcgctaattaaatgccctgatgaaatgaaactcttggcgaagcggataattttatatctattggattaa

SEQ ID NO: 90087 - DNA, 1203 bp, Enterobacter aerogenes
atgcgtagtatttgtgtggattcttttatgttcgaaaatggtgagagatattgtcatattgtaaataaaaatactggtgaaccattgtattatcctaacttgtatataacaacacaggtcaggaatcggtcagagtctatatcaacaatgaaggttattgccggtagcatttcattgttatatcgattctttatgaggaaagagatcaatattgatgaaagaattcagaaaaagatatttctggctcctcatgaaattgaagatttgattgaattcacttcattcaatttccgagatggcgaggatgataattttaggagttcaaatgtcaaaaaagcaactaagtactttcggattacaaccatagctaactatctggaatggctgtgcaaaatacatctttctcatacaggacagaaggatactctcaaatatattttagatttcatgaacaacataaaacgaaagaaaccgagaaacaatgataaatataatatggatatagaaaaaagcttagataaagaacaattggattctttgtttagcactcttgcaccgggtagtaaattaaatcctttttcagaaaaagtgcaaaaaagaaacaatctaatattcctgctattatactgctttggcctgagagcaggtgaacttttgaatctgcgaattggtgatatagattttgcagaatcgacaattgcaataagaagaagagcaaatgataaaacagatccgcgagtgtatcagccattagttaaaacttgtgagaggaaattaattgctgatacaaagctcatgtttgaaatttcagattatattatgaatgatcgaagaaagataaaaaattctaacaaacatgatttcctgtttattacttataaggaaggaaaaactcaagggcaacctatttcattttcttcatatcacaaagtggtgagtgttgttcgtcaatcctcctcacttctagggggattgacaggtcacaaactcagacatacatggaattatgagttttcgaaagcaatagacaagaatcaggacatatccgatgaaaaagagcaacaaatccgttcttatctcatgggatggcgaccgggttcagaaacttcaatgatttataatcgcaggcatatttttgagctatcgaaaaaaactgcacttcaacaacaagagcaactattcaaaggagaatttgatgaataa

SEQ ID NO: 90088 - DNA, 1305 bp, Enterobacter aerogenes
atgaataatttaattaaatataactctgataaaatgtctttgcatgagcataaaatcgtcagttcgattgaaagcaatggaatcaatcttacaaacttaatatatgctatgaacgaaaatttggtttgtggatttgtatatacagtacaatattatttcaatagcaacagctatttgtatgtgaaaaatattgttagaaatatggagagtcttatccgtaaagtatctcctactcatattgatgataaggttctaattgaatatcaaaataagaaattatcaaaagccccagcatcacttcgcgttttacgaccatttttgattaaatggtttgagttaggatatccaggaatagatgaaagtgcggtagaactgttaaagcatttggacctaaagataaaaaaatctggtcagtctgtgcttcaagatgatccaacagggggaccactaactaaagaagaacatacttctttgattaaggctatgaatcatgcatatagaaaaggtgaactgtcactgccacattacgcaatatcactattgatcagccttacaggtagaagacctcagcagttagttatgttgaaatataaagaccttcttcaaaagaacttagataatggcaaagtagaatatgtaatttcagtgccacgagttaaacaacggggtaaagaactacgatatcgagaacttgcaataatatcagaggttgcatcaattgttcaattgcaagctaatcaatcagtgaaactcgttgagcaagctcttggaaaaactcttgatgattattctaaacgagaagttcctattttcttaaatgaggaaaaactctcagatttatccataacaggttcaattcttctggaatataataaattatatgcgaagcctataattgctaatgtagcattgaaaggtattgttaataatgggaatataatatccaaccgtaccggttcgatactaaatattacgcctcgtaggcttcgttatacaatagcaactatgctggctaaggatgggcataatgttaatactatagctgagttattggatcattcctctacttcaagtgcgggtatttatattaaaaatcatgctgacagtgttgaaaggattgattccgctgtttcagaacaattgtcatttgtcgctgatatttttatgaacggaatcaaatcgaaaaagagttgtcatttcaaatttttttcttcaagtagatgccagagtcagaattcaggattcccttgcaatcaatgtatattttttattccgattgatcgcagtgaggtgaatcaactatga

SEQ ID NO: 90089 - DNA, 1875 bp, Enterobacter aerogenes
atgaataatattattttgttcaaatcaaaaaaacatattcttgtagaagaaaattataatgagttcataaaattttgtcgctatcaactgcccggactaacccaaactcaggattgggagcagtatgcatggaaaggatatgtcacatttagaaaaatagggattggaaataaaatctttgattccattgatgcaatgcacgaagattatatcaattttgcgaaagcatatatcagatatcaacacacattgaaaccattaaaaaattatggggttattatgatggccttgcgatgtctcgaacaggcccttttgcaggttcagaacactggtctcatttataatgttacagccgttgttttcgatgaggcaatgcagatcgggagtaaatattttgaaggtaacgttttggctaaatgtggaatacagcttgaaaaaatatcaaagtttctgtgtgaacataatcttgtgaagtcaggatatatctcatggaaaaaccatgtaaaacagaaagtcaaaaacaattatcttcctgagattgaggattatcaccgaagcgataagttaccagatgaagaagcattgctcgctattgctgatattttttctcaaaatgatgagttactgagtccaagggataagttcaccagttcagtatttgcacttctactttgttgtccgagcagaatttctgaaattttagccttacctgctgattgtgagattacacaaatagatggcaagggtatcgaaagatatggattgagattttattcggtaaaagggtatggccctaatatcaaatggattccacgggttatgataccagttgcaaagaaagcgattagaagattactttccttatcacaaaatgcaagagcacttgctcactggtgcgaaaagtacccggataaattttaccgacatgagctttgcccaacagttgatgaaaaagctaaattgaccgttgtacaagtttgccatgcactggggtataatttatttgatcataaatcatgtgttttaaaaattaaaagaacgagtttggatggtgggaaaagtttcttaaaccacaatgattacaactattcattgagtaatttgtgggaaattattagttctaattttagcagagactttccatggtatgataaagaaaaatccataaaatttagcaatgctttatgcttgctcaatactgatcaattttctttatcaagaatgacttcaattttcatattttacaaacctactaaaagtttctttttcagtgacatacaaagtaaaaaaagctatgagatgaattataaaaatatattttcccgatatgggtattatgatggtgaaggtaaaccactacttattcgctcacaccagccacggcaccttttaaacacaatagcccattatggtgaaatgtctgaactggatatagctaaatggtctggtcgtatcaatgcgaatcagaacagagtttataaccatgtgtcagaagaagatatgttagataaaatcaaagctattgaattgaataggagtaattactgtcaaagggagtcaatacccacaaatgaattgacaattgattttgataaccttaatcaaggtgcaatacacttaactgaatttggttactgtgtacataactatttaatcaatccttgtgcaaaaattaatcatcttattgaatgtgataatgaaataccggacattaactcagtagatagaattagactgcaatctgtccgagagaaagtaatgcaattaaagagaataactcagatcgcttttgaaaatggtgactatggtgctgataaatggttacaacaccacgaaaaaaacttggaaagaattaataagcttttgaataattaa

SEQ ID NO: 90090 - DNA, 387 bp, Enterobacter aerogenes
atggcaaaacatttgaacaggagtgaaataaaggcaattaaaaacattatactgacttgggacggtaaaatcacatggagtgatttatgtgaatcagtttataagaatctaaacagaactatcacaaggcaatctttaagtgctcatgatgaagttgttgaagcatatagaacaaagaaaaatttgtccaatttgaaaaaatctggtctaaagaaaccagctaacttaactattgcggcacaacaaataataaaccttaaagccgaaaatgaaatgttgaaaaaacagaacaatagatacaaagagcaatttagctattggcagtacaatgcttatagacacggccttactatggaacagttgaataggccatttaataaaaaataa

SEQ ID NO: 90091 - DNA, 426 bp, Enterobacter aerogenes
atggacaagaacattatctatccagagtttactctggaagagcaacttatcattatcgtcgataaatatatctcaaaacgataccagccaggtgataaaagtttctcatatcaactttacctaatttttgtgggataccatttaaaatatttctaccctaaaaggatttattccaaatccaatcgtaatattgataacataatgactatgtttagctcggtatacaaaagtctgacaagcaatcttctacaacgattaaataacaaggaaggagttattagggaactaaactcgcttgttaattacatagataacaatcaagaaaaagcagaggaaatctatgctactgtcagagcacaatatgaaatgaaagtaattgagaaagagttaacccatgaagttcgcgtaagaaccgtcaggttatag

SEQ ID NO: 90092 - DNA, 315 bp, Enterobacter aerogenes
atgaaaatatactcaatcctcacagttattcttacctcatttcttctaaccgcatgtaacagtgaaccatcgcaagacgatatatacaatgctttcaaaagtgttgtagataaatcaaatgccaatatgaaagcttttgattcaagagtttcagaaaaggatcttttaagaatcgattatgtgaagaaagttagctgcacagaagaagcaaacaatgtttataactgcattgtcgatgcctctattagtaatatgaaacagacaaagcctgttaagcttgtgaaagcagatggtatctggaaagaagttcagtag

SEQ ID NO: 90093 - DNA, 387 bp, Enterobacter aerogenes
atgaaccgatttataacgtcctctttttttattattgtcttcctgctttctggctgttcaacatcagggaaccagaaccttaaaaacgaaacaccacaaagcctccagtcaaagatcattaaaaacaaaacaactaagacggaattactcactaagttaggtgagcctgatacaagaaccacacttgatgacggaaatgagcaatggaaatatttcatgtctaacaatcagttcaatgcaacgactttcattcctgttgtggggctgtttactggcggttctcagactcagtctaaaactcttgagatcgacttcaagggagagaccgttagtaaatggactttctcctctgataacaacaacaccaaaactggtattcttaattaa

SEQ ID NO: 90094 - DNA, 273 bp, Enterobacter aerogenes
atggaaaacgaaacaataaagtgcccgttctgctttacacaaagtcctcatggtgtgcggatttgcaaaggctgtcatgcaaaggtcgcttacggtgaaagcccgctcagtgtggcattcctgtttcaattcgtggcatttggtctcgcgtggttagcattttcgtggaccggcagcactcttgtatcagtcattacgtttttcgtaagcatcattattcttatctataaaatcaaaagaatgtatgcagacagagttgtttttatacggtga

SEQ ID NO: 90095 - DNA, 1200 bp, Enterobacter aerogenes
gtgaagggtatgcggaagatcaagaggggtaagagattcgctggtgttgttcgttatgtattgcaaccgggagcacatcataaaagcgatccagtcgtaattggcggtaacatgttaagtggatctgttcttgaactgattttcgaattcaatgacacaaaacagcttcggccagatgttcagaaaccggtttggcacaactcacttcgcttacctgatggtgaatcattatcgaatgaccaatgggtaaccatagctgacgactatatgaagaggatggggttcagtgatactcatcttcgttgctatgtgcttcatgacgacggaggccagcatatccacattatcgcaagcagaatcgacatgctcggtggtaagctttaccttggcaggaatgagaaccttatcagtactaggatcatcactgaactcgaaatcgatcatgctcttacagtgaccaaggcagcatcatccctctcaaatacaaaaccaaagcggaagagaatctctcgcaacgaacagatgttatcagaacgaactggccttccctcccccaaagaagctctccaacagataattgataaaagtttggcagatacacctgatcttttaacttttatcaagaggctggaagaagcagaagtcggctggacggcgaatgttgcttctaccgggaaaatgaacggcttctcattttcttaccgcgatattgctttcaaagcttcgcaattgggtaaaagctattcttgggcaaatctcagtaatcggcttaactacgaccccgaccacttagaagctatgcgaaccggcataccaccaaaagacccccttgctcctgctcctgctcctgctcctgctcctgctcctgctcctgctcctgctcctgctcctgctcctgctcctgctcctgcaacagttttgaaaaacactgagagaaaggaaagtatcagtgaaaaaattgctgaactcgaactacgactcaaagaagacagaagaaacgaaatcgtagaaaagattcttcaaaaaaactcagtacaacagcaaaagcatctcaggcttatcggctggattccatttctcagaaggctcgcagagcttctcagaagctatgggaagagcattcttcacaaaacccatatgaccttctcaaatatctccgcaatgaaacctttaaacaaggcgagaaaaatccgtttatag

SEQ ID NO: 90096 - DNA, 438 bp, Enterobacter aerogenes
atgagacaagataaaaataataaaagcagtaatggaaaatttcactttgataaaaaagataaggatattgagactaaaagcattacaagtttgagaactcactgtattagtgtaaggttgaatgaaaaagaattagatatactcaactctcagcgtaaaatatacagtaaaggtgaatggctccgtatggtattacttcaaaaatcacctcctgttataccaactatcaataccgaagcctggaaagctttaactgacatatcacaaaagctaaatcgagttgcgatccatatcgatggtaagagcaaagatagccagcttactcatacagagcttttcgcactgaagcgactactcgtagagcttcgcaataaccttctaagaactgatgttgggagtatatatcgtgaagggtatgcggaagatcaagaggggtaa

SEQ ID NO: 90097 - DNA, 909 bp, Enterobacter aerogenes; identical to SEQ ID NO: 85078

SEQ ID NO: 90098 - DNA, 609 bp, Enterobacter aerogenes
atgagtaataaaattaacatattatgtattgtgaaagcacacttcaatacattgaaagatatttcaaagaaaggaatatcaaagttagatattactacgtttattattatgccaatatcactgtctctcttttcggcttataaaaacttcaatcttaataaagaccttgattcccttttagtgaattttggagctatttttacggctttattgctttctgttattgtattgatttatgatcaagagaatagaactatagaaaaggttagaaataatgccgatagtgttggtgaggtttctcaaaataaattacttttattgaaggaactatatcataacatttcttatgcgattctatgctcactcgccttggtagttttaacttttatacattcaactcttcctccagtgactccagaaataatagataacagccgggtttttatagattacaaaattagaggttttagtataaactttagttttacatttacatgggcaacaacaataatatctccattgataatatttgtaactgcaaatatcgtccttacaatagtaatgatagtaaaacggctctatctcattttgataaataatacaaactga

SEQ ID NO: 90099 - DNA, 1452 bp, Enterobacter aerogenes
atgttaggacttatagtagaagattttgatggtattaaagaaagctttttaattaccgacaaacactatatttataagagcctatggaaattagtaattgattctctttatgatttttatttacctgaatacaactatgaatttacttggcatatagaaacaactccctattctttctttctttggttaagttcaggtcaggaaaaaaatgaaagagatgttgagctattacaagaaaaatataacattaataattccattctagaatcagatcttgacaaggttattgagaaacttgcaccagaatcaaatcaaatcatagttaaagcaatacaaatgattcctgtaagtttaagaccccaaaaaaataaagaaatactgggcctcatatttaacataataaatataccaccattggaagaattatttattttctttgaccgatatcaaaagaaaatagagatggaactgatggaattgaacggtattttaaacccgaagtttagtgaaactctgaacctaataaatatcccaccaatacttaataatggattttattacatagaccatcatttattacaaggtataggatggaataaaacattcgaaaatgaatacttcaaaactcatagagatgaaatttctaaaatagaaatagattctgaaaagtacgaaggggaattaaatgacacattcatttgtccgtgttgcggggagttaagcgatgttaaaataccaaaggatgctgtcagaataaaacttctttgcgagaacaaagaacttcataaaattgttggtcttttctatttcgagcagtatgttagctcgtttatggaaaatgtaatagaagaaataaacaatttcgaaaaaacaataaatagtgcaaatagaccagattgtctaattcttgtagaaggtgagagcgaggaaatatttatacctataatagcattaagagctgacataaaccttaaagcaaaaaaaataaaagtatataattgtaaatcgaaacaaaaagtacttagtgactttttatcatttaaggaaaaatatccagatcttaaaatggtttgcttacttgactctgatgcagttaaagaaaaagaagaaatccagaggattataactgacaaactagacaaatatagattaattgatattgcgcatggtgcattcgaggatttatttgatctagagacatcgctgacggtcttaaatgcattacaccctaacggtgaagatattatcaaagatgatatagagcagtctaaggattttgcaagaagcataagcaaagtattattttcaaagaaaaaagagaaatttgataaggttaagtttgctaaaatgatggcatttaaattacctattgataaaatccctcacgaaattaaggatgtttttgataaagccctactgctttgcagcaaaagcaaatatataaaaaaataa

SEQ ID NO: 90100 - DNA, 948 bp, Enterobacter aerogenes
ttgaaagcgattctttggttatgttcattactcgttatttcaggctacagcggcttgatacacgcagattgcaagattaagcctagctcgcctaattttggctcagtgagatcgtttgatgtggcggcaactccgcaaggggtaagcgccggtgcaggctttagctgtaccaacatactatcgcttttttcaaccagcaccattaccgcaacgctcaaagattcggcaaataaaagtggcaaaatccctcgactttataacagcgctaacaacgcctggatcccctatcgagtttgtaaagatgccggctgtaacccgtcgtatcaaattgatggtgcaatcccctggaccattaacgcgttggttgatctattaggcttatttaataccagtgacggaaccattccgctttatttccagacaatagcaggaagtaatatccctgcgggaacctataacgacaccttgaccattgaatggaaatatcactattgcctgataggcgcgctggggatctgcgtaccggacgatggcacgttaacttcacaagttcttataaccatgaacgtgactaactattgctatattgatgacgcgcccgatgtcgccttctccacagcggctctggtagccgcttttagcgaggtcagcgggcagttaactatccgctgcacgcagaatgcggcatacagcattaacctttccagcatcaacgcccttaacggcagttggcggcaaatgagccaaacgattaattcgacaaattattacctgcaatatcagctttataaaaccgacggtagcgcctggacgccaacagcagatgtcagcctggtgggaaatggcaacgcacagcaaacaaacttcaaagctcgggtgaacgcctcacagagcaatcaacctgctggcgtgtacagtgatacggtattggttaccgtgagctattga

SEQ ID NO: 90101 - DNA, 2325 bp, Enterobacter aerogenes
atgaggcttctcatcggaaccggtggtctgctggctattgcttcggcaacggcctgggcggctacctatgattcgttacccgcacctgcggccacgccaggcacacagcaggagtacgtgctgtatctcggtatttccgtcaacggcaacacgcctgtgggtaccgtgccggtgaaagtgattaatgatcgttattggatctccgctgcggtactcaagcagatgtggatccctgttcccgacggcaaaacgctggttgacgtaggagagatagcggaggtcaaggtcgtttacgaccagcccgggcaaatgctgaaattaaccgttccggataattggctgccggagcagcatattggtaatagtcgcgagcaggagtatctgcaggcgatcagtacccctgggctgttgtttaactacgattcctatagcctggcttctactggcggcgagcgaaccaccagcacctcgacggaatttcgccttttcggcccagccggggtgttttcaaacaatgcggtgatcagacagaactggtcatctcgtcacgacgatagccaacaaggctatattcgctacgattcgctgtggaaatatagcgacccggaaagtctgctcagctatcaggcgggggatgtggtaagtaatgctttaacctggagtagttcagtacgtgttggcggtattcgtctcagccgtaactttgcggtacgcccggatcttatcacctaccctttgctcaatctttccggtagcgcggcggtcccctccagtgtcgatctctttatcaacggctacaaagccagctcaacgcaaattaacggcggcccttatactctcaccaacgtaccctacatcagcggcgccggcgaagcgactatcgtcacaaccgatgcgcttggccgccaggtctccactagcgtgcctttttatgtctccaacactctgctacgccagggactcagcgatttcgattttaccctcggcgcgttgcgtaataattacggcactaaaaacgccgactacggtgccggcgccgtcagcgcgatctatcgctatggcttgaccaattggctgacggtgtcaacgcatactgaagaccggcaaggattaaccaacggcggtatcggcagcgacatcactattggcacgattggcaccttgagcctgtctgccagtgcgagccagggtgataagcagggcaaccagtattccgcgggctattcgtactacggcaatatctgggggattaactatcagcatattcaacgcagcgagaatttcgccaatctctccagctatcgctcaacgacaaccctcagccgtcagtcagaccaggcgacattaagtctcagcccatggggaaaagtgcttggcgcatttagcctcggatatttcgatatccaggcccaggacaacagccgcacccggctgatgaacttttcctggagccgcagcctgtggcggaacagcagctttaacctgagcatcaaccgcgatttgcaggcagacacctactccagcatgatgcagataaccattcccttcgacagtttcggttcactgcagttaagcagccagcgcgccaactccggcgagtgggggcaaaacgtcgcctacaatcgttccgcccctgcggaaggcggtttcggctggaatttagcccactccatcagtggagatcgctacagccaggcggatctgacctgggtgaatgatgtttcaaccttgagcggcggttattacggttcgcagcatgataatcagggctggtttgaagcagcaggctcggtggtaatgatggatagcagcctgttcttcgcgcgacgaatcagcgattcatttatcgtcgtctcgaccgccggctatccggacgtcgcggtcaattatgaaaatcgaaaagtcggcactaccgacgatagcgggcacctgctgatcccgtgggccgccgcctggtatccgggcaaagtgaccctcgacactctgccgctgccaaccgacgttgaggctaaagtcgtcgagaaacgcattgcggtgcgggaagccagcggcgcgctggttgatttcccggttacacgcgtgcgttcagcctccattaccctggttgataaaacgggacatcctttgccgctgggaacggccgttgaggaacttaccagcaagcagtctggcgtggtcggttatgacggtctggtgtggtttacccatctaagccagcaaaaccaattagttattcacacggctaacggcgaatgccgggctttattcacgctgccggaatctacgccggtgccacaacgtatcggcccactaagctgtggctaa

SEQ ID NO: 90102 - DNA, 750 bp, Enterobacter aerogenes
atgattcatcgttgtattgttgttttgctgggttcatcaataagtcttaacgcctgggccgccagctcggtgctggtgtggcctatttttcaaaccatcagcgccagcgataaaggctctgaactgtggctggaaaatcgcggcgcgacggcggtaaatttacaactacgcattttcggttgggatcaaaaagaatctaaagatctttatgccgatcaaaacgatgtggtctccagccccccgttcgccaatgttcagccaggacaacgtcaacttattcgcctgatgcgtgtgtctccggtcgccagcggccaggaaaaatcatatcgaatcgtgattgatgaaattcccgcggcgcagccgacaaaacagactgacaagagttccgccggcctgaatatgcgcatgcgctatgtactgcctttgtttatctacgggcaaggcgcgcaaccgctgaagctggaaagcagcgtcgaaccaatacgaaccgcgctaagctggtcgcttagcggtcagaatctgtgtattaacaatgccgggaatcaacacgccaggttgagtaatgtctactggtcaacatcagcaggaaagccgcaggtcgaacaaactcagggtttactggggtatgtgctggctaaacgtcgcgtctgtttcccgacatcaggccgcgcggcgaacgcatccgggatgcgcctgtttgcgaaattgactgataatagtcaggcggtggaaattccggcagcgcgttaa

SEQ ID NO: 90103 - DNA, 519 bp, Enterobacter aerogenes
atgttgcgcgcaatttggctactcatattctttttttcgaccacagccgtttgggctgacagtgcgcagaaaaccttcaaagtgaccgcgcagatcacgaccggctgcctgcttggcaacggaacagggacccctggcgctgattttggcaccttaaattttggctccatgtcatcgctttatagcaatgttgatgtcgccagctccgctggcgcgggctctatcgttgtcgcgtgtacgccggggatggcgatctcgctggcgcttgactatggcgtcaacggcggctctgcggctcaacgctatatgtccaacgccaccggcagtacgctggcttaccagctttttcaggatgctaaccgctctaccgtttgggggactggcgctcaagcctacagcgtcgcctcattccccaacacgacacaaacttatacggtttatggccgcctttttgccacgaatggcttcccggcgcaaggttcatacactgataccgttacggtcacgctgacctattaa

SEQ ID NO: 90104 - DNA, 573 bp, Enterobacter aerogenes
atgaacgtccacactttttcgcgcactttgcctggtatctttatcacaacagcgcttctcgttcaggcgccatgggtcgctgcagcagggctaaccacaggtacattgacgggtcaggtcggggtgcagttgactatcggctcgggctgtaccgtcaccaatggttccagcgcaagcggggtaaacagctggggtaccattgatttcggcacctatagcgatttggttaacgccatagatagcaatctgattggcagcggcggcgccagcgcggtctcaatcatctgtagcaataaccttcccgcaacgctgacattgaataacggtcagcatgtagggacaaccggactgcgccaaatgcaaagcgccgacggcgatcaaattgcctaccggctttactcaaatagcacccgtcaggctgaatttaccagtgccggtatcggtatcacggggacgggtagcgctcaggaaatcccgatttatgcccgggtgttgccggcagatcaaggcggcgtaaccgcccctgctgagggtttctaccaggacgtggtcactgcaacattaacctggtaa

SEQ ID NO: 90105 - DNA, 951 bp, Enterobacter aerogenes
gtgacggacaatagcctgcattcatcatgcacacttcagcaacgctcaaatttgattgccgatctggtaatggggcgtatcacgcccgcgcctatctggcaaaagcgcaactatcggcttaaatttttgctgcgtacggcactgttctatcagccgacccgcgagatgctggacaccctttctgcgcgtggtgatttccgccaactgctggcggcgcaggctacgctgccaggtaaagtacatcgccagtatttagtgcgcgaccttaacgcccgtcagcgttcccaggctatcattagccactatcagtacgtcgactcgctgggcgagaaccgattggcaacggccatgatatcgccgtcagaacgaccgttactgaccctgtccgcgaaagatgaagcggccttcacgctctttgcctcgtcagccggcaaagccgaacgagaaggtgaaacgactctttggcttcgcgatagccagcagcaactgttagccagcgctacgtttagcgtgattcaccatcaaggagagtggcaactggtcatcggcggcctgcagggaccgcgccgcaatgtctctcatgacgcaattaaacacgcgacccgcgcctgctacggcctgttccccaaacgtctgctgctggaattcatctggctgttggccggccaaagcaatattcaggctatttacgccgtcagcgataatggccacgtattccgcgctctgcgctatcgtttgagcaaaggtcggcacttccatgccagctacgatgagttctggcaatcaattgaaggtgtgcgtaacgatagttaccgctggcgcttgccgctgaagctggaaaggaaatcgctggaaagtatcgccagcaaaaaacgcgccgaatatcgccgccgtttccagttaatggatgatatggccgtacaggtggctaatctgctacgcgtaaaataa

SEQ ID NO: 90106 - DNA, 657 bp, Enterobacter aerogenes
atgtatcagcgagaagatggttgcgcctggcgtaatatttggctggtgggcgatctacatggttgttttgctttattaatgtctcagttgcgcaagctgaaatttgaccctgggaaggatcttctgatttccgttggcgatctgattgaccgtgggccgcaaagcgtggaatgtctgggtttgcttcgttgccagtggttcagagcagtgcgcggtaatcatgagcagatggcgcttgatgcgcgggcgagcggggagatggcgctgtggacgatgaacggtggcgactggtatcaaacggcctcacaagaacagaaacggttggctgatttgttgtttatccgctgtctggaattgccgctaatcattgaactgcgctgccaggatgataccacccacgtgattgcccatgccgactatccagccagcgtctaccgttggcagttgcccgtggcggagcaacaggtactctggagccgccagcgtttgaccgatcatctggcggggcggcacggtgagatcgccggggccgatcacttttggtttggccatacgccgcttaaacatcgttacgatagcgataaccaacactacattgataccggcgcggtatttggcggcgagttaacgctggtgcaactgcagtcggctgtttaa

SEQ ID NO: 90107 - DNA, 192 bp, Enterobacter aerogenes
atgttcgccttagtattattcatttgctatctggacggcgggtgcgaagacatcgtggttgatgtttacaatagcgagcgacaatgcctcgtcgcgatggacgatcagcgaattcgccagggcggctgtttcccggtagaagattttatcgacggcttctggcgtccagcgacggaatatagcgacttttaa

SEQ ID NO: 90108 - DNA, 243 bp, Enterobacter aerogenes
atgatgagtaaaactaacgtacgaatcggcgcgtttgaaatcgacgacgccgagctgcacggcgaatcacagggtgagcgaacgttaagcattccttgtaaatccgatcctgacttatgcatgcaactggacgcctgggatgccgagaccagcgttcccgccattctcaatggcgaacattctgtactctaccgtaaacattacgatcgccaatccgatgcctgggtcatgcgccttgcctga

SEQ ID NO: 90109 - DNA, 1389 bp, Enterobacter aerogenes
atgcgtgcggctatgccaacgcatctctctttcgatgactttatcgccgcctgccagcgtccgctgcgccgcagcattcgcgtcaatacgttgaagataacggtcgcggattttctgcaactggtcgccccttacggctggcagttaacgccggttccgtggtgtgccgagggtttctggatcgagcgtgatgatgacgatgtactaccgctgggcagcaccgccgagcatctgagcggactattttatattcaggaagcgagctcgatgctgccggtggcggcgctgttcgccgatggtgaaatgcccgagcgagtgatggacgtcgccgctgcgccgggttccaagaccacacagatagccgcccggatgggcaaccacggagcgatcctggccaacgaattttctgccagccgggtgaaagtgctgcacgccaatatcagccgctgcggcattaataacgttgccctcacccacttcgacgggcgcgtcttcggcgccgcgctgcccgaatgctttgatgccattttgctcgacgccccctgctcgggcgaaggagtagtgcgtaaagatcccgacgcgctgaaaaactggtcgccggaaagtaatcaggagattgccgccacccaacgtgagctcattgacagcgcctttcatgctctgcgtcctggcggcaccctcgtctactccacctgtacgctgaaccgtgaagaaaacgaggaagtggttaactggctgctgcaaacctacccgcaggcggttgaagtcctgacgctggattcactcttcccgcaggctcgcgaagcgctcaccgacgaaggtttcctgcacgtattcccgcagatttttgattgtgaaggttttttcgttgcccgcctgcgtaaaaccgcctctatcgatccgctgcctgcgcctggctataaagtaggcaagttccccttcgcaccgatgaagggccgggaaggcgccgctgtcgccgccgccgctaatgctgttggcctgcaatggccagagcatcttcgtttatggcaacgcgataaagaaatctggctgttcccgcaagaactggaagcgttaatcggcagggttcgtttttctcgcattgggattcgtctcgctgaaacacataacaaaggctaccgctggcaacatgaagcggtgatctcactggccacgccagaggctccttttgagctcaccttaacggaagcggaggagtggtaccgtggacgcgatgtctatcccgaagcgccgccgcagcaggacgatgtcatcgtcactttccagggaatgccattagggctcgctaaacgcatagggtcacgtctgaaaaatagttatccccgcgaactggtgcgcgacggcaaactcttcgccggaaagtcgtga

SEQ ID NO: 90110 - DNA, 2634 bp, Enterobacter aerogenes
atgagtcaggaaacgcccgcttcgccgactgaagccaaaataaaaaccaaacgccgtatctcgccattctggctgttgccggtcatcgcgctgatgattgccggatggctcatctggaccagctttgaaggtcggggaacgacgattaccatcgatttccagtccgcaaacgggattgttccgggacgtacccctatccgctatcaaggggtagaggttggtacggtacaggatatctctttgagtaaggacctcagcaagattgaagtttccgccagcgtgaagagcgatatgaaagacgcgctgcgcaaagatacccagttctggctggtgacgccaaaagcctctctggccggcgtttccgggctggatgcgctggtcggcggtaactatatcggtatgatgccgggcaaaggcgaaccggaagatcatttcgtcgccctggatactcagccgaaataccgcatcaacaacggcgaactgatgattcatctgcaggcgccggatcttggttcgctgaacagcggatcgctggtctatttccgtaaaatcccggttggccgggtgtatgactacacgctcaacgccaacaatcagggggtgacgattgatgtattaatcgaacgtcgcttcactaatctggttaaaaaaggcagtcgattctggaacgtctccgggattaaagccgacgtcagcctgagcggcgccaaagtccagttggaaaacctctccgcgttagttaacggcgccatcgcctttgactcgcctgacgactccaaagcggcggtgcaaaacgacgagtacaatctgtacgaagatctggcgcacagccagcgcggggtgctggtgacgttggagctacccgacggcgatgggttgaaagcaggttctacgccgctgatgtaccaggggctggaagtgggacagttaaccaaactcaatctcaatcccggcggtaaagttaccggtgagatgaccgtcgacccgagtgtggtcaccctgcttcgggataagacgctgattcaaatgaagaagccgaaaatctcactggataacccaagcgttagcgccctactcaccggcaatacttttgaactggtccctggtgacggcgagccgcgcaatcactttatggtgatgccagccgataaagcgctactggaagagccgaacgtcgccaccgttactttatcggcgccggaaagctatggcgtttccgccggccagccgctgatgctgcacggcgttaaagtcggccaggtactggaacgcaagctaaccgcagagggtgtcactttccaggtcgccattgcgccggagtatcgcaatctggtacgcggcgatagcaaatttgtcgtcaacagccgccttgatgtgaaagttgggctggatggcgtgcaggtgcttggcgccagcgccagcgaatgggtcgatggcgggatccgcatcatccccggcgaaaaaggggaaatgcagagtcgctatccgctgtatgccaacctggaaaaagcgcaggaaaatagcctcagtgaaatcccgaccaccacgctgagcctttccgcggaaacgctgcccgatgtgcaggcaggctccgtggtgttgtatcgcaaattcgccgtcggcgagatcatctcggtgaaacctcgtagcaatgctttcgatatcgatctgcatatcaaaccggaatatcgccacctgctgaccaataacagcgtcttctgggccgaaggcggcgcgaaggtaaaactcgacggtaatgggctaaccgtgcaggcgtcgccactggcgcgcgcgctgaaaggcgcgatcagctttgataacctcaacggcagcagcgccaacgcgcgcttgaacaataagcgtgtcctgtacgcctccgaaaccgccgcccgcgcggtgggtggccagatcacgctgcacgctttcgatgccggtaaaatggcggcgggcatgccgattcgctacctcggtatcgacatcggccagatccagtcgctggagttgattacggcaaaaaatgaagttcaggcgaaagcggtgctttatccggaatatgtcggcacctttgcccgtgccggtacccgcttctcggtgattacgccgcagatctctgccgccggcgttgaacatctggacacgatcttccagtcatatatcaacgttgaacctggacgtggttcgccgcgccgcgacttcgagattcaggacaccaccatcaccgattcgcgctacatcgacggcctgagtattatcgtcgaagtgccggaagccggttcgcttgatattggtacgccggtgctgttccgcggcctggaagtgggtaccgtgaccgggctgacgctgggctcgatgtccgaccgcgtaatggttaagctgcgtatcagtaagcgctaccagtacttagtgcgcaataactcggtgttctggctggcttccggctatagcctcgacttcggcctgattggcggagtggtgaagacgggtacctttaaccagtttatccgcggcggtatcgcctttgccaccccgccgggaacgccactggcgccaaaagcgcaggatggcaaacacttcctgctgctggaaagcgagccgaaagagtggcgcgattggggaacggcactgcctaattaa

SEQ ID NO: 90111 - DNA, 1284 bp, Enterobacter aerogenes
atgctgataaaaacaccctcaatcacgccgacgaagaagattaccgttcattcggtcagttcgccaacgccgcatgcgcactatcagcgctgtacgcagtgcgacatgctgttccgcataccggttgtgaaacgaaatcaatgcgcctggtgtccgcggtgcaacgcgaaggtacgcgacggccgcgattggtccctttcccggctcgccagtatggcgtttacaatgatgttgctgatgccgttcgcctggagcgagccgctactgcgtttgcatctgctcggcgtgcgtattgacgccaacgtcctgcaggggatctggcagatgaccaaccagggcgatcccattaccgctgcgatggtgctcttctgcgcggtggttgcgcccgtcctgctggtggtctccatcgcctacctttggcttggcaacgtgctggggatgaacctacgtccggtgctgctgatgctcggcaaactgaaagagtgggtgatgctggacatttatctggtcggtatcggcgtcgcctccattaaggtccaggactatgctttcctgcagcccggcatcggcctgatcgcctttatcgcgctgaccctactcagcatcctgacgctcatccacatgaacgttgaggagttgtgggagcgtttttatcccgaacgaccggccatgcgctacgacaccaatcttcaggtttgcaccggctgtcactatactggttatcgggactcccgcggccgctgccgccggtgccatacctcgctgcatcatcgccggccgcaaagcctgcagcgcagttgggcggctttgattgcgtcgctggttttcctgctgccggccaacctgctgccgatttcgataatctacgtcaatggcgcgcgccaggaagatacgattctttcggggatcatttcactcgccaacagcaacatcgcaatcgccggcgtagtgttcatcgccagtattttggtaccattcaccaaagttatagtgttatttaccctgctggtcagcatacaattcaagtgcgaacaggggctacgtacgcgtatcctgctgctgcggctgattacctggatcggccgctggtcgatgttggatctgtttgttatctcattaaccatgtcgttgataaaccgcgatcagctcctggcctttaccatggggccggcggcggtctatttcggcggcgcggtgattttaactatccttgcagttgaatggctggacagccgcttactttgggacgctcatgagtcaggaaacgcccgcttcgccgactga

SEQ ID NO: 90112 - DNA, 498 bp, Enterobacter aerogenes
atgaacaaaacagaattctacgcggatctgaaccgcgattttcaggcgcttatggcaggcgaaaccagttttttggcaatgatctcaaataccagcgcgttactgtttgaacgcctggaagaggtcaactgggccggtttttatctcctggaaggcgatacgctggtgctggggccgttccagggtaagctggcctgtgtacgtattccggtcggccgcggcgtgtgcggttccgccgtggcgcagaaccgcgtccagcgcgtggaagatgtccatgcgtttgatggccatatcgcctgtgacgccgccagcaattcggaaatcgtctttccgttgcaggtgaataatcagattatcggcgtactggatatcgatagcacggcgtattcccgcttcaccgcagaagacgaacaggggcttgcagagctggtctcgcgcctcgaaacgctgattgcggcgaccgattatcaaaaaatctttgcccacgtcgcaggataa

SEQ ID NO: 90113 - DNA, 684 bp, Enterobacter aerogenes
atggaaaatcaacctaagttgaatagcagtaaagaagtaatcgcgtttctggccgaacgttttcctcagtgtttcagcgctgaaggcgaagcgcgccccctgaaaatcggtatttttcaggatcttgtagagcgagttggcggcgagatgaatctcagcaaaacccaactgcgcgctgccttacgtctttatacttcgagctggcgttatctgtacggcgtgaaagcgggagcgattcgcgtcgatctcgacggcaacccgtgcggtgaactggaagagcaacacgttgctcacgcccgtcagcagctcgaagaagccaaagctcgcgttcaggcgcagcgcgccagccagcaggctaaaaagcgcgaagccgctgccgcggcaggccagcaggaagaaggtgcacgccgcgagcgtaaaccgcgtcctcagccgcaggctcgccgtaaagaaggtagtgaacagcgtaagccgcgtcctgcagctgccaaagcaccgcgtgaagagcaacgtcttaccccggtgtctgacgtctctgtattgagcgtcggtcaggctctgaaggtgaaagcaggcaacaacgcaatggacgccaccgttgtggaaatcaccaaagatggcgttcgtgtacagctgacttctggtatgtcaatgattgtacgcgcagaacacctggtgttctga

SEQ ID NO: 90114 - DNA, 2049 bp, Enterobacter aerogenes
atgaacaaactttttaagctcaccgcgcttgcgggcctgctagcaatagcaggccatgccttcgccgtggacgatatcacccgagtcgatcaaattcccgtgctgaaagaagagccgcagcacgcgacggtgagcgagcgcgttacctcgcgctttacccgctcccattatcggcagtttgatctcgacaacgccttttcggcaaagattttcgaccgctatctgaatctgctggattacagccataacgtgctgttggccagcgatgtttctcagtttgcggcgcaaaaaaataaaatcggtgatgaactgcgcagcggcaaactggacgttttctacgacctgtacaacctcgcgcagaagcgtcgctttgagcgttaccagtacgccctgaaggtactggatcgtccgatgaattttaccggcaacgacaacttcaacctcgatcgcagcaaggcgccgtggccgaaggatgaagccgagcttaacgcgttgtgggacgccaaggtgaagttcgatgaactgagcctgaagctggcgggtaaagacgataaagaaattcgtgaaaccctgacccggcgttataagtttgcgattcgtcgcctggcccaaaccaacagcgaagacgtcttctcgctggcgatgaccgctttcgcccgcgaaatcgacccgcataccaactatctctccccgcgtaacaccgaacagtttaatactgaaatgagcttgtctctggaaggtattggcgcggtgctgcagatggacgacgactacacggtgatcaattcactggttgccggcggcccggcggcgaagagcaaagcgattagcgttggcgaccgtatcgtcggcgttggtcagccgggtaagagcatggttgatgttatcggctggcggctggacgatgttgtcgcgcttatcaaagggccgaagggcagtaaagttcgcctggaggttctgccggctggcaaaggggcgaaaacccgtattgttactctgacccgcgagcgtattcgtcttgaagatcgcgcggttaagatgtcggtcaaaaccgtcggtaaagaaaaagtcggcgtgctggatatcccgggtttctacgttggcctgactgatgatgtcaaagtacaactgcagaagctggaaaaacagaacgtcagcagtatcgtcatcgatttgcgcagtaacggcggtggggcgctgacggaggcggtttcgctttctggtctgtttatcccatccggcccggtagtacaggtgcgtgataacaacggtaaggtccgcgaagatagcgataccgacggtgtggtttactataaaggcccgctggtggtcttagtcgatcgcttcagcgcttccgcatcggaaatttttgctgccgcgatgcaggactatggccgtgcgctgatcgtcggcgagcagaccttcggtaaaggcaccgttcagcagtatcgttcgctgaaccgtatctacgatcagatgctgcgcccggaatggccggcattaggttccgtgcagtacaccatccagaagttctaccgcattaacggcggcagcactcagcgtaaaggggttactccggacatcatgatgccaaccggtaaagaagatcgcgataccggcgagcagtatgaagataacgcgctgccgtgggatagcatcgatccggcgacctacgtgaagtccggcgatatgaaaccgttcgaacctgaactgcttaagcgccatgaagaccgtatcgcaaaagatccggaattccagtacatcatgaaggatattgcgcgctttaacgccatgaaagataagcgcaatatcgtttctctgaactacacgcagcgtgagaaagagaatgaagaagatgatgcgattcgtctggcgcgggtaaacgatcgccttaagcgcgaaggcaagccgcttctcaaaaagatagacgatctgccgaaggattatcaggagccggatccgtatcttgatgaaaccgtgcatatcgcgattgacctggcgcaacaggaaaaagcgcagcctccggtagaaccaccggttagcaaataa

SEQ ID NO: 90115 - DNA, 885 bp, Enterobacter aerogenes
atgatgcgaatcgcgcttttcctgctgactaacctggcagtcatggtggtgtttggcctggtgcttagcctgacggggatccagtcgagcagcatgaccggcctgctgatcatggcgctgctgtttggttttggcggctcgatcgtttcgctgttgatgtcgaaatggatggcgctgaagtcggttggtggggaagttatcgaacagccgcgtaacgaaactgagcgttggttgatgaacaccgtcgcacagcaggcgcagcaggcaggcatcgccatgccgcaggtggcgatttatcacgcccctgacatcaacgccttcgccaccggcgcgcgccgcgacgcttctctggtcgccgtgagtaccggtctgctgcagaatatgagccgtgacgaagcggaagccgttatcgctcacgaaatcagccatattgctaatggcgacatggtcaccatgacgctgattcagggggtggtgaacaccttcgttatctttatttcccgcgttatcgcgcagattgcggccggtttccttggcggcaaccgtgaagatgaaggtgaaagcagcaacggtaacccgcttatctactttgcggtcgctaccgtactggaactggtattcggtattctcgccagcatcatcaccatgtggttctcgcgctatcgtgaattccatgccgatgcaggttccgccaaactggtcggtcgtgagaaaatgattgctgcattgcagcgtttgaaaaccagctatgaaccgcaggaagccagcagcatgatggcgttctgtatcaacggtaaagcgaaatcgatgagcgaattgttcatgacccacccgccgttggacaaacgtattgaagcgctgcgtagcggagaatacctgaaataa

SEQ ID NO: 90116 - DNA, 1371 bp, Enterobacter aerogenes
atggaaaaaaaacttttggatggcctgccggttccgcagcgttacggcgccattctgacgattgtattaggcctgacgatggccgtactcgacggcgctatcgccaacgtcgccctgccgactatcgccaccgacctgaatgcctcgccggcatcttcaatctggatagtcaacgcctatcaaatcgctatcgtcatcgccctgctgccactctcgtttcttggcgatatggttggctatcgacgaatctataaaattggtctggtagtgtttaccatcacctcgctgatttgcgccctctcccgaagtctcgagatgttaacgctggcgcgtgtggcccaggggctgggcggcgcggcgctgatgagcgtcaacacggcgctgattcgccttatctatcctaagaggcagctaggtcgcggaatgggcatcaactctttcgtcgttgccgtctcctccgccgcggggcctaccattgccgccgctatcctctcgcttgcttcctggcaatggctgtttttaatcaacgtaccgctggggattatttccatcttcctcgccatgcgctttttaccgcccaacagcagcgccagcaagattacccgtttcgatctgccgagcgcgatgatgaacgcccttaccttcgggttgctcatcacggcgctgggcggctttgcccagggacaatctggttacctggtattggccgaggtcattgctatgctgattatcggcttcttctttgttcgtcggcagttgcgcatgccggtcccactgctgccggttgatttactgcgcattccaatcttttcgctctctatctgcacctcgatctgctctttttgcgcgcagatgctggcgatggtttccctgccctttttcctgcaaaccgttatcggacgcagcgaagtagagaccgggttactgttaacgccgtggccgttggcgaccatggtgatggcccctctggcgggttatttgatcgagaaggttcatgccgggctgttgggggcaatgggactgctgatcatggcctgcggcctgtttggccttgcgctattaccctcttcaccttccgatctcgatattatctggcggatggcgttgtgcggcgcaggtttcggactgtttcagtcgccaaataaccataccattgtctcctctgcgccaggccatcgcagcggcggcgccagcggtatgctgggtaccgcacgcttactggggcaaagtagcggcgccgcgctggtcgccctgctgtttaacctggcaggcaatagcggcacccacaccgcgcttctgctggccggctccctggcggtcattgccgccgccatcagcgggctacgcgtaactcagccgcgcgccgcctga

SEQ ID NO: 90117 - DNA, 792 bp, Enterobacter aerogenes
atggcagctgctgatatggataaacagccagattctgtctcttcagtattaaaagtttttggcatcctgcaggctttgggcgaagagcgtgagattggtatcaccgaattgtcacagcgtgtgatgatgtctaaaagcacggtgtatcgttttttacagactatgaagtcactgggctatgtcgcacaggaaggcgagtctgagaaatattctttaacgttgaagttgttcgagcttggcgcgcgggcgttgcagaacgttgacctgatccgcagcgcggatatccagatgcgtgaaatttctcgcctgaccaaagagacgattcacctcggcgcgctggatgaagacagcatcgtttacatccacaaaattgattccatgtacaacctgcggatgtattcgcgtatcggccgacgtaatccgctgtacagcaccgccattggcaaagtgctgctggcgtggcgcgaccgggcggaagtcgagcaaatcatggacggcgtcgagtacaaacgtagcaccgagcgaaccattactgataccagcgcgctattgaaagtgctggaccaggtgcgcgagcagggctatggcgaagacaatgaggagcaggaagaaggattacgctgtattgcggtgccggtcttcgatcgcttcggcgtggtgattgccggactgagtatctccttcccgacgctgcgtttctctgaagaacgtttgcacgaatatgtggcgatgttgcacgctgcggcgcgtaagatttccgagcagatgggttataaccgttacccgttttga

SEQ ID NO: 90118 - DNA, 240 bp, Enterobacter aerogenes
atgcgattgatcattcgctctattgtcatactggcgattgtctggattggcgtattattaagcggttatggcgtgttaattggcagcaatcagaatgctggcgggctgggactgcaatgcaaatacctgacagcgcagggtatcaccaccgcacaatatgttcattctgatagcggtattatcggtattaccaactgccctattctgcgcaaaagcgtgaaggttatcgaccagggttaa

SEQ ID NO: 90119 - DNA, 291 bp, Enterobacter aerogenes
atgagtgagttattgaatcctgggattgtaagtctggcgtctctggcgctttccgttgtactgctgttggtggggctgctgttatggttctttgtgaatcgcgccagttcacgtagcaatgagcaaatcgaactgctgcagtcgctgctggatcaacaaaagcggcaaaatgcgctgctgcgccgtctctgtgaagccaatgcgccgcacaaagaagaggttgctgaaccttcagcggatgagaaggagaaaaacgacgacgatttcattcgtctcgttgccgaacgttaa

SEQ ID NO: 90120 - DNA, 210 bp, Enterobacter aerogenes
atggcaaagattaaaggtcaagttaagtggttcaacgagtctaaaggttttggcttcattactccggctgatggcagcaaagacgtgttcgtacacttctctgcaatccagggtaacggcttcaaaactctggctgaaggccagaacgttgagttcgaaattcaggacggccagaaaggtccggctgcagttaacgtaactgctatctga

SEQ ID NO: 90121 - DNA, 1746 bp, Enterobacter aerogenes
gtgcaaaagaataaaagtaagtccgccacaaattttctccctatccgttttgggttgctgtgtgtggcgattttgggatgtcttggatttctgctggcgagggtaggttggctgcaaatcgtctctccggataatctggttaaacaagaggatatgcgttcgctgcgcgaagaacccattgccgtaatgcgcggaactatcagcgatcgtgaaggacgcccgctggcggtgagcgtgccggtaagcgcaatctggatagatccacagaccatgctggagaagggcggcgtcggctatggcccgcgctggcaggcaatggcggaagcgttgcatattgatcttattgacctctctcatcgggtgcagtcacatccgcatgcccgattcctctatctcgcgcgtcaggttaatccggaacaggcggagtggatcgataaattacacctgccgggcgtttatctgcgcgatgaatcacgccgcttctatcccgccgggcacgtcgcggcgaacctgctgggttttaccaacgtggataatcaggggatcgagggggttgaaaaaagctttaacaaacagctcatgggaacgccggggcgtcggctggtgcgtaaggaccgccatggccacgtgattgagaatattaccgagcaggccgctgtgccggcgcataacctgcagctcagtattgacgagcgcctgcagacggtgacggaagatgcgttggataatgccgtacggtggaataaggcggaatccggcgcggcggtattaatcaagattgataccggcgaaatcctgtcgatggccagttacccggacttcaaccctaataaccgcgacagcgcccagctcgatgattttcgaaatcgcgctatcagcgatacctttgagccgggttcaacggtcaaaccgctggtgattatgaccgcgctgcagcaggggattgtgcagccggatagcgtggttgatacccatccctttacccttgatggtcatcgcattcgcgatgtgggttattatcctgagttgacgctcaccggtattttgcaaaaatcgagcgataccggggtttcgcacctctcactggcaatgccggtgcaacacttgatcgacacttataaggcctttggctttggcgacccgaccgggcttggcttgaccggcgaaagctccgggttaatgccgcatcgccgttattggggtgagctggatcgcgccaccttcgcctttggctatggactgatggtaaccccgctgcagctggcgcatgtctatgcgacgatcggcggctacggcattgaacgcccactgtcgataacccgtatcgatccgccggttatcggtacgcgagttatgccgcaggagatcgtgcatgaagtggaacatatgatggagagcgtggcgctgccgggtgggggcgggacgaaagcggcggtacgcgattatcgtatcgcggtgaaaaccggcacagcgaagaaaattggccccgacgggaaatacatcgataaatacgtcgcctacaccgccggcgtggcgccggccagtcagccgaagtttgcgctggtggtggtgataaacgaccccagcaacggtaaatactatggcggggcggtatccgcgccggtgttcagccagatcatgggcgatgtgttgcgtctggaaaacgtaatgcccgacggtatgccgcagggctctgagaatcttatcgtcatgcataaccgcgagggttcggttcccgcgctgtaa

SEQ ID NO: 90122 - DNA, 795 bp, Enterobacter aerogenes
atgtcttatacctgtccactatgccacgcgccgcttagccgcagcgaaaatagctatatttgcccgcagcggcaccagttcgatctggcaaaggaagggtatgtcaatttactgccggtgcagttcaaacgttcgcgcgacccgggcgatagcgctgagatgatgcaggcgcgccgcgccttcctcgatggcggatattatcagccgttgcgtgaggcgatttgcagctatctgcgggctttcgcgccgggcgagttgctggatattggctgcggagagggatactacacgcatgctttcgccgccattgccgcacgcagtttcggcctcgatgtctcaaaatcggcgatccgcgccgccgctaaacgttacccgcaggtcgaattctgcgttgcttccagccaacggttgccttttgccgatcggtctctggatgcggtagtgcgtatttatgcgccctgtaacgcggacgaattagcgcgtgtagtgaaaggcggcggttgggtgattaccgctacgccgggaccgcgccatctgatggagctgaaagggctgatctacgatgaagttcgtttgcatgaactgaaccgggaagcgatgccgggctttacgctgcgtcatgagcagcagttagcctatccgatgcagttgagcggcacgcaggcggaagcgttactgcagatgacgccgtttgcctggcgagcgaaaccggaggtacgagaattactgcgccagcaggagacctttggctgccagaccgatttcatgattcactgctggcagcgcgaggcgtaa

SEQ ID NO: 90123 - DNA, 567 bp, Enterobacter aerogenes
atgaatatttctgccactatccttcttgcctttggtatgtcgatggacgcgttcgccgcttctatcggtaaaggcgccaccctgcataaacctaaattctccgaagcgctgcgcaccggtcttattttcggcgcgatcgaaaccctgacgccgctggtcggctgggggctgggcatgttggccagccagtttgtactggaatggaaccactggatcgctttcgtgctgctggtgtttctcggcgggcgtatggtgattgaaggttttcgcggcggcgatgacgatgaatgtgaagcgccgcgtcgccacggcttctggttgctggtgactaccgcattcgctaccagtcttgacgcgatggccgttggcgtggggcttgctttcctgcaggtcaatattatcgccaccgcgctggctatcggctgcgccacctttaccatgtcaacgctgggaattatggttggccgctttatcggcccgctgctcggcaaacgggccgaaattctcggcggtatcgtgctaatcggtatcggcgcgcagattctgtggggccatttcgcgccgtag

SEQ ID NO: 90124 - DNA, 459 bp, Enterobacter aerogenes
atggcaatcacggagctggtgctcattctgtttatcgtcgccctggtggctttcgctatctacgaccaatttatcatgccgcgccgcaatggccccaccctgctgtcaatccccctgctgcgtcgtggacgcgtcgacgggatgattttcgtcggcctgacggcgattctcatttacaacaatattgccagccatggcgaaataatcaccacgtggttattatctgcgctggcattaatggggttatatctgttctggatccgtacgccgcgaattctgtttaaaaagagcggttttttctttgccaacgtgtggattgaatatccgcggattaaagcgatgaatttgtcagaagatggcgtactggtgatgcaattagagcagcggcgcctgcttattcgcgtacgaaatatcgacgatctggaaaaaatatacaaactactcgttaccagtcaataa

SEQ ID NO: 90125 - DNA, 852 bp, Enterobacter aerogenes
atggttgatatgactaaaaataccaccgagaaaaaactcactcagagtgatattcgtggcgtgttcattcgttctaacctgttccagggttcatggaacttcgaacgtatgcaggcgctgggcttctgcttctctatggttccggcaatccgtcgcctgtacccggagaacaacgatgcgcgtaagcaggctattaagcgtcaccttgagttcttcaacacccatccgtacgtcgcggcgccggtactcggcgtaacgctggcgatggaagagcagcgtgctaacggcgcggaaatcgacgatggcgcaatcaacggtatcaaagtcggtttgatggggccgctggcaggcgtcggcgacccgatcttctggggtaccgtgcgtccggtattcgccgcgctcggcgccggtatcgcgatgagcggtagcctgcttggtccgctactgttcttcatcctgttcaatgccgtgcgtctgctgacccgctactacggcgtagcatacggctatcgtaaaggcgtggacatcgttaaggatatgggcggcggcttcctgcagaaactgaccgagggggcgtcaatcctcggcctgtttgtcatgggggccctggttaacaaatggacgcacgttaatatcccgctggtggtttccacgatcaccggtcaggatggtcagactcgcgtgaccaccgtgcagaccatccttgaccagctgatgccgggactggtaccgctgctgctgaccttcgcctgtatgtggctgctgcgtaagaaagtcaacccgctgtggatcatcgttggcttcttcgtcatcggtatcgccggctacgcggtcggcctgctgggtcaataa

SEQ ID NO: 90126 - DNA, 801 bp, Enterobacter aerogenes
atggagattacccttcttcagattgtgctggtgttcatcgtcgcgtgtattgcgggtatggagtcggtacttgatgaatttcagttccaccgtcctctggtcgcctgtacgttaattggcgccgttctcggtgacatgaaaaccggtatcatcatcggcggtacgctggaaatgatcgctctgggctggatgaacatcggtgcggcagttgcgcctgatgccgcgctggcatccattatttctaccgtactggttatcgccggtcaccaaagcattggcgccggtatcgctctggctatcccgctggcggcggcaggccaggttctgaccattatcgttcgtaccatcaccgttgccttccagcacgcggcggataaagccgctgaaaacggtaacctgacggccatctcctggctgcacgtttcctcgctgttcctgcaggcaatgcgtatcgccatcccggcggttatcgtagccatctctgtcggtaccagcgaagttcagggtctactgaatgccattccggaagtcgtgactggcggtctgaatatcgcgggcggcatgatcgtcgtcgtcggttacgcgatggtcatcaacatgatgcgcgcgggctacctgatgccgttcttctatctcggtttcgtcaccgcggccttcaccaatttcaacctggttgcgctgggtgtgattggtgccgttatggccattctctacattcagctgagcccgaaatataaccgcgtagcgggtgccccggctcaggcggctggtaacaacgatctcgataacgaactggactaa

SEQ ID NO: 90127 - DNA, 966 bp, Enterobacter aerogenes
gtgacgattgctattgtaataggcacacatggttgggctgcagaacaactgctgaaaaccgcagaaatgctgttgggcgagcaggaaaacgttggctggatcgatttcgttcctggcgaaaatgccgaaacgctgatcgaaaagtacaatgcacagctggcaaaactggataccacaaaaggcgtgctgttcctcgttgatacgtggggcggtagtccatttaacgcggcaagccgcattgttgttgataaagaaaactatgaagtgatcgctggcgtcaacgtcccgatgctggttgaaaccttcatggctcgcgatgacgatccgtcgtttgatgagctggtggcgctggcggtggaaaccggtagcgaaggcgtgaaagcgctgaaagccaaaccggttgaaaaagcggcgccggttcaggctgccgcgccgaaagcggcaacgcccgctaaaccgatgggtccaaatgattacatggtgattggcctggcgcgtatcgatgaccgtcttatccacggccaggttgcgacccgctggaccaaagagactaacgtcacccgcattatcgtggtcagcgatgaagttgccgccgacacggtgcgcaaaacgctgctgacccaggtggctcctccgggcgtgaccgctcacgttgttgatgtcgcgaagatgattcgcgtctacaacaacccgaaatacgccggcgagcgtgtcatgctgctgttcactaacccaacggacgttgaacgtattgttgaaggcggcgtgaaaattaccagcgtcaacatcggcggtatggctttccgccagggtaaaacgcaggtcaataacgcgatttcggtcgatgcgacagatatcgaagcattcaagaagttgaatgcccgcggtattgaactggaagcgcgtaaagtttccaccgaccagaaactgaaaatgatggatttgatcgccaaggtgggtaattaa

SEQ ID NO: 90128 - DNA, 1560 bp, Enterobacter aerogenes
atggaattcttaatggatcccaccatctgggctggcctgctgacgctggtagtcctcgaaattgttctgggtatcgataacctggtctttatcgccatccttgccgataaactgccgccaaaacagcgtgataaagcacgtatcatcggcctgtcgctggcgctgattatgcgcctggggctgctctcggttatctcgtggatggtcacgttgaccaagcctttgataagcataggcgatttttcgttctccggacgcgatctgatcatgctggtcggcggtatcttcctgctattcaaggcgacgacagagcttcatgaacgactggaaaaccgccagcatgatgccggtcacggcaaaggctatgccagcttctgggtcgtcgtgctacaaattgtggtgctggatgccgtcttctcgcttgatgcggtgattaccgccgtcggcatggtgaaccatttgccggtgatgatggctgcggtcgtgatcgcgatgatcctgatgctgctggcctcgaagccgttaacccgcttcgtgaaccaacatccgacggttgtcgtgctgtgtctgagcttcctgctgatgatcggtctgagtctggtggcagaaggctttggcttccatattccgaagggctacctgtacgcggcgattggcttctcgattaccattgagttctttaaccaggtggcgcggcgtaactttatccgccaccagtcgacgttgccgctgcgcgcgcgtaccgctgatgcgattctgcgcttgatgggcggtcgcaaacaggcgaccgtggcgcacgatagcgatagcccggcggcagtgccggtgccggaaggggcgtttgctgaagaagaacgctatatgattaacggcgtactgaccctggcgcaacgctcattgcgcagtatcatgactccgcgaggcgaaattagctgggtggatgctgagcagagcgaagacgaaattcgtcgccagctgctttcttccccgcacagcatgttcccggtttgccgcggtgaacttgatgaaatcatcggtattgtacgcgccaaagagatgctggtggcgctggaggcgggcgagaacgttgccgcgatggcatccgcttccccggcgattgtggtgccggaaacgctggatccgatcaatctgctgggcgtgctgcgccgggcgcgcggcagttttgtcatcgtcaccaacgaatttggcgtggtgcagggtctggtgacgccgctggacgtcctggaagccatcgctggtgagttcccggacgccgacgaaacgccggaaattgtgctggatggcgagggttggctaatcaaagggtcaaccgacctccacgcgctgcagcaggcgctggggctggacgacctggtcaacgaagacgatgatatcgcgaccgttgccgggctggttatctccgcgaacggtcatatcccgcggataggcgatgttgtcgaactgccgccgctgcagttcaccatcgttgaagccaatgattatcgcgtcgatctggtacgggtcattaaaaccgtccacgataacgacgaagaagagtaa

SEQ ID NO: 90129 - DNA, 1596 bp, Enterobacter aerogenes
atgcaaaatgcacagaaggtcatttcgacataccgccgcaagcgcattcttgtgtgcctggccgttgcatttctgacgcttgccgtcaccctgacaatccgatttatttcacagcgtagccaaaatcaacagcgcatccagacggtgacccgcaatatggtgatcgcgatggacaatatcctgcaaccgctggcggcaaaacacgctaccctgctgagtatggtgggcaaaccctgtcaggatgtgcatcttgagttgcgtaaaaccgcagccactctacagaccgtacgctcaatcatccttgttcaagccgggatggcctactgctccagtatttttggcccacgccatgtggccattcatcagctgcagccaacgttgccggcagtcaacccgctgctggccttttcaacagataactcgctgctcaaaggcacaccggtactgattcagtggtatccctcctccgtaagcggtgccgacggcgcgttgttaattatcaatattgagctgcttggcgaattgattctaaaagaaaaatcatcgttgataaacgacatcagcctcacggtaggcaacaagagttttctcagcgatgttggcgtcgttgcaagcgatcggttgccgggtctgccgataatttaccggcaaagctccagccagtttccctttaccatcaacatcagcggcccgggagcctccgcggtagccttagaagagctgcccgccgaattaccgctggcgctgatgttcagcctgttgatgaccggtatcgcctggttgacgaccgcaggacgaatgactttctcgcgcgaaataaccctgggtatcgccgcccacgagttcgaggtatggtgccagccgctgcaggatttacgtactcaggagtgttgtggcgtagaaattttgctgcgctggaacaatccgcgccgcggaaatatctcgccggatgtatttatcccgattgctgaaggctacaacctgatagtccccctgacccgctacgtcatcgctgaaaccgcccgccggctgcattatttcccgcaggatgccaattttcatattggtattaacgtggcggcgcgtcatttcagcaacggcgagctgctgcgcgatctgcacacctattggttcagcgctaatccggtacagcagctggtggtcgagctgaccgaacgcgatgtcctgcgtgaaggcgatcatcacatggcagagcacctgcattttaaaggcgtccagctggctattgatgactttggcaccggtaacagttcgctatcctggctggaaaaacttcgcccggatgtactgaaaattgataaatcttataccggcgccattggcattgatggggtcaacgcgacggtgaccgatatgattatcgccctggcgcaccggctcaaaatcgtcaccattgccgaaggcgtcgaaactcaggaacagaagatttacatgcgtagccacggcgtggatttactacagggatattattatgcccgcccgttgccggtggaggattttccgcgctggctggcggaagagaagcaccgtctggcggcgactgggggtaaaaaacaacccgccgggcaagtttag

SEQ ID NO: 90130 - DNA, 1365 bp, Enterobacter aerogenes
gtgattagtatattcgacatgttcaaggtggggattggtccctcatcttcccatactgtagggccgatgaaggccggtaaacagttcgtcgatgacctggtcgaaaagggattgcttaatgaagtgacgcgcgtcgccgttgacgtctatgggtcgctttcattaaccggcaaaggccaccacacggacatcgccattatcatgggactggcgggcaatctgcctgcgacggtcgatattgacgcgatcccggcatttatccgcgacgtagaaacccgcggccgtctgctgctggcaaacgggcaacacgaagtcgacttcccggcggatgacggcatgcgttttcgtagcgacaacctgccgctgcacgaaaacggcatgactatccatgcgtgggccggcgagaaagaaatctacagcaagacttactattcaatcggcggcggttttatcgtcgacgaagagcatttcggcaaagaagacgcgagcgaactgcaggttccgtatccgtttaaatcggcacaggaaatgctgggctactgcaaagaaaccggtctgtcgctctccggcatggtgatgcaaaacgaactggcgctgcacagcaagcaagagatcgaggcctattttgaaaacgtctggcaaaccatgcgcgcctgtatcgatcgcggcatgaacaccgaaggtgtgctgccggggccgctgcgcgtgccgcgtcgcgcttcggcgctgcgtcgtctgctggtcgccagcgataagctgtctaatgacccgatgaatgttgtcgactgggtgaacatgttcgcgctggcggtcaacgaagagaacgccgcaggtggccgcgttgttaccgcgccgaccaacggcgcctgtggtatcgttccggcagtgctcgcctactacgatcactttatcgagtccgtcagcccggatatctatattcgctactttatggcgtccggcgcgattggcgcgctgtacaagatgaacgcgtccatttccggcgcggaagtcggctgtcagggcgaagtcggcgtcgcctgttcaatggcagcggcgggcctggctgaactgcttggcgccagcccggagcaggtttgcgtggcggcggaaatcggcatggaacataacctcggcctgacctgcgacccggtcgccggccaggttcaggtgccgtgcatcgagcgaaacgctatcgcctccgtgaaggcgattaacgccgcgcgtatggcgatgcgccgcaccagcgaaccgcgcgtctctctcgataaagttatcgagaccatgtacgaaacgggtaaagacatgaacgccaaatatcgcgaaacttctcgcggcggcctggcgatcaaagtccagtgtgactaa

SEQ ID NO: 90131 - DNA, 579 bp, Enterobacter aerogenes
atggcggctaacgccctcgatctggacgactttctatcccgttttcaactgctgcgcccgcagccctcgccgcagtcgctaaaccagcgccaggcggcggtactggtgccgattgtccgtcggccgcagccgggactgttgctgacccagcgttcgccgctgctgcgcaagcacgcgggccaggtcgccttccccggcggcgcagtagataacaccgacgctacattgattgccgccgcgctgcgcgaggcgcaggaagaagtggcgatcccgccggaagccgttgaagtgatcggcgtgctgccgcctgtcgacagcgtcaccggctttcaggtgacgccggttgttggcataatccccccggacctgcactatcatgccagtcaggacgaggtgtctgcggtgtttgaaatgccgctggaagaggcgttgcgcctgggtcgttaccacccgctggacatccatcggcgcggtaattcacatcgcgtctggctatcgtggtaccaacattattttgtctggggaatgaccgccggcattattcgcgagctggcgctgcaaatcggcactcgcccttag

SEQ ID NO: 90132 - DNA, 1356 bp, Enterobacter aerogenes
atgttgtcccccgctattatcaccctgccctggcgcccggatgccgccgaacgctatttcgcgccgttaagcgccacgccgtgggcgatgctgctgcactccggcttcgccgaccatccgtatagccgtttcgatattatcgtcgccgacccgcgcgcgacgttggttacccgcggcgagcaaacctgggtcaacgacggtgaaggcgaatttgtctcgcaggacgatccgctgcagctgctgcaacagcagttggttcgctgtcagttaacgccgcaggccgatgataacctgccgtttctcggcggcgcgctggggctattcggctacgatcttggccgccgctttgaacgtcttccgacgcaagcgcaggctgatattgccctgccggagatggcggtaggcatttatgactgggcgctgatcgtcgatcatcaacgccagcaggtgtcgctgctgagctatgacgatccgcaacggcgcctgcagtggctggaatcgcaaacacgccagccggctgaacctttctccctgacctcctgctggcaatcgaatatgagccgccagcagtacggcgaaaaattccgccaggtacaggcgtacctgcgcagcggcgactgttatcaggtcaacctggcgcagcgttttaaggcccgctaccgcggcgatgaatggcaggcatttcgtaagcttaatgccgccaaccgcgcgccgttcagcgccttcattcgcctgccggaaggggcgattttaagcctgtctccggagcgttttattcaactgcaccagggtgacatccagacgcgccccatcaaaggcacgctgccgcgactcgattctccgcaggaagacgcacgccaggcggcaacgcttgcccactcgccgaaagaccgcgccgaaaatttaatgattgtcgatctgatgcgcaatgatatcggccgcgtcgccgtgccgggcagcgttcgcgtaccggaactgtttgtggtcgaaccgttcccggcggtacatcacctggtgagcaccatcaccgcacgattgcctgctacgcttgatgccagcgatctgctgcgcgcggccttccctggcggctccattaccggagcgccgaaagttcgcgccatggagattatcgatgaactggaaccgcagcgacgcaacgcatggtgcggcagcattggttatctcagcctgtgcggcaatatggataccagcattactattcgtacgatcaccgcctggcagggccaactgtactgctcagcgggcggcggtatcgtggcggacagcgaagaagccgcggaatatcaggaaacttttgataaagttaaccgtatcctgcatcaactggagagctag

SEQ ID NO: 90133 - DNA, 186 bp, Enterobacter aerogenes
atgtttgcaggtttaccttcgctgagccatgagcaacagcaaaaagcggtcgaacgtattcaggaattgatggcgcagggaatgagcagcggccaggcaatcgccctggtggccgatgaactgcgcgccacgcacaccggcgaccggatcgtagcgcgcttcgaagatgacgacgaagacgagtaa

SEQ ID NO: 90134 - DNA, 345 bp, Enterobacter aerogenes
atgacaattacgcgtattgatgccgaagcccgctggtctgatgtggtgattcacaaccagaccatttactacaccggggtgccggaaaatctcgacgccgacgcgtttgagcagactgccaacaccctggcgcaaattgacgcggtgctggaaaaacagggcagcaataagtcacgtattcttgatgccaccattttcctcgccaataaagatgattttgcggcgatgaataaagcctgggacgcctgggtagtcgccggtcacgcgccggtgcgctgcaccgtacaggcgaccctgatgaagccgcagtataaagttgagattaaaatcatcgccgcggcgtaa

SEQ ID NO: 90135 - DNA, 1911 bp, Enterobacter aerogenes
gtgatcgacgattttgcagcagacggccagctggccatggcgataccgggatttaagccgcgcgaaccgcagcgccagatggcgatagcggtgagtgaagccattgacgcctcccggccgctggtggtggaagcagggactggcaccggtaaaacctacgcctatctggcgcccgcgctgcgcgcgaagaaaaaggtgatcatctccacgggttcgaaagcgctgcaggatcagctctacagccgcgacctgccgaccgtcgctaaagcacttaaattcaccggcaaactggcgctgttaaaggggcgctcaaactacctgtgccttgaacgccttgaacagcaggcgctggcgggcggcgatctgccggtacaaacgttaagtgacgtaattcttctgcgctcctggtctaatcagacgcaggatggcgatatcagcacctgcgccagcgtcgccgaagattctcaggcctggccgctggtcaccagcaccaacgataactgtctcggcagcgactgcccgttatataaagattgctttgtggtgaaagcgcgtaagaaggcgatggatgctgacgtggtggtggtcaaccatcacctgttcctggccgatatggtggtgaaagagagcggctttgccgaactgatccccgaagcggaagtgatgatcttcgatgaagcccatcagctgccggatatcgccagccagtattttggccagtcgctctccagccgccagctactggatttggccaaagacatcaccattgcctaccgtaccgaactgaaagatacccaacagctgcaaaaatgcgccgatcgtctggcgcaaagcgcgcaggatttccgtctgcagttgggcgatccgggctatcgcggcaacctgcgcgaactgctggcggatagccacattcagcgcgcgctgctgctgctcgatgacgcgcttgaactgtgttatgacgtcgccaaactctcgcttggccgctcggcgctgctcgacgccgcctttgagcgcgcgacgctctaccgtggccgcctgaagcggcttaaagagattaatcagccgggctatagctactggtatgaatgcacctcgcggcattttaccctcgccctgacgccgttgaccgtcgcggagaagtttaaagaggtgatggcgcaaaagtcaggaagctggatctttacctcggcgacgctgtcggttaatgacgatcttcaccactttaccgcccgcctcggcatcgatgacgcgcagacgctgttgctgccaagcccgtttgattatcaacatcaggcgctgctctgcgtaccgcgcaatttaccgctgccaaaccagcccggcgcggcgcgccatctggcggcaatgctgaaaccgctgatcgaagctaacgacggccgctgctttatgctgtgtacttcgcacgccatgatgcgcgacctggcggagcagttccgcgctaccatgacgctgccggtactgctgcaaggggagaccagtaaaggtcaactgctgcagcagtttgttagtgccggcaatgccctattagtggcgaccagtagcttctgggaaggggtcgacgtgcgcggcgacgcgctgtcgctggtgattatcgataagctgccctttacctcaccggacgatccgctgctcaaagcgcgaatggaagactgtcgactgcgcggcggcgacccgttcgatgaagtgcagttgccggatgccgtcattaccctcaaacagggcgtcgggcgcctgatccgcgatattgacgatcgcggcgttctggttatctgtgacaaccggctggtgatgcgtccttacggcgccgtgttcctggccagcctgccacccgcgccgcgtacccgcgatatccgccgggcagtgcgctttctcgctgtaccgccggcaaggtaa

SEQ ID NO: 90136 - DNA, 696 bp, Enterobacter aerogenes
atgcgaattttggctatcgataccgccacggaggcgtgctccgcggcgctgtggaatgatggcgcccagagcgcccattttgaaatttgtcctcgcgaacacacccaacgtatcctgcctctggtgcaggaggtcctcactgaaagcggcactacgctgaatgaactggacgcgctggcctttggccgcggtccgggcagctttaccggcgtacgtattggtatcggtattgcgcaaggactggcgctgggcgctgagttgccaatgatcggcgtctctacgctggcgacgatggcccagggcgcgtggcgcaaaaccggcgctactcgtgtgctggcggccattgacgcgcgtatgggcgaggtctactgggccgagtatcagcgcgacgaagatggcgtctggcacggtgaagaaacagaagcggtcctcaaaccggctgcggttgccgaccgcctggcgcggctttccggcgaatgggctaccgtcggcaccggctggcaggcgtggccggatctggcgaaagagagcgggctgaccttgagcagcggcgaggtcgaactgccggcggcagaagatatgctgccgctggccattcagctgctggcggcgggaaaaaccgtggccgttgagcatgcggaacccgtttatttgcgaaacgaagtggcgtggaagaaacttcctggccgcgagtga

SEQ ID NO: 90137 - DNA, 582 bp, Enterobacter aerogenes
atggcgggtcaaaaacagggcgttcgttggctgttagccgcggcggttgccgttgcgctaagcggctgcgtatcggtgccggatgctattaaaggcaccagccctacgccgcagcaggatttagtgcgggtgatgaacgcgccgcagctgtatatcggccaggaagcgcgttttggcggtaaggttgtcaacgtgcagaaccagcaggggaaaacccgcttagagattgccaccgtaccgctggatagcggcgcgcgaccggaactgggcgaaccttcgcgcggccgtatcctcgccgacgtgaacggtttcctcgatccggtcgatttccgtggccagttggtcaccgtggttgggccgattagcggcgttgtcgacggtaaagttggcgcaacgccgtataaattcatgttgatgaacgccaccggctataagcgctggaacgtggtgcagcaggtggtgatgccgccgcagcccattgacccgtggatgctcggtccgcgcccctggggctacggatacggtggctggggttggtataatccgggcccggctgaggtcagaaatgtcgtaacggaatga

SEQ ID NO: 90138 - DNA, 1719 bp, Enterobacter aerogenes
atgacgacgaataactatttcagaggtgaagcagtgaaaaaggtttggctaaaccgttatcccgccgatgttccggcggagataaatcctgaccgctatcaatccctggttgaattgtttgaacacgccaccacccgttatgccgatcagccggcatttatcaacatgggcgaggtgatgacctaccgtaagctggaagagcgcagccgcgctttcgccgcttatctccagcaaggtttagggctacagaagggcgatcgcgtcgcgctgatgatgcctaacctgctgcaatacccggtggcgctgtttgggatcctgcgtgccggaatgattgccgtcaacgttaacccgctgtataccccgcgcgaactggagcaccagctcaatgacagcggcgcggcggcgattgtgatcgtttccaacttcgcacataccctggagaaagtcgttgataaaacccaggtaaaacacgtcatcctgacgcggatgggcgaccagctctccaccgccaaagggacgttggtcaactttgtggtgaagtacattaagcggctggtgccgaaatatcatctaccggacgccatctcatttcgtagcgccctgcagcatggctaccgtatgcagtacgtgaagccggaaatcgtcgcggacgatctggctttcctgcagtacaccggcggtaccaccggcgtggcgaaaggggcgatgctgacccaccgcaatatgctggctaaccttgaacaggtgaatgcgacctacggtccgctactgcaccgcggtaaagagctggtggtgaccgcgctgccgctctatcacatcttcgctttgaccatgaactgcctgctgtttatcgaacttggcgggcagaacctgctgattaccaatccgcgcgatattccgggtctggtaaaagagctggcaaaatatcctttcaccgcgatgaccggggtgaataccttgtttaacgcgctattgaacaataaagaattccagcagcttgatttctcttcgctgcatctttccgccggcggcggcatgccggtgcagcaggtggtagcggagcgctgggtgaaactgaccggccagtatctgctggagggctacggcctgacggagtgctcgccgctggtgagcgtcaacccgcatgatatcgactatcacagcggcagcatcggcctgccggtgccatcgaccgaagccaagctggtcgatgatgacgataatgaagtcgcgccgggtgagccgggcgagctttgcatcaaagggccgcaggtgatgctgggctactggcagcgtccggatgccaccgatgaaatcattaaagatggctggctgcataccggcgatatcgcggtgatggatgatgaaggcttcctgcggatcgtcgatcgtaaaaaagatatgattctggtttccggttttaacgtctatccgaatgaaatcgaagatgttgtgatgcagcactccggcgtacaggaagtggcagccgtcggcgtaccctccggcagcagcggtgaagcggtgaagatctttgtggtgaagaaagatgccgcgttaaccgaagaagcgctgattactttctgtcgtcgccatttgaccggctacaaagtgccgaagctggtggagtttcgtgatgaactgccgaaatccaacgtcggcaaaattttacgacgagaactgcgtgacgaagcccgtgctaaagtagacaataaaggctaa

SEQ ID NO: 90139 - DNA, 1116 bp, Enterobacter aerogenes
atgatcaccaccgacgatggcctgcgcgctatctgtgaagcggcaagttcggcgcccgcggttgcgctggataccgagtttgttcgcacccgcacctactatccgcagcttggtttgctgcagctgttcgacggcaaacaggtttctctgatcgatccgttgaccatcaacgactgggcgccgatgcgcgagctgctgcttaaccaaaatgtcaccaaatatctgcatgcgggcagcgaagatttagaagtcttcctcaacgcgttcaacctgatgccgcagccgctgatcgacacccagattctggccgctttctgcgggcgcccgatgtcgtggggctttgcttcaatggttgaagagtattccggcgtcgcgctggacaaaagcgaatcacgtaccgattggctggcccgaccgttgaccgagcgtcagtgcgaatacgcggccgccgatgtctggtatctgttgccgatcgccagcaaattaatggcggaaaccgaccatgcgggctggctgccggcagcgttgaacgagtgccacctgatgcagcagcgccgtcaggaagtccttgacccggcggaggcgtggcgggaaatcggcaatgcctggcaactgcgtacacgtcagctgggctgcctgcagttgctggcggagtggcgtctgcgcaaagcgcgcgagcgtaacctggcggtgaactttgtggtacgcgaagagcatctgtggagcgtggcgcgctatatgccgaccagcctcggtgagcttgatagtctgggtttatccggtagcgaaattcgcttccacggcaaaacgttgattagcctggttgagaaagcgcaggccttgccggaatctgcgctgcctgagccattgcaaaacctgatcgatatgccgggataccgcaaagcctttaaagatattaaagcgctggtacaggaagtgagcgccgagaagggcgtgagcgccgaactactggcgtctcgccgccagatcaaccaactgctgaactggcactggcagctgaaaaccaaaaacggcgagccggagctggtttccggctggcgcggtgaattgatggccgagcgtctgaacgcgctgctcaacgactatcctcgctag

SEQ ID NO: 90140 - DNA, 270 bp, Enterobacter aerogenes
atggcattactcgacttttttctctcgcgaaaaaagaacacggctaacattgcgaaagaacgcctgcaaatcatcgtcgcggagcgccgccgcggcgacgcggaaccgcattacctgccgcagctgcgcaaagatatcctggaggtcatctgtaaatacgtgcagatagaccctgagatggtcagcgttcagctggaacagcgtgatggtgatatttcgattctcgagctgaacgtgaccctgccagaagctgaagagtcgaaaccctga

SEQ ID NO: 90141 - DNA, 813 bp, Enterobacter aerogenes
atggcacgcattattgttgtgacttcgggtaaagggggcgttggtaagaccacctccagcgcggccatcgctactggtttggcccagaagggaaagaaaactgtcgttatcgacttcgatatcggcctgcgtaacctcgacctgattatgggatgcgagcgtcgggtggtttatgacttcgtcaacgttatccagggcgatgccactctcaatcaggcgctaatcaaagataagcgtactgaaaatctctatatccttccggcttctcagacccgtgataaagacgcgctgacccgcgaaggtgtagataaagttctggaagaactgaaaaagatggacttcgattttattgtctgcgactccccggcaggcatcgaaaccggcgcgctaatggcgctgtacttcgctgacgaagccatcatcaccactaacccggaagtctcctccgtacgcgactccgaccgtatccttggcattctggcctccaaatcccgtcgcgcggaaaatggcgacgagccgattaaagagcacctgctgctgacgcgctacaacccaggccgcgtgaacaaaggcgacatgctgagcatggaagacgtgctggaaattctgcgcatcaacctggtgggcgtgattccggaagatcagtctgtactgcgcgcatcgaaccagggcgagccggtgattctggataccgtttcagatgcgggtaaagcctatgcggatactgtggatcgtctgctcggagaagaacgtcctttccgcttcatcgaagaagagaagaaaggtttcctcaaacgcctgttcggaggataa

SEQ ID NO: 90142 - DNA, 702 bp, Enterobacter aerogenes
atgtcaaatacgccaatcgaacttaagggcagtagcttcaccttatctgtcgttcatttgcacgatgcaaatcccgaggttattcgtcaggcgttagaagacaaaatcgcccaggctcccgcttttttacgtcatgcaccggtcgtggtcaacatcagcagtattgaagagagcgtcgactggcgcccgatgcatgaagctatcgtcgccaccggtttacgcatcatgggggtgagcggttgtaaaatttcccgcctgaaaacggaaatcgaccgcgccgggatcccgctactgacggaaggaaaagagaaaatcgttcgtcaggcgccgccgccggaacccgttgaaccgccaccagttgctacgccgatcacaaaaacgcgtttgattgatctgccggtacgttccggtcagcgcatttatgcgccacactgtgatctaattgttacaaaccatgtgagtgccggagcggaacttatcgctgatggtaacatccatgtgtatggcatgatgcggggacgtgcgctggctggcgcaagcggcgacagagatgcccaaatattttgtactaacctctcggcggaactggtgtccatcgcaggggaatattggctgagcgataacatcccagctgaattttatggcaaagcggcgcgcctgcgtttaggcgacggcgctttgacaattcaaccgttcaattaa

SEQ ID NO: 90143 - DNA, 282 bp, Enterobacter aerogenes
atgttttgtgtgatctatcgaagtactaaacgtgaacaaacctatttatatgtcgaaaaaaaggacgatttctcgcgcgtcccgccggaactgatggcaagcttcggcaccccgcagatgaccatgctgctgccgctcgacgggcgcaagacgctggctaacgctgacctcgaaaaagtaaaacaagcgctcgtcgatcagggctattacctccaacttcctccccctcctgagaatctacttaagaaacacctcgcggaacaggggaataaatccgattaa

SEQ ID NO: 90144 - DNA, 660 bp, Enterobacter aerogenes
atgtaccaacatcataactggcagggtgagttactggattatccagtgagcaaagtggtttgcgttggcagtaattacgcaaaacatattaaggagatgggcagcgcgatgccggaagaaccggtgctgtttattaaacctgaaacggcgctatgcgatatccgccagccgttggtacttcctgaaggattgggatcggtgcaccatgaggttgaactggcggtgctgatcggcagcaccttgcgccaggccagcgaagaccacgtgcgtaaggcgattgctggttatggcgtggcgctggatctcaccctgcgtgatattcagggcaagatgaaaaaggccgggcaaccgtgggagaaagctaaggggttcgataacgcctgtccaatctccggttttattcctgccgccgagttcaacggcgatccgcaaaatatgccgctaagcctgaagattaatggtgaagttcgccagcaggggacgactgcggatatgattcataagatcgtaccgctaattgcctatatgtcgcgcttctttacgctgaaagcgggcgatatcattctgaccgggaccccggagggggtcgggccgctcgccagcggcgatgagctggaagtcggcttcaatggtttgacgttatccacccgcgtgctgtaa

SEQ ID NO: 90145 - DNA, 447 bp, Enterobacter aerogenes
atgagcgaacaacctttctggcaacaaaaaacactggatgaaatgaccgacgcggagtgggaatcactgtgcgacggctgcggacagtgctgcctgcataagctaatggatgaagataccgacgagatttactttaccaacgtcgcctgccgtcagctcaacattaaaacctgccagtgccgtaactacgagcgtcgcttcgagtacgaaccggactgcatcaaactcacacgcgataatctgccgaccttcgaatggctgccgcacacctgcgcctatcgcctgctggcggaaggtaaagcgctgccgcactggcacccgctgctgaccggctcaaaagtggcgatgcacggcgaacgtatttccgtgcgccatattgcggtaaaagagtccaccgtcgtcgactggcaggaccatattttaaacaaaccagactgggcgcaatga

SEQ ID NO: 90146 - DNA, 1281 bp, Enterobacter aerogenes
atgaaatatcctaccggggtagaaaatcacgggggtagtttgcgcctgtggtttatatataaaggtgtaagggttcgggaaaatctcggtatacctgacaccccaaaaaacaggagaatggcaggagaactgagaacgaccatttgctatgccatcaagatcggcacgttcaattatgtcgagcagtttccgcagtcttcaaaccttgggcgatttggcctgacgcgcccagggattactgttggcgaactcgccaaaagatggttggagcttaagaggatggaaattacgcttaacgccttcaaccgttaccggtcttacatcaaaatttgctgcgaattactgggcccagacaaattgctttccagtattaacacggaacagatcctggtagtgagaaaggagttgcttacagggttccagatttgtgggaaacaccagaagaatcgctccgccaaaaaaggccggacagtgagaacagtaaatgtttaccttaactgccttggaggtatgttttctttcgctaaacaaaatgggtatatcgacagaaacccattcgaaggcattgatcctctcaggaagagtagatcggaaccagatccacttacccacgaagaatatttccgacttcttaacgcttgcccatcagagcaaataaaaaatctgtggatactggccgttaacactggactacgtcacggagaaatcagtgcgctggcttgggaagatatagacctgaaaaaatggacaatcactgtaagccgcaacattgccattaaaggacatttcaccccgcctaaaacagaatgcggaaaccgggaaatagtgctcaccgacgcagcaatacaggctctgaaaagccagatggcttatacccggatgggcaaacagcatcaaatagaagtgcatttgagagagttcggcagaaccagaacagatgcatgtactttcgtatttgttccgcggctgactgcaaggaatggaaaaggtggagactggtatgcacctggttcattcggcgcgacgtggaatgatgtgctcaagagaaccggcattcgccatcgccgtgcatatgaatcaagacacactttcgcatgttgggcattaagtgcaggagcaaatccaaacttcattgcctcacagatgggccacacgtcagcgcaaatggtttacaacgtttacggaaaatggatgactgacaacaacagtaatcagatggcgatactcaacgcaaattttggaggttttgccccatccatgccccaggcactaaatcagtaa

SEQ ID NO: 90147 - DNA, 249 bp, Enterobacter aerogenes
atgcgcgaagttattcagctgactcctaacaagtgggtttcggaagaagtgctgatgacgatcaccggactcaccaaaaacgctatcaaatcggcccgcgaaaaatcctggatggaaggtcgcgagtatcggcactattccggagactgccagcctaaggacaactcccctatcctctacaatcgcttagagatagacaactgggttgaacgtcagcgcccggcgatcccgcgccagaaatctgtttaa

SEQ ID NO: 90148 - DNA, 237 bp, Enterobacter aerogenes
atgcattccttgcaagacgtacacaacaagttagccgatcttgtatcagaggcgcacaaagtagcgtgtgccctcgatattggtgacgagcgcactgaagcattcgagctatacgaggcacttcgccgacttcagcgccaaggcgcagcagctgagcttctttccgcgaccaaccctcttctggcctctccttattacgacgaggactgggaagaagatgaagatgaagatgactaa

SEQ ID NO: 90149 - DNA, 222 bp, Enterobacter aerogenes
atgacagcagaaatcatcgatcaagccaacgagcttgcgcagcagcgaatcgacatggcgatcgcagcgcaccggataaaccacaacgccgtatcagctgagcattgtagtgaatgcggagagagtattccggcgccgcggcgcgctgccgttcctggctgccagacatgcgcggaatgtcaggcagacttagagctgattatgaagcagagaggtaagtga

SEQ ID NO: 90150 - DNA, 753 bp, Enterobacter aerogenes
atgagttggctcttttcgcaggcgctggcggaggaatacttggcggaaacctccttggttggagaacagtttgcgcagttgaacgtgatgcctacgccgcacaagttctcgcgcaacgacaaaatgatggaattctcaagcctttcccgatttggtctaacgtgtgcagttttgacgggaaaccatggagaggaattattgacatcgtttctggcgggtttccgtgccaagacatcagcgcaaatggtcacggtgccggcattgatggcagacgctcaggactgtggtctgaaatggcgcgaatcgtcagtgaggtacgacctaaattcgtcttcgtggaaaactctccacgactcaggggaaaaggtcttgccgtggtcatcagtgaccttgccgaaatggggtatggctgcgagtggtttcgtctttcggcatcgaactgtggagcgccccatgaaagagacaggatgtggattgtggcctacagcgaaggcaacgatacgcggagactgtccaagcgagcggctgcgcagaacaccagacttgccgagtgcgataaagatgcgtccgttgccggatgggtcgcagccacgacaggatggacaactgaacccggaatgggtcgagtggttcatgggttggcccatcgggtggaccgaattaaagcccttggcaatggacaggttccgcgagtggcggcaacagcattctctttgctctgtggaaaatgaaaaacaggagcgtgccgcatga

SEQ ID NO: 90151 - DNA, 660 bp, Enterobacter aerogenes
atgaacaatccatactccctaatttatgcagacccgccctggtcatatggcaacaccattagcaacggtgctgctgttgaccactactccacaatgaaactcatcgatatgaaacggctccctgtatgggagctcgcagcggaaaacgccgtgctggcgatgtggtacaccggcacccataaccaggaggcgatcgagctggccgaggcctggggctttacggtacgcacgatgaaaggcttcacctgggtgaagttgaatcagctggccgagctgcgcattaccaaggctctggcagagggagacgtcgccaatttttacgacttcctcgacctgctgaatgccgagacgcgcatgaacggtggcaaccacacccgcgccaacacggaagacgtgctgattgccacccgcggcgccgggctggaacgcaagcatgcaggcattaagcaggtagtctacagcccgctcggcgcacacagtgaaaagccgtgggaagtgcgccaccggctggaactactttacggcgacgtaccacgcattgagctatttagccgcagcgcggcgccaggctggagtcactggggaaaccagtgcgccaccgcttccgttgagctgatccccggttgcgcaatcgacgttatgaaaacggaggtggcatga

SEQ ID NO: 90152 - DNA, 705 bp, Enterobacter aerogenes
atgaaccaaccaatgtcttttgtatggaacaccgaagctgcttctatggctaagaaagcaggcgctactggcggaattagcgaaactggcgcttatgagggatttatcacctcagccatttataccttcggtaaggatggcagtcagtcacaggcgcttgagttgagcctcgacagtgacggcgccaaagccaactatctgcgcatcaactacatcgggaaagatggtcagcaaactttcggcatggggttgatctctgcccttctctgggccgcccaggtaaaaagcgctcagccagaacaggtgcaaaacgaaaatggtgttgagtggcattgcccggcgctggttggaaagaaagttggcctattcctgcagaaagtcctgtacaccaaaggcgatggaactgacggctataaattcgaagtccgccacgttttccagcctggttcccgtcgcacttatgccgaatacagcgaaaacgaagcggcaaccgctatcgctgccctggagaagtcgatgaaagataaagacgatcgcgtccagggtaatcctcagttttccggtggcggtcgccagcaggctggcgctaacccttatgcgcaaaaccctaacgcagtacctcattctcggttgcagcaagctgccagtcagcatgctcagaacatccagaatccgccggacttcgacgacgacattcccttttga

SEQ ID NO: 90153 - DNA, 669 bp, Enterobacter aerogenes
atgggaacgcctgtactcatcctgggcgacagcggcgccggcaagtcatacagcctgcgcaacttcacgcctgacgaagtgatcctgctgcaatgcatcccgaagatgctcccgtaccgcgctaccggatggaagctgaacgggaaagagttaccggatggctctgttcagcgcggaaacatcatccgttttgatgcctgggatgcggtgctggactccatcaaccgcatggtgctttcgaagaccaggcgcgtacttgttatcgacgatttccaggtcgtcatgcagcacgaaaacatgatgcgcgcataccagaccgggtatcagaagtatacggaaatggccgatcacgtgtggcaaatcatcatggctgccacccggcttccggatgactttcgggtttacttcttggcccacaccgaagagtcggacgggaaaatccggatgaaaaccaccggcaaaatgctgaatgaaaagcttacgcctgagggttatttctccatcgttctgagggccatcaagaaagacgggaagcacgtttttttgattaagggtgacgacaacgacaccgcaaaagcgccgccggacctattccctggactaactgaaatggataacgacctgaaagccgttgacgtcgctatcaccgaatttatgaccgaattataa

SEQ ID NO: 90154 - DNA, 660 bp, Enterobacter aerogenes
atgttgcgcgtaattgataccgaaacaaccagtcttgaaggcagcgtcctagagatagccagcgtagatattgtcgatggtgttatttgcaacccaatgagcgactttgtaaagccttctgaagagatcagcttcgaggctatggctatccaccacatcacagaagaaatggtcgctgacgctccactgattagcgaagtaattggccggtatcttggtgcagatgcatatgttgcccacaacgcgaaattcgataaatccaaacttccccaaattgacgcaccatggatatgcactttaaagcttgctcgtacccaatatcctgaatttgaaagccacggtaaccagtacatgcgttatcgacttggtttgaagccatacctccccgagggattgtatgcgcaccgtgcactttatgactgctatatcaccgctgagttgctcctttatatgggacggcttgccaaatggactatgggagagatgcgaaccatctcaaacagcccgtcactgatgaaggcgatccgctttggtaagcacaaaggtctggctttcgaagaaatagccaaattggaccctggctatctccgctggctatccagcaacagcgatgacgaagacatcctgtttaccatcaagcactggttgaaaggagcctga

SEQ ID NO: 90155 - DNA, 159 bp, Enterobacter aerogenes
atggtaataagccaacaagacggaatgctggcgctggccatggtgattattgcctatggactccagccagaagatctcgaaaacgcggccagtcaactggccgagtatgacgcagtaaccgacgcaaacacggagatgaatgatgttgcgcgtaattga

SEQ ID NO: 90156 - DNA, 396 bp, Enterobacter aerogenes
atgcaagcattaccacgtttaaccgctgatcgcctcgctgttcttcccgaaggtactcggctgaaaatgggcggccatatcgttaaatatgttgggcgagggtcatttaccaacgcatcgggtatcactcagaacatggttgattacgtcgattcttgcggcatccctggtagtttcgaagaaaagatcttcctctcaacagctacagagcaccttaacgcagttcaatgcgaaaactgctttgcgctgcgtcttccggaagattgtgttgttcggacaatcactaattacatgactacacgtcaggctcatttctgtgacgacaaaggttgcgctcagaaatatttcatcaagcaccctgggcgtcagccaagcggacggagaaccaaatggtaa

SEQ ID NO: 90157 - DNA, 207 bp, Enterobacter aerogenes
atgattagtcagcactacggtacccagaccgttaaccgcggcgccgttcagcctggcatgctggttaagcatcgcgacggcacctggacggcatcagctcacaaacgcggcaagttgtatcttcaccgcggctgcgaacgtacctacaccaaagccctgcttatcgagatctacctcgatggacgcggaaacggcttaagcaattaa

SEQ ID NO: 90158 - DNA, 138 bp, Enterobacter aerogenes
atgaatcacgatgaatttgatgatggtcgttgcggtatgtcgcggcggtgctggcgaaacctgacccgcatctgcattggcttgatagccatatacctgctgattgccttgtttgtgatggaggtcttccatgattag

SEQ ID NO: 90159 - DNA, 753 bp, Enterobacter aerogenes
atgctaaatactacgcaagcaacatttagcaatttgcacatttatcgatttgctaaaagcagtaacaatgcagggatggaaaataaagaaatcagaaaagccaacctggaagcgctgtatgagaagcgccagcacgagtctggaatgaccaaggcgcagttcgccgaactcatcgagacaagtccggctgcccttagccagctcctgggaccgacccctcatcgcaatattggcgataagatggctcgtaaaattgaaaccgctcttgatctgccttttggctggatggatgttttacactctaatgaagaaccttcgaacgttgcatttcgaggactgaacgatacaaaaggaagttatccggtaataagctgggtaagcgcggggcaatggatggaagctgtagaaccttatcatcgaagagcgattgatcgctggtatgacacgaccgttatctgttcggaagattcattctggctggacgtcaaaggagactccatgacctcccctgcaggcctgagcattcctgagggagcggctatcctagtggatcctgaagtggaacctcgcaacgggaagctggttgttgcaaagctggaaggcgataacgaagcaacctttaagaagcttgtaatcgatgcaggcaggcgcttccttaagcctcttaaccccgcttacccaatgatagaggttaatggcaactgtaaaattatcggtgtagtggttgatgccaagatactgaacattccatag

SEQ ID NO: 90160 - DNA, 234 bp, Enterobacter aerogenes
atgagcactgaactacaccgctggcgcaagaccgccactaccgacgaatgggcacagctcgcaaagttggctaacacgacgccagggtatctggaccagattgcatacggaaatcgccgggcatcaccagaaatggcatctgctatcgaaaaaggcacgaagcattttcatcgccaggctccggtcctcaaagaaagcctggtattcgcatcgccgcgtgatacagcggcctaa

SEQ ID NO: 90161 - DNA, 543 bp, Enterobacter aerogenes
atgcaatcacttacgtatcaccacaataccggattcgttccggccgcgatgataaatcgcgctcaatcaaagcaggatcatgatcatgagctgatccgcgatgcagtaagagcctgggcgtcggctatcgacaatcaggatgtggtatcggcactgattatcaacgagtaccaggagcagggcggcgattcaatcagctttcctgacgatatcagccgggcccggcagaaactctttcgcttcctcgataaccggtttgattcggatcagtaccgcgagaatgttcgccagctgacgccggcaatcatggccgttttgccggtggaattccggacaaagctggcgccgcagaacgacactatgtcgctgatagcttcggcaatgaaagagtgtgcagaggccaagcaggcagtgcttcttaatgctcctgagcaccagaaactgaaggaagtgagcgagggtatcgcttcgctgtttcgcctcatgccggagcaggtaggcccactgatgacgatggtgacatcaatgctgggggttatgtga

SEQ ID NO: 90162 - DNA, 933 bp, Enterobacter aerogenes
atggagaaccagaagtctggttacgtcccgttgtaccggagcatcaagaagaagtcatgggctaaagacgtgttcctgcgtgcattgtgggaaaaccttctcattgacgcggccagacagccatatgtggccttcttcaagggcaagcaatggcctctgcaacccggtcaactggtcgtcactgctgcagatcttgggcttcagttgtgtgaccgtcagggtaatccgacaagccgtgacgcagtggagagaatgctgtctgttttcgttcgcgaagggatgatcaccatcgaaggagagaagcgaaaaggcagggtgatcaccattaaaaattatgtcgaatatgctcaaaaaatggacgatttacccgcacataaagccgcacatataagcgcacatgacgaagcctgtaatggcgcgggttcggaagggtgtgccgcacataaagccgcacaattccccgcacatcatgaacaagaaggtaataacaagaatataaataactcttcgtccgagaattctgacgaatcctctgacaagcccggaaagaaaacccctgctttgagaccagaagcagcgatccagagcggaaccaaatggggcaactctgaagacctccgctgtgctgaatggctgttcaccgtcgtacagggcatcgccccatcggcaagaaaaccgaactacgccacctgggcgaatgatatccgcctgatgcgagagcgtgacaagcgcacctacaaggaaatcgcctcgctgttcaagtgggcctgtgaagacaagttctggaagggcaatgtcctgtgcccatcaacccttcgcgaaaagtggattcagctcgatatcaagcgaggtaagcagagcaacggaactgcttccgacaagccaaaggtcgacctaaccaacactgactggatttacggagtgcagctatga

SEQ ID NO: 90163 - DNA, 702 bp, Enterobacter aerogenes
atgaaaagccttgcagagcagatgcataactttgaccgcgatcagatgcgccgcgttgcgcacaacctgccggagcagcacgacgagaaaccgcagcttgagcaggtggcccaggtcatcaacagcgtgttcagccagttaatggccgccttcccggcaaccactgctaaccgtgaccagacagagatgaacgaaatccggcgccagtgggttctggcattcagggaaaacggcatcaccaccatggaacaagtttctgctggcatgcgggtagcccgtcgtcaggaacgcccattccttccgtcacccggccagtttgtcgcctggtgcaaggctgaagaagccgcggcggccgggttacctaacgccgatcaactggtggacatgatttaccagtactgccgtacgcgcggacagtatccggatgccgagtcctacccctgggagtctagcgcgcactactggctggttacatccctgtaccagaacatgcgcgcaaacggcctcagtgacgctgagttacgccgtaaggcatcggaagaactggcgcgcatggctaaccgaattaactcaggagagacgattccggagcccgttaagcaacttcctgttcttggtggtaagccgctatcacgcatgaaggggctggccaggctggctgaaattcgcgagaagcacggactgagagggcgcaaacaatga

SEQ ID NO: 90164 - DNA, 294 bp, Enterobacter aerogenes
atgaccggaaaagacgcaattctgaattacctcaagacacacaaaacctgcagctccccggatgtggctgaagcttctggcatgtctcacacctgcattaaccaggcggccaacattctggcaaagcagggcgtactggtggcagtagcgaaggtctggcgaacggttcactaccggctggccaccgaggaagaaatctccggccagaagagcgcgaaccagattttcaacgagtgccggcagagcccggttatgaaacgaattttagcggtctacgggagagcgcaggcatga

SEQ ID NO: 90165 - DNA, 606 bp, Enterobacter aerogenes
atgaataacgaaatcgaacagattgcacagcagaacgatatgagtatcgagtttgttcgctggttcttcaacgaaaagaaagcagattgcggtgagcaatggtttctggcgttaggtgctatgtgggaaggctggaaagcgcgtgaaggagaagtgaccgcactggcgctgactcttgagaagagtcgagaggcatcaggctgcccggctgacgtagacctgcaggactgggtgaagcagctggcggcggagaatgtggggctgaagaatgtatttatccagaaggaaatcccatccgaagcagtcgatgcattcatggaaaccgcagtaatggatcatgactggaatgaaacctccgagtggtcatgggttgaaaacgaaacagaggttatccacgccgttctggacgcacttaagccagacacccccgccaccgatcgcatcgtagccgggattaaggctgatgccgcaaatcagatgtgcgtttcctttgttaagcacaaggaacttgctggcctgtctgatgatgatgaggtgacagttcgtgaagctacagacgtagtgctgcattgtgctgaggtgattagtgagggggctgacaaatga

SEQ ID NO: 90166 - DNA, 753 bp, Enterobacter aerogenes
atgatccacttccacggagggccaatcacgccagatacctgtgcgttgaaggcgtggaaggggcgccatgcgttcatcagctttgcaaacgctggtcagttagcactggctagcgaggttactcaatcctttgctctggataacggcgcattcagcttctggacgaaaaaacgcgtggtggactggaacgaatattacgcctttgtcgcaaagtggatgaaccatcctcgattttcctttgctgtaattcctgacgtcatcggcggtacgagtgaggagaacgacgcactgattgctgagtggcctcacgggaagataatcggcgcgccggtatatcacttcaatgaaccggatgagcgctttatccgtctgtgccatgagttccctcgggtggcaatcggcagcatgggcgaatacgacgcaaagcggccgcgccgctgtgtggctcgcctgcgtgacttaatccggcatgttgtggatgagaacggttatccgatttgcaaactgcacggcctgcggatgctcaatgccgatattttccgccatgtaccgctgtcatcagctgatagcacaaacgtagcccgtaatatcggcatcgataaatcctggcagaaatcagcctatgcgccggccagcaaagagactcgcgccgctgtactcgttgagcgtattgagtcaatgaacagcgccagcgcactcaactataacgccgaacgcgaccgctttatgccgcaattggcctttgagatttag

SEQ ID NO: 90167 - DNA, 243 bp, Enterobacter aerogenes
atgactgatctcacccgactattagccagcctcaagcgccgctctgcccacgcaaaagagtttggtcacgatgtgctgttcgtaaagttagaagatattgatgcgctggtagaggcgctggaaccgagtacatcatcctcaaatttgctgggtaaaccttgtgaaaaaagatgcaatcttagcgatcagtgcgttgaaacatctttgaactgcgtcgacagagcacctctaaggacatcgtag

SEQ ID NO: 90168 - DNA, 1137 bp, Enterobacter aerogenes
atggttgaccaaaaaagcaatgcacaagttttaaacggtgttaacgacgatatttcagaaatgaaatcactgaccacgttgcgcaagcgtgtggttaccgatggtgaggtggtttctaaatcacagaacgcttttcgtctggcgggtggtaaaacgggtgtcatcctgcgcaatgacggtaatgacttttatgctcttgtaactccagaaggtcaggcgcaagacggacaatggaacacccttcgcccattatctttcaatctcaaaactggtcgagtttctctccgtaatggcgtggacatttctggtggggcagtagtttcgcatgatgcaggcatttcggcgcgtacgaccggcccgtcgccgatcataaatggacagacctattcagccccctccattcataccgattttaccagcggtaatatcacgacccagatgatgatgggctcccgggtagatgcaggcaagcaagattacggtctgctgtcctatcgcgactggcagggtaactggaacgaactgcgcgttcggtcaaatgccgaactggatgccgggcagtttaccaaacgcaattcagagggatggattaaagctgcaggtaaccgtaacgtcaacaatgataaagaccgtaaaaccaatgcgttatgggttcagggcgcgggggatttatccgcagacttatatcactatgagcgtattggtcagcatcatttcctcggcctgcatgttgctaatggcggcgcgcaggggtggtatgaattccgtaatgatggtcatgcctacactaatggtgcctggaatagcagctctgatgcacgtatgaaaactcaggtcgagaaaatcgataatgcgttagaaaagctcgattgtattagtggttacacctatctgaagcagggcgttaccgaagctggtgtaatcgctcaggaattggaagcagtgctaccacaggcggtttcaaagacggaacttacactcaatgacggcagtgtgttgaaggatgctcgtagcatcaatatcaatggagtcgtggcgcttttgattgaagcattgaaagaagagcaaaagttgagaattcgattagaggaaaaagtgacatatttggaaaaagtaatctctgagctgcggaattaa

SEQ ID NO: 90169 - DNA, 2079 bp, Enterobacter aerogenes
atgtcaactgaactcaaagggcctggagaaattgcgggtgagaacttggggggctccggtgcaaacttaaatgaacgacctgataattctactcctggaggcggttctaacggtactggtggtaatgacagtggcggctcatcttctggctatacagctgctcgccgacaaattgatgcagtagtaaacgacccagcagttaagagtaaattatcggcgattattaaaggtgccaaagcgatcaatcccaatgcacacctgtctattacagagttaactgagactggtactttaaaactcggcatcaccgatatttcggcagatcaggcctcggctcttgggctgggtaatattatcaccgtacatgctaataatgggtttatgtatactggcggaagtattgaaaccgggcatgtgctgggtaaaactccgcccgggattggcggaaccggtggtagcaacgatagtggaactatcgcagcacaaaacaaggtctcgccagatatttatctttcagtactgcaagggacaattccaaatggattttggctcagcaacgataaagtaatgacccgggtacgtgttgcttacatcataaatggtgggggtaagggtgacgaccgtactggttatcgggacaaggatgtggaagttccttcacttactgatgcctggaatactagcaagcagattaaggcggatattgaggaggctgcacgtcaggctgaagctgccaggaaagccgaggaggcaaggaaggctgaagaagcgcgtaaagctgaggaggcaagaaaagcggaggaagcacgtaaagctgaagaggcaaggaaggctgaagaagcacgaaaagctgaggaggcacgacaggctctttacaagaaagccggtattttaccgactccatcttactccccagaaaaggccgcggcaggcagtgctgcacttgcgaaagccggagttatggcccttaaccgtgcgcctgctgcattacagcttacatcggtagctggtggcgttatgactactgctagtgagctggccggttgggtagccagtgccttatggcgaggagctgttgccgtttccgacattgcagtggttagtccagttggggctatggtaggtgcatttgtagctggatttacaccaattccagtggggacaggtagcgatcgagtaccgggacgagatattgaaatgctggcagtgcaggcccgattgatggcggcaggtaaggttagtattgagccagggatgaccagtgtcaacttaccagtacgtagcttcattactactgacgatgatggtcgtcagtccgtacacatggttaaaactggtgtcggcggggtgtctgcagctgttccggtacttaatgcagtccgggatgaagctactggccttgatcgcattacggttccggcagtggaaggcgctccatctcgtaccattctgattaaccctgttccaagcgggccaacagtacctgccaataccggtaatacggggccagtgccaaagactcctgtacatacgggcacagatatccgacaagcagatagcatcgtaacaacgacctatccagctgcggaagatttggcgatacaggactttatctattggcagcctgacgcgcttgtaagtggagttgagcccatttatgttatgttggctagccctcgagacttgccaggcaaagtcaccggtaaaggggagcaggttggcgatggttggttagacaaagcaggtcaggaattaggctctccaattccaagccagattgctgacaaattacgtggtcgtgagttctcgaactttaattcgttccgcagagctttctggaagactgtttctgataccccagagctaagtgagcagtttgatcaagctagcttaggtagtattaagttaggaaagtcgtccttcgttcgcaaaagtgagcgtgttggagggaggctaaaacatgagttacatcacgtaaaagctattaaagatggtggtgatgtatttgatgttgataacttgcgggttatgactccaaaaagacatattgaagtacacaaaagtaatggtggtaaatga

SEQ ID NO: 90170 - DNA, 264 bp, Enterobacter aerogenes
atgatggacgataaaaaaagtatttctgattttaccgaagctgaatttttagctttcgtaaaaaagatatttaacccaaatactacaacggaagacgaagacgtacaaaacgtattggagtttgaacggcttactgagcaccctgatggttctgatgttatcttctatcctccaaaggaccgagaggatagtccagagggggttgtaaaggaagtaaaagaatggcgtgcaaaaaatggcaagccaggattcaaggatagctaa

SEQ ID NO: 90171 - DNA, 186 bp, Enterobacter aerogenes
atgtcaaagattctcactgatgaagagttaaatgctctcatcgaaaaagcgcaggcacactcagaagtgatgtctgaattaggttcagcacaggaagctgaagagtctgaacagatactaagcgcattatgtgaattgaagcgccacaggggaggcgcatctgatttggggattggcgaagcataa

SEQ ID NO: 90172 - DNA, 450 bp, Enterobacter aerogenes
gtgaagcaacaattccacctcatcaacgaaaacgttaaacagaacgctatcaacttcatccgcacgttaccggttgacctgaagcggccgctgattctcgatatcaaagagatgactcgcacactggatcagaaccgcaagatgtggcctctccttaaagatctgtctgaccaggttacctggttcgggaacaaatacgattcagacgactggaaagacctcataacggcgatggtagctaaggccaaaaaacaagaacaacgaatggcgcccggacttgatggcggcgttgtgatgtttggtcagcgtaccagcaagatgaccgttcgacagatggtagaggtcattgaggctatctactggttcggcacacagcagggcgtcaagttcagcgagaaatcccgtctcgaaattgaatgggcaaaagagtggggtgagcagcatggctaa

SEQ ID NO: 90173 - DNA, 366 bp, Enterobacter aerogenes
atggctaaccaataccggatctcattaccctggccaccgagcaacaatcgctactaccggcataaccgcgggcgcacgcatatcagcgcagaagggcaggcgtaccaagacagcgtcgcaagaatcatcaaagacgcaatgctggatatcggcctatcgacaccggtgaaaatccgtatcgagtgccacatgcctgaccggcgtcgccgtgacctggacaacctgcaaaaggcagcattcgacgccctgacgaaatctggtttctggctcgatgatcagcaggttgactactacagcgtgaagaggatgccaattgtcaaaggcggcaggcttgaactgaccatcaccgaactggaggccgcatga

SEQ ID NO: 90174 - DNA, 690 bp, Enterobacter aerogenes
atgaacagtcagcaactggaatacgtacgtcagcagctcattgtggcgaccgcagatctgagcggggcgacgaaagggcaactggtagctttcgctgagaacgcaatgtttgaagcgacggctcgcagcaataagcggatgaaggtagtcgacccggcgacagggagaatggtcaagccgagtaatcctccggttcccggcaagcagtcccgcgccaaaggctcagccatagccctggtgcagcccgttgagttttctactgccagctggcgccgcgctctcctgtcgctggaagaacatcagaaggcctggctgctctggaactacagcgacaatatccgctgggagcaccaggagacaatcacccggtgggcgtgggaacaattcagcgagaagctggccggcattcgcattgcaaagaaaacagttgatcgcctgcggcagcttatctggctggcagcgcaggatgtcaaagccgaactggcggggcgtgacacatacgaatatcaggaactggcggaactggttggcgtagcaaaatccacatggacggaaacctatctacctcattggctggctatgcgcagcaacttagttaggcttgataacgacgcgctcatatcgactacgcgatcacgttcacaacaaaaggcgacaaatttagatgcaagtcttgcaaaaccgaactga

SEQ ID NO: 90175 - DNA, 288 bp, Enterobacter aerogenes
atgaaacaggtaattttaacaacagtcttgctagtatcctcagcgagcggcttcgcttcagacgcagtcggaaaatacaaacaaggcgactgcataataggtaccgacccacattatagctggaatggccagatcgccgccgttgaagcatattctgaaatctcgggctttatcgggcctaaatacatccttaattttccaaaatacaaatctagtgctgtagtcttcgacaaggacatcgaagcgcactcaaccaaaattggagataatttctgtagaaatctttaa

SEQ ID NO: 90176 - DNA, 321 bp, Enterobacter aerogenes
atgcaacgtatgaacccaacaaatggacacgatctgccgtactggtggtcggcggccttgggtctgttctctttgcttagcctgcaggattacgtgtttattatcggcgcgctggtatcggcgttcttcacgataaaaacctattacgcaaaacggaaagaagagcgtgagcgtatggctgaggaaaggaaacgaacccaactgctggaaaactacttatctgatgtaggtaaaaaacctcactccgatcgtccggctgccgccgaggtggttacggaggcaatgcggagaatttccggtggcacagttgaaactgagtaa

SEQ ID NO: 90177 - DNA, 528 bp, Enterobacter aerogenes
gtggcacagttgaaactgagtaagaaaagcggcgcggcgggtattgtctgctccgtaggaacggtcatcgctattgttattaatgcgggccatgtcaggactaacgagcgcgggctagagttaatcggcaacgctgaatcttgccgacgtgatccgtatgtgtgcccggcaggtgtgctgactgacggtatgggtaatacgcatggcgtaaaactcggcaccgttaagtcagaccagcagatcgcagccgagtgggagcgcaacatccttgatgctgagtcctgcgttaaccgctacgggaatggacgcaagctgtctgacaatactttctcggcagctgtatcggtaacatttcgtgccggctgcggaaacatgcgcacttccacgatgttctctcttctccgaagtggggacatcacggcggcatgctaccagttcccgcgctgggtttatggcggcgggatcgtcctgcctggtctggtaacccgcgcaggcaaagaagaagccctctgtctggatggtttatga

SEQ ID NO: 90178 - DNA, 600 bp, Enterobacter aerogenes
atgcgttttttaaaaaggaccgcctggccttgcataaccgtaataatcgcctgcacatcatgggttctcgtcaatggcgacaaagtggtcgataacgtgcatgcctttcaggaatggtacggaacctctaaagcgttagagggtagatggaacaactctactgagttcgatattgatcctccggaatggctaacaaaacaagaggaccttgttgaagttcgtattacgctgaaaaactcagttattgacgggacaattacttcaggaaagctaaagagcgtattcccatacgactatgtcctcctgactggcaagaaaaggggcttccgcgacaccttagacgcttacgcgtttgactatatacttggaaaaaaaatccacttcggctcttttgtactcagtcgtgaaggggagcgtttacatgtggaggcagataaaatcgcacaaaggttttttccaaaggaatccatccttttgaaggtatctgacaacgcttttcccaacctaaaaatagataaatcagatgatgtggaaagagagacaaacgagaacccaccaataaggggagtttctcgaaatcatatagatagcaatcagtaa

SEQ ID NO: 90179 - DNA, 462 bp, Enterobacter aerogenes
atgagtcgcgttactgcaataatctgtgccgtcgtgatctgtttgctggtatcactgggctttctggcaaaccactaccacaccacctcgacagaattcaaaaggcagcgtgacgaaaagacgcaggcgctggagttggcgaacaccaccatcaaagacatgcagacccgccagcgagatgtcgctgcactggatgccaaatacaccggagaactggctgatgccaaagctactatcgatcagcttgagcgtgatgttgcttctggcaagcgtcggttgcagctcaacgcaaaatgtcccgcatacggagcggccggcgccggcggcatgggcgatgcttccagcccccgacttgctgacgccgctgaacgggattatttcaccctcagagagcgaatcgtcacagtgacgaagcaggttgattatctgcaggactacatcaaagagcagtgcttaaaataa

SEQ ID NO: 90180 - DNA, 546 bp, Enterobacter aerogenes
atgacaaatcaaactgtcaatgtttacggtgtatccgtccgggtagactcagccggtagatacaaccttaacgatctgcatgcagcagccgttgctaatggtgaagctacagagtcgcaaaggcctaacaaatttattcgaaatgcatctgtaaagcgttttgtttccgcgcttgacgccagaggacaaaaatgtcgtctggaaggaaatcaagcacttaatatcgtcaatggtggtgttggtcaaggagtttgggctaatgaattgctggcgattcgatatgccgcatggataaaaccagagtttgaaatccgcgtttatgaaaccttccgagaggctgtgcttaacgggcttagcaatatgaaccgactaaaccgcctcgacatgctgattaccaatgagaccaaagaagtaagcgaatgcgcccgggcaatgaataggtggggagtaggcggccgcaagaagcttctcaactgcgcgcgtgagagaattgtaagtcagatggatcctgacatggtcacgctgatggaagcaaaggccgggtag

SEQ ID NO: 90181 - DNA, 246 bp, Enterobacter aerogenes
atgtcagaaattacacctgcagaacaaatccgcctgactatcatcaagaaagttaattacgacaccgccgcggcgaagctggccattgactgggttggcgatagcaatctcaaagctgagctgttcgcagactctttcgatcgtgtttacacggaaagtgagattgtctctaaaacccgtaaggcgattcaggaagcgaccgaagcgctggcgctgtttgataccgctactgagcagtccagttaa

SEQ ID NO: 90182 - DNA, 267 bp, Enterobacter aerogenes
atgatgcgattcatatcgaacacctttgaaggtggtattatcaagttggatggcgcgcattatgaaaactgtattttcaaaaattgcgatatccgctttggtgggacagcgccatttggattggtagggtgcaggtttgactcatgcagatggacattagaaggaccagcgtcaaatacaatcgagtttttgcgattaatgtacaaagatatgggggattttggtaaacaaatggttgaggccactttcgagaacatcaaaaagtaa

SEQ ID NO: 90183 - DNA, 330 bp, Enterobacter aerogenes
atgaagaatattaacgattgtaggccataccctccggttaacttcatcggctccgataactggcagccatacacccgactcattcccgccaacgaagtgcatgagtgggttaacaggcaaatactcatcgacaccgtaagcatctataacccagaccatgggcaccttctcgatgctgatctctgcttcatgtgggcgtcagactctttcgcgaagaaagggcgatacgttctcggtcaggccgaacaggtaatgcttcgcgccggatgcctgtttaagaatgagtacgtgcctgaagcaattacacgccgccaatctgaccaagaatag

SEQ ID NO: 90184 - DNA, 252 bp, Enterobacter aerogenes
atgttcgaatggatactagaaaaacatgtaatttctttgggctgtggttttttgtctgttgtcttttggttgatttctgtttttgtgaaggccaaggaaaaccctagcgttgttaaattaacaatgggcaaaggagaaaaagcagtagatctgcataatttggttttaactttgcagcttcaaaccaaattcaatgggttggccgcgtttttcgctgccctcgctattcttggtcagattggcggcgtgtaa

SEQ ID NO: 90185 - DNA, 516 bp, Enterobacter aerogenes
atggcactcaccgacaagcaagaaatgttctgtcgcgagtaccttatcgatttaaacgccacgcaagcggctattcgggcggggtacagcgcaaagacagctaaccgcaccgcgtccgaaaacctgtcaaaacctgtcatccagtcaaggattgctgaacttaaagcgcaacgcaatgatctggttggtataaatgcgacatacgtcctgaatcgtctcgttgagatagaccagatggacgtgctcgacatcctgacctcgaccggagagctaaagccagtttctcagtggccgaaggtatggaggacgacgctatccgggctggatgtcgtcgagatggctgcagaaggaaacaccgccgcgctacttaaaaagattaagtggcctgataaggtgaagaacctcgagctgattggtaagcatatagacgttcaagcattccgcgagcaagtgaaaacagagcacgttgttgagtcaatttctgacctgatggattcattgtctcagggggcgtaa

SEQ ID NO: 90186 - DNA, 1476 bp, Enterobacter aerogenes
atgaaacctgagcacctcaagctgctgtccgacaaagactggcggctgaacaatctttactggatcaccgacaaagagggtaagcctactcgcttcaggatgacgcctgagcagcgggaatatttcgaggggatccacacccgcaacattattctgaaagctcgtcagctcggcttcaccaccgaggtgtgcatcatccagctcgacgcggctctgtttgagtcggcaaagtgtgcattgattgcccacacactgaatgatgcaaagcgtctgtttcgggaaaaggtgaagtatgcatacgacaagttgccggcggagataaaggcggctaacccggccagcaacgattcgtctggcgaactcgtttttaagaaaggcggctcgctatacgtcagcacgtcgtttcgtggcggtacactgcgctacctgcacgtttccgagttcgggaagatatgcgccaagtatcctgacaaagcccgtgaaatcgtcacaggtgcgtttgaggcggtgtcgacaggctgctttgctactatcgagagcacggcggaaggccgggcgggttacttcttcgattactgccagacggcagagaaagccttactgcagggcaagccattgtccgcgctcgactggaagtttttcttcttctcatggtggaagaatccgcagtacgcaattgatccggtagagccgctacctcagcgcttagttgaatacttcgccgagatggaggcgaaacacggcgtagtcgttaacgaacggcagaaggcgtggtattacgccaaagaaaagacgctcggcgacgacatgaagcgcgaatacccgaccataccggcggaggctttccagcagtcggtcgagggcgcgtactacgccaaacagttccgctggctctacaccaacaagcggatcggcaaaatccccgataactcacatctaccggttcacacgttctgggatattggtgtgggcgactccacggctatctggtttgttcgcgaagttggtgaggagtttcacatcatcgactactacgaaaactctggtgaaggtcttcggcactacatgaaggtgctgaaagaccgcggctatgaatacggtgagcactggggcccgcacgacatcgataatcgtgaatttggtgcagacgcaaaatcgcggagggaactcgcccaggaagggtatgagatcgacggtcaggtttacagcatgacatttcaggtggtaccaaaagtcggtgtcgataccggcattgagtcggtgcgtgaaatcctcccatcctgtgttttcgatgaagagaaatgcgctgagggcatatctcaccttgagggttatcgcaaggagtgggatgacaagcgaggatgctggaaagataaacctcttcacgacttcacatcacacggcgccgacgggttccgctacttcgcagtagcgaaaaacaaccacaaacaagtcggtgcaattttcttcacctaa

SEQ ID NO: 90187 - DNA, 1467 bp, Enterobacter aerogenes
gtgagtaacgataacgaaatgcaaatcctcgctgggctcatagtgaatagccttaacgaggtgggccgtgcgcgccagttgtatgcttcagggctaggaaagtcagggaacacgaaacgacatcatctatggtgcgaatttggttacccggagcgtctcgattttgaccacttctacaacatgtatgagcgtaatggcgctgcgtttggcgcggtacataaactgctcgatgcatgctggactgacacgccggtgatcgtagacggcgatgagaccaagaaatcgaaaaagtcgacgccttgggagaaaaaagtcaccaagctaatgaagaaacactgggctaaggtgaaggatgcagaccggcgaaatctggtaggtcattactccgccctgattcttcagtttgcagacagtaaggagtggtgggagcccgtcggtcgcagcgtgatgcgtaattctcgcgagcgtggcctggtcaaaatgattcctgcatgggaggcacaagttaagcccggggaacttgaacaggaccagaaatcgccagactacggcatgccgaagttctattacttccaggagcaacaagtcggggacaatggcaacatttccggtccgatgcggtcgattaagatccacccggaaaggatcatcatcttttgcgaagggtcagaagacgagtcatcgctggctggcattcctttcctgcgagctggttacaacgacctgcttgatatggcgaaaacttccggcgggagtgcggaaggtttcctgaagaacgccagcagacagctcggcattaacatgtcgaaggaaacaaacctcaagaccatcattgatgaagcaaagaaagccggttactcaggactggcagaagcgctaaatgctgccatacagaagctgaactctggtacagattcagcactggtgactcaggatggtgaagccaaagtgttgtcggtggcggcagcggatccgagtccgacatggactgtgttagcaaatcagttttcctcttcagtccagatgccattcaccattctctttggtcaacagacagggaggcttgcgtcagatcaggacaaaaacgactttgctaagcgctgcaacggtcgtcgcgcaggcttccagactgaccgtgcgaccgcggtaattgagcggctgtggacagtagaagtcatcgagcctccaaaatctggcgaaataactttaacctggtctgacttacttgcaccaagtgagaaagaaaagattgccaacatgaaggaaatggcggttgtcgctagggatacgcagcaagcctacggaacaccggctgtcgatgagaatgaggtcagggaagcgggagagttagagccgcgcgaagaagtgataactcctgacccaaaccaaaaggtaactaccgatgatcctctttccgatgaatccggagcaaaaggcgaaagtcggtacgccagtagtgccgcgtag

SEQ ID NO: 90188 - DNA, 981 bp, Enterobacter aerogenes
atgaatccggagcaaaaggcgaaagtcggtacgccagtagtgccgcgtagcaaggttgacccgacacgctccgcaaagcaggttaccgcgatgttccgggatatcgagagtaggtatctcggcatcaagcgagcgctgaaagcattgttcgaccagcgcctgaccgggcgagagcgtgaggtaaaccgccatgactggcacttcctttgccatgaccacggcgaggacatgcgactctaccaggtcaacgccggcaagttcatctacgacatgtcggcgcaggaactggcggacctgctggaagcggtgcaggtcattctcgacgattacctgctggatggtggcgagcaaaatctctgggcgatggattacgtcgttgcagaggcgcagcgcggcacactggaggctttcaataacctctcgcagcagtcgcaggtctacgccagccagacgacgctacagcagcttttaaacagccccggttatctgaaccagatagcggcggcaagactgacaacgttcagtgactggaaggtcatcagcgataccgcccgcggcgacctagccaacatcattaccgatgcggtggcccgcggagtaaacccacgcgagacggccagcgttatcagcaagcgcctcgatgtgtcgatgtcgaaggcaaaaaccatcgctcagactgagcaggtcggtgcgctgcggcaggcgcaatggaacgagacggactgggctgctgaccgtttaggtctgaatactggcctgctctggctatcggcgctcaagccaacgacgcgaacctggcacgcaagccgccacggaaaggtctacaccaccgagcaggtgcgagacttctacgccgagaatggtaaccggtacaactgctactgcagccagattccggtgctgctcaatgacgacggtagcatattcaacaaagggttggctgagaagctggcgaaagagcgtgagcagtggcaatcttga

SEQ ID NO: 90189 - DNA, 426 bp, Enterobacter aerogenes
atggaaaaccaagtagaaaaagaactgtcagaagttgtctcacacggtattgttgatgcatcaatcatgcacttagttctctgcgctaatttcggagtgagtgttgaagttacaatcgtgactggtgggcaagtcatagctggagagttggtgtcgggaaaagtttatgctgagaaaactgcagctaactatcgcaatgctaacgctgcagaagaatataaagagttgcttgcaaagttcttcgatgatctagcgcttgattatagcgcagaggatggcaataaaatcccgctaaattatctgcacattaagaatcctgcgtacctgaaaggtgatggtaattggttaactatcaatgacgcaatccttagggttgccattagtaaggttgacggcttttctcctggtaagccaaaaaccatttaa

SEQ ID NO: 90190 - DNA, 1194 bp, Enterobacter aerogenes
atgaaacgcaaccgcgttaacgtgctgaccgtcgtcaactccgcttcaaacattaccactgaaaccatcgacggcaagccacatatcgtggttcgcggcattacgcctgtcgtggacgatatcgtgatgaaccggaagttgtacccggcagcagaaatcgaaaaggcctacaacacgcttgagcgcaacccgatgccgctgggccaccccaaagtggacggtaagcacgtgtcggcgcgcgatgtccgggcggtgaacgaataccacgttggcgcatggctgcagaacgtcagccacaaagacggaaaggtgactggcgacatgtacgttaaccgccagtacgccgaatccagcgagaagggcaagcgcctgattaaccgcttggacgagatgctagcgggcaccaattccgagccgatccacatctccactggcctgctgtattcaggcatcgccgccaacggcgaatctaagggcaagaagtacaacgagatcgccaccaacatgatgtttgaccatgtggcggtattgctcgacgagccgggtgccggaacgccggaggagggcgtggggatcttcgttaacgccgagggtgacgaagtcgaaatcgaggtcgtaaacctcgaagagtccactaccccagaccagcaagaccccgcattcaaaacatttttcaaccagctaaaggcgtttttcggcgccaacagcgattcaacccagaaggaaacagacccgatgaaagagctcatcgttaatgcgctgaaggccaaaggtaaatcggttgacgataaaaccgatgccgaactgatggacgcatacaaccagatgctggcagaaaacgccgacagcaaagaagaaacgccagaagagaaggccgcccgtgaaaagaaagaggcggatgacaagaaggctaaagaacaggccactaataacgaagagatgccagcctgggcgcagaaactcgccgatcgcgtggacgtcgttttcaacagcctgaacgcgaacgccgacaaagagaaaggcgaaaagcgcgcagctgtgaagctggcgatgaacatgagcgatgaagaagtcgcagatctggacggcaaggcgctcgacgctatgtatgccaagtgccagacatctttcggcctgaacggtgcattccgccaggcaaccaacactcaatcagtcagcgaaatgccggagtaa

SEQ ID NO: 90191 - DNA, 441 bp, Enterobacter aerogenes
atggctaaagacggaaaacacgtaattcacgcgggcggtatcttcgcgaacccacagcttcaccgtgaaggtgctgcagccgctgatacgcctcccggtacgattggtttcttcgacaacaccacgaagaaattcaccgcctccgtggatggcaatgaagctgcgattctctacgtagccaactatgactatctgcgttgcaaaaccgtagatgacgttatcaaggctggcgactgggttgttgctttccacccaactccaggcgttttcttcaacgttcccgctgccgcaggcacttacacaaaagggcagccactctctgtggccaatggtcgcgttaaagctgtcggcactgatgagtcagtccgctgctacgtagaagaagaccgtccgtataccattgcaacggcaggtgacctcctgcgcgtggtcattaaataa

SEQ ID NO: 90192 - DNA, 1077 bp, Enterobacter aerogenes
atgtttgtattctccactaaacaggccaccgaaaccgggaacctcgaggttaactcctctcaattcaaaaaactctcagccgcgcgcaatgccagtgctcaggctgcggcagactttattgcgcgcactaaatggcgtggcgatgcagaagatacaccagagctgaatgcggtaaacgcagtcgacgatatccgccgtctgtacaaagcctacgaccagaccgtgctgaagcaattcgaaccgaacaccgaattcacactgctgaacgacttgatgccgctttctcgctctgttcgcctggaagagtctgtgtacgaatacgctcgcaccggcggccgtggctgggcgcacacttccatgtccggtcagattggtgctgcgctggatgcgaagtcctacaccttcgatggcaccatggtaccaatccacgacagcggctttaagttcaactggcgtgatccggtatttaataaaggctctgcgctctcatccctggccgatgctcaggcaggttctgtcgatgacgtacgccgccagtatgtcgactacatctgggaaggcttccgtgacgcagacggtaactacatcaaattcgatgacaagacctggaagggtttacgtcacgatgagcgtgtggcccaggtgacactgactgttaacttcgcaaccagcaccgacccgaaagccatgcgtgccgcggcgatcgccctgcgtgacgtcctcaagctgcaaaacatgcagtacggccagcagacgtggtacgtctccagcgaaatcatgtccaactgggaacagtatttcgatgtgaactcgctccgcactgtgctggaagagatctccaaactgtcaggcatcgcggcaatcaaagaagatgctgagctgaccggaaacgaaatcgtaatcgtaccgctgcaggctggcgtgattgctcctatcgtcggtcaggcgttcggcaccgtcgccgatccgcgtcagttctacaactcagattacgtttggcgtacctggggagctgccggcctgatggtcaagcaggacatcaacggccactactctgttattcacgcttcgagctaa

SEQ ID NO: 90193 - DNA, 402 bp, Enterobacter aerogenes
atggcattcgtaaaggtattggtagcaaacctctttgccggtgccagccttcaaaagctggaggctggacaggtttatgacgtcgatgactcgatagctgaaaagtggatcgagcagggtaaggcggaaaaatcaactgacaagaagggggagaagctcgtctttgaagtggcgacaccgtctgcgcctgtggcatccggtgcatctgatttgcagtcaaaactcaatgacacccttgagcagttgaagcaggcgaagtcagacgctgatgcaaaagacaaagagcatgctgacgccattgagcagctgaagcaggtgcatgcggctgagctggaatcggcgaacaaacgcgctgaagaggcagaagccgcactggcggaagcaaccaagaaggcgaaataa

SEQ ID NO: 90194 - DNA, 381 bp, Enterobacter aerogenes
atggctgacccaatcacagcggcagacgtgcaggcgttcctcggtgaattgggttattccattcccggcgcgctgctgaatccgattctctgcgtggtgaacaagattatcccgtgcctcgatggtgcgggatatgacgactgcacggcaaagctcatcctgatgtatgccactgcgctcatggcgacgtcttccggtgcccggcgaataaaatcgcagggggcgccgtccggggcatcgcgttcgttcgattacggtgctgacagcatcacctggttgcgcgactcactggcccagcttgataccagtggctgcactgatgaactccccatcagtgccgttaatagcgtcggcctgtttatggtcgttggtggttgctga

SEQ ID NO: 90195 - DNA, 348 bp, Enterobacter aerogenes
atgtcggcaaccgcgaactggagctataccgctacggctaccatctggcgcaagctcggcaatgatgagtacggtgattcgctcgggttctcgcctcctgaggcgattctctgtgattacgaaggtggtctttctaagagcatcggtagtcttggtgctgaaatcgtcgtgaagaataccgtctggtctgagtatgcactggcagcggcaggtgattaccttctgattggcgcatcgaccgaagccgatccgattgtcgccggggcagacgaggtacggcaggttatccgttacgccgacacattcgaacgactggcggatgattacgccattctgacgggagtgtaa

SEQ ID NO: 90196 - DNA, 441 bp, Enterobacter aerogenes
atgggtgtaaaggttcgtggtgtaagggaagctaaggccaatctcaaccgcatcattgacaatattcaggggcgaaaggttgtacgtgctattcagtctgcgctgattttaggcagcagcagggcggcgtattacacgccaattgactcatctacactcctgaatagtcagttccgggaaattaacgttaacggcacaagagttactggaagggttgggtactctgcaaattacgctgcatttgtgcatgatatgccaggcaagctaaaaggccagccgagagcccatttcggtaagacgagagccggtagtgaatttggtggtggtactggaaagggaaactattgggatccgcatggcgagcctcaattccttaagaagggattcgatgaagagcgtgatgcgattgatgctgttatcaagaaggagttatccctgtga

SEQ ID NO: 90197 - DNA, 390 bp, Enterobacter aerogenes
gtgaaccccccgatgcataagcgcgttcgtaacttcctcgttgatgccggcttaacctccgggtacaccgttcagtcactgacatggacagataccggaaaactggcggagcgattcatcgtattccggcccaacggtggtacggcagtagaccgcgatatggctgctgattattacgtcctggtggatgtcataactggtaagtctgccggcgactacgcgaaatcagagaccgatgtgcaagccatcatcgactacgtcaagcagaaccctatgacaaatgcctgcatcgggcagatatctaaccttggcggaaccccatcaccggtaatgactgcagaagggcgaatggtgtggcgcttacagttcgcctgtctctttggcggataa

SEQ ID NO: 90198 - DNA, 753 bp, Enterobacter aerogenes
atgcaaggctgctccaataacgaacaactaatcggtcgcgcgaagacgcttgaattggcgtatggatgtgctgaccaggtgccggcggagggcgactggaaattacttggtcttccgacttcggcgacgtgggatatgagcccggaggcattaacctcggatgcagataatggcggtttcagttcaaacctgatcgccagtcttgatccaacgtactcaatcgaaggcgaggtccgtgtcaaagatcgtaccgatgaatttggcattcagcaattcgtgaaatatatcgctgatgaagttcgcgcccgtcgtcaacctgcggtctggatgcgttttcactggggggattacttccatattggctacatggtcccgactggcgccagtgatggtggtggcgtgaaggagattgttacctacagctttgagttcaaactggctgacggcaacacgttccagatcaccgaagcggacgaaggcattccggtaactggcgtgacggttgcgccaacgaccagctctattgccgccggagaaagcaccaccttcgaagtaacgattgcgccagcagatgctgacgacaaggtcttcacggttacttcatctgttccagcgcgcgcgacagtagcatttgctggcaatacggtcaccgtatccgcgccatctggtgctactgctggcaccgcagtaatcactgtgaagacggatgatggcgggtttaccgcaacgcatacggtaaccgttacggtgtaa

SEQ ID NO: 90199 - DNA, 699 bp, Enterobacter aerogenes
atgacgcctgttaaagagtttggcgagtgcctgattacttccggggataaggaatatttctttcgcccgtcactgctggccatgacgagaatcggagagccggcagagattgttcagacgttttatgacctatgtaacgatgaggcgacaccgttaattcaacaggctgctcaggtgtatatccgcgatgagtacagccgcctgcctgattgcgttctgagatatatccagagcgggcttctgagccgtaaagcagttatggccgcccatgccgttctgactgcgtgctgcgatgacgatatcggggaactggtcggatggatgaagccgggtaaatcacgcaagcggggatttatgtggcgttctgggacgatgccggcgcccgaaatgatcatcgttgctcaaaatctgatgatgcatggaatcattggcaaggcaaaggtgagaaaactccagcgccatgagactagcgatacaaccaatgaattcagagcatctgagtatatcgtcgcagcgcgcaatcacttcggcataagcaaggaggaagcatggcaactcactatgaccgagtttcagctaatgctcatcgctaaataccctgaacagaaagggtacacccgcgaagagtacgatcacgcagcagatgactactttgcgcggcgcaagcgtaggaaagtgatgatggagaaagagtcttag

SEQ ID NO: 90200 - DNA, 210 bp, Enterobacter aerogenes
atgtttagtttctcgaacaaacggaaggcaactactggagctgaaagccccgtagagcgcttaacaaacatccttgtcgacaaccaggaccgactcacgattgatcgcgatggcgtaatcagcttaaacctcgaaaacgataaggttcgcaaagagatgaagcgccagtttcagtttcttgcgagagttgaaccctctaaggcaaggtga

SEQ ID NO: 90201 - DNA, 840 bp, Enterobacter aerogenes
atggggacactgttactatccgctatcctcgttagtggttacatttttactattacatcagtatctacgagatacaaatttaagcgctccgatggttggggcgcttatttttatgtggcgacgtgggggaccgggttttgtatcctgagctggatgttatgctcgataatgggatttgtgggcttcattgatttctctgccaaagtagtgggaatgaacaaggaaaatgtcaaattacttatcccgctatctgcagatgctgtagctacaggaaagagcttaaagatagctctatggctagttggaactgttgcactttccacaatttgtggactgctaaacaaggcctggcacggctggggtaataacagatttaaagctcttgcaaaggctgcaaggaaccatcctcttgaaacattggcaatcgaggcttctgctactttagctccagtaatttttactttgaaatcgaagaaattttatgtcggttgggttattcgcccccccttggagcatgggaagattgagcacatggctttcatcccactgctcagcggttatagggataaagacacgctaaaaattgtcgtcacgacaaactatataactcattatgaaagtatcggcttatatggtgatgtcttgggtgtggatggccctccaagggttaagagcaatctaacctttgatgacttcagggtcgtatgcccagtttcagaaatagaaaacctttccttttttgatttcgagacttacaacaactttaaggcgcaggaagagaaagagcagaacaatccacggagattacggactaaagttgcaaggcataagcattcataa

SEQ ID NO: 90202 - DNA, 474 bp, Enterobacter aerogenes
atggataagtttgaccgcaacatccagcgggagctactccagcacctctgcgacatctacccagactctgccgatagcagtttctcagggaagtttaccgaaaaatttggaagcattaatatctttactgctaacttactctatcttgctggtcacggactcattgaagtaagacttagcaatgaaataggccgacgactgccatctgtaatggactctttcacgaaaatcaccagcaaaggcatagatttcattcgcgatgacggcggtttgggcgcaattctgaacgtacaaaccattaagtttcaccgggatgcggtgatcgtcatcgaagacctgatcgccatttcaaacatgaacgacgaacagaaggaaaaagccaagtcgactctcggcgaaatgtcgacggaagcccttaaaactgtggtacaagctgcgactaccgccgggttatccgtgctatttggaaaatga

SEQ ID NO: 90203 - DNA, 330 bp, Enterobacter aerogenes
atgaaaaaagtagcgctggcattaattgcaattgtttcttttggtgcttttgcatctgaagtaatgaaaattccctcagatccaaaaggtacatataccattcttgaaaaagatatgaatggcaacatggccactatcgtcaccaaaagagaggggcctgcgggaactacttactctaagcgcctctatgattgttcatcatggacggttaaatatttagggactggagagtcgttagagcaaatgaactcctcagaggcggataaagggatgtcaccgattggtgatgagacaatagcttattatgtcgggcgaagagcctgcaattaa

SEQ ID NO: 90204 - DNA, 2649 bp, Enterobacter aerogenes
atgtcagagaaagcaggtgaaatttattatgacatagaggctgatgtttctggtctgattcaggcgcagcagcaagttaataaacgcctcgatcagatggatgccaaattcgagcaatcatcgagatctgttgggagattcgaaggcgcgctcaacaaagtcggtgttgcaatagctgccgcttttacgattgatgccgcgaaaagactgattgccattggcgacgaaatggtcactctccaagcgcgcattacacgattgagcccaagcattgatgtagcaaaagaaacattagcggctctttctgctatagcgtcacaaacgggtaatagcctgtcagagacggagcgcctttgggagtcgttaactacagcattaaaagaaacaggcgcaacaaattcccagattttggggctaacctcaactttgcagaagatcggaaccataggtgcgtcttcgacagaggaaatggcgaatgctttaaggcaatttggacagtcaatctctggcggtatcgttcgcgcggaagagttcaactctattcttgaacaaatgcctgaacttgcaaggcagattgctaccggacttggcatttccataggggatcttcgcaagagaatgctggagggcaagctcacagcacaggatgctttgaatgccattcagaagcagtctcaatcggtaaatgaagagtttgacaagatgccggtcagtattgaccgtgcaaaaaacagtcttgatgtagcgtttaaaaatgccataaatgacctgaaccaagctattggattgacgtcaacactggccggcttgatgcagacagttgcagacaaccttaattactacaataacaacgttggtgattcttccagaatgccaaagttgattaagttacagcaagaactgaatggcgaattaaaggacagtcagcgctggtatgagtctgattctgtcttccaggctcgtcgtgctcaagcagctgtgcagcttaaacaaattgaaggagaaattgcgcatattcgagcgaaagcgaagaatgacgctagcaataaccagttcaatgctccaccgacaaaaggtgatgatgctgcaacgaaaaagcttgtgcagaattccgagcgccgactcgctcttgccaaactagagggagaggccagagctcgtctgcaagctcaatatgatgccgccgatgccggggtgactgaccagaagcggattaaagcccttcaggatgagtatgctgaaacctaccgagtcacagaggccagaaaggaaagcaataaggcaggtaagcagtcagaaactcaggctgattcgattgcgcagaaattagcgagcttgaaacaggagtccgcacttgccgcagactctacagctgagttaagccgtgaacaggcgatcctcaatgctcagctttcgcttggcaaaggcgctacgcaggaacaaatagcgctggctgggcagtatgctgctaaaaagtgggatacggccaacgctatcaaggcgcaagtcgcggctgagaaacttctccctgaagcgcgcgagaatgcaagttacaagcaggatgtgcaggatttaaatactgcactggccgcgaagaaaatcagccaggagcaatacaacgagacctccgagagactggaggcaactcaccaggccaaccttgcgaaaatccgcgcgcaacaggctgtcactccgcagcagcaggcagctggcgatgtggatccggtgcagaacctggcaaaccagcatgcccaacagttagcactaatccagcaatacgagcaacagggggttatcgcccataatcaggccttagcactaaaaaaagccgctgatactcagtatgagcaggaacgaacggatgctatgtggtcattgttcacgcaacagagcgtagggtatcaggctcttggcgcagcggtggacgctttcggcaatcaggcttccaatgcattaaccggtatcatcactggcagcatgtcagcctcagatgcattgcagtctatcggtaacaccattctcaacgacgtaattaatacgttcgtgcaaatgggcatccagcaagcaaagtcagcaataatgggtgcaagtgtacagcaagctaccatcgcggctacaacggcaacccaagtgggcgccattgccacaacgacagcagcaagtacagcatctgcagggactacattagcggcatggcttccggctgcattggttgcctcggtaggttcgtttggtgctgcagctatcattggtggagctgcgctggttggtgcttttgctctgtcaaaaaccctcgctggcggaaggaagaatggtggtccggtatcggcgggctcaatgtaccaggtaggtgagggcggtatgcctgaaatctaccgcgccagtaatggcagtcagtacatgatcccgggtgataacggctctgtcatcagcaataaggatttgcatggcagtggcggcggcgcgctgcaggtcgtgaacaacgtttacaactatgcaaatggcgtcaatgtcgatacccgtagcagccagaacggcggccaactggttatcgagacctttatcaccgatatgcagaacggcggcccgatgtcctctcagatgcaggacacatttggccttcgccggcaggccaatggcgattactaa

SEQ ID NO: 90205 - DNA, 477 bp, Enterobacter aerogenes
gtggcaacagtttcatacccggaattcctaccccttccgcagcgtcccagccaaaatatgacgcaggataccggctggcagacaacgcagccggcagtcggccctgtcatatttaccccgttcaccactgacctcaaagctacctggacgctgcagtggatatttacgctgcagcaggccgaacggtttaagtcatggctgcggtcgccaacgtactgtgaccgcgggcgtaactggttcacgatgccaattgaccttggcgacacatacggaccgcagttgcagacgcttcacttcgtcaatatgccggtgcaaaccagtaagaatggcggggtggtgacctggaccgccacggttatctgtaatggtattgatgacctgactgaagacttcgatgactggattgttcaggcaccggagaactacgggtcatggcttgattatctcgtcactgatgtgatgccgaggactgactga

SEQ ID NO: 90206 - DNA, 471 bp, Enterobacter aerogenes
atgccaacattacgagaatggaaagagcggcggccggcgagtgatatcaaacagaccattgagttttatcacccggcatttggttattaccgtgtggttaacaaactttttcaggaggcgacgttcggtggaaacctctatcaacccgcggcgtttgatatcaccgaaccgacacagaacgggtcagccatcatcacgatggggatcaccttcctgcagggtgctgaagaggtcagaaacacgctaaaaacgtggactggtgccgcccggatgacggctatcacgtgtaagtaccaacagtggaatgcaatcggtgatgcttcgccgatgaagacctggtcactgttcgtgaaggatgtcggtgccgatggcacaaacgtcacggtgaattctggtaagacgaatcctctgacgctggccaatcccattatttacaccacgaaagactatcccggactgattaccgtatga

SEQ ID NO: 90207 - DNA, 396 bp, Enterobacter aerogenes
atgacgcagagcgaatttatccggcttgtgaatggcaagccgtgggttaaccgtgcctgttgttttgagcagatggattgctgggggctggtggtgctgtattaccggcatgtgctcggtctggagctgcatcatatccccggctacgaatcgggcgccgacttcatcacctgctactcagcggaatcagctcactggcgagcggtgccggtagcgtcgtctggctgcctggccgtgttttattacgctgatcgtcctgttcacgtgggcgtaatgctggatccggttaaatgcctgcattcccgcggtgagttcggttttgtacgcgctgacagcatggttatcctggcgaagaaattcaacaaagtggagtatctggttcatggttcgatatga

SEQ ID NO: 90208 - DNA, 2484 bp, Enterobacter aerogenes
atggttcgatatgagctgcagcgtctgcctggcgcgccgaaacagtatggaacgacggcgccgggtactgagttgatagcattactggactcactcaggctgcataataatgtgaaggttcgcctgaatggacgtgagcttaatgatgattttgatttgtcgtttaagctgcgcgccggcgacgtcgtagcagtattcgatcagcctgaaagcggcggtctgataaagacacttctgaacccggtggagcatctcaacccgatccgcttcactaaaaaagtaatgtcagggctaaccgggcaacagaccgcatcatctccgtccatttctactggtgaatccccgaataacgacgccaccgggcagactaaccgcgcgcggctttacaagggaaggccgaatatttatggccagtgccgggtatatccggatttgattcagcaggcgctgtttgagtacatcgacaacaacaaatacatcactgaatggttcgaagtgggattcgggaaatacaccatttcttctgtgcgctattcagagtcgaatctggggagtctagcaggggccagttaccagattttcgaccctggcgcgacgataggcaccattgatgttggctaccagtttgatgatgtcgataacgaagaagtgcctgggttgaatgaaagcgaggattttcccgcccagacagcgacgacgacagcgccaacagccatgctgatcgaaagcaaccagctgaaagccacagtgttgtcgaatgacgataacttttcatacttcgcggcgcttgccgttccgcatccggtgactttcgttatcaacgcgacatggaacgccggcggcggcccggtgacaagggatgttaccggcagcggaaatatcgtctactcagaaagttatatcggggaggatacgcagtcttacaccacgttctatcttggcgatatgaccggggagatcacgacgctaccgtctgacaccacgctgaacctgacacttttcaccctcaacgaccagacgccgctggttataggcccatcggtatcaccgcttgaatccacacagatttgggtgcatgtcatggttcaactgggggcgacttcgggcacttcccgttatcgaatccggttctggaaagtggatgacaacaacaaccagatcccgggcacagctgaacagtacgattatttctttgataacgattttcaggttaccacgcgttatttccgcacaacgcataaattctcacccgccgccggtacaggtcgatatgcggtgacgatcgagcgactggataacagcaatgatggaaatgtcgtgacgttaatggcaattcacgccgtcaacacccgtgccaatgttgtttacccggatgacacgattgccagagtgactatcaaagggagtaacaacagcaacagtaaccgcgagcagaaatacaacatgctcgcgcatcgccacaccatcagctatgaccggacgaccggccagattgattacacgctacgtccaagccgttcatttgctgacgccgcactgcatgaatgggtggttatcggtaagcaggatgttagcagtatcgatgttgcgacgctgtacgcgattgccgactcgatatctgtgccagagcttggctatttcgattacaccttttcagatgagaagctgtcgctcggagagcggatccggactatttgcaatgcagcgagggtggatgggaataacatcggtgatgtgctgacgttctggcgcgatgaaaaggtcacctatcctgatgcggtgtttgcgcgctcaaacatgttctttgatgaatataaggtttcatggcagatgtcgctgccgggaggatatgacggtgtcacggtcgattatgttgacccgctcaccaataagaaatcctatgtttatctgcagatagatgccagcggcattcgggaagtcgaagacgcaacggttaacgccagccagattagcctggacggttgtcgtaatcgcacccaggcggttgaccgggcatggcttgaggctcaacgccttctgtattcacgaatgagcatgacggtcaaagtgctggagactgagcaggtggtgcgtggcgccgttgttcagtgtcctgacatgtacgataacaggcagcagaacggttatctcaccggccgcaatggcgatatcttcacaacgtctgaacgcatcgatttttcgtttggcgatatgtgggtcgtgatgactgatagtctgggtaattttcgagggcgctggcgtgcctaccctgtatccggtactgccaaagcctttcaggccgccgcggatgctttcgatctgaatatctacaatggtgctgactgccaggtggccagtcgctacttcattgcaacagaaagcgaattaaactcgactatctggcgtgtagaaacagcaaaaccgaatggcgattacacccagacccttaccttgtctgaatattcggactcgatatatccataa

SEQ ID NO: 90209 - DNA, 2028 bp, Enterobacter aerogenes
atggcacaattaccaaccccgacgcaaaagccggtaccgagtgatgatatccgggaccacgtttatgcaggcggcatgctggacaaggtcgtaacaagccgagaactgacatacaccgatcgacttggtggccagcattacactgttgatggaatcaaggcagaaggtgataaggtcattgaggataccaggcaaaacctggtccccttaagccgtcagtatattaccctggaagaggcgcaagcggacattgccaatatcccacaaggtggtgccacatatgtgagaagtcctgatggtagttctcttgcggacgagtacatcaataatggcggaactttggagccaactgggcgcaagatgccatcgcagcaggcggtggataaagcagctaattcagcagagttggccgggctatcagtagaaagcaggatttttgacgatgaaggtatagagatagttcacgcgcttactgatgcagaagggaaagcccccattactactaataaacttggcgcagtgggaatgggaagggcagaggttgcatctcagggtgggaatgaggttccatgggcaatcactgatactcggcgcgtcccctatatcgctggcacgccaatgggaggcgtgtgtattggaaatacagagatagttgaaataccgggtccacctggcatcgtcttttgtgatgcaaattatatcccgatggcctgtacgccagggtttgaaagtgatcaggatattcctgtcattggtggttctggcagccccccagagacgccagtaatcccaatttatcttcgggactggaacggcgtgaggtcacaggggcagtctctgtctattggtgaaatgccgccggcatccgctgctgctaacccgccactttcaaccacgcagccatatgggaatctggggttcagttcaaataacaacagctattcttcagcaacggatactgccgttccactgattgaatcggcttatatgccatctgagggaacgtatccggctggtgaatctccttgctctggcgccgcaaataagctggttgagcgtattcaggcagatactggttttgactggcagcaacaaggcgctgtgtttttctcgtcctgccctggccgtggaggtacccaaatagcgaacctgtcaaaaggtacggcatcatatcagcgcgcgctggatcacgtgactaacagcatgcgcctggcgaatgcagccggaagaacttttgccgagttagctattctctggactcagggagaatctgatatcggcggtaatgtatcgcgagacgattattctacgatgctcctgcagtacatctctgacatgacggaggatactgttgctattactcaacaggactacaacccattttttgtgtcttaccaactggcatcgcatagacaatatggaaaaaccaaccctcttatagctttgtctttacgcgacgtggcccttgcagggcgttcccggcttagtcatccagcatatatcggtgattatgtcgacaatgttcacgggactaaccagacctatttgatgtttgcgaagtattacggccgcgctatccataagctgctgctcgacaatcaggcagggaaaaagcctggcatgcactggctggataaaatcggcgaaactcgtcagggtaatattattaatcttcagttcaatgtccctcatcctccacttgtgattgatacaacctgggtaacggaaacggaaaattacggtttctacatccgggatatgacgactcagaatttcgatgttgtggatattatttctgcggttgaaatagcgggaccggaccgagtcaggattatctgtagccgggcccctacagttaatgagcaggttacatatggttggggaaaagccggtgatcctcttactgcaggaagaaccactgggccacgcggtaatctccgcgacagtgaaggcgatttacccggtgaaagctacaccgatacttccgggacgctgagaaaactccataactggtgcgtaattttttaa

SEQ ID NO: 90210 - DNA, 792 bp, Enterobacter aerogenes
atgacaaccattattcgcaataaagacgtaatcatcgctaaccctcaacttaaaccgatttataccccgttcgtggctgagcccggcctgctggctgcatggcggtttggtgatggaatggatgatctgagtaacaacgcaaatacactcaccccaatcggcgctccagtgaccggcgaatactatattagcggcgataaagataatggatttatcacctccgttcctgacggactgcaacgtactctgattgctgtctggagaaatcattcatcttcagatgcatatgcgtatccagtaggtaaccttgcgcagtctgcatcagcacagggtattggtattggcttgaaaagtaacagtagtgcctcttcaaatttgattcgcaccagcggtaatgcggggggcatttcaaaaaccggtaatctgttagccattgcggatgggccatcagaaacatatgcaaatcgtgttaatttccgttgggcagcttttacagttgatggtgcaagcaataaggctaatctttacttgccgaaactgaatgcttcacttattccagcgaccattgcttcaggtgcaaatcttgcaaccagggacatcactgaaggtggaatcagcagcatgttcaggcttatcgctttccgtgatccgtcaatgccgcctaacttaccaggaacggatattgatgtagctgaagtactcattttcgaccgagcactggatctttcaggtcttcaaagaacatatgcccgttcaaaaagctatcttgcttcgtttggacaggatatttaa

SEQ ID NO: 90211 - DNA, 1689 bp, Enterobacter aerogenes
atggcatctttaaatgacgaaaacctacgagacgacttatcctctactgaatctggtaagggggcatcattggttgcgctggaacagggtggaaatgttcagcaaagcattaatattgtcatgcctgaatggtatggagctaagggaaacggcctcgatgacgatagtagtgcattcactcaggctgctaatactggcaaaaatctgtatttgacgtctggaaaaaaatatcttttaacatctccttgcgcattaccttttattgcaaactacgaggatggagagcgaaagactgtttttggaaatggcgcaaagttaataacaaaaggcgcgtacagccctttcaaccaatatacagatgaaacaaaatcatctttaagcgctattgtctatggatggaatttcttcgatttgaatattgaaggatttgccaataaagactcttcttacgacttggtcaatggcgcgcatggaatatcattcggattcggaaaggcttataatatcaatgggcttggattatgcaacgtaatcagagcatatggcaaaaccatagccaaacacatttatggtgatgaattacgaaatgccttatattcgtgctacccctaccctaaaaacacatcaataggaaataacaaactatttaatgcttgtgtaaattggtgttcaggtgatggtcttgttcttaagggtagtgatatatatgttgatggttttcattacaaatatgcgggatgtattacggcaaacaataatgatggagctaacgcgactcgtggggtagctatatcagctggagcagatggtgtgcctgcttcttctgtaaccatcaataatatttccggagagttttatggggctggctcacttaacctaaacgcatcagatgtaacgatttctggtgggattaatttaggtagttattatactgaaaacttcaaagcagaattaagttctgctgctgtatggttgaacgtaacaaatgccatgatcggtgatatcaaatgtgaaaacatttttaccgggttaggtatcaacccagggtgttcagatttttacatcagttcattctctgcaaaaagcaaatataatgttagcaagcatccgtttttttcgattggggactcagtagatactaaaataacccgtggctttattggcaatataaacctgtttggcgagagcgcaattaacaatgatgtttatataaacactgcaggcgtaattattgactctattcacatatcccagatgaataaccaagaaggcggggactctgtaaccattgcaaaagcggcaacaatcaataacatcacattaatctcaaccacttccgccgctacaaataatattcttaactttttagctgcggccaaggttcaaaacatttatattgaaagagtatttggcacggccattactgtttcaaatgatatagttccaaaacttgaccgtgtatatctattcaataaacaagggacaaaagctccaatcatcatcaacggcaatggttccgcaagtcatcaatggggtctagtaacaataactggtccatcagtagcaagcccaaggatatccggttcacttattatggagggttactcgggaaatgaatggaaacgcgctgtagatacagtatcagcttctgtttcatatccgcaaaagcaaacattcacgctgacataa

SEQ ID NO: 90212 - DNA, 147 bp, Enterobacter aerogenes
atgctaaagcaatcagatatacgtagtgtctttattgttatggatggagaagccatagaaggtgatgcgcttgcaagtgttgagctgatagtcgtggttacccacatcatcagcaaagctggctttgatgactgcccggtgatgtga

SEQ ID NO: 90213 - DNA, 1266 bp, Enterobacter aerogenes
atgtttgctttggttgatgtgaacagcttctatgcgagctgcgaaaccattttcaggccggatctgcgagggaagccggttgtcgtattgtccaataacgatgggtgcgtgatagcgcgttctgccgaagccaagaaacttggtatcaagatgggggatccgtacttcaaatgcaaagaccagttccgcgggcatggcgtggtttgcttcagttcaaactatgaactctacgcggacatgagcaaccgggtcatgacgacactggaggaaatgtgtcccagagttgaaatctacagtatcgatgaggccttttgcgatctcactggtgtacgcaattgccgtgtgctggaagagttcgggcatgagctgaaagatacggtctaccgcaataccaggcttccggtcggggtggggattgcacaaacaaagacgctggcaaaactcgccaatcatgcggcgaaagcatggaaagccactggcggggtagttgacctttcgaatgtggagcggcagcgcaaactgatggctttacttccggttgatgaggtgtggggtgttggccgccgtatcagcaaaaagcttgaagctatggggataaaaaccgtcctgcagctagctgatacggatatccgctttatccgcaaacacttcaacgtggtgcttgagagaaccgtaagagagctgcgcggcgagccgtgtcttgaactggaagagtttgcgccagtgaaacaggaaattgtctgcagccggtcgttcggggagcgcattaccacctatgaacaaatgcgccaggctatctgttcatatgcggccagaggcgcagagaaacttcgtggtgaacatcagtattgtcgttatatatccacctttgtgaagacatctccctttgcgctgaacgaaaaatactacggtaacagcggatccattaagttactgacgcccacgcaggatagccgggatatcattaatgctgcggtaaagtgtcttgatgcgttatgggtcgacgggcaccggtatcagaaagcggggatcatgctaggtgatttctatagccagggtgtcgcacaactgaacttgtttgatgacaatgcgccacggcagaacagcgagaaactgatgaaagttctcgaccacctcaacgcaaaggacgggaggggaactctctattttgctggacaggggatccaggccacctggcgaatgaagcgagacatgctttcacctcgatacacaacacgatacaaggatttattagttgttaaatga

SEQ ID NO: 90214 - DNA, 723 bp, Enterobacter aerogenes
atggataaagcacagattaattcttggttaaaaaaagagactctaattgttgctctagctactgctctttgctacacaggggcttatgtatatgaaagaggctttgccgtatactttggcatacctacagagttaatctcagtcacccccggaagcattattactacagtttctttattcgttggctttcttttcctcgtgtatatcttatcgacctttcccgttctaatatctcagagcaagaaaataagaaataacttcattataatcacattgagcctatccccagtatggatattatttaatctgattttctttttaatatcaggatttaaaacactgaatttctctatagtaaccatgggttttttacttctttgcggaagtatattcctgagtaaaaaacaactaaataaccgacccaaactgtattcattagaaacctccaaaggaatatttaacagcattgataatgcagccggattaatattttggttttcatttacatttttctccataataagtggaatgggtacatttattgctagaaccacagataatttcagtacctttacttacaaaaacgaaaactacaaactaattaaaagttatggagataatatcattgccataaaagagaccgctaaaaagaatgaggatggcgtttacattttcaaggctgaagacctaaaggaaactcttataaataaagtgaaggcatga

SEQ ID NO: 90215 - DNA, 669 bp, Enterobacter aerogenes
atgtgcggacgcttttcccagtcaatgacccgtgaagattatctttcctatcttgccgatgaagccgatcgtgacatcgcatatgacccggagccgattggtcgatacaacgtcgcgcccggtaccaaagttttgcttctgagcgaacgtgacgaacaactacatatcgatcctgtcttctggggttatgcgccaggatggtgggataaaccgcctctgattaacgcacgcgttgaaactgcggccaccagcaggatgtttaagccgctatggcaacatggccgggcgatctgctttgctgatggttggttcgaatggaagaaagaaggcgataagaagcagccctacttcatccatcgtgccgatggccagccgatattcatggcagcaatcggaagcacaccatttgaacgtggcgatgaagctgagggatttttgatagtgactgcagtagccgatcggggcttggtcgatattcatgagcgccggccgctggtgctttcaccagaagcagccagggaatggatgagacaggatgtaggagggaaagaggccgaagaaatagctgcggacggtacggtatccgcagacaagtttatctggcatgctgtgacgcgcgccgtaggtaatgtgaagaatcagggtgcagaattgattaaagctctttaa

SEQ ID NO: 90216 - DNA, 345 bp, Enterobacter aerogenes
atgtatcacctgcgtatcccagctaactggaaagttaaacgctccactccgttcttcactaaagaaaatgttccggcggcgctgctcacccatcacaatactgccgctaacgttttcggtcagctgtgcgtcatggaaggaacggtaacttactacggttttcatgacgagcgggctaccgagccggaggtgaaggtcgtcattaacgccggacagttcgccaccagcccgccgcagtattggcaccgtatcgagctcagcgatgatgcccagttcaacattaacttctgggttgaggatgaatcccacggcgaagacggcctgttccacgccaagaaaagctaa

SEQ ID NO: 90217 - DNA, 531 bp, Enterobacter aerogenes
atgttgcaatacttaaaccagtgctcacggggacgcggcgcctggctcttgatggcgttaaccgcttttatacttgaattagtggcgctgtggttccagcacgtgatgctgctgcagccctgcgtgttgtgtatttatgaacgctgcgccctgtttggcattatgggcgctggtctggtgggcgctatcgcgccgaaaactccgttgcgctacgtcgcgctgctgatctggctgtacagcgccctgcgcggtttgcagttagcctgggagcacaccatgattcagctgcacccttctccgttccagacctgcgatttcgccgcgcgtttcccgacgtggctgccgctggataaatggctgccgcaggtattcgtcgccaccggcgactgttccgtgcgccagtgggaattcctgacgctggagatgccgcagtggctggtaggcatctttgccgcttatctggtcatcggtctgctggtgctgatcgctcagccatttaaggctaaaaaacgcgatctgttcggccgttaa

SEQ ID NO: 90218 - DNA, 1551 bp, Enterobacter aerogenes
gtggaaatgtcttatggccgcgccctgtggcgcaattttcttggccagtcgccagactggtacaagcttctcctgattatcttcctggtggttaacccgctggcgttttatctgcaaccatttgttgccggttggctgttagtggtggagtttatcttcaccctggcgatggcgctcaaatgctacccgctactgcctggcggcctgctgtcgatagaagcggtgctgatcggtatgaccagccccgaacatatccgcgaagagatagccaataatctcgaagtcctgctgttgctgatgtttatggtggccgggatctatttcatgaagcagctattgctgtttatttttacccgtctgttgctggggatccgcagcaagatgctgctgtcgctggccttctgccttgcggccgcttttctctccgccttcctcgacgcgctcaccgttgtggcggtggtcattagcgtggcagtaggcttttacggcatttatcatcgcgtcgcctccgcgcggcctgatgataacgacatgcttgatgacagccacatcgatcagcattaccgcgacgtgctcgaacagttccgcagctttttacgcagcctgatgatgcacgccggcgtcggtaccgccctcggcggcgtgatgaccatggtcggcgaaccgcagaacctgattatcgccaaagccgccggctggcacttcggtgagttctttatccggatgtcgccagtaaccctgccggttatcctgtgcggcctgatgacctgcctgctgctggaaaaatttcgtctgttcggatacggcgagccgctgccaataccggtgcgcaaagtcctgcaggatttcgacgaccgtagccgccagagccgtagccgccaggatcggatgcgccttatcgcccaggggatcatcggcgtgtggctgattgccgccctcgccctgcatctggcggaagttggcctgattggcctctccgtcatcgtgctggcaaccaccttttccggcgtgaccgacgagcacgccatcggtaaagcctttaccgaagcgctgccgtttaccgccctgctgacggtgtttttcgctatcgtggcggtgattatcgatcagcatctgtttgccccagtgattgagttcgtcctgcaggcttcgccgcacgctcagctatcgctgttctatctgtttaacggcctgctgtcgtccatctccgataacgtctttgtcggtacggtgtatatcaacgaagcaagagcggcgctggagcatggcgttatcagcctgcagcagtttgaaatgctggcggtcgccattaataccggtactaacctgccctccgtcgccactcccaatggccaggcggcatttctgttcctgttgacctcggcgctggcgccgctgatccgcctctcttatggcagaatggtgtggatggcgctgccttataccatcgtgttaacgctggtcggcctgctgtgcgtcgaaaccctgttgatgccggccacccagtggatgctcagccacggctggttgaccaccccaatactgccgtaa

SEQ ID NO: 90219 - DNA, 720 bp, Enterobacter aerogenes
atggtcattaaggcgcaaagccctgcgggtttcgcggaagagtacatcattgaaagtatctggaataaccgtttcccgcctggatctattctccctgctgaacgtgaactttctgaactgattggtgtgacccgaacaactctgcgcgaagtgttgcaacgtctggcccgtgatggctggctgactatccagcacggtaaaccgacgaaggtgaacaacttctgggaaacctccggactgaatattcttgagacgctggcgcgcctcgaccatgatagcgtaccgcaactgattgataacttgctgtcggtgcgcaccaatatctcgacgatttttattcgtaccgccttccgccagcacccggacaaagcgctggaggtactgtctaccgcccgtgaagttgaagatcatgccgacgctttcgccgaactggattacaacatcttccgcggtctggcgtttgcctccggcaaccccatctacggtctgatcctcaacggcatgaaggggctgtatacccgcatcggccgtcactattttgctaatccggaagcgcgtagcctggcgctgggtttctatcaccagttggcgaaagtgtgcgaaaagagtcagcacgataaagtgtacgaaatcgtccgcgcctatggccacaacagcggcgagatctggcatcggatgcaaaaaacgctgcccggcgatttagccattaatatgcgctaa

SEQ ID NO: 90220 - DNA, 1533 bp, Enterobacter aerogenes
atggctacgattgattccatgaacagggacaccacccggttaagcgatggacccgactggacttttgaactgctagaaacctatctcgccgaggtcgatcgggtggcgaagctgtatcgtcttgacacctatccgcatcaaatcgaggtgatcacctccgaacagatgatggacgcctactccagcgtcgggatgccgatcaactatccccactggtcgttcggcaaaaaatttatcgaaaccgagcaggcgtataaacacggtcagcaaggtctggcctatgagatagtcattaactccaacccttgtatcgcttatttgatggaggagaacaccattaccatgcaggcgctggtgatggcgcacgcctgttatgggcacaactccttctttaaaaacaactatttgttccgcagctggaccgatgccagctcaatcatcgactaccttatattcgcgcgtaaatacattaccgaatgtgaagagcgctacggcgtcgatgaagtcgaaaaattgctcgactcctgccatgcgctaatgaactacggtgtcgaccgctacaaacgcccgcagaaaatatcgctgcaggaggagaaggcgcgacagaaaagccgcgaagagtatctgcaaagccaggtgaacatgctgtggcgtactctgccaaaacgggaagaggaaaaagccatcgaggcgagccgccgttatccttccgaaccgcaagagaacctgctgtacttcatggagaagaacgcgccgctgcttgagtcctggcagcgcgagatcctgcgtatcgtgcgtaaggtcagccagtatttttatccgcagaagcagactcaggttatgaacgagggttgggcgacattctggcactacaccatcctcaatcatctgtatgacgaaggaaaagtgacagagcgctttatgctggagtttctgcacagccacaccaacgtggtgttccagccgccctacaacagcccgtggtacagcgggatcaacccctacgcgctgggtttcgccatgttccaggatattaaacgtatctgccagtcgccaacggaagaagatcgctactggttcccggatatcgccggttccgattggctggagacgctgcatttcgccatgcgcgattttaaagatgagagttttatcagccagttcctgtcaccgaaggtgatgcgcgatttccgcttgttcaccgtactcgacgacgaccacaataattacctggagatttccgccattcataatgaggaaggctatcgggaaattcgttctaagctgtcggcgcagtataacctcagcaacctcgaaccgaatattcaggtctggaacgttgacctgcgcggcgaccgttcgttgacgctgcgctatgtgccgcacaaccgcgtgccgctggataagagccgccgcgaggtactcaaacacgttcaccgcctgtggggctttgacgtgatccttgagcagcagaatgccgacggcagcgttgagctgttggatcgcacgccgccgcggcagaacgcgctgtaa

SEQ ID NO: 90221 - DNA, 1299 bp, Enterobacter aerogenes
atgcgagtcgtcatactgggaagtggggtggttggggtagcgagcgcctggtatttaagccaggcgggacatgaggtgacggttatcgaccgtcagccagggcccgctgaagaaaccagcgccgccaacgccgggcagatctctcccggctacgcggcgccgtgggcggcgccgggcgtgccgctgaaggcgattaaatggatgttccagcgccatgcgccattggcgattggccttgacggcacgcagttccagctcaagtggatgtggcagatgttgcgtaactgcgatacccgccactatatggaaaacaaagggcgtatggtgcgcctggcggaatatagccgtgattgcctgaaagcgctgcgtgaaaccaccggtatccagtatgaaggccgccaggggggcaccctgcagcttttccgcaccgaaaaacagtatgaaaacgccactcgcgatatcgccgtgctggaagaggccggtgtgccgtatcaactgctggaagccaatcgcctgcgcgaagtcgaaccggcgctggcggaagtcagtcataaactgaccggcggcctgcgcctgccaaacgatgaaaccggcgattgccaactcttcaccacccgtctggcggcgatggccgaggcggcaggggtgactttccgctttaataccgccgtcgatgcgctgctttacgaaggcgatcaaatcgccggtgtgaaatgcggcgaggaaattattaagggcgacgcctacgtgatggcgtttggttcttactccaccgcgatgctcaaagggctggtggatatcccggtctatccgctgaaaggctactcgttgactattccgattgccgaagagagcggcgcgccggtatcgactatccttgatgagacttacaaaatcgcgattacccgtttcgataagcgtattcgcgttggcgggatggcggaaattgtcggcttcaataaagagttgctgaagccgcgccgcgagacgctggagatggtggttcgcgatctgttcccgcgcggcggctacgttgagcaggctaccttctggaccggcctgcggccgatgacgccggatggtacgccggtggttggccgtacgccgtacaaaaacctgtggctgaacaccgggcacggtacgctgggctggaccatggcctgcgggtccgggcagcttctgagcgacctgatctccgggcgtacgccggcgatcccttatgatgatctggccgtggcgcgttacagcccgggctttacgccggctcgcgctcagcatctgcacggcgtgcataactaa

SEQ ID NO: 90222 - DNA, 1071 bp, Enterobacter aerogenes
atgtctcgtccggtaaaagccagcattgatctgtcggctttacgtcagaatttacagattgttcgccgcgccgcccctggggcgcgcgtttgggcggtggtcaaggcgaatgcctatggccacggcctggcgcggatgtggcaggcgctgaacgccgcagatggatacgcattgctcaatctcgaagaggcgatcctgctgcgggaaaagggctggaaaggaccgattctactgctggaagggttctttcacgccgatgaactggcgctgcttgataagtatcgtctgaccaccagcgtacacagcaactggcaaattaaagccctgcagcaggctaaactgcatgcgccgctggatatctatcttaaagtgaatagcggtatgaataggctgggctttatgcccgagcgagtgcataccgtctggcaacagctgcgatcgctcgccaacgtcggtgaaatgacgctgatgtcgcatttcgctgatgcggaaaacccggagggcatcgcggagcccatgcgccgtatcgaacaggcggcggaggggctggactgcccgcgttcgttgtcgaactcagcggccacgctgtggcatccggaagcgcactttgattgggtgcgtccgggaattgtgctgtatggcgcatcgccgtcgggccagtggcgggatattgccaatagcggcctgaaaccggcgatgaccctcagcagtgaagtgattgccgtacagacgctgaaaagcggcgaacgggtgggttacggtgggttgtatcaggccgcaggtgaacagcgcatcggcattgtcgcctgcggttatgccgacggctatccgcgcgtcgccccaagcggcacgccggtgctggtcgatggcgtacgcaccaccaccgtcgggcgtgtttcgatggatatgttggcggtagatctgacgccttgcccgcacgcgggtattggcgcgccggtcgagttatggggacaggagattaagattgacgatgtcgctgcggccagcggcaccgtcggttatgaattaatgtgcgccctggcgccacgcgtgccggtagtgacagtgtaa

SEQ ID NO: 90223 - DNA, 1734 bp, Enterobacter aerogenes
ttggacgccgctgcggtcattagtctgtttatcctgggttctgttttagtaacctgcagtattttattgagttctttctcctcacgcctcggcatcccgattctggttatcttcctcgctatcggtatgctggcaggcgttgacggtatcggcggcattcctttcgataactatcccttcgcctatatggtgagtaacctcgcgctggcggtgatcctgctggacggtggtatgcgcacccaggccagttcgtttcgcgtggcgctctggccagcgctatcgctggcgacggtcggcgtgctgataacctccgcccttaccgggatgatggcggcatggctgttcaagctcgatttaatcgaagggctgctgatcggcgccattgtcggctccaccgacgcggcagcggtcttctcgctgctcggcggtaaagggcttaacgagcgcgtcggctcgacccttgaaattgaatccggtagtaacgacccgatggcggtattcctcaccattaccctgattgaaatgatccagcagcatgaagccggtctgagctggatgtttgtggtgcatatcattcaacagtttggtctgggcatcgctattggtcttggcggcggctatttgctgctgcagatgattaaccgtattgtcctgcccaccgggctctacccgctactggcgctaagcggcgggatcatgattttcgccgtcaccacctctcttaacggtagcggtatcctcgcggtctatctctgcggtttcctgctcggtaataaacccattcgcaaccgccacggcattttgcaaaactttgacggcctggcgtggctggcgcaaatcgccatgttcctcgtcctgggtctgctggtgacgccgtccgacctgtggccgatcgcgattccggcgctactgctgtcaatgtggatgatcttcatcgcgcgtccgctgtcggtattcgccggcctgctgccgttccgcggttttaatctgcgcgagcgagtgtttatcagttgggtcggattgcgcggcgcggtgccgattatcctcgctgttttcccgatgatggccgggcttgagaacgcgcggctgttctttaacgtcgcctttttcgtggtgttgatttcactgctacttcagggcacctcactctcctgggcggcgaaaaaagcgaaagtcgtagtaccaccggtcggctggcctatctcacgcgtcgggctggatatccatccggaaaatccgtgggaacagtttgtctaccagttgggtgatgataaatggtgcgttggcgcagcgttgcgcgacctgcacatgccgccggagacgcgcatcgcggcactcttccgcgacaacgtactgctgcatcctaccggcagcacgcggctgatggatggcgatattctttgtgttatcggccgcgagcgcgacctgccggcgctgggtaaaatgtttagccagtcgccgccggtttctctcgatcagcgattctttggcgacttcatcctcgatgcggaagctaaattcgccgacgtggcgcagatctacggcctcgacggcggcgaggagtttcgcgagcatcagcagtcgctgggtgatgtgatacagcaactgttaggcgccgcgccggtcgttggcgatcaggtggagtttgccggtatggtgtggacggtcgcggaaaaagaggacgatcacgtactgaaggtgggtgtgcgggtcgcggaagatgaggcggagtga

SEQ ID NO: 90224 - DNA, 915 bp, Enterobacter aerogenes
atgtctcagttttatctggtcgccccttccggttactgtatcaatcaacaggctgcggcccttggcgtggcccgtctgcaggaggccggtcatcaggtactgaaccaacaggcgatctcccgtcgacagcagcgtttcgccggcagcgacagcgaacgcctggccgatattaaccaacttgcggccctcgagggaaaaaaccgcatcgtgctggcggtacgcggcggctatggcgccacccggttactaccgcaaatcgactggcaggcattgtccgcgcgccagcggcaggatccgctgcttatctgcggccacagtgatttcaccgccatccagatgggactgctggctaaagccaacgctatcagcttcagtgggccgatgttagcgggcaatttcggcgctgaaaccctgaatgcgtttactgaacatcacttctggcaggcgctgcgcgaaccggagtttaccctcgaatggcaaagcgatggcccaacctgccgcgccgaaggcaccctgtggggcggcaatctggcgatggtcacgtcgctcatcggcacgccgtggctaccgcagattgacggcggtattctggtgcttgaggatatcaacgaacacccgttccgcgtagagcgtatgctgctgcagttgctcaacagcgggatccttgcccgccagcgggccattgtgctcggcagctttaccggggcgcaacccaacgactacgacgacggttacgatctacccaccgtctacgcctggctacgtcagcaactcgccatcccgctgctcaccggactcgaattcggtcatgaacagcgcaccgtgactttgcctctcggcgcacgggcacggctggtcaacaacgcctctgtcgcaacgttaacgataagcggccatccggtgctggcggaataa

SEQ ID NO: 90225 - DNA, 675 bp, Enterobacter aerogenes
atgccgcctggaacgtgtattgtcatctccgtgcggcaaacttcagccaataaggatagatgtgtgaaattgagatggtttgtttttttatttgtattgttggccggttgtagctcgaagcacgattacaccaatccgccgtggaacccggaagtcccggtgaagcggtcgatgcagtggatgccgatcagcgaaaaagccggcgccgcgtggggggtagacccgcagctgataacggcgatcatcgcgattgagtccggcggtaatccttcggtggtcagcaaatccggcgcggtaggactgatgcagttgaagccgtcgacctccgggcgtgatgtctatcaacggatggggtggcgtggtcagccttcggtaagcgaactgaagaacccagagcgcaatatctcgatgggggccgcttacctgagtattctggaaaacggcccgctggcggggattaaggacccgcaggtgatgcgctatgcggtggtggtctcttatgctaacggcgcgggcgcgctgctgcgtactttctcgtcgaatcgccaggacgctattgacgagattaacgatctcgatgccgatgagttctttgaacacgtggcgaaaaagcatcctgccccacaggcgccgcgctatatctggaaactgcagaaagcgctggacgcgatgtaa

SEQ ID NO: 90226 - DNA, 2235 bp, Enterobacter aerogenes
ttgatcatgcaaaagcaaacgataataattcgcattatttttaacgaaaaagcatttcgtttatttccgcggcggcgcacaggagtgccagaccgcgctattcaggattatggcatgatctcctctgtttacttcaaacgctccgcgctggtgtgcgccctcgcggccgccttccctctcgccgcgcaggcggaagatactctaatcgttaccgcaaagcctgacgactccgccagcgcgcagacacaaggctatagcgccaaaacgtcaaccggcgccacgaaaaccgatcagccgttgataactaccgcccagtcggtatcggtgatcacccgccagcagatcgccgatcagggcgccaataccgtaagccaggcgctccagtatacgccgggggtttattccagttttggcggcggcgcgacgcgctttgataccatctcgctgcgcggctaccacggcggtgacgtcgataacctgttccttgacggcatgcgcctgatgagcgacggcggcagccataacgtgctgcagatcgatccatggtttattgagcgcgtcgacgtcatccgcggcccctcttccgccctttatggtcagagcgtaccgggcggggtggtcaatttgacctccaaacggccgcagttcagccagcagggtcactttcgccttaccggcggcacgcaaaataccaagggcgcggcctttgactataccgacgccatcaatgaccagtgggcctggcggctcatcggcatgacccgcagcagcgatacgcagtatgaccatacccgcgaagagcgctacgcgatttcgccttccttgctgtggcaaccggatagcgatacttcgttgctgttgcgcgcctacctgcaaaaagatccctcaggcggctaccacggctctctgccgctggatggcacccgttacgcgcacaacggccgtaaactttcgcccagcaccaatgaaggcgatccgggtgatggctaccagcgccgcgaacagatctacagctacgagttcaaccaccagtttaacgatgtctggtcggcctactccgcgggcagctatacccatacgaacgtctcgctggatcaggtttatcaggttggctgggtaggtgacagcgacatgctttcccgcggctacagcggttcccgcggttcgctggacgcctggtcaaccgataaccgcctgcgcgccgattttacgaccggtgaactggcgcatacgctgatcctcggcgctgagtatcatcgcttccgcaacgatttgtggaccggcgccggcaacgcggcgccgctcaacccgttcaccggctatacgccgcaaaccgggcataccatcacctacagcgataataataatcgccgttattaccagaccgggttttatctgcaggatgaaatggtatggaaccgctggcatcttgatgtttccgggcgctacgaccgcatcgtttcacagcaggttagcgacacctcaggcacgtcgaaccgccgctccgacgatcacatcagcggccgcgcctcgctgctgtacgcgctcgataacggcctttcgccctacttaagctacagccaggcgattaccccggcgatgctgccgggcgccgatggtacgttattaaaacctaccaccgccgaacaggtggaagcaggcctgaaattccagccgccgggcagcagcgatttgtatagcatcgcgatatacgacttgatgcaaaaggatgtcgccacccgcgacccgaacattgccaccgccacctatattcccgccgggaaagtgcattcgcagggcgtagagctggaagcacataaccagattacgccgcaattgagcactattgcctcttatacctggaatcgcctgcgcttccaggacacgaaagacggcaccgatagtaatacgccgcagctgtcgccagatcagatggcctcgttctgggcgcgctatcaattgccggcgggcattactgttggcgcgggcgtgcgctatatcggtaaacagtgggctgatgacgccaataccgaacgtttaccgtcagtcaccctgatagatgcgatggcgcgcgccgacctcggagcgtggtcgacagcgatgaaaggcgcctatatccaggttaacgcgaataatatcggcgatcgcgaatatctttccggctgctacggcaccggcaactgttactggggggctgaacgcagcgtcacggcaaccgtgggctacgatttctga

SEQ ID NO: 90227 - DNA, 1734 bp, Enterobacter aerogenes
atgacgagatcggttctacgtcgcccggaaaccctgacctaccttattcaactggcactgggaggcgcaatattaagcctggcgacattcgccgcgcaggcagatgacaacacctccccggtaccgcaatcgcctgatgaactattaggcccgctgtttaacgacgtgcagagcgcgaaactattccctgaccaaaaaaccttcgctgatgcggtaccgaacagcgatccgctgatgatccttgccgactatcgaatgcaaaaaagccaggccagcttcgatctgcgccatttcgttgagatcaacttcaccctgccgcgtgataacgatcaatacgtgccgccgaaaggacaaaccctgcgtcaacacatcgatgggctatggccagttttaacccgcagcaccgtcgaggtcgagaaatgggattcgctgctgccgctgccgaaaccttatgtggtacccggtggacgcttccgcgaggtttattactgggatagttatttcaccatgctgggcctcgccgaaagcgggcactgggataaagtggaagacatggtggccaacttcgctgccgaaatagaccgctggggccatattccaaacggcaaccgcagctactatctgagccgttcgcagccgccgttcttctcctttatggttgagctgctggccagccacgatggcgatcgggcgctgaagacctggctgccgcagatggaaaaagagtatcgctattggatggaaggcgccgatgcgctaacgcccggcaaagccaataaacgcgtggtgcgtatggaagatggcgcgctgcttaaccgctactgggatgataacgatacgccgcgcccggagtcctggctggacgatgtcaccaccgccaaaaacaatcctaaccgcccggccaccgaaatctatcgcgacctacgttccgccgcggcttccggatgggacttcagctctcgctggatggataatccgcagcaattggggactatccgcaccaccagcatccttcctgtcgatctcaatgcgctgatgttcaacatggaaaaaaccatcgcccgcgccagtaaggccgctggcgacagcgccaaagccggacagtacgatgcgctggcgaacgcccgtcagaaagcgctggaaaaatatctgtggaacgataaagaaggctggtatgccgattacgatctgaagagccataaagtccgtaatcagctgaccgccgcggcgctgttcccgctgtacgtcaaagcggcctccagcgaacgcgccgcgaaagtcgccgccgccgccgaaagccgcctgctgaagcccggcggcctcaccacgaccacggtcaatagcggccagcaatgggacgcgccaaacggctgggcgccgctgcagtgggtggcggtggaaggcctgcagaactacggtcagaaaaaggtggccatggaggtcacctggcgcttcctcagcaacgtccagcacacctatgacagcaagcagaagctggtagagaaatatgacgtgagttcaacaggtaccggcggcggcggcggtgaatacccgctgcaggacggctttggctggaccaatggcgtgacgttaaagatgctcgacctggtttgcccgcaggaaaaaccgtgcgatgccctgccggcgacccggccgacgcagacagaaagcgccaccggccaacagccagccgcgaacgatgccgtggcggctgcggagaaaaaagcccagtaa

SEQ ID NO: 90228 - DNA, 771 bp, Enterobacter aerogenes
atggcatggctcagcgcggatgcatcctttgaccctgatacgctcagtgcgccgctgattggcgtgcaatccacgcttaacggcgatcatgacgacggtctgcatcgtcatcaaatggggcagatgttatttacccgtcagggttgtatccggctgacgctaaatgatggcgcgctattgtgtatgttaccgccgacccgcgcggcgtggatccccgcaggcgtgacgcaccgcgcccaaatgcagcacatcgttgattaccgttcggtgtggttcgccaatacgcattatcccgagctacccgccgccccggccatcctcaacgttaccccgctgctgcgcgagttgctcgaacgcattagcgccagcctgtgggatactgactggcaacagggtccggcccggcacctggcggcgctctgcgtggcggaaatcggcgcggcaaaacatgagccgatgatgctaacgctgccgcaggataaacgtctgcgccatctcaacggccatgggcacccgccgcagcttcagcaactggcggcgcaatgcggcgccggagaaaagaccatcagccgcctgtttcaacgtgaaaccggcatgtcatatcagcagtggcgccaacagtggcggttgatgaaagccgttgagctattggccagcggtcaacgcattacggatgtcgcccaggcgctggagtttgccagcgatagcgcctttatctactttttccgcagccagaccggcaaaacccccggacaatacatcgcaaggtaa

SEQ ID NO: 90229 - DNA, 1137 bp, Enterobacter aerogenes
atgttaagtcgttcggcgatggcgctggttaccgcattactcatgtttccgcaaatcgcggaaactatctatagcccggcgctgactgatatcagcgcccatttttccgttagcgccgccgatgcggcgcagacgctggcggtctattttatcggctttgccgttggcgtgctgttctggggctggttcagcgaccggcgcgggcggcggccggcgttattgctcggtctggcggtgtataccgcaggttgtatgctggcgctggcggcgccagattttagcgtactgctggcggctcgtatcgtggcggctttcggcgcggcaatcgggtcggtggttgggcaaacggtgctgcgggatgcgtttgatggccggaggttggcggcgatcttttcttttgtcggcatggcgctggctatcagcccggcaattggcgtttatcttggcggcgtgctgacggcctggcgcggaatgaacggcgtcttcggcgcactggcgttgctggcggcggcgctgttgctgctgtgcgcggtgatcatgccggaaacccggccgccgcgaacgggggatcaggcgctctggccgttaatgctgcgcatgctggcggatgcgaaaatccgttttgcggtggcgctggtggcggcattgaatatcggtttgttcagctattacagccaggggcctttcctttttgcccgcctggggttggatgcgcggacctttggctatagcggcatggcgctggcggcaggggcgttggttggcgcgcagggcaatcgtttgttgctgcgacgtggagcagggcagcggcctatttttatctgtgccggtctgctgttattgctcgccagcgcaggcgtatgcctgttagcggattcatggttctttttgctgccgatgatcgcagtggcgacagcctatgccatggcgatccccgtagtgctgggaacggcgcttagcgactacgctgattgtcgtggtagcgccggagcgctgttcggcctgacctattatttggttatcggcttggggctggcattcgtggggtgggggcaatcgctcggcgtcgcgttggctatctgtgcggtgatttgcgcgttaaccggttggtgttatctgcgatacattgatgattag

SEQ ID NO: 90230 - DNA, 939 bp, Enterobacter aerogenes
atgaatactattccgctccctaaaactcagcacctggttgtattccaggaggtgatcagaagtggttcgattggttcggcagcgaaagagttaggattaactcaacctgcagtcagtaaaacgattaatgatattgaagactatttcggcactgagcttattgtccgtaaaaataccggtgttacgttgacggaggccggacaggtgctgttgagctggtcggagtcgattacccgcgaaatgaaaaatatggttaacgaaatgaacagcatgacctgcagcaccgtcgttgacgtctctttcggtttcccgtcgctgatcggcttcacttttatgtcggatatgatccataaattcaaaaagttatttcccaaagcacaggtctcgatgtacgaagcgcagctttcatcgttcctgccggcgattcgcgatggccgtctcgatttcgccatcggcacgttgagcgatgagatgaagctgcacgatctgcatgtcgaaccgctatttgaatcggagttcgtgctggtggccagcaaatcgcgaacgcgcagcggcagtgccacgctggcatcgttacagcacgaacagtgggtattgccgcaaactaatatgggttactacagtgaactcctcgccacgcttcaacgcagcggcatcaacaatgaaaacatcgttaaaacagactctgtcgttactatttataatcttgttctcaatgctgatttcctgacggttattccttgtgatatgaccgcaccttttggctctaatcaatttattaccattcctgtcgaggatgcgttaccggtggcgcattatgctgcagtgtggtcgaaaaattatcgcattaaaagcgcggcctcggcgttagttgaattagcgaaagaatattcagcccatagcggctgccgacgacgacaattaattaccgtggactaa

SEQ ID NO: 90231 - DNA, 990 bp, Enterobacter aerogenes
atgcatattacatacgatcttccggttgctattgaagatatcctcgaagcgaaaaaaagattggcaggtaaaatatataaaacggggatgccgcgctcaaattatttcagtgaacgatgcaaaggcgaaatattccttaagtttgaaaatatgcagcgcaccggttcttttaaaattcgcggcgcgtttaataaactcagctcgctgaccgatgccgaaaagcgcaaaggcgtggtggcgtgttccgccggtaaccatgcgcagggcgtttcgctctcctgcgctatgctcggtattgacggcaaagtggtgatgccgaaaggcgcgccaaaatcgaaagttgccgccacctgcgactattcggcggaagtagtgctacatggcgatatctttaacgacactatcgccaaagtcagcgaaattgtcgaaatggaagggcgtatatttattcctccctacgatgacccgaaagtgatagccgggcaggggactattggtctcgagatcatggaggatttatatgatgtcgataacgttattgtgccgattggcggcggcggtttaattgccggcatcgcggtggcgattaaatcgattaacccgactattcgtattattggcgtacagtcggaaaacgttcacggcatggccgcctcgtattacgccggagaaattaccaatcatcgcactaatgccacccttgctgacggttgcgacgtttctcgtccgggaaatattacctatcagatcgtgcgtgaattagtcgacgatattgtgctggtcagcgaagatgaaattcgcaatagtatggtcgcacttattcaacgcaataaagtcattaccgaaggggccggggcgttagcctgtgccgcattattaagcggtaagctggatagctatattcagaaccgaaaaaccgtcagcattatttccggcggtaatatcgatctgtctcgcgtatcgcaaattactggtttagttgacgcttaa

SEQ ID NO: 90232 - DNA, 1332 bp, Enterobacter aerogenes
atgagtactacagatagcattgtatccagccagacaaaagagtcgtcctggcgcaaatcggacaccacctggaccctgggcttattcggcaccgccattggcgccggggtattattcttcccgatccgcgccggcttcggcggcctgatccccatcttactaatgttagtgctggcctacccgatcgccttctattgccaccgggcgctggcgcggctgtgcctttccggctcaaatccttccggcaacatcaccgaaacggtagaggagcactttggtaaaaccggcggggtggtgattaccttcctttatttctttgcgatttgcccgctgctgtggatttacggcgtgacaatcactaatacctttatgaccttctgggaaaaccagctgcagttgccggcgctgaaccgcggttttgtcgcgctgttcctgctgctgctaatggcgttcgtcatctggttcggtaaagacctgatggtgaaagtgatgagctatctggtatggccatttatcgccagcctggtgctgatttcgctgtcgctgatcccttactggaactccgcggttatcgatcaggtcaatttaagcgagatttcgctaaccggtcacgatggcattctggttaccgtctggttgggtatttcgattatggtgttctcgtttaacttctcgcctattgtctcttcattcgtggtttccaagcgcgaagagtatgaaaaagagtttggtcgcgagttcaccgagcgcaaatgttcacagattatctctcgcgccagcatgctgatggtggccgtggtaatgttctttgccttcagctgcctgtttacgctgtcgccgcagaatatggccgatgccaaggcgcagaatatcccggtgctctcatacctggcgaaccacttcgcctcgctgtccggcaccaaatccacctttgccacggtgcttgaatatggcgcgtcaatcattgcgctggtggcgattttcaaatctttcttcggccactatctcggcacgctggaaggcctgaacggtctggtgctgaagtttggctacaaaggcgataaaacccgcgtttccagcggcaagctcaacaccatcagcatgatttttatcatgggctcaacgtggattgtcgcctacgccaacccgaacattctcgacctgattgaagcgatgggcgcgccgattattgcctcactgctgtgcctgctgccgatgtacgccattcgtaaagcgccatcgttggcgaaatatcgcggccgcctggacaacgtcttcgtcacggtaatcggtctgctgaccattctgaacatcgtttacaaactgttttaa

SEQ ID NO: 90233 - DNA, 1209 bp, Enterobacter aerogenes
atgaatgaatatccggtagtactggtcattaactgcggctcgtcttcaattaaattttcagtacttgatgccgccagctgtgaagtattaatggctggtattgcagatggcattaattctgaaaatgcgttcctgtcaataaatgggggagagccggctaagctggctcaccgcagctatgagggcgcattgaaggcgatcgcatttgaattagaaaaacgcgatttagttgatagcgtggcgttaattggccaccgtatcgcgcacggcggcagcatatttaccgaatcggtgatcattaccgatgacgttatcgacaatattcgccaggtgtcgccgctggcgccgctacataattacgccaatctcagcggtattgaatcagcgcagcagttattccccggtgtactgcaggtggcggtgtttgataccagctttcatcaaacgctggcgccagaggcatttctttacggcctgccgtgggactattaccagcgcttgggcgtgcgtcgctatggtttccacggcacctcgcaccgttatgtggctcagcgcgcgctggcgctgcttgatttacccgagcaggatagcgggctggtcattgctcatcttggcaacggcgcgtcgatttgcgcggtacgcaacggccacagcgtggacacctcgatgggcatgacgccgttggaaggcctgatgatgggcacccgcagcggggatgtcgattttggcgcgatggcgtggattgccagcgaaactaaccagacgctcagcgatctggagcgcgtggtgaataaggagtccggcctgctggggatatccggattgtcatccgacctgcgggtgctggaaaaagcctggcatgaggggcatgaacgcgcgcggttggcgattaaaacctttgtgcatcgtattgcccgccacattgccggccatgccgcctcgctacgccgccttgacgcgattatttttaccggcggcatcggcgaaaattcggtattaatccgccaactggtgattgagcatttagcggtatttggcgtcagcctgaacgatgcgttaaataaacaacccaactccgccggtgaacgcattatctcttcccgcgaggctcgagtgatatctgcagtcatacccaccaatgaagagaagatgattgcgctcgatgctattcatttaggcaaaattaatgcatccctggaatttgcttaa

SEQ ID NO: 90234 - DNA, 2295 bp, Enterobacter aerogenes
atgaaggtaaatatcgataccagcgatatgctgtacgccgaagcatggcacggatttaacggtacggactggaaagaagaaattaatgtccgtgactttattcagcacaactatacgccatataccggggatgaatcgttcctcgcacaggcgacgccggcgacgaccgcgctgtgggaaaaagtgatggccggcattcgcgtagagaacgccacccacgcgccggttgattttgataccaatatcgccaccaccattaccgctcacgatgccggctatatcgaccaggcgctggagaaaattgtcggtctgcaaacggataaaccgctcaagcgcgcgctacatccgtttggcggcattaacatgattaaaagctcgtttgatgcctatggccgggaaatggatagccagtttgaatatctgtttagcgagctgcgtaaaacccacaatcagggggtatttgacgcctattcgcccgatatgctgcgctgccgtaaatccggcgtgttgactggcctgccggacggctatggccgcgggcgtattattggcgactaccgccgcgtggcgctatacggcattcgctacctggtgcgggaacgtgagctacagtttgccgatctgcaggcaacgctcgagcgcgggcaggatctggaagccactattcgtctgcgtgaagagctggcggagcaccgccgcgcgctgctgcaaatgcaggagatggcggcgaaatatggctgtgatatctcccgcccggcgcgcaacgcccaggaagcggtacagtggttgtacttcgcctatctggcggcggtgaaatcgcaaaacggcggcgcgatgtcgctggggcgcaccgcctctttcctcgatatctatatcgagcgcgacttccacgccgggatcctcaatgaacaacaggcccaggagctgatcgaccacttcattatgaagatccgcatggtgcgtttcctgcgtacgccggaattcgacacgctgttctccggcgatcccatctgggcaaccgaagtgattggcgggatggggctggatggccgcacgctggtgactaaaaactctttccgctatctgcatacgctgcacaccatgggcccggcgccggaacctaaccttaccgtattgtggtctgaagcgctgccgattgcctttaagaaatacgccgcccaggtctcgatcgtcacttcctcgctacagtatgaaaacgatgacctgatgcgcgccgatttcaacagtgatgattacgccattgcctgctgcgtcagcccgatggtcatcggcaaacagatgcagttcttcggcgcgcgcgccaacctcgccaaaacgctgctgtacgcaatcaatggcggggtggatgagaaactcaaaatccaggtcgggccgaaaaccgcaccgctgatggacgacgtgctggattacgacaaagtgatggccagcctcgatcattttatggattggctggcggtgcagtacatcagcgcgctgaacatcattcattacatgcatgataaatacagttatgaagcctcgctgatggcgctgcacgaccgcgatgtataccgcaccatggcctgcgggattgccggtctgtcggtggcggcggattcgctttcggctattaagcacgcgaaggtgaaacccatccgtgacgacagcggcctggcgatcgattttgagattgaaggcgattatccgcagtatggcaataacgatcggcgcgttgatagtatcgcctgcgatctcgttgaacgtttcatgaagaaaattaaggtgttgccgacctaccgtaacgcggtgccgacgcagtcgattctgacgattacctcaaacgtggtgtacggtcagaaaactggtaataccccggatggccgccgcgccggtacgccgtttgcgccgggggcaaatccaatgcatggccgcgatcgtaaaggggcggtcgcttcgttgacttccgtggctaagttgccgttcgcctacgcgaaggacgggatctcttataccttctcgattgtcccggcggcgttaggcaaagaggcgagcgtccggcaaaccaacctcgtcggtctgcttgatggctacttccaccacgaagaacgaatcgagggcggccagcatctgaacgtcaacgtgatgaaccgcgagatgctactggacgccatagctcatccggaaaattatccgaacctgaccatccgcgtctctggctatgcggtgcgctttaatgcgctgacccatgaacagcagcaggatgtcatttcgcgaaccttcacccaggcgctgtaa

SEQ ID NO: 90235 - DNA, 1365 bp, Enterobacter aerogenes
atgattagcgctttcgatattttcaaaattggtattggcccttcgagctcccatacggtggggccgatgaatgcaggaaaaagttttatcaccgagctggcgacccgcggcaacctgacgcagactacgcgcattgtcgtcgatctgtacggttcgctatcgctcaccggcaaaggacacgcgaccgatgtcgccatcatcatggggctggccggaaatagtccgcaggatgttgatattgacgccatcccggcctttattcagcgggtgacagagagcggccgtctgccggtggcgaaggggagccgacaggtcgatttcccgctgccggagagcatcgtatttcatgatagcgcgctggcacgccatgagaacggtatgcgcatcagcgcctgggatcatcagcagcctctactcagcaaaacctattactcaattggcggcgggtttatcgttgaggaggcatgttttggccagactcacgatgttgcaacgccggtcccctttgatttccgctccgcccatcaactgcttcagctgtgcgagcacaatggcctttccatctctggcctgatgatgcaaaacgagctggcgctgcgcgataagggacaaatcgaggccggtttcgccgccatttacgcggtgatgcataacggtattgagcggggaatgaataccgagggcgtgctgccggggccgctcaacgtaccgcgcagagcggctgcgctgcgccgacagctggtggccagcgacagcctttcccgcgacccgatgaacgttatcgactggatcaatatgttcgcgctggcggtgagcgaagagaacgccgccggtggccgggtcgtcactgcgccgaccaatggcgcatgcgggattattccggcggttctggcctattacgacaagtttcgccgcccggtcaatgccaactcgattgcccgctatctgctggctgcggcggctatcggttcactgtataagatgaatgcctctatatctggcgcagaagttggctgtcagggcgaaattggcgtggcctgctctatggcggcggcagggttgacagaactgcttggcggcagcccggcgcaggtatgcaacgccgcggaaattgcgatggaacataacctcggtctgacctgcgatccggtggccggacaggtgcaaattccctgcatcgaacgcaatgccatcaatgcggtgaaggcggtaaacgccgcgcggatggcgctccgtcgtaccagcgagccgcgggtctgtctcgacaaggttattgagacgatgtatgaaaccggcaaagatatgaacgataaatatcgcgaaacctcgcgcggcgggctggcgataaaagtgatttgcgcctga

SEQ ID NO: 90236 - DNA, 687 bp, Enterobacter aerogenes
atgtccaccgtcattgatacctttatcgccccaccttgttccgcgcagattaagatcctctacgaggacgcgcatttgttgttgatcgacaaacccagcggcctgctcagcctgtcgggcaagaacccgcagaaccaggattcagttcatcatcgcctggtgcaggattttcctgggtgcacgctggtacatcggctcgatttcgggacgtccgggctgatggtggtcgcgcgtaacaaaacgatcaacgccgcgctgtgtcagcagttcagccagcgggcggtaagcaaggtctatcacgccctgttgtgcgggcatcctgcggaagatgaaggggtgatagacgcgccgattgctaaagatccggagctgtttccgcgcatggcgattagcgtgcgtaatggtaaaccggcgcgctcgcgctatcaggtgctatcacgggaatggttgccaatagccggtggttcgctggcggtaacgcgcgtgcggctgctgccggaaaccggacgcacccatcagctacgcatccactgccagcatctcggctatccgattctcggctgcgatctctacggagggctggtggagcatcaggcctcacgcctgatgctccacgccagtgaactgcattttcatcatccggtcagcggtaaagcgatagcggcgcgccagcccagtcctttttga

SEQ ID NO: 90237 - DNA, 789 bp, Enterobacter aerogenes
atgcttaagagtgatactgaaatacttagcatcaaggggctgagtctgactgtcaaaaaggggacggtaatacttgacgggattcatttctcactccgagccggggaaaagttggcggttattggacctaacggcagcggtaagtcgagcctattaagagccattattggcgaagtcaatccggataaaggaacgctgtactggcaggggtgtcaactacggcatctgtcgccacaagcgcgcgcgcggaatattgccttcctgtcgcaaaacgatatccccgatttgcgcctgacggtggaagagtatgttcaattgggccgtttaccgtatcgcgaatcaccgtcctcggcgcagggacggcgcatcgtggatagcgttattagtgatacgggtctgcagcctttacgccatcgcccgctgggcaacctctccggtggtcagcgtcagcgcgccgcgcttgcccgcgcgctggcgcaatcccccgaattactattgctggatgagccgaccaatcacctcgatccgctggcgagaagcgagttgcttaccctggtaaagcgcacagaggtggcggtgattgcggtgttacacgatcttgccgcggctgaagcctttgccgaccgaatgctggttatccaccacggcaagcaggtgatttgcgacgtacccgaggctgcgctgcaccccagcgtaagctatccggtttttggcatgaccagttttcgcgtggcgcatcccgtgagcggtaaagcgctgcgcatttttgaagttcctcatcacgcttaa

SEQ ID NO: 90238 - DNA, 957 bp, Enterobacter aerogenes
atgaatagacttttaactattttatggctgctgttaagtagcccgttcgcgttagcgaatccatttcccgttaccgtggacagctgcggtaaacccatcacctttaatcaacccccacagcgtgcggtaattaacgatcttaatatggcggaaatggccttcgcgctcgatctccaggatcggattgtggggctaaccggcatcaccggctggtataaactaacaccacagttcaaagcagcgatgggggccatccccgagctggcgcctaaatacccgtcgctggaaacgctgctggcggtccggccggactttttcttcgccggctggaactacggcatgaaaattggcggcgatgtgacgccgcagacgctggcgccatatgggattaacacgttggtattgagcgagagttgcgtacaggccggtgggcaggcaaagaaagccgacatgagtttgctttataacgatgaactcaagttgggtaagatttttggcaagcaacaacaggccgaggcgctggtggaagggtggaaacgtcggctggcgaacctgcctgtcaggccagcgaatacgctgcctcagcgggtctttgtctatgactccggcgaggataaaccctttaccagcggcaagtacgggatgccgacggccattatcgaggcggccgggggacgcaacgtgatggatactctggacgcgaactggaccacgacgagctgggaggcggtggcggccagcgaaccacaggtgattattctgctcgattaccaaaccggcacgggaaccgcggcgctgcagcgtgtactcgaatctcatcccctgatgaaacagacgcccgccgtccggcagcagcgttatcttaatctacagtatgctgaattgactccgggtccggcgaatattgcggcggttgagaagctggcgcacctcttatatgccacggacgtgaaatga

SEQ ID NO: 90239 - DNA, 996 bp, Enterobacter aerogenes
atgcaacgttttgttctatggacggcgctggcatccgtcgttttatgcggcatgatgatagcgagtctgcagtgggggagtgtggaactctcgtggcgacaggtgctatccgcgttgggcctggcatccgctcccgttgccgaaatagtgaaaactatcgtcattgacttacgcctaccgcgagtcctgctggcggcgctaaccggcgcggggctggcgatcgtcggcttgctcttacagaccacgacacgcaacgaactggccgatccgtttttgtttggcctgtcttcaggcgcttccgctggcgcggtgctggtgatcacccgcttcggcgatgtactggggccactcacgctgccgggctcggctttcgtcggcgggatattatccgcgctggcggtgatgatattgtttcgcgtcaaccagctaaggcgagcggaacagttaatcatctgtggcctggcggtgtcgtttcttttcagcgcgctgaccagctatctggtcttttccggcgaccagcgggcggctggttcgttgctattctggtcattgggcggtctgggactggcgcgatgggacaacctgttcattcccttattgagcctggcgttgttgagtggatttaccctgcgccgctggcgggcgctggatgcgctgttggcgggggaacagacggcctgctcgctgggcgtcgaggttgagcggttgagaagcgaaaccttcctctgctgcgcgttggctaccgctttgctggtttctataaccggggttattggtttcgtcggcctgatggtgccttacctggcgcgtcgggccgttggcgtcaggcatcgaatggccgtgccgatgtgcggtttgcttggcgcgatattgctcactggcggcgatatactcagccgaagcctgatagcgaatcaagaattaccgattggtattatcactgccgggcttggcggcgcgtttattgtcgggttgctgatgcgggcaaaaggataa

SEQ ID NO: 90240 - DNA, 279 bp, Enterobacter aerogenes
atgaacgacgcctttccgggtgagcgactcagtgcccgtattcattcacaactggcactgcataacgaaattgaacagagggttgtcgagctgttgcttaaatccctaagcgtgagtcgtttcagtaatattaaaacccatccgctaatcattcaagaaaaaataaatatcaataataataattcaacttttctctttcgaaataccgttcgccaatcatttagcgtggtgaaattaaatatcggattgatgaacaccttattgaagaagcacgagtaa

SEQ ID NO: 90241 - DNA, 1344 bp, Enterobacter aerogenes
atgaagacattacgaccactgtggggcaggggtcagatgatctccccacaacattttcaacagcaggtgaatcaggcggcctggcaaagcgaatgtatcgcccgtctgggggtgatgaatccctgggggatcatccgcgtcgaatttgacgccgcattgctaaaacaggggaagctgaaggccagccacctctatgtacgctttcctgatggaacgcttatcgacagcgataacgctgatgcgctgcctgaggtcatggtgttgccgcaagcggaaagccgcgaattaacggtggtgctggcgctgcctcatgagcatgaaaacggcggcaactgcctgcagatggaacaacgcgcagagcggccggtacgttggcgtttggcctggcgagaagtacgcaacagatatggcgaagacagtcgacaaattgcggtgatgcttgcgcaactgacgctgcgcacagcggatgacaataacggcgattatcaaaccgtcgccgtcgccagattacgtcgcgacagtcaggattgctggtcgttggatgaggactttatcccgccgctgctgaaagtgttggccagccgctggctgcacgaacaaacggaacagctgacgaatcaactgggcgtgcgcctgcaacgcctgatggccatgcgtcgggaaagcaacgccaggatggcggattttgcggtagcggatgtatcgctgttttggctgctgaacgcgcttaacagcgcggagccggtgttgaaccatttcctgcgccatccgcaggtacatccggaacggctgtatgaagcgctggccagcctggcgggcagcctgttgaccttctcccttgaccataccacggcggatattccgccctatcgccatcaggcgttgacagaagtctttccaccgctgttcaaattactcggcgtactgctcgaagccagcctgccatcccgggttgtggcgattgaaatgacgcacgatgaccggcgtaagcgctggcatgcccgtctgcacgatccaaggttgcgcgaagaggccgatttttatctctcggtgcgttccgcgctgcctgcggcgcaactgctggagcagtttccgcaacagtgtaaagccggtagccccgatgaggttgaccgggtggtcaacggttcgcagcccggcattccgctgaaagccatgagtcatgttcccgccgccatcccgctgcgcctggagaatcagtatttcacccttgatatgactcatccggcggcgcaggcgatgctggcggaagggagttgcgtcttttacgtgcccggcctgctgggcgaccctgaactcgaactctatgcggtgctgcgctcatga

SEQ ID NO: 90242 - DNA, 666 bp, Enterobacter aerogenes
atgacccaggatatcaatattgatgctctgctggcggatagctggctaacggtgacggaactgcgccttggagccaaactggccgagggggaggggaaacatctctggcagcgttgtgtagacaacattgaacaggtgatggcgcagttggtggccgctgatatcagcgaggcgaaccgtcagcatatcctctatgcatggtgtgcgctgctggatgaaaccgcgaaagggcgcaatgaggaagatgacgcctgtatcgcctggtacgatcggccgcttgaggttaaatattttggcggcatggaagccggagatgcgctctatgagcgcatccgccaggtgctgcgcgagccggcgccggataacctcgttctgacttgtttccatcgggtgctggcgctggggtttaaggggcggtatggcctcaatgatccggcgcgcgcagcgctcgtcagcgcgcttggcgagcgtgtaccgccgtttgcgggcgatcctcagcagccgattctggcgaatctatccggccgccgcggtctggcagactggctgcgccgttggccggtcagtattggcgtgtcgctggtgctggtggccgcgttgtggttggggttgaactactggctggatgccctggtggcggcgttgcgactgggaggcggacaatga

SEQ ID NO: 90243 - DNA, 1683 bp, Enterobacter aerogenes
atgagcgcgggctatccgcgcctgctatggctgtggggcgggctgctggcggtgttgatgatcctgctgtttctgccgttatccaccggcggccgggtgctggctgttgggctgacggcggcgggcgtagcggccgggctggtctacatcgggcgccaacaacgtgagcggcctgcggatgccgactggctggttgagctaccgccggcgccgtatcgactgccgattgtgctggtctgcggcgacacggcggactggccgggagaaggagcggtttaccgtacggctcaggggtgctggctgagagtcgccaccgccgcgctgcagcagacggtgcgttatgtgcgcaatgagcgcccggcgctcattgcgcaactggcggtgatgttctgcatgcagccgcaacaacatgatgatgacgcggcgctggcggcgcggctacgcgagttgcgctggcagcttgcccaggcgcggggcgatacccgtcgggagataccgttactgctgaacagctctctatccggcgcatcgctggaaccgttatggcagacagcgcgtgccggagagacgttgcaggtgtggctgcctgacggcgtgccgtgcagcagcgcaagctggttgatgcaggctgatggcgctcatcgcctggcggcgcagctaaggataaatgcgcttgcccgctttacgcagcagatggcgttaagcgtactgacggcggccaccgacgatgttcccccgatcgctccggcggtcgtactgtatcatttcacgccagccggggcgcctgccatggcggataatctatggcagcgttggctgtctgagcatacttccctcaactcactaccgggctggttaccggaaattgctgcagaaacgcggaaactgccggatttcattttaccgatactggcgcagggcggcggcatcacgccgaaaagccgtgctctacggcgggcattctgtctgttctccctcgcggccctgattgcgctgtgctgcagcgcatggaacaaccagcaactcctccagcgggttggctttgatgttcagcgctatgaacggacggcgatggacgaccatgtcgcaaaagcccgcgccgtacagattttgcgtcaggatgcggcgcaactggacgccttcgcgcgtgatggcgcgccgctggcgctgggccttgggctctatcgcggcgagcgtctgcgtcagccggtactggcagcaattcgttcctacgtccctccacctccgccgccgaaagcggtagaaaaaatcgtaccgaaaattgtccgtctcgacagcatgtcgctattcgacaccggcaagtggacgcttaaaccggggtccaccaagctgctggtgaactcgctggtggggatcaaagccaggcccggttggctaatcgtcatcgccggacataccgacagcgtaggcgatgataaatccaaccagacactctccctgaagcgtgccgaatcggtgcgtaactggatgcgcgataccggcgacgtgccggaaagctgttttgcggtgcagggttatggcgaaagccgtccggtcgctagcaacgatgcgcagcaaggccgggcgctgaaccgccgggtcgaaattagcctggtgccgcagcccgacgcctgtcaggtttcgacgaactccgcttcaactccggcggatggcgctttctaa

SEQ ID NO: 90244 - DNA, 2379 bp, Enterobacter aerogenes
atgagtgacataaagcctctgttgttcaaccacagccatcatctgttacaggtgcatggttgtaactcgttgctggatgttctgtgctttgaaggcgaggaaaacttaagcgagcctttccgctataccattgaatttaccagcagcgataaagccatcaccccgcagcagatgttgctgcaaaacgcctcgctgaccttgcaggcgccggttgaccagggatttggcattaagatccagcagccggtgcgcgttcttcagggagtgatcaccgcttttgaacggctttccaccgcaaaagaggaaacgcgctacgccttgacgttacagccgcgtctggcgctactgtcgaagagccatcagaaccggatttatcaggatatgtcggcaccgcagattgtggagcacattctcagaacccgtcaccagatgcgcggggaagattttgtctttcaactggcgcatgaatacccgcagcgtgaacaggtgatgcagtacggcgaggacgatctgacctttatctcccgcctgttgtgtgaagtggggatctggtttcgctttaccgccgatacccggctgaatattgatgtggcggagttctacgatgaccagcaacactacgagacgggactgttgttgccttcggtcgctccctccgggcagcatgacggcgggagcgaatcggtgtgggacttacagagccgacaccacgtagttgagcgttcggtctttactcgtgactataactaccgtaacgcgccagaggatatgaatctcaacgtcaatgtcagccgtggcgatagtaccacctacggtgaagcctatcactgggcggacaactatctgacgccgggtaatcgcttccagcatactccggacccggagagcggggccttttatgcccgtattcgtcatgagcgttatctcaaccagcagacgcggctgaatggggaaaccaactgcgcggtgctggctcccggccagcagctaaaagtgagcggcggcgaagaggtgacggacgtctggcgacagggggtggcgatcgctgcgattcactgccgcgcccgtcgcgaccgcagcttcgtcatgacgtttcaggctattccctgcgtagagacttactgctttcgccctgcggtcatcagcaaacccagaatggccgggacgctgccggcgcgcgtcaccagcaccaaaatcaacgatctctatggacatatcgatcgcgacggacgttatcgggtgaacttattgttcgatcgcgatcgctggcagccgggggaggaaagcctgtgggtgcgccaggcgcgcccttacgccggtgaaacctttggcctgcatctgccgttgttagcgggcaccgaagtggcgatcgcttttgagcagggggatcccgataggccctatattgtcggcgcgctgcacgactccacgcaccaggaccacgtgacgctctacaactacaagcgtaacgtgctgcgcacgccggcgaacaacaagattcgcctcgatgatactcggggtaaagagcacgttaaggtcagcaccgaatatggcggcaagagccagctcaacctcggtcatctggtggatcatcagaacacgccgcgcggtgagggatttgagttacgcaccgatagctatggcgcgatccgcggcgggaagggaatatttattaccgccgatgaacagctgaaagcgatgggcgcgaccgtggaaatggatcccgcgagtcaattgctcggcagtgccgttgttcagctcaacgactggcaggagatagcccgcacccactacaacaccccgccggatgtcagcacgttaaagcagttcgtcggcaaagccgtcaatctggcgagccccgtcctgctgatgagcgcgccgaagggcatcggcatcgtgacggcggaaacgacgctgctgcagagtggtaaaggactgtatctgcaaagcgccagcgatattgcgctggccagcggtaatcgtttgtcggtgaataccaaaaacgctatctcgctgctttcccaccgcgaagggatgcgtatggtatcggtgaaaggccctctggagatagagtcgcacggcgacacactggcgctcacttcactgaaggatattaccgttcagtccacgcagggacatctgcagcttaccgccaaaaatggcatcaccctgggctgcggcggcggctacattcgcctgacgccgcagggagaaatccatcttcacagcccgagtctgctcagttttaaaggcacgcataagatgcaggggccggccggcgagacgtttccgcttcccgatcttcccacatcgatatgtaaagactgcctgattcgtgcgcaagaactggctcaggcttttgtgccacgtgccgcctga

SEQ ID NO: 90245 - DNA, 258 bp, Enterobacter aerogenes
ttgaaacccattattcggcagggtgataccttgcgtgagcatggcggtacggtgatcggcggccattatctctgttttggtaaaggcatcgcctgcaaaggcgaccaggtgagctgcaatgaacatggcctgacggtcatagccgaaggaagctcgctatatgaagtggatggttttccggtggctcttgacgggcatcattgcgcctgcggctgtacgctggtgagttcacgccctgattgcgaagtcgcgctatga

SEQ ID NO: 90246 - DNA, 1161 bp, Enterobacter aerogenes
atgagacagctaaccgactatctgccttacaaaaccgccacgccgccccacaacggacggtggttgtccgtcggcgcggggatgacgcttatcagcggaggaggcgcggcgttaatgcctgccgaagcgcgtggcggggcgttaataaccgtcgcaatcgttagcgccatgcttttggtcctcatcatctggatgctgcgtctgctttattaccgcctgtcggttcactacacccagtactaccagcggttgatcgatttcgatcatcaaacgtggtgggcccggcatcaatatagcgttgggctggtggaaacggtgctgctggggccggtgggatgtgaacccgagcgctggcagacgctgctgaagcgagaacatcagccgccaaaagagaaactggaggccggtgcgcgggcgctgcgactgatccactcggacatcgtcgatatcgacttgcgtgaacagcagctagcccgaatgctggcgcaacaatggctggcgcagcgaggcgaacatcaacttcccggcctgaacggctgttactggcagggcagcgaaccggcgtggcgagaattttgcgccgagctgcgcaagcgctgtcccaccgctcagttgccgcatatggcggaaccctggcagggcgaggccagcttatcggagattaccgcgcgaattaatgagtccggcgacgaatgtttcattctggtggcggggtgccagtcggtggcggcgacgggggattcggcgagaccggcgggggaatccgccgcgctctggttactggcccgggagggggaggcgcggctgacccgcggcgaggtttatgaaggcgccgcggtggaaaatatccagcaggtctgtcagcgggcaatgcagcaaagcggggctgaacgtccgcccgatccctgtatcgcattcacacaaccgcaaatcccggaactggcgcaaagcggctggaacagcaaccaactgctgcaggatgaaaactggggtgagacggggcagatggagcagctcatcatcatcgcactggcggcgatatttgcccgccactttcatcagtcttgcggctggatcgcccgcgatccgcgtcaccctctctcactaggcatcgtcaccgcagcagtcccgtcaccgcaacctcaagacaagaaggaatga

SEQ ID NO: 90247 - DNA, 759 bp, Enterobacter aerogenes
atggcgttaatggatcaggaatggatgagcaagctggaacaatttgcgcgaaaactcgcgctgcgcgacgtctatctcattgccgatcaaggcgttttagacaacccgttattggatggcttaaatagactttctcctccggtgcagtggttctcactctatcaggggcaaccggaagagccgctgctggagatggcgcctttattgatgcggcttgagccagcttgctggcagcatcgtcaatggatcgccgatctgatcgccgcattttcctgcaagccgggtctgctgatcttcctctcaccactgagtttttcaacgctcgccgcccacctgcgcaatctggccgacggcgcatgggaagaccgttctggcctggtgcgttattacgatacccgcatgttcccgttgctgatgcagcatgtgctcactgaagaacaaaaagcatggtttttagaaccggtttatctctggagctatcgcgatagagacgacaagatctgctggctggaaggcgagtgttcgcctgttcaggcagcgatcccggaggcgatcaagattaatttcagcgatgagcaaatgatgaaactggatgtcgctatcgatgcccagcaatttacggtttctgaaaaattcagcaccttttttaccacccaggaggacaaatttaacactctttggcagctcggctggcaggcgcatcagcagaattttatcggcgatttagcttcctggttcgaaagccactttgaggaatga

SEQ ID NO: 90248 - DNA, 573 bp, Enterobacter aerogenes
atgataaagcatatccgtattttgtccggcgggctggcggtgctggtcgccgttttgctctgcctgctgactgcctgccgcgatcacagtcgcgacgggatgagcggcgctgatataaacgtcttaaaccacggtccggatgccattgtctcgttgcaggtgaacggctatgggggaccaagggccaattcctacggcggcggcggcggcttctgctgtgtgatggtgcctgatgtctggcgtccgggactgacggcaaaaattacctggacttctgaccctaactcctggatgaaaataagcgatatgcctgacaactattcgcaatactatcagcgccatggcccgatcaccgtgcccattgaacgctgggaagaggatcaggcttgcggctttcatgtgcatattttcccctgcgataaggtgcggatagtccgttcctgcattccaccgggacagccggggtatccggttccccagtctccaccggactggaaggaaagagctcagaaaatacttatcaaacatatcaaggaggaagttgtatgtccgacaccgcagactccacgctga

SEQ ID NO: 90249 - DNA, 186 bp, Enterobacter aerogenes
atgctgattctgactcgtcgagttggtgagaccctcatgattggagatgaggtcactgtgacagttttaggggttaagggtaaccaggtacgtattggtgtcaacgcccctaaagaagtctctgtacatcgtgaagaaatctaccagcgtatccaggctgaaaaatcccagcagtccagttactaa

SEQ ID NO: 90250 - DNA, 2628 bp, Enterobacter aerogenes
atgagcaagagcaccgctgagatccgtcaggcgtttctcgactttttccatagtaagggacatcaggtagttgccagcagctccctggtgccgcacaacgatccgaccctgctgtttaccaacgccgggatgaaccagttcaaggatgtcttccttggtctcgacaaacgtaattattcgcgcgcgaccaccgcgcagcgttgcgtgcgtgcgggcggtaaacacaacgatctggaaaacgtcggttacaccgcgcgtcaccacaccttcttcgaaatgctgggcaacttcagcttcggcgattacttcaagcaggatgccatcaaatacgcatgggaactgctgaccggtgagaactggttcgccctgccgaaagaaaaactgtgggttaccgtttacgagaccgatgacgaagctttcgacatctgggccaatgaagtgggcgttccgcgcgagcgtattatccgcatcggcgacaacaaaggcgcgccgtttgcttctgataacttctggcagatgggcgataccggtccgtgcggcccatgcaccgaaatcttctttgaccatggcgaccacatctggggcggccctccgggaagcccggaagaagatggcgaccgttacattgagatctggaacatcgtcttcatgcagttcaaccgtcaggctgacggtaccatggagccgctgccgaaaccttccgttgataccggtatggggctggagcgtattgccgctgttctgcagcacgttaactccaactatgacatcgacctgttccgcaacctgattgcgagcgtggcgaaagtcaccggcgcgaccgatctgactaacaagtcgctgcgcgttattgccgatcacattcgttcctgcgcattcctgattgctgatggcgtgatcccgtcgaatgaaaaccgcggctacgtgctgcgtcgcatcattcgccgcgcgattcgccacggcaacatgctgggcgcgaaagacaccttcttctggaaactggttgctccgcttatcgacgtgatgggcgccgccggtgaagagctgaaacagcagcaggctctggttgagcaggtgctgaaaaccgaagaagagcagtttgcgcgcacactggagcgtggactggcgctgctggatgaggaactgtcgaagcttaaaggcgacacgctggacggcgaaaccgccttccgtctgtatgacacctatggcttcccggttgacctgactgcggatgtctgccgcgagcgcaacatcaaggttgacgaagcaggctttgaagccgcgatggaagagcagcgccgccgcgcacgtgagtccagcggtttcggcgctgactataacgcgatgattcgcgttgacggcgcatcggaatttaaaggctacgatcatctggagctgaacggcaaagttactgcgctgttcatcgacggcaaagcggttgatagcgtcagcgcgggtcaggatgcggttgtagtccttgaccagacgccgttctatgcggaatccggcggtcaggtaggcgataaaggcgaactgaaaggcgctggcttctccttcgcggtcagcgatacgcagaagtacggccaggctattggtcatatcggtaaagtcgccagcggttccctgaaagtgggtgacgcggtgcaggccgatgtcgatcaggctcgccgtcagcgtatccgtctcaaccactccgcgacgcacctgatgcacgcggcgctgcgccaggtcctcggtacccacgtggcacagaaaggctcactggttaacgataaagcgctgcgttttgacttctcgcattttgaagcgatgaagccggaagagattcgtgcggtagaagatctggtcaacgcgcagatccgtcgtaacctggctatcgaaaccaatattatggatatcgatgccgcgcgtgaatccggcgcaatggcgctgttcggcgagaaatacgacgatcgcgttcgcgtactgcggatgggcgatttctccaccgagctgtgcggcggtactcacgcggcgcgtaccggtgatatcggcctgttccgtattacctctgaatccggtaccgccgcaggcgtgcgccgtattgaagcggtgaccggcgaaggggcgattgccagcctgcatgcgcagagcgatcagctcagtgatatcgcgcagttgctgaagggcgatagccacagcatcggcgataaagttcgcgcggcgcttgagcgtacccgtcagttggaaaaagagctgcagcagctgaaagagcaggctgcagcgcaggagagcgctaatctctccagtaaagccgaagaaattaacggcgttaagctgctggtcagcgagctggccggcgttgagccgaaaatgctgcgtaccatggttgatgatctgaaaaaccagctcggttcgacggtcgttgtattagctacggtagcggatggtaaggtttctctgattgcaggtgtgtctaaggatgtgacagaccgcgtgaaagcaggggagctggttggtatggtcgcccagcaggtgggcggtaaagggggcggtcgtccggatatggcgcaagccggcggtaccgatgcgtctgctctccctgctgcgttagccagtgtgaaaggctgggtcagcgcaaaactgtaa

SEQ ID NO: 90251 - DNA, 501 bp, Enterobacter aerogenes
gtgactgagacttcaccacgccgctccggctatgcgcgtctgttggatcgcgcaattcgtattctggcgatgcgcgatcatagcgaacaggagctgcggcgtaagctggcggcgccggtaatgagtaaaaacggccctgaaaagctggacatcacgtcggaagagctcgaacaggttgtcggctggtgcctggaaaaccgctatcttgatgaccagcgttttgttcgccagtttattgccagccggagccgcaagggctatgggccggcacgtatccgccaggagttgaatcaaaagggcattggccgcagcgacatcgaaagcgcgatgcgcgagtgtgaaatcgactgggcggcgctggccaaagagcaggcgcagcgtaaatacggcgaaccgttacctaccacctttactgaaaaagttaaaatccagcgatttttgctgtaccgcggctatctgatggaagatatccaggaaatctggcgaaattttgcagattga

SEQ ID NO: 90252 - DNA, 1059 bp, Enterobacter aerogenes
atggcgatcgacgaaaacaaacagaaagcgttggcggcagcactgggccagatcgaaaagcaattcggtaaaggctccatcatgcgcctgggtgaagaccgttccatggacgtggaaaccatctccaccggttcgctttctctggatatcgcgctcggcgcaggcggtctgccaatgggccgtatcgttgagatctacgggccggaatcatcgggtaaaactaccctgacgctgcaggttatcgccgcagcgcagcgtgaaggcaaaacctgtgcgttcatcgatgccgaacacgcgctggatccggtatatgcccgcaagctgggcgttgatatcgacaacctgctgtgctcccagccggataccggcgagcaggcgctggaaatctgtgacgcgctggcgcgttccggcgcggtagacgttatcgtcgtcgactccgtggcggcgctgacgccgaaggcggaaatcgaaggcgaaatcggcgactctcacatgggcctcgcggcgcgtatgatgagccaggctatgcgtaaactggctggtaacctgaagcagtccaacacgctgctgatcttcatcaaccagatccgtatgaaaatcggcgtgatgttcggtaacccggaaaccaccaccggtggtaacgcgttgaagttctacgcttccgtgcgtctggacattcgccgcatcggcgcggtgaaagagggcgacaacgttgtcggcagcgaaacccgcgtgaaagtggtgaaaaacaaaatcgccgcgccgttcaaacaggctgaattccagatcctctacggtgaaggcatcaacttcttcggcgagctggttgacctcggcgtgaaagagaagctgattgaaaaagcgggcgcctggtatagctacaacggcgacaaaatcggtcagggtaaagcgaacgcaatctcctggctgaaagataacccggcggcggcgaaagaaattgagaagaaagttcgcgaactgctgctcaacaaccaggactccacgccggacttcgcggttgacggcaacgacgcagaagaaaccgaacaagatttctga

SEQ ID NO: 90253 - DNA, 498 bp, Enterobacter aerogenes
atgaccgattcagaattaatgcagctaagcgaacaggttgggctggcgctgaaagcgcagggcgcgacggtgaccaccgcggagtcctgcaccgggggctggatagccaaagcgctgaccgatattgccggtagctcagcgtggtttgagcgcggtttcgtgacctatagcaacgaagccaaatcgcagatgattggcgtgagcgaagtgacgttactggataacggcgcggtgagcgaaccggtggttgtcgagatggcaattggcgcgctacgcgcggcgcgcgccacctatgcggtatcggtcagcggtatcgccggcccggacggcggcagcgcggagaagcccgtcggcaccgtgtggttcggcgtcgcctgtgcgaacgggcagggcgtgacccgccgcgaatgctttgccggagaccgcgaagcggtgcgtcgtcaggcgacggcctatgcgttaaatctgctctggcaacaatttctacaaaatacttga

SEQ ID NO: 90254 - DNA, 879 bp, Enterobacter aerogenes
atgaaacgaagtgcagtggtgatggcgttagccgtggggctgatggcgcagggggcgatagcaaaaacgctgaacgtggtaagcagtttttcggtgctgggcgatatggtgcagcaggtcggcggcgagcatgttcatgtcgatacgctggtagggccggatggcgatccgcacacctttgaaccttcaccgaaggatagcgcgctgctcagcaaagccgacgtggtggtggtcaacgggcttggtctggaagggtggctggatcggctggtgaaagcgtccggttttaagggcgaattagtggtggcgtcaaaaggggttaagacgcataccctcgatgaagacggtaaaacggtgaccgatccgcacgcctggaatagcgccgctaatggcgcgttatacgcgcagaatatccttgatggcctggtgaaagccgacccgcaggataaagcggcgctccagagccgcggtaagcgttatatcgagcagctgacggcaattgacggctgggcgaaggcgcagtttagcgccatcccgcaggtgaagcgtaaagtgctgaccagccatgatgctttcggctattttggccgcgcttaccacgtgacgttccttgcgccgcagggactctcatccgagagcgaagctagcgcggcgcaggtggcggcgttgattaagcaaatcaaagccgatggcgtgcatacctggtttatggagaaccagctggacccgcgtctggtgcagcaaatcgctggcgcgacgggggcgcaaccgggcggcgaactctatccggaagcgctgtctaagccgggcggcgtggccgatagctacgttaaaatgctgcgccataacgtcgagctcatcgtcaatagtatgaagtaa

SEQ ID NO: 90255 - DNA, 864 bp, Enterobacter aerogenes
atgatctggcataccttttttcaaccttttattgaatttggctttatgcgccgggcgctggtggtgtgcttcgcgctgtcgctgagcaccaccatgttaggcgtgctattgctgctgcgacggatgagcctgatgggcgatgcgctgtcgcacgccattctgccgggagtggcggcgggttatctccttaacggcatgtcgctgctggcgatgagcgttggcggatttatcgccgggatcgcggtggcgctggtggcggggtgggtcagccggcgaacgccgctgaaagaggacgccagttttgccgggttttacctcggctcgctggcccttggcgtcacgctggtctcgctgcgcggctccagcgtcgatctgctgcacctgctgttcggttcgattctggcggtggatagcgacgcggcgttctttgtcaccggcgtggcgagcctgacgctgctgtgcattgcgctgttttatcgcgggctggttagcgaggcgttcgatagcgcctggctacaggtcaacgcgcggcggctaccggcgctgctgcacggcctgtttctcgcgctattggtactgaacctggtggcggggtttcaggtgctcggcacgttaatggcggtagggctgatgatgttgcccgcggtagcggcgcgctgctgggcacgaacgctgccgggcattttgttgctggcggcggcgatcggcgcgttttgcgcctggatgggattgagcctttcgtgggcagtgaatttacccgccgggcccgccatcgtgctgaccgccagcgtactgttttttatttcagtgttttttggcacgcgcagccggctggtcgttggctggcgcaaattaatggggtaa

SEQ ID NO: 90256 - DNA, 678 bp, Enterobacter aerogenes
atgattgagttggatcatatggttgccgggtatgaaggcatggcaatcactccggcgatgagcggcgtgattgcggcgggaagcctgacggcgattgtcgggcttaatggctgcggtaaatcgacgctgctgaaaacgctggctggatttattccgccggttagcggccggctgaactggcgcaaagggcggcccgtggttggctggctggcgcagcgccatgccctggaatcacagtttccgctgctggtgcgcgatgtcgtgagtcagggggcctggccgcgggtctcgctgctgcgcggcttgggcggcgacgagcgtcggcgcatcgccgcggcgctcgagcgggtggggatcagcgcgctggctaatacgccaattgaagagctctcgggcggccagttccagcgcatgctctttgccagggtgatggtgcaacaggcgccgctggtgatgttggacgagccgtttaccggcgtcgatgaggccaccagccgcgagctgatggcgcttatcgtcgatatgcaccgccaggggcaaacgatactggcggtgctgcacgataaccagtgcgtggccgatttctttcccgagacgctgctgcttgaaccccagcacgcgcgctggggcgagacgtcaagcgtgcttcccgccttcaacaccgcgaggcaggcatga

SEQ ID NO: 90257 - DNA, 1227 bp, Enterobacter aerogenes
atgagtgaaaaaattaacgtgcggatcgaactcggagaacgtgcaaaaaaaggactattttgtctgcaaatgtattgccgcttccttgttggcgggcgcatgctttaccataattaccctttgccgattttgttaaatggaattcccatgttgaagcgtcgctatctggctttactccctttatgtgcacttctggctgcctgcagcagcaaacctaagacccccgcggaagcggagatggcgagcggcaccggcggctttttgctggaaccgcagcataacgtgatgcagatgggcggcgatttcgccaataacccagcggcggcgcagttcatcgataagatggtggcgaagcacggcttcgatagacagcagctccaggagatcctgtcgcaggctaagcgcctggactatgtgctgcggctgatggatcgccaggcgccgagcgggctgccgccgaccgggccaaacggcgcctggttacgctataagaaacagtttattacgccggataacgtgcagaacggcgtgatgttctggaaccagtatcaggacgcgctgaaccgcgcgtatcaggtctacggcgtaccgccggaaatcatcgtcggcattatcggcgtggaaacccgttggggccgggtgatgggcaaaacccgcatcctcgatgcgctggcgacgctgtcgtttaactatccgcgccgcgctgaatacttctcctctgagctggaaaccttcctgctgatggcgcgcagcgaaagcgatgacccgctggatctgaaaggctcctttgccggcgcgatgggctacggccagtttatgccgtcgtcgtataagcaatacgcggtggacttcaacggcgacggtcatatcaacctgtgggatccggttgatgccatcggtagcgtggcgaactactttaaacagcacggttgggtgagcggcgataccgtcgcggtgcaggcgctgggccaggcgccgggtctggataacggctttaaaaccaaatacagcgtttcacagctgtcggcggcgggattaaccccaacgcagccgcttggcaaccatcagcaggccagtctgctgcggctggatatcggcaccgggtaccagtactggtatggtctgccgaacttctacactatcacccgatataaccacagcacccactacgcgatggctgtctggcagctggggctggcggtttcgcaggcccgcggcgggtattga

SEQ ID NO: 90258 - DNA, 564 bp, Enterobacter aerogenes
atgattgaaatcgttacccacggcgctgagtggttcatcggcctgtttcagaaaggcggcgaggtgtttaccggtatggtgaccgggatcctgccgctgctgataagcctgctggtgatcatgaacgcgctgatcaactttatcggccagcagcggatcgaaaagctggcgcagcgctgcgccggcaacccgcttacccgttacctgctgttgccctgcatcggtacctttgtcttctgcaaccccatgaccttaagccttggccgctttatgccggagaaatacaaaccgagctactacgcggcggcctcctatagctgtcattcgatgaacgggctgtttccgcacatcaaccccggcgagctgtttgtctatctcggtatcgccaacggcctcaccacgctgggcctgccgcttggcccgctggcggtgagctacctgctggttggcctggtaaccaacttcttccgcggctgggtcaccgacctgaccacctctattttcgaaagaaaaatggcgattcaacttgaccagaaagtgcatctgtcaggagcgacatcatga

SEQ ID NO: 90259 - DNA, 972 bp, Enterobacter aerogenes
atgacccgtattcgtattgaaaaaggaaccggcggttggggcggcccgcttgaactcgacgttgttgagggcaaaaagattgtctatatcaccgcaggcacccgcccggcgatcgtcgatacgctcgccagcctgaccggctggcaggcggttgatggatttaaagaaggtgaaccggcggaaagcgaaattggcctcgccattattgactgcggcggcaccctgcgctgcggcctctacccgaagcgccgtattccgaccatcaacatccacgccaccggtaaatccgggccgctggcgcagtatatcgtcgaagatatttacgtctccggagtcaaagaagagaacatcaaactgctggaagatagcggcgagacggcagtgcaaccactccccgccgcgggccgcgattacgataccagcaagaagattaccgaacagagcgacggcctgctggctaaggtcgggatggggatgggttcagtggtcgcggtgctgttccaggccgggcgtgacaccattgatacggtgctgaaaaccattctgccgtttatggccttcgtctcggcgctgatcggcatcatcatggcctccggcatcggcgactggattgcccacggcctggcgccgctcgccagccatccgctggggctggtgacgctggcgctgatctgctccttcccgctgttatcgccgtttctcggccccggcgcggtgatagcccaggtgatcggcgtgctgatcggcgtccagatcggccttggcaacattccaccgcacctcgccctgcccgcgctgtttgccattaatgcccaggccgcctgcgattttatcccggtaggcctgtcgctggccgaagcccgtcaggataccgtacgcgtcggcgtgccgtcggtgctggtcagccgcttcctcaccggcgcgccaaccgtgctgatcgcgtggttcgtttccggatttatttaccaataa

SEQ ID NO: 90260 - DNA, 363 bp, Enterobacter aerogenes
atgaccgtcatttaccacaccactattacccgtatcggcgccagcgcggcgacggcgctggaagaacagatgcttattaccttccgcgagggcgcaccggcggatatcgaagagtattgctttattcacaaccacggcgagctgtgcggcgagctgcgcccgggcgcagagctacagctcggcgatcggcattatccggtgaccgccgtcggcgaggtcgccgagcaaaacctgcgcgagctgggccacatcaccctgcgctttgacggccatcgtcaggcggagtttcccggaaccgttcacgtcgcgggcccggtaccggacgccatcgcgaccggctgtgtactgaaatttgttgcttag

SEQ ID NO: 90261 - DNA, 780 bp, Enterobacter aerogenes
atgaatcaggttgctgttgtcataggtggcggacaaaccttaggagagtttctgtgccgcggtctggccgccgagggctaccgcgtggcggtggtcgatatccaaagtgaaaaagccagccgcgtcgcccaggagatcaacgctgaatatggcgaaggtacggcatacggcttcggcgccgacgccaccagcgaagccagcgtcacggcgctggcccacggcgtagatgagattttcacgcgcgtcgatctcctggtctacagcgccggtatcgctaaggccgcctttattagcgacttcgcgctgggcgattttgaccgctcgctgcaggtcaacctggtgggctatttcctctgcgcccgcgagttctcacggttgatgatccgcgatggcattaaaggtcgcatcattcagatcaactcgaaatccggcaaagtcggcagtaagcataactcaggctatagcgcggcgaagttcggcggcgtcgggctgacccagtcgctggcgctggatctggcggaatacggcattaccgtgcattcgctgatgctcggcaatctgttgaaatcaccgatgttccagtcgctgctgccgcagtacgccaccaagctcggcattgatgagagcgaagtcgagcagtactacatcgataaggtgccgttgaaacgcggctgcgattaccaggatgtgctgaacgtgttgatgttctacgccagcccgcaggcatcgtactgcaccgggcagtcgattaacgtcaccggcggccaggtgatgttttaa

SEQ ID NO: 90262 - DNA, 360 bp, Enterobacter aerogenes
atggttaccgcactcattaccgtcgccgctattgcctggctttgccaactggcgttcggcggctggcagatccgccgcttcaatcgcgcctttgatagcctttgccagcagggccgcgtcggcgtcggccgctcctccgggcgctttaaaccgcgcgcgattgtcgctatcgccgtcgatgaaaacgatcgtatttgcgatacgctgttgatgaagggactcaccgtcttcgccagtccgcaaaaaatccccacgcttagcggtaaacatctcgaggaattgcagcctgatgtgatctttcccaatgatccgctctgtcagaatgcactatcattagcgcttaatccgaaacatgcataa

SEQ ID NO: 90263 - DNA, 774 bp, Enterobacter aerogenes
atgaaaccacgtcagcgccaggcagccattctcgagtacctgcaatcgcagggcaaatgctcggtcgaagagctggcgcaacacttcgacaccaccggcaccacaatccgcaaggatctggtgattctggagaatgccgggaccgtcatccgcacctacggcggcgtagtgttaaataaagacgaggccgacccgcctatcgaccacaagacgctgatcaacacccacaagaaagcgcagattgccgaggccgccgtacgatacatccacgatggcgattcaattatcctcgacgccggcagtaccgtgctgcagatggtgccgctgctgagccgcttcaataacatcacggtgatgaccaacagcctgcatatcgtcaacgcgctttccgagctcgataacgagcagaccatcctgatgccgggcggcaccttccgtaaaaaatcggcctcttttcacggccaactggcggaaaacgccttcgaacaattcagcttcgacaagctgtttatgggcaccgacggcattgatctggtcgcgggcgtcaccacctttaacgaggtctataccgtaagtaaggcgatgtgtaacgccgcccgcgaagtgatcctgatggccgactcatccaagtttggccgtaaaagtcccaacattgtctgcggccttgaacgcgtggataaattgattaccgatgccgatattgaccctgaattccagcgggcgctggaagccaaaggtattgaagtcattattactggagaacatcatgagtaa

SEQ ID NO: 90264 - DNA, 966 bp, Enterobacter aerogenes
atgagtaactttttgttagaggccggacgccagaccctgatgcttgagctgcaggaggcgagccgcctgccggaacgcctgggcgacgacttcatccgcgcagcggaaaccattatccactgcgagggcaaactgattgtctccggtatcggtaaatccggccacatcggtaaaaagctggcggcaaccttcgccagcaccggcaccccggcctttttcgtccatccggcggaagccctgcacggcgatctcggcatgctcgatagccgcgacgtgatgctgtttatctcctactccggtagcgcgaaagagctggatctcatcgtgccgcggctggaagagaaatccattccgctgctggcgatgaccggcaaatccacctcgccgctggcgctggcggcgaaagcggtgctggatatcgccgtggagcgcgaagcctgcccgatgcatctggccccgacctccagcaccgtcaacacgctgatgctgggcgacgcgctggcgatggcggtgatgcaggcgcgcggtttcaatgaagaagatttcgcccgttcccacccggcgggcgccctcggcgcgcgtctgctgaacaaagtgcatcacctgatgcgccgcgacgaagaagtgccgcgggtcaatgccgaggccaacgtcatggacgccatgcttgaactaagccgaaccgggctcggcctggtggcggtatgtgatgaaaccaaccgcgtgcagggcgttttcaccgacggcgacctgcgccgctggctggttgctggcggtacgctcaacgatagcgtcactcgggcgatgacccgcaacggcgtaacgctgcaggcggaaagccgcgcggtggaagccaaagagcggctgatgaaacacaaaatcagcgccgcgccggtcgtggatgaaaacggccaactggtcggcgccatcaacctgcagaacttttaccaggcagggatcctttaa

SEQ ID NO: 90265 - DNA, 1551 bp, Enterobacter aerogenes
atgagtttttccgtcgacgagctggcgagaatcgccattgatttacaaagcgatatcggtcatgccgaccgtttttcgcgcctgattactaccctgcggcagatcctcggctgcgatgcctcggcgctgctgcgctatgaggcgcatcagtttgtgccgctggcgatcgatggcctggcgcaggatgtgcttggtcggcgctttgccctggaaggacacccgcggcttgaggcgattgcgcgtgccggggatgtggtgcgcttcccggcggatagcgatttgcccgacccctatgacgggctgatccccggtcatgagagcctgaaggttcacgcctgcgttggcctgccgctgttcgccgggcagacgctgattggcgcgctgacccttgatggtatggatgccgatcgtttcgatagtttcagcgatgaagagctgcggctgattgccgcgctggtggctggcgccttgaataacgcgctgctcatcgcccgccttgaggcgcaaaatgtgttgccggtgcaaccggtgaatgacgcgcagcctgagcgtcaggagattatcggcctgtcggcgcccatgctgcagctgaaaaaagagatcgatatcgtcgccgcctcggatttaaacgtgctgataagcggcgaaaccggcaccggtaaagagctggtggcgaaggcggtgcaccagggatcgccgcgagccgccaatccgctggtctatctcaactgcgcggcgctgccggaaagcgtggcggagagcgagctgttcggccatgtgaaaggggcatttaccggggctatcagcaaccgcagcggtaaatttgagatggctgataacggcaccctgttccttgatgaaatcggcgaactgtcgctggcgttgcaggcgaagctgctgcgcgtgttgcagtatggcgatattcagcgcgtcggcgatgaccgcagcctgcgggtcgatgtgcgggtgctggcggcgacgaaccgcgatctgcgccaggaggtggtggaagggcgctttcgcgccgatctgtaccatcggctgagcgtcttcccgctgtcggttccggcgctacgcgaacgggaaaacgatgtggtgctgctggcgggctatttctgtgagcagtgccgcctgcggatggggctggcgcgggtcattttggctgaggcggcgcgaaacaggctgcagcagtggtcctggccgggcaacgtgcgcgaactggagcatgctattcaccgggcggtggtgctggcgcgggccacccaggccggtgatgaagtggtactggagccgcagcatttccagtttgctgtgacggcgccgatgttgccgaatgagacggcggcagcggcgccggcgacggaaaacgtcaatttgcgcgaggcgactgactcttttcagcgagaagcgattagccgcgcgctggaggcgaaccagcgcaactgggcggcgaccgcccgtgcgctggaactggacgtcgccaacctgcatcggctggcgaaacgtctggggcttaaaggatccctgcctggtaaaagttctgcaggttga

SEQ ID NO: 90266 - DNA, 1443 bp, Enterobacter aerogenes
atgtctattgcggttaaaaataacattctttgggttggccaacgcgattgggaagtgcgtgatttccacggcaccgaatataaaacgctgcgcggcagcagctacaacagctatctcattcgcgaggagaaaaacgtgctgatcgataccgtcgatcataaattcagccgcgagttcgtgcagaacctgcgcagcgaaatcgatctggctgacctcgactatatcgtcattaaccacgccgaagaggaccatgccggcgcgctgaccgaactgatgatgcagatcccggatacgccgatttactgcaccgccaacgccatcgactcgatcaacggccaccatcatcatccggagtggaacttccacgtggtgaaaaccggcgatactctcgatatcggtaatggtaaacagctgatcttcgtggaaacgccgatgctgcattggcctgacagcatgatgacctacctgaccggcgacgcggtgctgttcagcaacgacgccttcggccagcactactgcgacgaacatctgttcaacgatgaagtggaccagattgaactgtacgaacagtgccagcgctactacgccaacatcctgacgcccttcagccgcctggtgacgccgaaaattaccgaaatcctcggcttcaacctgccggtggatatgattgccacctcccacggcgtggtctggcgcgataacccgacgcaaatcgtcgagaaatacctcgagtgggcggcggattaccaggaagatcgcatcacgattttctacgacaccatgtccaataacacccgtatgatggcggacgccatcgctcaggggatcactgaagtcgacccgcgggtagcggtaaaaatcttcaacgtcgcccgcagcgacaaaaacgacattctcaccaatgttttccgctcgaaaggcgtgctggtgggcacctccaccatgaacaacgtgatgatgccgaaaatcgccgggctggtggaagagatgaccgggctgcgttttcgcaataaacgcgccagcgcctttggctcacacggctggagcggcggcgcggtagaccgcctgtccacccgcctgcaggatgccggctttgagatgtcgctgagcctgaaagccaaatggcgcccggatatcgacgcgctggaactgtgccgccaacacggtcgtgacatcgcccgccagtgggccctctcgccgctaccggttgctgaagcagcgacaacgccggaaccacaggattgcgcctgcgccgcggccgccgatctcggccccatgatgcagtgcagcgtgtgccagtgggtctatgacccggcgaaaggcgaacctaaccaggatgtacagccgggtacgccgtggagtgaagtgccggacaatttcctctgccctgagtgttctcttggcaaagatgtctttgacgtactggcgacggaggcaaaatga

SEQ ID NO: 90267 - DNA, 1134 bp, Enterobacter aerogenes
atgagtgatggcatcgtcatcatcggctcgggcttcgcggcccgccagctggtgaaaaatattcgcaagcaggatacgcaaatcccgctgacgttaatcgccgccgatagcatggatgagtacaacaaaccggatctcagccatgtcatcagtcgcgggcagaaggccgacgatctgaccctgcaaagcgcaggcgagttcgccgagcagtacaatctgcgtttgtttccccatacctgggtaagcgatatcgacgccaaaaaccggttagtgaagagccaggataaccagtggcgctacgacaaactggtgctggccaccggcgcgacgccgtttatcccgccggtgccgggacgcgagctgatgctgacgctgaacagccagcgcgaatatggcgcggcgcagagccagctgcacgacgcgaagcgcgtgctgatcgtcggcggcggcctgattggctgtgaactggcgatggatttctgccgcgccggtaaagcggtaacggtagtcgacaattcagccagcgtgctggcggcgctgatgccgccggaggccagcagccgcctgcagcatcggcttaccgagatgggcgtacatctgatgctcaaggcgcagcttgaggggttagagcaaaccgccgacggcattcgcgtcagcctcgaccgccagcgcgcgataaccgtcgatgcggtggtggccgccgccggcctgcgcccggaaacgtcgctggcgcgccacgccggattgcagattaaccgcggcgtggtagtcaatagccacctgcaaaccagcgacccggcaatttatgcgctcggcgactgtgcggaaatcaacggtacggtactgccgttcctgcagccgattttactcagcgccatgtgcctgagtaaaaacctgctggcgcaaacgggcgagctcaccttgccgccaatgctggtgaaagtgaaaacgccggatctgccgctgcatctggccggcgacacccgccgcgacgatctgacgtggaatatcgtggccgccaaagaggggctggtggcgaaaggcgtggatgccgaaaaccagctacgggcctttgtggtgagtgaagacaaaatgaaggaagcctttgcgctgctcaagcaactggtgaggtga

SEQ ID NO: 90268 - DNA, 1014 bp, Enterobacter aerogenes
atgataacgatgattttacgccaacagccgcgtgcggcggcgctggttctgggacttatcgccgcgaacgccctggcctggctatgggcgtttcaggcgtttggcgacagcggggcattgatggccgccagtctgctggcctggggttacggcctgcgccatgcggtcgacgccgatcatattgcggcgattgataacgtcacccgcaaaatgatgcagcaggggcggcggccgtttggcgtcggggcgtggttctcgctagggcattcgtcgatcgtggtgctggcgtcggcggcgatcgccgcgacggccaccgccttcagccagcagatgagctggctacacgaaaccggcagcgtgattggcactgcggtatcggcgctgtttctgctggcaatggcgctggtcaatctggtgattttgcgcagcgtatggcgcagcttccaggcgtggaagcgcggtgaaaaggtcagcgacgaaatcgtcagcggcggcggcatgatgagctggctgtttggcaagaccttccggctgataagccgcagctggcagatgtatctggtgggttttttgttcggtctcggctttgataccgccaccgaaatcggcgtgctgggtatttccgccgccggcgcgtcgagcggcatttcgatttggtcgataatggtcttcccggcactgttcgccagcggtatggcgctggtggatacgcttgataatgtgttgatggtcggcgcctacggttgggcattcagcaagccgcagcgcaagctctattacaatatgaccatcaccgctacctcggtggtggtggcgctgtttatcggcggcctggaggcgctggggctgttaatggataagttcgccctaagcggcggggtgtggcgctgggtaggggcgttaaacgataacctcggcgatgccgggtttgtggtggtggggttgttcgtcgtttgttgggcgctgtcggtgattaattatcgctggcgcggctacgataatttggcgcgctag

SEQ ID NO: 90269 - DNA, 2229 bp, Enterobacter aerogenes
atgaacggggtgcaaatccgcatacgcggcaaagtgcagggggtgggtttccgcccctttgtctggcaactggcgcggcaaatggcgcgcggcggcgatgtctgtaacgacggcgacggcgtgctggtcagactgaccggcgacgacggtggcttttctgccgcgttggctcgtcactgcccgccgctggcgcgcattgacagcaccgactgcaccccgtttcactggcacaggcttcctcaggatttcaccattcgccacagcgacggcggcagtatgcgcacgcagattgttcccgatgccgcaacctgcccggcgtgcctggcggagatgaacgatccgcaagaacgccgctaccgctacccctttatcaactgtacccactgcgggccgcgcttcaccattattcgcgccatgccatacgatcgcccctttaccgcgatggcgccgttcccgctgtgtccgcgctgcgctgccgagtatcggcagcctgccgatcgccgttttcacgcccagccggtggcttgtgccgattgcggcccacagctggagtggcgggcgggaacgctaacgctattcgctgaagcggccctgcaggcggccatcgcgcggctggcggcgggcgatattgtggcgataaaagggattggcggttttcatctggcctgcgatgccggcaatagcgaggcggtggcagcgctgcgcgcgcgtaaacggcgcccggcaaaaccgctggcggtaatgctgccgacggcaacggggttacccgccgcggcggcaacgctgctgcgctcgcccgccgcgccgattgtattgctggctaaagcgcaggttcccggcctgtgtgacgagattgcgtcagggcttgcggaagtcggggtgatgctgccgtctaatccgctgcagcatttacttctgcaggcgctggcgcgcccgatagtgatgacctccggcaacctcagcggccgccctccggcattgagtaatcacgaagcgctcaccgacttagccgctatcgccgacggttttctgctacataatcgcgatatcgtgcagcgtatggacgattcgctggtgcgctcaagcggtgagatgctgcgccgcgcccgaggctacgtgccggatgcgctgccgctgccgccgggcctggataatattccgccgctgctggcgctgggggcggatatgaaaaataccttctgtctggcgcgcggcgacgaggcggtgctgagccagcattttggcgatctcggcgaggagggcgtcgagcaacagtggcgcagtgcgctgcggttaatgcagagcatttatgcgtttgcgccgcagcgggtggcggttgacgcccatcccggctatcgctcaacgcggtgggcggcgtcaatgtcgttaccggtcgagccggtactgcatcaccatgcccacgcggcggcttgcctggcggaacaccgctggccgctcgacggcggcgatgtgattgccctgacccttgatggcatcgggatgggggaaaacggcgcgctgtggggcggcgaatgcctgcgggtgaactaccgcgaatgcgaacatcttggcggcctcccggccgtcgcgctgccgggcggcgatctggcggcgcgccagccgtggcgaaatttgttggcccagtgcctggcatttattcccgactggcagtcatacccgcaaaccgccgcgctggggcagcgaaactggccgctgttggcgcaggccatcgaacgcggcattaattcgccgcgcgcctcttcctgcggacggctgtttgatgccgtcgcctgcgcgctggattgcgcgccggaaaccctgagctacgaaggcgaggcggcctgtcggctggaggcgctggccgccagctgtccgggcgtcagccatccgatcacgctgccctggcgcggcggcgagctggatttagccaccttctggcgacagtggttgcgctggcaggcgacgcccgcgcagaaagcctgggcctttcatgatgcgctggcctgcgggctggcggcgctggcgcgcgaccgcgccgcttcctgcgggatcgcgacgatcgtttgtagcggcggcgtactgcataatcagctgctcgccgcccgcctcagcgattacctctcggattttactttgcttttgccgcagcagcttcctgctggcgatggcgctatcgcctacggtcaggcggtggtggccgccgcccgctggcagtctcaaaggatttaa

SEQ ID NO: 90270 - DNA, 528 bp, Enterobacter aerogenes
atgaaccgtttcattatcgccgatgcgagcaaatgcatcggctgccgcacctgtgaagtggcctgcgtggtctctcatcaggaaaatcaggattgcgccgcgctgacgccgcagtcgttcttgccgcgtattcacgtgatcaaaggcgtcaatgtgtcgacggcgacggcctgtcgtcaatgtgaagacgcgccgtgcgccaacgtctgcccgaacggcgccatcagccgcgataaaggctttgtccacgtgatgcaggagcgctgcatcggctgtaaaacctgcgtcgtggcctgcccgtatggggcgatggaagtggtggtgcgcccggtcgttcgccacagcggcgccgggttgaacgtcatggcggaaaaagccgaagccaacaagtgcgacctgtgccaccagcgcgatagcggtccggcctgcattgaagcctgcccgacccacgcgctggtttgcgtcgaccgcaacaagcttgagcagatgaacctcgaaaaacgtcgccgtacggcgctggcctggtaa

SEQ ID NO: 90271 - DNA, 1014 bp, Enterobacter aerogenes
atggcaacgatgctggaggttgcgaagcgcgcgggagtatcaaaggcgaccgtgtcgcgggtgctgtcgggcaacggctatgtcagccaggaaaccaaagaccgggtgtttcaggcaattgccgaaagcggctatcggccgaatctgctggcgcgtaatctggcgaccaaaaaaagccagactatcggactggtggtaaccaacaccctttatcacggcgtttatttcagcgagctgctgtttcacgtggcgcggctgacggaagatcaggggcggcagctgatcctggccgacggcaaacacagcgcgcaagaggagcgcgaggcgattcagtatctgctcgatatgcgctgcgatgcgatcatcatctatccgcgctttcttagcgtcgatgagatggatgagataatcgacaatcatgagcagccgatcgtggtgctgaaccgtcgcctgcgccgccacgccagccactgcgtatggtccgatcacaaagcctcggcgcggatggcggttgaaaagttaattaccagcggtcatcgcgacattgcgtttatcaccggttcgctggattcgcctaccggggttgagcgtctctctggttataaagacgcgctggcaggactggggattcccgtgcggcaagaactgatcgttgaagggcgctggacgccacaaaccggagccgccgctgtcgaagcgctctgccaacgcggcgtcagtttcagcgcgctggtcgccagtaatgacgacatggcgatcggcgcgattaagcaactgcaccagcaggggatcgcggtgccgcagcaggtatcggtgatcggtttcgatgacatcgcgctggcgccgtatgtgatcccttcgctctccagcgttaaaattccggtcaccgaaatgatgaaagagagcatcaacaggctgatctttatgctcgacggcggcgaatttaaatatcagcaaactttccccggcgagctgattgaacgcgagtcgttggcgcgcggcccgcatgcctga

SEQ ID NO: 90272 - DNA, 1437 bp, Enterobacter aerogenes
atgtctaaaaattatgcagccctggcgaaccagatcctgacggcgctcggcggcgcagataatgtcgttgccgtgacccactgcatgacccgcctgcgcttcgtggtgaaagataaccaacgcgtggacgccccggcgctgaaagcgctgcaaggggtacttggcgtcgtgcgtagcgataaccaatgtcaggtgatcatcagcaataccgtctcgcaggcgtatcgcgaggtgctgaatctgctgcccggcgagttgcgcccggcggagccgcaggggaaaccgccgctgaccttaaaacgcgtcggcgccgggatccttgatgcgctgatcggcaccatgtcgccgctgatcccggcgattatcggcggatcgatggtcaaactgctggcgatgatcctggagatgagcggcgcgttgccaaaaggctctccgacgctgaccattctgacgcttatcggcgacggcgcgttcttcttcctgccgctgatggttgccgcttccgcggcggtaaaattcaaaaccaatatgtcgctggctatcgctatcgccggggtgctggtgcatccgggattcatcgaattaatggctaaagccgcgcagggagaacacgttgagttcgccttcattccggttaccgcggtgaaatacacctacacggtgatcccggcgctggtgatgacctggtgtctctcttatatcgaacgttgggtcgatcgcatcaccccggcggtgacgaaaaacttccttaaaccgatgctgatcgtgctgattgccgcgccgctggcgatcctgctgattggcccgctcggtatctggatcggcagcgcgatctccgcgctggtgtacacgatccatagctatctcggctggctgtcggtggcgatcatgggcggactctggccgctgctggtgatgaccgggatgcaccgcgtctttacgccaaccatcattcaaaccatcgccgaaaccggcaaagaggggatggtgatgccatcggaaatcggcgccaacctgtcgctgggcggatcgtcgctggcggtggcgtggaaaaccaaaaacccggagctacgccagaccgcattagcggcggcggcatcggcgattctggccgggatttccgaaccggcgctgtacggcgtggcggtacgtctgaaacgcccgctggtcgccagcttaatcagcggctttatttgcggcgcggtggcgggaatcgccgggctggccagccattcgatggcggcaccggggctgttcaccagcgtccagtttttcgatccggccaatccgatgactatcgtttgggtctttggcgtgatggcgctgtcggtggtgctctcctttgtgctgacgctgctgctcggttttgaagatatcccggtagaaaatgccgccgccgacgccagacagcgccagggcgcggccactcacgcctga

SEQ ID NO: 90273 - DNA, 1425 bp, Enterobacter aerogenes
atgtcgagttttccacacggatttttatggggcggcgctctggccgccaaccagtctgaaggcgcttatcttgaaggcggcaaagggctgacgaccgttgatactattccgcacggcgcccatcgcctggcggtgaagctgggccaggagaagcgctttacgcttcgcgaagatgaattctacccaagccacgtggcgatcgatttttaccatcgctataaagaggatatcgccctgatggcggagatggggtttagcgtcttccgcacctctatcgcctggagccgactgttcccgcgcggcgatgaacaacagccaaacccggaaggtatcgccttctatcgtgcgatgtttgaagagtgcagaaagtacgggatcgaaccgctggtcaccctgtgccactttgatgtaccgatgcatctggtgacggaatatggctcctggcgtaaccggaagatggtcgattttttcagccactatgcgcgcacctgttttgaagcgtttgacggactggtgaaatactggctcaccttcaatgaaatcaacattatgctacatagtccctactccggcgccggtctggtatttgaggagggagaaaatcaggagcaggtgaaatatcaggccgcgcatcacgagctggtggccagcgcgctggcgacaaaaattgcccatcaggttaacccgcaaaaccaggtcggctgcatgctggcgggcggtaatttctacccctattcctgtaagccggaagatgtctggatggcgctggaaaaagatcgtgaaaacctgttctttatcgatgtgcaggcacgcggcgcgtatccggtgtgggccgcgcgggtattccgcgagaaaggcgtcactattgccaaacagccgggcgacgacgaaatcctcaaaaacaccgttgattttgtctcctttagctattacgcctcgcgctgcgcgtcagcggagatgaacgccagcaacaccaacgccgccaatatcgtcaagtcgctgaagaatccgtacattgcggccagcgaatggggctggggcatcgatccgctcggcctgcgcatcaccataaacatgatgtatgaccgctatcagaaaccgctattcctcgtggaaaacgggctcggcgcgcgcgatgagatcgacgccaacggcgaaatcaacgacgactaccgcattagctatctgcgcgagcatatcaaggcgatgcgcgacgccatcgatgacggcattccggtcatcggctataccagctggggctgtatcgatttggtctccgcctccaccggcgagatgagcaagcgctacggtttcgtgtatgtcgatcgcgacgatgccggtaacggcacgcttgcgcgcaagcgtaagaaatcgttctggtggtataagaaggtcatcgccagcaacggggcggatctggaatag

SEQ ID NO: 90274 - DNA, 492 bp, Enterobacter aerogenes
gtgactgacgttttactgtgtgtcggcaacagcatgatgggcgatgacggcgcaggcccgctgctggcggaaatgtgcgcggccaatccggtcggcggctgggtggtgattgacggcggcagcgcgccggaaaacgatatcgtcgccatccgcgagctgcgcccgacccggttgctgatcgtcgatgcgaccgatatggggctcaaccccggcgaaatccgcattgtcgacccggacgatatcgccgagatgtttatgatgaccacccacaatatgccgcttaactatcttatcgatcagttaaaagaggatgttggcgaggtgttttttgtgggcattcagcccgatatagtcggtttctattacccgatgactcagcctgttaaggatgccgtcgcgacgttatatgcgcggcttgatggctggcaggggcagggcggttttgccgcgctggaagcggccgaggagcaggcgttccccggcttgcgctaa

SEQ ID NO: 90275 - DNA, 411 bp, Enterobacter aerogenes
atgagcgagacggtggtgttcagtcagctgagccgtaaatttattgatgagaacgacgcgacgccggatcaggcgcagcaggtggtctattacagcctggcgattggccaccacctcggcgtcattgactgcctggaggcggcgttaagctgcccctgggaggactatctggcgtggatcggtacgctggaagcgggcagcgccgcgcggcgcaaaatggaaggcgtgccgaagtatggcgagatcgttatcgacagcaatcacgtggcgatgctggctaacgcctttgataaagcgcagtccgcgcagaccccgcagcagcaggcgtggagtaaaaccctgctcagcatgctgcacgatattcaccaggaaagcgccatctatctgatggtgaggagactacgtgactga

SEQ ID NO: 90276 - DNA, 768 bp, Enterobacter aerogenes
atgagcaatttattaggcccgcgcgatgaaaacggcattccgctgccgatgtcggtggatgaatccatcgccagcatgaaggcctcgctgctgaaaaaaatcaaacgttccgcctacgtttaccgcgtcgactgcggcggctgtaacggctgcgaaatcgagattttcgccaccctgtcgccgcttttcgatgccgaacgcttcgggattaaagtagtgccgtcgccgcgccatgccgatattctgctgtttaccggcgcggtgacccgcgcgatgcgttcgccggcgctgcgtgcctggcaatcggcgccggatccgaaaatctgcatctcttacggcgcctgcggcaacagcggcggtatcttccacgatctgtattgcgtatggggcggcaccgacaaaatcgtgccggtcgatgtctatattccgggctgtccgccgacgcctgccgccacgctgtacggttttgcgatggcgcttggtctgctggagcaaaaaatccatgcccgccggccgggcgagcttgacgaccagccaaccgaattgctgcatcccaacatggtgcagccgctgcgggtgcgtatcgatcgcgaagcgcgccgtctggccggctatcgctatggccgccagatcgccgacgactatatgcgtctactggggcagggcgataaccaggtactgcgctggctggaggcggagaaagatccgcgtctgaccgagatcgtcacgcacctgaatcaggtggtcgagggggcgcgtatccgatga

SEQ ID NO: 90277 - DNA, 543 bp, Enterobacter aerogenes
atgtttacctttatcaaaaaagtcatcaagaccggcaccgcgacccactcctatccgctggagcctatgccggtggataaaaacttccgcggcaaaccggaacacaatccgcagcagtgcatcggctgcgcggcctgcgtgaatgcctgtccgtctaacgccctgacggtagagaccgacctggcgactaaccagctggcgtggcagttcaacctcgggcgctgcattttctgcggccgctgtgaagaagtttgcccgacggcggcgattaagctgtcgcaggagtatgaactggcggtgtggaaaaaagaggatttcctccagcagtcgcgctttgccatctgtcactgtcgggtctgcgaacggcctttcgcggtacaaaaagagatcgactacgctatcgcgctgcttaagcacaacggcgatacccgcgccgaactgcaccgcgaaagttttgagacctgcccggaatgcaagcgtcagaaatgcctggtgccatccgatcgtattgaactgactcgccacatgagggaggccagctga

SEQ ID NO: 90278 - DNA, 1710 bp, Enterobacter aerogenes
atgtctgaagaaaaaatcggtcaacactatcttgcggcgctgcatcaggcctttcctggcgtggtgctggatgaagcctggcagaccaaagatcagcttaccgtcaccgtgaaggttaactacctgccggaagtggtcgagttcctgtactacaagcaggggggctggctgtcggtactgttcggcaacgacgaacgtaagttgaacggccactacgcggtttactatgtgctgtcgatggagcagggcactaagtgctggatcaccgtgcgcgtggaagtcgacgctaataaaccggaatatccgtcggtgaccccgcgcgtgccggcggcggtatggggtgaacgcgaagtacgcgatatgtacggtctggtgccggtgggcttgccggacgagcgccgcctggtgctgccggacgactggccggatgaactctatccgctgcgtaaagacagcatggactaccgccagcgcccggcgccgaccaccgacgcggagacctacgagttcattaacgagctcggtagtaagaaaaacaacgtggtgccgattggcccgctgcacgtcacctccgatgagcctggacacttccgtctgtttgtcgacggcgagaacattatcgacgccgattaccgcctgttctatgtccatcgcggcatggaaaaactggcggaaacccgcatgggctacaacgaagtgacgttcctgtcggaccgggtatgcggcatctgcggcttcgcccacagtaccgcctataccacctcggtggaaaacgcgatgggcatcgtggtgccggagcgcgcgcagatgatccgcgccattctgctggaagtagaacgcctgcactcgcacctgctgaaccttggcctggcctgccacttcaccggttttgactccggttttatgcagttcttccgcgtgcgcgaaacctcaatgaagatggcggagatcctcacgggcgcgcgtaaaacctacggtatgaacctgatcggcgggattcgccgcgatctgctgaaagaggacatgatccagacccgccagctggcgcagcagatgcgccgcgatgtgcaggagctggtggatatgttgctcagcacgccgaacatggaacagcgcaccgtcggtattggccgtctggatccagaaatcgcccgcgacttcagtaacgtcggcccgatggtccgcgccagcggccacgcccgcgatactcgcgccgatcacccgttcgttggttacggtctgctgccgatggaagttcacagcgagcagggctgcgacgtgatttcccgcctcaaggtgcgtatcaacgaagtttataccgcgctgaatatgattgatttcggtctcgacaatctgcccggcggcccgctgatggtggatggcttcacctatattccgcaccgcttcgcgctgggcttctcggaagcgccgcgcggcgacgatatccactggagcatgaccggcgacaaccaaaaactgtaccgctggcgctgccgtgcggcgacctacgccaactggccgaccctgcgctatatgctgcgcggcaacaccgtctccgacgcgccgctgattattggcagcctcgacccttgctactcctgtaccgaccgcatgacggtggtcgatgtacgtaagaagaaaagcaaagtggtgccgtacaaagagctggagcgctacagcatcgagcgtaaaaactcgccgctgaaataa

SEQ ID NO: 90279 - DNA, 924 bp, Enterobacter aerogenes
gtgaacctattcgttgcattaatacaggcgctggtactgtttgccgtagcgccgctgctgtccggcctgacccgcgttgcccgcgcgcgcctgcataaccgccgcgggccgggggtactgcaggagtatcgggatatcctgaaactgctgggtcgccagagcgtgggcccggacgcttccggctgggtattccgcctgacgccgtttgtgatggttggcgtgatgctaaccatcgccgccgcgctgccggtggtgaccgtagattcaccgctgccggggctgggcgacctgattacgcttatctatctgttcgccatcgcccgcttcttcttcgccatttccggcctggataccggcagtccgttcaccgccatcggcagcagtcgtgaagcgatgctcggcgtgctggtcgaaccgatcctgctgcttgggctgtgggtcgcggcgcaggttgccggctccacccatattagcgcgattaccgataccgtttaccactggcccgccgcgcgcagcatcccgctgatcctggcgctgtgcgcctgcgctttcgccacctttatcgaaatgggcaagctgccgttcgatttagccgaggccgaacaggaactgcaggaagggccgctttccgaatacagcggcagcggtttcgcggtgctgaagtggggcatcagcctgaaacagctggtggtgctgcagatgttcgtcggcgtatttatcccgtggggacagatgaccagttttagcgcgccaggcctgctgctggcgctggtggtcgccgtcgtcaagctggtggcgggggtgctgattatcgcgctattcgaaaacagcatggcgcgtctgcgcttttgtgccacctcccgcgttacctgggccgggtttggtttcgcctttttagctttcgtctccttgctggtggcgtga

SEQ ID NO: 90280 - DNA, 1827 bp, Enterobacter aerogenes
atgagcgtggttgcattagtgaatcaggcggttgcctggtatgccgccagcgcggtgctggcgtttttatttagtttgcgtaaaccgctgagcggcgcgattgccgggatcggcggcgcggtcgccagcgcgatgttaatcgtcgccggcttctcggcgctgatcgcgccggagcggatcaacggcggcatgctgcagtatctgcatctggcgatgcgggtgggcgggattaacgctctgtggctgctggccatcggcctgtcggcgctgccgatttcgctgtttaacatttcctggcatcgtcatccgcaggtcaaatccaacggcctgctggttaacctgctgctggctgccgccacctgcgcggtggtggtgactaacttcggcagcctggtggtgatggcggaaatcatggcgctgtgcgccgcgttccttaccggctgcgcgcagtccggcaaactgtggtttgcgctggggcgtctcggtaccctgctgctggcgtggacctgctggctggtgtggtcgttctacggcactctcgatctggcggcgattagccagttggccgctggcgcgccgcagaacatggcgctgtggctgccgggtctgctcggttttgccctgctcgccggggtgatcccgctgcacggctgggcgccgcaggcgcatgcgggcgccagcgccccggccgccgcgctgttttctacagtggtgatgaaggtcggtctgtacggcatcctgaccgtgtcgctggccggtagcgtgccaccgctgtggtggggcgtgctgctgctggtgttgggaatgattaccgcctttatcggcgggctgtacgcgctgatggaacataatatccagcgcctgctggcttaccacaccctggaaaacatcggcattattctgcttggcctcggcgcgttcgtcaccggtatagctaccggcaataatgcgctgatggtgctgggctttatcggcggcatgtaccacctgatcaaccacagcctgttcaaaaccacgctgttccttggtgcgggggcggtgtggttccgtaccgggcatcgcgatatcgagaagctgggcggcatcggtaaaaaaatgccgctgatttcactcgccatgctggtggggctgatggcgatggccgcgctgccgccgctgaacggctttgccggcgaatgggttatctatcaatccttcttcaagctgagcaccggcgaggtgtttatcggccgtctgctggggccgctgctggcggttggcctggcgattaccggggcgctggcggtgatgtgtatggccaaagtctacggcgtcaccttcctcggcgcgccgcgcagtaaagaggcggaaaacgccacctgcgcgccctggctgatgaccttaagcgtgatgcttgccgccgcgtgctgcgtcatcggcggcgtggcggcgccatggttgttgccgctggtcggccacgttattccggttcctgcgcaggccacaagcgtcgtgtcgcagccgctgatcgccattctgctgattgcctgtccgctgctgccgttcctgctgatgatcttcttcaaaggcgaccgcctgccggcgcgctcgcgcggcgcggcgtgggtctgcggctacgaccatgaacaagcgatggtggtcaccgcccacggcttcgccatgccggtgaaagaagcctttgcgccgctgctgaagctgcgtcactggttgaatccggtacggctggtgcccggctggcagaacgccgccgcgcccgccttgctgcgcggcgtggcgctgatcgaactggcggtactggtggtgattgtgatttcgcgaggagcctga

SEQ ID NO: 90281 - DNA, 609 bp, Enterobacter aerogenes
gtgaaccgttttgtaattgctgattccagcgtctgtatcggctgccgcacctgcgaagccgcctgttccgagacgcaccgccagtatggcctgcaaagtatgccgcgcctgcaggtcatgcgtaatgaaaaagagtctgcgccgcagatgtgccaccactgtgaagacgcgccttgcgccgcggtgtgcccggtcaacgccattactcgcgttgacggcgcggtacagctgaatgaaagcctgtgcgtgagctgcaaactgtgcggcatcgcctgcccgttcggcgcgattgaattctccggcagccgcccgttggatattcccgccaacgctaacacgccgatggcgcccgccgcgccgccggctccggcccgcgtcagctcgctgctcgattgggtgcctggcgttcgcgctatcgccgtgaaatgcgacctctgccactttgatgagcagggcccggcgtgcgtgcggacctgtccgaccaaagccttagtgctggtggatattcgcgacattgctaagtccagcaagcgtaagcgcgaactgacctttaataccgacctcggcgatttgtcgctgtttcaggcgcaacaagggggcgtgaaatga

SEQ ID NO: 90282 - DNA, 450 bp, Enterobacter aerogenes
atgacaatttgggaattaagtgaaaaggcggactacatcgccgatcgtcaccgccagcatcaggagcagtggcacacctactgcaactcgctggttcagggcatcaccctgtcgaaagcgcgtctgcatcacgcgatgagctgcgcgccggacaaagagctgtgcttcgtgctgttcggccactttcaggtatatgtcgcgctggcggaaggctttaacagccacaccattgaatattacgtagaaagcaaaaatggcgatgacaaacggctgatcgcccaggcgacgctggatgcggaaggcgtaattgacggtcgcatcagtaaccgttcccgcgaagcggtgctggaacactacctggcgatcatcgccaccgtctatgaccgcctgtatgaggccatggagcgcgaccagccggtggatttaagccatctggcgcaggtccattaa

SEQ ID NO: 90283 - DNA, 345 bp, Enterobacter aerogenes
atgcacgaaatcacgctaagccagcgggcgctggaaattattgagcaacaggcgcggcaaaacggcgcgcgccgggtcaccggcgtgtggctgaaggtcggcgcgttttcctgcgtggaggccagcgccctcaccttctgttttgaactggtgtgccgcggcacgctggcggaaggctgcgcgctgcacattgccgagcaacaggccgaatgctggtgtgaacgctgtcagcagtatgtgcatcttgtctctcagcacgtccgccgctgcccgcactgcgataacgaccagttgcagatcgtggcggatgatggcttacagattcagcgtttagaattggagtaa

SEQ ID NO: 90284 - DNA, 873 bp, Enterobacter aerogenes
atgtgtacgacatgcggctgcggagaaggcaacctttatatcgaaggcgatgaacataacccgcactcggcgtttcgcagcgcccccttcgcccccgccccgcgccagaccatgaccatcaccggcgtgaaaaccgataacttctccccgacccgcagcgcgcaaggcgatctgcattacggccacggcgaagccggtacccacgcgccgggccagagccagcggcggatgctggaagtcgaaatcgacgtgctggataaaaacaaccgcctggcggcgcgcaaccgcgcgcgcttcgcggcgaataaccaactggtgctaaatctggtctccagtcccggctccggtaaaaccaccctgctcaccgaaaccctgacccgcctgaaaggcatcgtcgactgcgcggtcattgaaggcgatcagcagacggtcaacgatgccgcgcgcatccgcgccaccggcacgccggcgattcaggtcaataccggcaagggctgccatctcgatgcgcaaatgattgccgacgcctctgcgcgcctgccggctggcgataacggcattctgtttatcgaaaacgtcggtaacctcgtctgcccggccagcttcgatcttggcgaacgtcataaagtggcggtgctgtcggtcaccgaaggagaagataaaccgctgaagtatccgcatatgtttgccgccgccagcctgatgctgctcaacaaagtcgacctgctgccgtacctcaactttgacgtcgagaagtgcctcgcctgcgcgcgggaagtgaatccgcatatcgagattattttgctctccgccaccagcggcgaaggcatggaccagtggcttaactggctggagacgcagcgatgtgcatag

SEQ ID NO: 90285 - DNA, 273 bp, Enterobacter aerogenes
atgtgcataggcattccggggcaaattcgcacgattgacggcgtgatggcaaaggttgaagtgtgcggcattcagcgcgaagtcgatctgacgttggtcggcgccgacgacgaacagggccagccgcgcatcggccagtgggtgctggtacacgtcgggttcgccatgagcgtgattaacgaagccgaagcgcgcgataccctcgaggcgctgcaaaacatgttcgaggtggaaccggacgtcggcgcgctgctatacggcgaggagcgataa

SEQ ID NO: 90286 - DNA, 1122 bp, Enterobacter aerogenes
atgcgttttgttgatgaataccgcgcgccggagcaggtgctgcagctggtcgaacatctgcagcagcgcgcccggctgctggactacagtgaagcccgcccgctgcggatgatggaggtctgcggcggccatacccacgccatcttcaaattcggcctcgaccagctattaccgaacaatattgaatttattcacgggcccggctgcccggtgtgcgtcctgccgatgggccgcattgatgcgtgtatcgagatagccagccgtccgggggtgattttctgcacctttggcgatgcgatgcgcgtgccgggaaaaaacgggtcgctgctgcaggcaaagagtcgcggcgccgatgtgcgaatcgtttactcgccgatggacgccctgcggctggcgcagcagaatccgcagcgcgaggtggtgtttttcggtctcggtttcgaaaccaccatgcccgccaccgcgctgacgctgcgtcaggcccgcgagcgcaacgtcgacaacttctactttttctgtcagcacatcaccttgctgccgacgctacgcagcctgctggaccagccggacaacggtatcgatgcgtttctcgcccccggccacgtcagtatggtgattggcaccgacgcctacggtttcatcgccagcgactatcatcggccattagtcgttgctggatttgaaccagttgatctactgcaaggcgtgatcatgctggttgagcagaaaatagcgcagcgcagtcaggtagagaatcagtaccgtcgcgtggtgccggatgccggtaacgcgctggcgcaggcggcaatcgccgaagtcttttgcctgagcggcgatagcgaatggcgcggcctggggacgatcaacgattccggcgtttgcctgacgccagattatcaacgctttgacgccgaggcccatttccgcccggcgccgcagcgcgtttgcgatgacccgcgcgcccgctgcggtgaagtgctgaccgggcgttgtaaaccacaccagtgtccgctgtttggccgcgtttgcaatccgcagagcgcctttggcgcgctgatggtctcctcagagggcgcctgcgccgcctggtatcaatatcgcagtcaggaaaataaagcatga

SEQ ID NO: 90287 - DNA, 1011 bp, Enterobacter aerogenes
atgaaaagcattcagttagctcacggtagcggcggtcaggcgatgcagcaactcattggcgagctgtttatgcaggccttcgccaacccctggctggccgaacaggaagatcaggcgcgtttagatctcgccgggcttgccgcccagggcgatcggctggccttctcaacggacagctacgtcattgacccactgtttttccccggcggcgatatcggcaagctggcggtctgcggcaccgccaacgacgtggcggtcagcggcgccgtgccacgctatctctcctgcgggtttatcctcgaagaggggctggagatggcgacgctggaagcggtggtgcgcagcatggcaactaccgctcagcaagccgggattgccattgtgaccggcgataccaaagtggtgccgcgcggcgcggcggataaaatattcatcaataccgccggtattggcgccatccccggcgatattcactggggagcgcagcagattagcgccggcgatgtgctgctggtcagcggcacgctcggcgatcacggcgccaccattcttaacctgcgcgaacagctggggctggacggcgcgttatccagcgactgcgcagtgctaacgccgcttatccagaccctgcgagagattccggacatcaaagcgctacgcgacgccacccgcggcggcgtcaacgcggtggcgcacgagttcgccgccgccagcggctgcggtatcgaactgcatgaagcgaagctgccggtcaacgatacggtgcgcggcgtctgcgaactgctggggctggacgccctgaatttcgccaacgaaggtaaactggtgattgccgtcgccagagaagccgcgccgcgcgtacttgagcatttacggtctcacccgctcggacagaatgccgcgataattggtgacgttgtcgagcgcgccggcgtgcgctctgtcgggttatatggcgttaaacgtacactcgatcttccccacgccgagccgctgccaagaatttgctaa

SEQ ID NO: 90288 - DNA, 2073 bp, Enterobacter aerogenes
atgtcgtatacaccaatgggcgatctcgggcagcagggtctgtttgatatcacccgtattttattacagcagcccgatctggccgcgctgagcgaaacgctaacccgtctggtgcagcaatccgcgcttgccgaccgggcggcgattatcttgtggaaccacggcaaccatcgcgccgccaggtacgcctgcgacgacgccgggcagccggcaagctacgaagatgaaaccgtactggcgcacggcccggtacgccgcctgctgtcgcgccccgacgcgctacattgcgacaacgtgaccttcgccgaaacctggccgcagctggccgccagcggcatttacccggaattcggctactactgcctgctgccgctggcggcggaaggccgcatcttcggcggttgtgagttcatccgcgacgacaaccggccatggagcgaaaaagagtaccagcgcctgcatactttcgcgcagattgtcgccgtcgtcaccgagcagatccaaaaccgggttagcaacaacgtcgattacgacctgctgtgccacgagcgcgataacttccgcatcctggtggccatcaccaacgccgtcctgtcgcgcctcgatattgacgagctggtcagcgaggtggcgaaagagatccaccgctatttccgcatcgacgcgatcagcgtcgtgctgcgcagcaaccgcaaaggcaagctcaatatctactccacccactatctcgacgccagccatccggtccacgaccaaagcgaagtcgatgaagccggcacgctaaccgagcgggtgtttaagagcaaagagatgctgttactcaatctgcatgagcacgactcgctggcgccgtatgagaaaatgctcttcgagatgtgggataaccagatccagaccctgtgcctgttgccgctcatgtccggcaatacgctgctcggggtactgaagctggcgcagtgcgatgaacaagtatttaccaccaccaaccttaaactgctgcggcaaatcgccgagcgcgtatcgatagctatcgataatgccctcgcctaccgcgagatccagcgtctgaaagaacggctggtggatgaaaacctggcgctcactgaacagctcaacaacgtcgaaagcgagttcggcgaaatcatcggtcgcagcgaagcgatgcacagcgtgcttaaacaggtggagatggtggcgcagagcgacagtacggtgctgatcctcggagaaaccggcaccggtaaggaactgattgcccgcgctattcataacctgagcgggcgcaacggccggcggatggtgaaaatgaactgcgcggcgatgcccgcgggcctgctggaaagcgatctgttcggccacgagcgcggcgcttttaccggcgccagcgcccagcgcatcggccgtttcgaactagcggacaaaagctcgctgttcctcgatgaggtcggcgatatgccgctggaactgcagccgaagctgctgcgcgttctccaggagcaggaattcgaacgtctgggcagcaataaactgattcagaccgatgtacggctgatcgccgccaccaaccgcgatctcaaacagatggttatcgatcgtgaattccgcagcgatctttactatcggctcaatgtgttcccgatccacctgccgccgctgcgcgaacgcccggacgatattccactgctggtgaaagcattcactttcaaaatcgcccgccgtctggggcgcaacatcgacagtattccggcggagaccctgcgcacgctttcgcgcatggagtggccgggcaacgtgcgcgagctggaaaacgtcgtcgagcgcgcggtgttgctaacccgtggcaacgtactgcaactgtcgctgccggaaatgcatattgaacaggagacgctggcgccggaagtgctgccggaggaaggcgaagatgaatatcagctgatcgtccgggtactgaaagagagcaacggcgtggtggccgggccaaaaggcgccgcccagcgcctggggctcaagcgcacgacgctgctgtcgcgcatgaagcgtttaggcattaataaggatcggttagtctag

SEQ ID NO: 90289 - DNA, 918 bp, Enterobacter aerogenes
atgccgcatctgccgccgttcaagtacctgttgttctccgccgcattagcgctgcttgccatcgcccccgctcaggcgcaagaaaaatttaaagtcattaccaccttcaccgtgatcgccgatatggcgcagaacgtcgccggcgacgccgccgatgtcagctcaatcaccaagccgggcgcggaaattcacgaatatcagccgacgccgggcgatatcaaacgcgcgcagggggcgaagcttattctcgccaacggtctcaaccttgagctgtggttcgcccgtttttatcagcacctgaacggcgtaccggaagtggtggtcagcaacggtattcagccaatgggtatcagcgatggtccctacaacggcaaacccaacccacacgcgtggatgtcggcggataatgcgctgatctacgtcgataacattcgcgatgcgctggtgaaatacgatcccgtcaatgccgacacctatcgccgtaacgccgaggcctacaaagagaagatccgccagaccatggcgccgctgaaggccgaactggcgaaactgccggcggacaaacgctggctggtcaccagcgaaggcgcattctcctatctggcgcgcgataacggcctgcaggagcgttatctgtggccgattaacgccgaccagcagggcacgccgcagcaggtgcgtaaaaccatcgacaccatgaagaaggagcatatcccgaccatcttcagtgaaagcaccatctccgacaaaccggcgcgacaggtcgcccgtgaagccggcgcccactatggcggcgtactgtatgttgactcgctaagcgccgccgacggcccggtgccgacctatcttgacctgctgcgcgtcaccaccgaaaccatcgtcaaagggatcaacgatggcctgaggaaacagtcatga

SEQ ID NO: 90290 - DNA, 822 bp, Enterobacter aerogenes
atgattgcgccacaagcgggacttatcgtcgaccaggtcacggtgacctatcgcaacggccacaccgccctgcgcgatgcctcgttcagcgtaccgagcggatcgattgccgcgctggtgggggtcaacggctccggtaaatcgacgttattcaaagcgctgatgggcttcgtgcgcgtcggacacggcgatatcgccattctcggccagccggtcaaccgcgcgcttcggcaaaatcttgttgcctacgtaccgcaatcggaagaggtggactggtcttttccggtactggtggaagatgtagtgatgatgggccgctatggtcatatgggctggctgcggcgggcgaagccctgcgaccggaagattgttgatgccgcgctggcccgcgtagggatgagcgaataccgcaaaagacaaattggcgagctctccggcgggcagaaaaagcgcgtgttcctcgcccgcgccattgctcaggaaggcaaagtgatcctgctcgatgagccgtttaccggcgtcgatgtgcagaccgaggcgcggatcattgccctgctgcgagaactgcgcgacgaaggctgtaccatgctggtttctacccataacctcggttcagtcagcgaattttgcgattacacggtgatggtgaaaggcaccgtgctggccagcggcccgacggagaccaccttcaccgccgagaacctggagctggccttcagcggcgtattgcgtcacgtcaagctcaccggcgcggaagagcgcattattaccgacgatgagcgaccgtttatcagccatcgcgcggcggggggccaacgatga

SEQ ID NO: 90291 - DNA, 849 bp, Enterobacter aerogenes
atgagctggctgctggagccgtttggctatcaatacatgctcaacgcgatgtgggtctcggcattagtcggcggcgtctgcgcctttctctcctgctacctgatgctcaaaggctggtcgctgattggcgacgccctctcccactcgatcgttcccggcgtcgccggcgcttatatgcttggcctgccctttgcgctgggcgcgtttctctccggcggcctggcggcaggcagcatgctgtttcttaaccagcgttcgcggcttaaagaggacgccatcatcgggctgattttctcctcgtttttcggcatcggtctgtttatggtgtcgctgaatccgacctcggtgaacattcaaactattattctcggcaatattctcgccatcgctccggaggatattatccagctggcggcaattggctttatttcgatggcgatcctgttgctgaagtggaaagacctgatggtcaccttcttcgatgagaaccatgcccgctcgattggccttaacaccagcggtctaaagctgctatttttcaccctgctggccgcctgcaccgtggcggcgctgcaaaccgtcggcgcgtttctggtcatctgtctggtcgtgacgcccggcgccaccgcctggctgttaaccgaccgcttcccgcgtctgctggccattgccgtcgctatcggcagcctgaccagcttcttcggcgcatggctgagctactaccttgatggcgccaccggcggcatcatcgtggtggcgcagacgctgctgttcttagctacctttgtcttcgcgccgaagcacggcctgctggccaaccgccgccgcgccagggaggcctcatgctaa

SEQ ID NO: 90292 - DNA, 855 bp, Enterobacter aerogenes
atgctaacgatgctccttgaaccattacagttcccgtttatggtcaacgcgatgctggtggcgacgatcgtcgccgtcccctgtgcgctgctgtcggtatttctggtattaaaaggctgggcgctgatgggcgatgccatgagccacgcggtgtttcccggcgtggtggtggcctacattatcggcatccccttcgccatcggcgcgtttattgccggcttattctgcgccgtcgccaccggttttctcgacgataacagccgcatcaagcgcgataccatcatggggatcgtcttctcggggatgttcggcgccgggctggtgctgtacgtggcgattcaatccgaggtccatctcgaccatattctgtttggcgatatgctgggaatatccgccagcgatatcgggcaaacggcggtgattgcgctggcgattgcgctgattatcgggctaaagtggcgcgattttttactgcacgcctttgatcccaatcaggccaaagccagcggcctgcgctgcgggctgctgcattatggtctgctgtgcatgatcgcgctgactatcgtcgcgacgttaaagtcggtggggattattctgtcgatttcgctgctgatagcgcccggcgctatcgccctgctgctgacgcggcgctttgtcagcgcattattgctggcaacggtaatcgccgtgggctgttcgctggcgggcgtctggctgtcgttttatctcgatagcgcgccggcgccaaccatcgtggtgctatttaccgcgctgttcgtgctggcctttgtcgccagtacggtccgtgacggtcagaaacagagggcgtcagcaacgctccccggtggcggttaa

SEQ ID NO: 90293 - DNA, 342 bp, Enterobacter aerogenes
atgggcaaacgcatcgatcgcgaaaagaagactatcggcaatatgatcaggctttatcagcgccgctgcccggatgcgcgcaacgacggcgaacattacctggcgcttaacgcttacgccgacaagcggctggataagtgcgtatttggcgaagagaagccggcctgtaaacagtgtccggtacactgctatcagccggcgaagcgggaagagatgaagcagatcatgcgctgggccgggccgtggatgctctggcgccacccgattctgaccattcgtcacctgattgacgacaggcgaccggcgccggagctgccggaaaaataccggccgaaaaaatag

SEQ ID NO: 90294 - DNA, 888 bp, Enterobacter aerogenes
atggctatgaaaattaaacagatacaagcctttctgaccgtcgccagcgaaggaaatttaaccctggctgcggagaaaatggggattacgcaatccgggctcagccgattattgctgaccctggaggaggatctgaatgccaccttatttgaacggcataagcatggaatggcgttaagcgagtatggcagcgcgtttttaccctatgccatgacaatgttgaacacggagaacaaagccagagaggaaatggcgctgatccgcggggcgggcaaggggattttgagaatcggctgcgtatccagtctgttaaccagccattttattgataaattagccgcctttcataaacgccatccccagatacacatcaaaatattcgaccgcattgactcagagttgtttaagttgctgctgatgcatgaaattgatatcgccctctgcgggcctttaccgcacgacgataaaatcgtagttcgtggaaaaattaactggcaggatcgtatttgtatcatttcaaggccaggccatccgctacaaaaagaaaaacgtctgtcgcttgcggcgatgctcgactatccgtggatcatgccgccgccattaagcacgccgatgcttatccttgaagatatttttcgctcgcatcagttaccctgtccggttcctattatcgagtgcgcttcatccgcggcgataaaatcctttatcgctgagagcgatcttttaacgtcaatgcctgcccccgtctatcgactggaagagaagcttggattgttgcgcccgctggaggcggagggcagcgtgtttgtccgagatttctatgcctggagccattttggcgtgttatccggagccgcgctgcagttaatccagcatctgaagcagtga

SEQ ID NO: 90295 - DNA, 942 bp, Enterobacter aerogenes
atgacacagaacaacattctattaatcctcggcgctattttacccgttatcattaccgttctcattggctatatcagcggtaaacgcaaagacttcaactggcagcagactggtgatattaataaaattgtgatgctgtatgctttaccgctgagtattttcagtaatatggtcatgacgccgcggcatatcgtgatgagcatggggccggtcgctatcgccattatcctggcgctaattctgagtttccttattcccttagctatcgcccgttatatctgtaaacgctccctggcgctcagtaccctacaggctctggccatcggctcgccggccgttcccttcattggcacctcggtactggcttttttattcggtaccgtcagcgcctcactcattactgtttccagtattacgcaaaatgtcttccagctcccgctggtgatgattctgatgtccgttgcaacgggggataaaagccagaatatctcttttgccacgcgggtcatcaacgccatcaagcagccggtggtatggtcgccggttgtcgcgctgatattagtattaatggatattcatattccagaaaccgtatcaatgtcgctaggtctgctgggtaaggcctccggcggactggcgctgtttgccgcaggcatcgtgctttatactcgcagcattgtcatcacctccgccaccattattaccgtcatcgcccgtaatattctggtgcccggcgcctgctacctcattttgttgaaaatgggtttcagcatggagcaaataaaacaagtggtattaacgatggcgattcctgtgggctcgatcgccattattatcgccatgcaatataagtccggcgagcaagaaatggcctcgaccatggcgctaagtattattacttccatcattacgatgggcgcatttattttcctgaccttttaa

SEQ ID NO: 90296 - DNA, 1710 bp, Enterobacter aerogenes
atgacttctatcactgtatcggccgctgaattattactgcaccggcttcaggccctcgacgtggcctatatttttattaattcgggtaccgattatcccccggttattgaagcgtgggccaaaatgcgcgctacgggacaacaggtaccggagctggtgatatgtccccacgagaacgccgctattggcatggcccatggctattatctcgggagcgggaaagtgcaggccgtcatggttcacactaacgtaggcctggccaatgccgcctgcggcgtcatcaatctggccaacagcaatattccggtactgatttttggcggacgtacgccaattagcgagcattcacactttggttgtcgcaacacgccgattggctacggccaggagatgcgcgatcaagcggcgctcattcgcgagtcggtgaaatgggactttgaattacgcattgccgatcagatcggcgagcatgttgacagagcatgggcgatagcccgttcattgccaaaggggccggtgtatttgagcctgccgcgcgagccgctatgcgaaacgttcacgatcgatgaacaagcgcttcatgccgaaccaacccaacagccggtacgctacgcgccaacgcgagcggatattgccagcgccgccgacgcgatagccaatgccatgcagccggtcatcttcgcccagcgcggcgcaagaacgtctggtggatttgcgcggctcaataccctggttaaggagtgggctattccggtggtggaatactggggtactgaagtcacccttagtagcgacaatcctatgctggccggcagcgatcccgaaggctggctttctgccgccgacgtcatcatcgttatcgactcacaggccccgtggatcatcgaagaaagccgctgcaacgacagctgtaaggtgatccagatcggccccgatccgcttttttcccgctaccccgtccgcggttatcgcgccgatattaacctggccggagaaaccgacgaggtattcgaacttttacaagaggcgctccagccgcatgtgacggcgaagcaacggcaggtggctgaacgtgaaaagcatgtgcttaacctgattcaacacgcgaagaaccaacgtgaagccctcctccacgccaaccaaaaaggggcgattggcaaaccctggcttagctactgtctgggtcagcttgccaatcaacatcaggggaagatcgtctctgaactgacaacaatgccgcagttcgccggcctgactcaggcggacagttattatcaggaagcgctggcgggcggtctgggtgaagcgttgcccatcgccttagggctgcagctcgcccggcggggtgagcttatcatcgccgccgtgggcgacggctcctatctctttgccaatccggcggtgtgtcatcacatcgcggaagtgatgaagcttcccgtgttggtggtggtcggcaacaatggcggctggggagcggtggcgggcggcacccgggcgctctatcccgacggctatgctgctaaaatggacgcgatcccggccaccgcgttctcgtcttcgccagatttcgccgcgctcgccgcctccagccgcgcggctgcgctgacggtttcgctggcggaagatctccccggggtactggaagaggcggtcgctattattcgcactcgccgacaaagcgtactggtcaacgttgaactaggacgttaa

SEQ ID NO: 90297 - DNA, 294 bp, Enterobacter aerogenes
atgagccataaagcgatgattaccattcactactgttcccaatgcaactggatgctgcgcgccagctggatggcccaggagctgctgcatacctttagtaccgatatcgcttcggtcacgctggtgcccggtaccggcggcatttttacggtgagcgtcgatgaggcgctcatctgggagcgcaaacgggacggcggtttcccggacgctgccgagctgaaacggcgggggagggacgtctgcttcccggaaaaagcgctggggcacgtggataatgccgggaagcaggtctaa

SEQ ID NO: 90298 - DNA, 2352 bp, Enterobacter aerogenes
atgtacaaatcgactcaatcagcagcatggtgtaagaaaagcctgctggcgacttctctgctcgcagcaatcgcgcagaatgccgctatcgcggccgtgacccaggataacacgacggatagcgcggaacagatggtggtgaccgccccggccccacagctgaaagccggcagcgagcattcggtgagcgcgcaggaactgcaggacaaaggcgccaacgacttcggctcaatcatgcgttatgaacccctcatcagcgccaccggcgccagcggcggttccggcaacggtaaaagcggtttcgatcgcggcggctataccggctacaacatccgcggcctcgaaagcaaccgcgtcggcatcgatgttgacggcattgcccagccaaacgccaccggccgcggctacgttggccgttccggcctcaacacctttggcattggccgcgattatatcgacccctatatgtacggcagcgtggatattcagtcgggcgccacctcaaccgagaccgctaacagctcaatcggcggcaacgtctccttccgcccgaaatcggcggatgactacctgcgcccgggcaaaaccagcgcctttggctatcagagcggctacgactcttccgaccgcagctggcataacggcgtcaccgtcgccggcggcgatgagacgctgcgcggcattttcgtctacagccgccgcgatggccaggaaaccgagaacaacagcggcagcgtcgacgcttacccggcaaactggcactctgacgcgtttatggcctccggcatctggcagccgaacgatgaacataagttcaccagcaccttcgactactatcacaagaccaaccacagccacttcgattcgtgggactccagcggtaacagcgtgatcggcaccgccaaccaaaccaaccagacgcggcgctgggggctgagcctgaaagacgactggacgccgatgaacgattacatcgacagcgtctcgaccaaggtttactaccagcataccgaagctcacgactggacctggatgccggatagcgtcacccgcaaaatgcagacggtcaattccgactacgataccgatacctggggcctgcagaccgcgctcgcgaaaagcatcggccgccacgacctgagcgccggttttaacgccagcacgaccaaaacccagcggccatttagccagtcgccgatccccagcgtctacagcgaaattatgcagccggaagcggacagccgcagctacaccctcggcggttacgtgcaggatcagatcaacttcgatctcgatagccacaacttcgcgattaatcccggcgtacgcgtgacgcatcagtccactaaaccggaagatctgtacgatcttagcgccaacagcagcgtgctcaccgaatcgtcggtggcgaatctgtatggtaaaaacagcgacacccaggtgctgccgtcactgacgttccagtacgacattacgccgcggctgatgacctatctgcagtaccagcgcggcgcgcagttcccgaatgccagccagctgtatggttcgtggaacctgggctccagctatgccggcagccagcagtacgcgctaatcggcaacaacgatctgaaaaccgagaccagcgacaatattgaatggggtatcaagggcgaagtcaccgaaggcatcaccgtgcgtaccgcgctgttctacaacagctataagaactttatcgcctatacgcgttattcgcgcgccaacaatccgggtaaattcactaacgtcccgtcgaatatttacaccatttatcaagcggaaaaccgcgataaggcctatatctacggcggcgagatcagcactaaatttaacttcggcacctggtttgagcaggtggatggcctgagcgccaccctcgcctggggctatagcgaagggaaatcgaaatccagctactacggcgataaatacgtcgacctcgacagcgtcgcgccgatgaaagcgatcgtcggcgtggcgtgggacgatccggctaagcgctacggtacggcgctgaccgccacctttgttaagggcaaacaggccactgccaccagccgcgagagctacaacaacaccggctccgccatcgccgattccagcaccgaatatatgcgcgtgccgggctacggcatgctggactggaccgcttactggcaggtggcgaagaacgttcgtctcaacggcggggtttacaacattaccgaccgtaaatactgggactacctgagcagccgcaacatcgagaccagtaccaatcaggatgccaacgataaagcgctggctgtgatgcccggaaggacctggcaactgggcgtgaatatcgatttctga

SEQ ID NO: 90299 - DNA, 1032 bp, Enterobacter aerogenes
atgcaaaacgcacacgacgatctgtggcagcgctaccaggccaccaaagcccgctccaccgccaaatatgcccgcgacatcgccgcagagatgggaattagcgaagccgaattaacggccgcgcgcgtcggtcacgatgccgtgcgtctgcacgacgacgtacgggcgattatcgccgccctggagagcgtcggcgaaaccaaatgcatctgccgcaacgaatacgcggtgcacgagcaggtcggcgaatttacccatcagcacctgagcggccacgccgggctggtgctcaacccgcgggcgctcgacctgcgcctgttcctcagccagtggtcgagcgtgttccacctcaacgataacggccgccagagcattcagttcttcgacccgcacggcgatgcgctgctaaaggtctatgccaccgggaaaaccgatatggcggcatggcaaacgctggtagccaaattcagcgagacggcgcccggcgcgctgacgattcgcccggccgaccgcgtaaagtacgccgactccgccgacgccgcggcgctggaaaaggagtggcgcgcgatgaccgatgtgcaccagttcttcggtctgctgcgtaaacacaatctttcccgtcagcaggccttccgcctggtgagcgacgatctggcctgccgcatcgacaataatgcgctgccgggactgctggaaacggtgcgccagggcggcaatgaaatcatgatcttcgtcggcaaccgcggctgcgtgcagatcttcaccggcgcgctggaaaagctggcgccgatgcgcggctggatcaacatcttcaacagcgactttaccctgcatctgcgtgaagacagcgtggatgaaatctgggtcacccgtaaaccgacctccgatggccacgtcaccagcgtcgaactgtttgccaaagacggtacgcaaatcgcccagctgtacggccagcgcagcgaaggtcacccggagcaacaacagtggcgcgcgcaggtggcgcgtctgtgcgcggaagggcagccggcatga

SEQ ID NO: 90300 - DNA, 819 bp, Enterobacter aerogenes
atgaaacgttggggaatactgcttgctgcactgccgctgttcgccagcgcggccgccgaacgggtaatttccctcggcggcgacgttaccgaaattgtctacgcgctgaacgccgggcagcagctggtagcgaaagacagcaccagcacctggcctgccgccgcgcagaagctgccggacgtcggctatctacggcagttaaacgccgaggggatcctctccttacgcccgcagctggtactggccagcgcgcaggcgcagccgtcgctggtgctgcagaaagtgcaggacagcaaggtgacggtcgtcaacgtgccgggcggcgataaccttgccgccatcgataacaaaatcgccgttattgccaaagcattaggtaaaactccggcaggcgacgtgctgcgccagcaggtcaagcagcggatagccgccattccctcgcggcctatcgccaaacgggtgctgtttatcctcagccacggcgggatgaataccatggtggccggacagcacaccgccgccgatggcgcgatccgcgccgccgggctgcaaaacgcaatgcagggctttgaccattatcgcgcaatgtcgcaggaagacgtggccgcaagccaggcggatctggtggtgatttccgccgatggtctcaaggggatgggcggcgaaagcgggttatggaaattgcccggtctggcgcaaacgcccgctggccgccataaacagctactggcgatcgacgatatggccctgctcggcttcggcccgcgtacgccgcaggcgctcctcgaactgcgaaaaaaagcggagcagttgccctga

SEQ ID NO: 90301 - DNA, 996 bp, Enterobacter aerogenes
atgcgccctgccctcgttcgccatttgctgttgatgacactgctgctggtcgcattgacgctctacgccaccaccctcggcgcaatgcgattgccattgatcaacctgctgccctccggcgatgaaatcctgcgccatatctggctgacgatccgtctgccgcgagtgctgctggcgctgctggtcggcgccgcgctggccctgtccggctgcgtgatgcaggggctgtttcgcaacccgctcgccgacccggggctgctgggtatcagcagcggcgcagcgctggcggtggcctgctggctggtgttgccgctcagcgtgccggctctgttagctctgtatatgccgatgctggcggcgtttatcggcagcctggcggtgatggcagtgatttttatcctcagccgcgcaggtgacggttcgctgtcgcggctgctgctggtggggatcgccatcaacgccttatgcggcgcgctggttggcgtgctggcctggctaagcaacgatgctcagctacgccagctgtcgctgtgggggatgggaagcctcggccaagccgaatggccgacgctgctggtggcggccagcctgattattccggcgtcaatagcggtgtggaggatggcaacacgtcttaacctgctgcaactcggcgatgaagaggcgcactatctcggcgttaacgtgcgggcgctacagcggctgctgttgttatgcagcgcggtgctggttgccgcggcggtggcgataagcggcgtcatcggctttatcggcctggtggtgccgcatctgatgcgaatgtggctgggggcggaccaccgcgggcttatccctggctcgctgctggcgggcgcgattctgctgttgattgccgataccctggcgcgcaccgtcgccgcgccggcggagatgccggtggggctgctgaccagcctgctcggcgcgccgtggttcctgtggttgatatttcgtcgggagaaaccaatccatggataa

SEQ ID NO: 90302 - DNA, 780 bp, Enterobacter aerogenes
atggataacaactatcgggcgcaaggtctgtcgctgcggctcggccaacgtcaggtgattgaccaggtttcgctgacgcttcgcggcggcgagatgaccgcgctgatcggcccgaacggcgcgggcaaatccaccctgctgcggctgctaaccggcttccttaccccggatagcggcgaacgcatgatggacggcaaagcgctggagcgttggtcgccgcaggcgctatcgcgccgccgggcggtgatgttgcagcgcactccactccaggccgactggacggtggaaacggttatcgccatggggcgctcgccgtgggaagcgaccgccagtccgcagactctgcgcgatgttatggcggaaaccggctgcgatcatttgcgcggcaggcgctatccgtcgctttccggcggcgagcagcagcgggtacagctggcccgctgtctcgcgcagctgtggcaaaacggcgcgccgcagggatggctgtttctggatgaacccacctcggcgctggatctctattaccagcagcatctgttacgcctgctcaagcggctgaccgcttccggccagctacatgtctgcgtggtgctgcacgatctcaacctcgccgccctgtgggccgaccagattctgctgctgcaccagggacaggtggtggcgcagggcacgccgcatcaggttatccagcaggaaatcattagccgctggtacggcgcggacgtgcgcctcggccagcatccggaaaaagcgattccacaggtttatctggcgccctga

SEQ ID NO: 90303 - DNA, 2562 bp, Enterobacter aerogenes
atgagcacaatcgacaatttagacgcccataccccaatgatgcagcagtatctgaagctgaaggctcagcatccggagatcctgctgttttaccggatgggcgacttttacgagctgttttatgacgacgccaaacgcgcctcgcagctgctcgatatctcgctgaccaaacgcggcgcttccgcgggcgaaccgattcccatggccggcattccccaccacgcggtggaaaactatctcgcaaagttggtaaaccagggcgagtcggtcgcgatttgcgaacagattggcgatccggccaccaccaaagggccggttgaacgcaaagtggtacgcatcgtcacgccgggcaccatcagcgatgaagcgctgctgcaggagcgccaggacaacctgctggccgccatctggcaggacagcaagggcttcggctacgcgacgctggatatcagctccgggcgctttcgcctgagcgaaccggccgaccgcgagaccatggcggcggaactacaacgtaccaatccggcggaactgctatatgcggaagattttgccgaatcgtcactgattgaaggccgccgcggcctgcgccgtcgcccgctatgggagttcgaaatcgataccgcgcgccagcagctcaacctgcagttcggcacccgcgatctggtgggcttcggcgtcgaaaacgccccgcgcgggctgtgcgccgccggttgcctgttgcaatacgtcaaagatacccagcgcacctcgctgccgcatatccgctccatcactatggaacgccagcaggacagcatcattatggatgccgccacccgtcgcaatctggagatcacccagaatctcgccggcggcgttgataacacccttgcctcggtactcgactgcacggtcacgccgatgggcagccgcatgctcaaacgctggctgcatatgccggtacgcgataccgcggtgctggttgaacgccaacaaacgattggcgccttacaggaacgctataccgagctgcagccggtgctgcgtcaggtcggcgatctcgaacgtattctggcgcgtctggcgctgcgtaccgcccgcccgcgcgatttagcccgcatgcgccatgccttccagcagctgccgctgctgcgcgagctgctggccgacgttgactgtcagccggtgcaacagctgcgcgagaaaatgggcgagttcgccgaactgcgtgaactgctggaacgcgcgatcatcgatgcgccgccggtgctggtacgtgacggcggcgttattgctccgggttataatgaagagctggatgagtggcgggcgctggccgatggcgcgaccgattatctcgacaaactggaaatccgcgaacgcgagcggctgggccttgataccctgaaggtcggctacaatgccgttcacggttactacatccagatcagccgcggccagagccagcacgcgccgatccactacgtgcgccgccagacgctgaaaaacgccgagcgctacattattccggaactgaaggaatacgaagataaggtcctgacttcaaaaggcaaggcgctggcgctggaaaaacagctctatgacgacctgttcgaaaagctgctgccgcatctggccgacttacaaaccagcgccagcgcgctggccgagctggacgtactggtgaacctcgcggaacgcgcggagaccctgaactactgctgcccgacctttatcgataaacccggtattcgcattaccgaaggccgccacccggtggtggagcaggtgctgaaagagccgtttatcgccaacccgctgcagctggcgccgcagcgccgcatgctgatcatcaccggcccgaacatgggcggtaaaagcacctatatgcgccagaccgcgctgattgcgctgctggcctatatcggcagctacgtgccggcgcagaaagtagaaattggcccgatcgatcgcatctttacccgcgtcggcgcggcagatgacctggcgagcggccgttccaccttcatggtggagatgaccgaaaccgccaatattctgcacaacgccaccgaacacagcctggtgctgatggacgagattggtcgcggcacgtctacctacgacggtctgtcgctggcgtgggcctgcgcggagaatctggcaaataagatcaaagcgttgaccctgttcgccacccactacttcgagctcacccagttgccggaaaaaatggaaggcgtggccaacgtgcacctcgatgcgctggagcacggcgataccatcgcctttatgcacagcgtgcaggacggcgcggccagcaagagctatggcctggcggtcgccgcgctggcgggagtgccgaaagaggtgatcaagcgcgcgcggcagaaactgcgcgagctggagagcatttcgccaaatgccgccgccacgcaggttgatggtacgcagatgtcgctgctctccgcgccggaagagatctcgccggcgctggaagcgctggagaatcttgacccggattcgctgagcccgcgtcaggcgctggagtggatctaccgcctgaaaagcctggcgtaa

SEQ ID NO: 90304 - DNA, 1143 bp, Enterobacter aerogenes
gtgttaaaatttttatatgccaccctgttattgctggggctgtttccgctggcggcccaggcggtttgtcatcgttccgacgacaccccgtcgcaatcttatgttgcgatgccgcagcagctactggtctccagtaaaaattatgcgccgggcgagatcctttatgactccggatatatgtccggcggcacgacaactatcaagaactgtgcggggacttattacgttggttttcactacgccggcgcgttaaccaccgccagtccgctgcaggataatgtctatccgttgaccaatggttcaaccgccaccgggctcggtattcgcgtctataccattaatcaggcaggcccgtttgatgacgaacgggcgatcgataacagctggcaggaacacgatgccggggcaggctccgaccacaccctcaataactccgcttatcgggtgcagattatcgccaccggcgggccgataaccagcggcacgtttaacgtaccgagcccgctggcgcgggtcgattatcgcgaaacacagagtattgatagcagcgatggcgacatcgcctccacgctgacgctgtcgaccaccacggttgaagtacatgcgatgggctgtacggcttcagtctcttctttgctttttgatatggggagtgtcgatgtctcttcgtttgataaccagcaaacggtagaaggacctgaacagagcgtggggctttcatgcgaaccgggaactaacgtaacgctgaaatttagtggcgcggtggcgtcgggagacaatgacaacggttcggtcttcgcactgaccgacgccggctctgacggcgtagcgaccggcgttggcgtgaaaatcctaacctataatccgaatcgacaatcttttatttctctacctattggccagacgtttggcgtctttagctccgatcgtgacgcggcggcggcggcaaatagcggacaggatgccgatggcaatgccatttccgatattggctccgcaacgacctatagcgatgatgcgaataggggaggggcaggggcaagtgaagcgatccgcttccgggcggattactacaaaaccggttcggcggtgacccccggtaccgccaatgccaccgggacgatcaccctgcaatataactga

SEQ ID NO: 90305 - DNA, 552 bp, Enterobacter aerogenes
atgtcaaaatttttatatgctgttctgtttttaacggggatgctggttagcgcaatgccagctctggctggggataataatctccgggagacacgtgatattacctttcacggcaggattgccgcagggacctgtaatgtcaccaatcctgaaaccgtagatctggggaaatactataaaggagacttttctgttgccggcggtaacaccggtaatgttccagtcaccatcagttttgacagctgtactgctgaaatcagccaggccaccgtcaccttcaccggcacgccctattccgaagacccgacctatggctcggtcatttatgccaatcaggtgacgcctgatgccgatggcgctaccgatgttggattgcagttgttcgattatccagctatccacgtggcgctggccaatggggtgagttatccggtacccattgaaaatggcgcgggcgcattgaaatttattgcccgcatgtacacccctcatggcgccccaacggcgggtaaattcagctccgcggtcacgttgaacgtgacctataactaa

SEQ ID NO: 90306 - DNA, 552 bp, Enterobacter aerogenes
atgtcacgctttcattttgctaccgtccgacgcatggcggcgacgagcctgcttttcgttgccgggctgccgtctgcgctggcgtacaacacacaggatgtcattaacttcagcgtcacggggaatattgtggcaggcagctgtaatgttagttatcccgcgaccgttgaactgggaacctatctgccaacggattttattaatgaaggcgatagcacggacaatgtcccgttcactgtctctttcactaactgttctccctcgctgactaaagcgacggtagcgtttaccggtgccgtagatggaacccagccattctattttgccaacgggattacggcagaggggggcggcgcaaccgatgttgcactggaattattaaccgatgcggatcactggcaaatgtctaacgggcagagtcatgacgtcactctcgagtcggacagccatgccggtgaaatcatttttatcgcaagaatggcaaccccaggccacaaccccggcaccggggagttccagagcgtcgtcaccctgaacgttgtttataactag

SEQ ID NO: 90307 - DNA, 2592 bp, Enterobacter aerogenes
atggaaaaagttaagcatacctatgtcctttctttagggctggggctcagtattgccttcagttctttcagcgccattgctcaggaacattttaaccctcgtcttttggaaacggatagtacagagacgccaatgatggatctcagtctgtttgccaaagatgaggtaccgcctggtgactataacgtcgatatttatatcaacggtagcctggtggatactaaaaccatttcctttcgcaagctgtcggacgacaaaaacaccaccgccgggcaggttgttggagcgtgcctgagcgtgtctgagctgaaagcctggaatgtgcgggtcgataactactttagcgaacaggacaaaaccagcgagtgcgccagcctgcaggctattccgggtctggagcagaaaatggatctggcgaatcagcgctttgatctcactatcccgcaggttgccctgctcaacaccgcccgtggttacgtttcgccagagcgatgggatgaaggtattgccgccggtttgcttaactacagcgtctctggtcagcaggatttgcaccaccgtaatggcgtggacagtagcaaccagttcgtcagcctacagccgggactgaacctgggggcgtggcgtttgcgtaactattccacctacagccactctgaatccgaaagtgagtgggattcggtgtacacctacgcttcccgcgatattaaatccctgaaaagccaactggttctcgggcagggcaccacccgcggcggcgtgtttgatagcgtgggttttaccggggtacagatgtattccgataatgatatgaagccggacagcatgcagggcttcgcgccggtgatccgcggtatcgcccgcagcaacgccgaggtcaccgtgtaccagaacggacacagcatctataaggccacggtgccgccggggccattcgaattcagcgatatgtacccgaccggtagctccggcgacctgaaagtggtgatcaaggagtctgatggttcgcaaagtagcttcatcgtcccttacgccacattgccggtgctacagcgtgaaggacaggtgcagtatggcctggtggcgggtaaaacccgccaggacggatcggattcgcgggcggaagactttaactttgtccagggatcggcggcctggggcgtcggcaaaggcgtgaccttgtacggcggctatattcaggcggaagacaaatactccaacctgattgccggtaccggttttaacctcggcagcgccggggcgctctcttttgatatttcacagtcgtgggcggatgtcccgcagccggacaatatacggcagatggaacaccatagcggccagtcgtaccgcgtgcgctacagcaagacgctgcagcagaccaacaccgatattgcggtggctggctacaaattctcaacccgcggttatctgtcgttccaggatttcctcaacgattgggacccgagcaacagcgccatcgataacggtcgcgaacgtaatcgtttcgacgtgactatctcacagacgctgcctttcggtacgttgtccctgaccatgtatgacgcctcctactggaatagccagcacgccgactcgctgaacctcggctttagcagcacgctggggccggtatcgtactcgctaaactatgcgcacacgaaaaacgttgatggcggttatggcaacgattccgatgaatacgatgacgataacgtcttctcgcttaactttagcgtaccgttcagcgccttcagcaatagtgaagcggcgcagtcgatttcggctaactactcgatgaacagcagcaaacacggcgataccacgcataacatcggtatttccggcaccgcaatgcagcaaaaccagctcaactggcaggtgtcggaaggctataacgccgattcagaagcgaccaacggcaacgttaccgtcggctaccagagctcgtatgccgatgtgtccgccggttacagctacgacgactacagccgtcgtctgaactatagcctgcgcggtggaatggtggttcacagtggcggtattaccctggcccgtcagttgaatgacagcgtagcgctggtggaaacgccgggcgtctccggggtgccgatcaatggccagactaacgtccataccgactactttggtaatgcgattgtgccgtacgtgcgtccgtaccacagtaatcagatttccctcaataccgtggaggccagcgatgccaccgcggccattgataacgtcgccaaaaccgtggtgccgaccaaaggcgcggtggtccgcgtgaagtacaacacctggattggccggaaggcgatgatgacgttgatcttcaacggtaagccggtgccgttcggcgcagtagtcacgcaaaccagcgatgattcggacgacacccgcagcagcatcgtcggcgacagtggcgaagtgtacctggttggtctcgccgataaagggcaactgatggtcaagtggggcgacggggcgaacaaacagtgtgccgttgactacacactggcgggtgcgaagtcgcaggccgatattctgtttatcaacgggatatgccatcccgtccagggggctcactga

SEQ ID NO: 90308 - DNA, 687 bp, Enterobacter aerogenes
atgaaacccatcgcagcttttgttttttgtgtggccgccgttgccagtctgaatgcgtctgccagtatcgttaccggcggaacgcgggtgatttttgacggctcccatcaggccgcctcgttatccgtggaaaactcggacaaagttaccaatctggtgcaatcctgggtcagtcccgccgaaggtagcgcgctgaaaaaagaaactatgattattacgccgccgctgtttcgcctcgaagccgggaaaaaagcgtcgatccggattgttcgttcagggatgccggttccggaagatcgcgaatcattattgtggctaaacgtaaaaggtattcccgctacggatgatagttctgctggcaaaaataccatgcagattgccatcaattcgaaaattaagctgatctatcgcccggttgcactcaaaggccagtcgccggaaagcagtgcaaataaagtggtatggaagccggttgccggcggtgtgcaggtcaataacccgacgccgttttatatgaacttctcccgtatagaaattaataatcatgcgctcagcggccaatattttgtcgcaccgttctccacgctgaatatttccgaagggaagatcccctcccacggcaaagtgacctggtcgctgattaatgattacggcgtgaaaggtcaggacaaagtctcttcatattaa

SEQ ID NO: 90309 - DNA, 537 bp, Enterobacter aerogenes
atgaaacttactaaaatcggcgcagctctggttctgacttttggcatgagcgcggcagcgatggcatctaacaccattacctttaacggtgaagtgctggagacgggttgcaacatcactgttgatggcggtactccggatgcaaccgttgaactgggcagcgtggcagcaactgatttggtagcaaaaggtgacctcggcgcgccgaaacagttcgtttttaatctggaccagtgcccgactgcgtccaatgtcaatattgtcttctctgcgccggttgacccggtggctggtgatgactcgtacttcgcgaatactgcctctggggttggcgtcactgctgcacaaaacgttgccgttcaactgaagcaaggcggttctaatggcaccatcgtgaagaacaatgcagacaacgatcctattaccctggactctggctctgctaccgagacctacaccgcatcgatgattgctgttgatcaggctgttgctggtacggttcagtccgtcgtgacctataacgtccgctataactaa

SEQ ID NO: 90310 - DNA, 237 bp, Enterobacter aerogenes
atgatttgtccacgttgcgctgatgagcagattgaagtgatggcgacgtcgccggtaaaaggggtgtggatcgtttaccagtgccagcactgcctctatacctggcgtaataccgaaccgctgcgtcgtaccagccgcgaacattatccggaagcgttccgcatgacgcagaaagatattgatgaggcgccgcaggtgccgcatattccaccgctgttggcggcagataagcgttaa

SEQ ID NO: 90311 - DNA, 1428 bp, Enterobacter aerogenes
atggcttttgatgatttacgcagctttttgcaggcgctggatgagcaggggcaactgctaaaaattagcgaagaggtgaatgccgagccggatctcgccgctgccgctaacgccactgggcgcatcggcgacggcgcgccggcgctgtggtttgataacattcgcggttttaccgacgcccgtgtcgccatgaacaccatcggttcctggcaaaaccacgcgatttcgctggggctgccgccaaacacgccggtgaaaaagcagattgatgaatttattcgccgctgggataaattcccggtaacgccggagcgtcgcgccaacccggcgtgggcggaaaacaccgttgatggcgacgatatcaacctgttcgatattctgccgctgttccgcctgaacgatggcgacggtggtttctatctcgacaaagcctgtgtggtttcgcgcgatccgcttgacccggaccacttcggcaaacagaacgtcggtatttaccggatggaagtgaaaggcaagcgcaagctgggcctgcagccggtaccgatgcacgatatcgcgctgcatctgcataaagcggaagagcgcggtgaggatctgcccattgccatcaccctgggtaacgacccgattattaccctgatgggcgcgacgccgctgaaatatgaccagtcagaatatgagatggcgggagcgctgcgcgaaagcccgtatcccatcgccaccgcgccgctgaccggctttgacgttccctggggctcagaggttatccttgaaggggtgattgaagggcgcaagcgtgaaatcgaagggccgttcggcgagttcaccggccactactcaggcggccgcaatatgacggtggtgcgtatcgataaagtctcttatcgcacaaaaccgatttttgaatcgttgtatctcggaatgccgtggaccgaaatcgactatctgatgggcccggcgacctgcgtgccgctgtaccagcagctgaaggcggagttcccggaggtgcaggcggtcaacgccatgtacacccatggtctgctggcgattatctccaccaaaaaacgctacggcggttttgcccgcgcggtgggattacgggcaatgactaccccgcacggcctcggttacgtgaaaatggtgatcatggtcgatgaagatgtcgatccgttcaacctgccgcaggtgatgtgggcgctctcctcgaaggtcaacccggcgggcgacctggtacagttgccgaacatgtcggtgctggagcttgaccctggttccagtccggcggggatcaccgacaaactgattatcgacgccaccaccccggttgcgcctgaccttcgcggtcactacagccagccggttcaggatttaccggaaaccaaagcctgggctgaaaaactgaccgccatgttggccaaccgtaaataa

SEQ ID NO: 90312 - DNA, 591 bp, Enterobacter aerogenes
atgaaactgattattgggatgaccggggcgaccggcgcgccgttaggcgtcgcgctgttacaggcgctgaatgaaatgccggatgtggaaacgcatctggtcatgtcgaaatgggcaaaaaccaccattgagctggaaacgccctatagcgctcgtgatgtcgccgcgctggcggacttctgccatagccctgcggatcaggccgcgaccatctcatcaggatcgtttcgtaccgacggcatgattgttatcccctgcagcatgaaaacgctggcgggtattcgtgctggctatgcggaagggttagttggccgcgcggcggacgtggtgctgaaagagggacgcaagctggttctggtgccgcgagaaatgccgctgagcaccattcatctggagaacatgctggcgctgtcgcgcatgggcgtggcgatggtgccgcccatgcctgcctattacaaccacccggaaacggtagaggatatcaccaaccatatcgtgacccgggtgctggatcagtttggtctcgaataccacaaagcgcgtcgctggaacggcttacgcgcggtcgagaatttatcacaggagaattag

SEQ ID NO: 90313 - DNA, 420 bp, Enterobacter aerogenes
atggagttacgtaacgaggcgttccaccttctacgccagctttttcaacagcataccgcgcgctggcagcatgaattaccggaactgaccaagccgcaatacgcggtgatgcgctcggtcgccgaacatcctggtatcgagcaggtggcgcttatcgaagcggccgtcagcacgaaagcgacgctggcggagatgcttagccggatggagaaacgcgggctggtacgccgcgaacacgatccgagcgataaacgtcgccgctttgtctatctgacgaatgaagggcaggcgctgctggcaaattccatgccacaaggcaatcgggtcgatgaagaatttttgagccgccttaacgaagaggagcgcgcgcagttttcccggctggtgctgaaaatgatggaaagtaaaaacgcggattaa

SEQ ID NO: 90314 - DNA, 888 bp, Enterobacter aerogenes
atgctaaacctgcagcgcgttaccatgtttgtcgccgttgttgatgccggaagctttactgccgcggcggcggcgcttgggcagaccaaagcggtggtcagttttaacgttcgccagctagagagtgaactgggggtgacgttgctgctgcgttcgacgcgccggttaacgctcaccgaagccggggcggtgttttaccagcgcggcgtcgggttgttgaaagccgcggagaatttacaggatgaggtgcgcgccagccacgccgggttaagcggtgaactgcggatcaccaccaccccggaatatggcgcccaggtgattatcccggcactggcggaatttgctcgtcgacatccggcgctgcgggtgcgtcacgtctcatcgtcttatcacgcggatttgatctctgaacgttttgatgtcgcgatacgcctcgggaccctggccgattcacgctatcatgcggcccggatttcgcgtttcgccatcgtgcccgtggcctcgccgatttggctggataaacatccgctgcgcacgcttgccgacctggcgcaggcggagtggatagttaacgagcgcttagcgacgccgctgcgctggcagctcctgaccgtcgaagggcaatcgatcgcttttgaaattacgcaaccaccgcggatctcagccgatagtgcacaagcgttaatgggcttcgcgctggcgggaagcggggtggcgctgctcccggagtggctggtggccgaagctatcgcgcggcaggagctggtgcgggtagtgccagagtatatttttccatcgcagggggtatacgccgtctacccggacgcgcagcatgtgccaaccaaggtccgggcatttatcgattttctgcgcgaacgaaccgcttaa

SEQ ID NO: 90315 - DNA, 378 bp, Enterobacter aerogenes
atgaacccatggatccaagaagttatcgacgcccacgtgatcattgaacaatggctgggccggaaagaaggtagcgcacaagcgctgatgagccgttttgcacaagagtttacaatggttcctatcagcggcgctaagatggattacccgacggtaagcggctttttccatagcgctggcggcagccgccctggattaagtatcgtggttgataatgcgcaggtgttgagcgaatggcatgacggcggcgcggtgctctaccgcgaaagccagaccctgccggaacaaggcgaagtcgtacgctggtccacggcgatatttcaacgcattgagggaaaaatcctctggcgtcacctgcaggaaacccgtatcggttaa

SEQ ID NO: 90316 - DNA, 993 bp, Enterobacter aerogenes
atgagtcagaatacgctgaaagttcatgatttaaatgaagacgcggaatttgatgagaacggaatggaggttttcgacgagaaagccttagtagaagaggaacccagtgatagcgatctggctgaggaagagctgctgtcgcaaggcgccacccagcgcgttctcgatgcgacacagctgtatcttggtgagattggttattccccgctgctgacggccgaagaagaagtctatttcgcccgtcgcgcactacgtggagatgttgcttcacgccgtcgcatgattgaaagtaacctgcgtctggtggtgaagattgctcgtcgttacagcaatcgtggtctggcgctgctggatctgattgaagaaggtaacctcggcctgatccgcgcagttgagaagtttgacccggagcgtgggttccgtttttcaacctacgccacctggtggatccgtcaaacgattgaacgggcgattatgaaccaaacccgtaccattcgtttacccatccatattgtgaaagagctgaacgtttatctgcgtaccgcgcgcgagttgtcgcataagctggaccacgagccaagcgccgaagagatagccgaacagctggataaaccggttgatgacgttagccgtatgctgcgtctgaacgagcgcattacctcagtggataccccgctgggcggtgactcagaaaaagcgctgctggatattctggccgatgaaaaagacaacggcccggaagacaccacgcaggacgatgatatgaaacaaagcatcgtcaaatggctgttcgaactgaacgccaaacagcgcgaagtactggctcgtcgtttcgggctgctgggatatgaagccgcaacgcttgaagatgtgggtcgtgaaatcggcctgacccgggaacgcgtgcgtcagattcaggtggaaggtctgcgccgcctgcgggagatcctgcagggacaggggctaaacatcgaagcgctattccgcgaataa

SEQ ID NO: 90317 - DNA, 1143 bp, Enterobacter aerogenes
atgagcgcgggaagcccaaaatttaccgtaagccgtattgcggcgttgtcactggtttcactctggctggccgggtgtacgaataccaataatccgcctgcgccggtgaattcggcaagcggcgctgcgtcctccagcaccaattccgggatgctgattacaccgccatcctccggcgcgcagcaagttccaccggctcagccgattcagccgatgcagacccagccaattcagactcagccgacccaggttcagccgatggctcagcaaccggtgcagacggtgaacggtaagatcgtttacaaccgtaaatatggcgatattccgaaaggcagctacaccggcggcagcacctataccgttaagcgcggcgataccctgttctatatcgcatgggtcaccggcaacgatttccgcgatcttgcggaacgcaacaacgtcccggcgccgtacgcgctgaacgtgggccaggtgctgcaggtcggcaactccgcaggccagccgatcaccggcgaaaacccggtatctcaggctagcgcgcaagcaagcggcggtgcgacggccaccacaacttctgcacaaaaatccaccgcagtggttgcgtcacaaccgactattacgtattctgaatcttcaggtgaacagagtgctactaagatgttgccgaataataaaccagcaacgaccacgacagcggtcgctccggttacggcgccatcaaccgttagcacaacccaaccgactgcaagcagtacgtctaccagttcgccgatctcatcatggcgctggccgactgatggcaaggttatcgagaactttagcggcgcggaaggcggcaataaaggtatcgacattgcaggcagtaaaggacaggctattgtcgcgaccgccgatgggcgcgtcgtctatgccggtaacgcactgcgcggttacggtaatcttattatcatcaaacacaacgatgattacctgagtgcctacgctcataacgataccatgctggttcgggagcaacaggaagtcaaagcggggcagaaaatcgctaccatgggtagcaccggaaccagctcaacaagattacattttgaaattcgttacaaggggaaatccgtcaacccgctgcagtacttaccgcagcgataa

SEQ ID NO: 90318 - DNA, 627 bp, Enterobacter aerogenes
atggtaagtaaacgtgttgaaagtttgttgaatcagctacgcactcagggcatcgtcgatgagcgggtcctcgaggcaatcgcgcaggttccgcgcgaaaaattcgttgatgaagcctttgaacataaggcgtgggaaaacaccgcgctgccgattggccaggggcaaaccatctcgcagccttatatggtggcgcggatgacggagcttctggaactgacgccggactcaagggtgctggaaattggcaccggctccggctatcagacggcgatcctggcgcaccttgtgcaccacgtctgctcggttgagcggattaagagcctgcagtggcaggcgcgccggcgtcttaaacaacttgatttacataatgtttcaacccgtcatggcgatggatggcagggttggcaggctcgcgcgccttttgacgcgattatcgtcaccgccgcgccgccggaaattccggccgcgctgatggcgcagcttgatgaaggcggcgtgctggttttgcctgtcggtgaagaacatcagtacctgaagcggatccgtcgccgcggcggcgaatttttcatcgataccgtcgaagccgttcgctttgttccgctcgtcagaggggaactggcctga

SEQ ID NO: 90319 - DNA, 762 bp, Enterobacter aerogenes
atgcgaatattgctgagtaacgatgacggtatccacgcgccggggatccaaaccctggcgaaggccttacgcgaatttgccgaggtccaggttgttgcacccgatcgtaatcgcagcggcgcctcaaattcgctcacgctggaatcttctctacgcacgttcacctttgaaaatggcgatatcgccgtccagatgggcacgccgaccgactgcgtttatctcggcgttaacgcgctgatgcgcccgcgcccggatattgtggtctctggaatcaacgcgggccccaatcttggcgatgatgttatctattccggtaccgtcgcggccgcgatggaaggccgccatcttggttttcctgcccttgccgtttcgctgaacggctatcaacattacgataccgcggcggcagtgacgtgcaccattctgcgcgcgttaagccgcgagccgctgcgtaccgggcggatcctcaacatcaacgtgccggatcttcccttcgagcaaatcaaaggcattcgcgtcacccgctgcggcaaccggcatccggccgaccaggtcatcccgcaaaaagatccgcgcggcaatacgctgtactggatcggcccgccgggtgacaagcgcgatgccgggccggggaccgattttgcggcggtggatgaaggctatgtttccgtaacgccattgcatgtcgatttaaccgctcatcaggcacatgaggtggtaaccgattggttagaacgcgtcggggttgatacgcaatggtaa

SEQ ID NO: 90320 - DNA, 1050 bp, Enterobacter aerogenes
atgatcgcctttgatgacttaacatacctgcacggcaagccgctgggccaggggcggctgaaggccaatccggaagactttctggtggtcgaagacctcggtttcgcccctgatggcgaaggcgaacatgtgctggtgcggattctgaaaaatggctgcaacacccgttttgttgccgacgcgctagcgaaatttcttaaaatccatgcgcgcgaagtgagctttgccgggcaaaaggataagcacgcggtcaccgaacagtggctgtgcgcccgcgtgccgggcaaagagatgccggatctgagcaagtttcagctcgaaggctgccaggtgctggagtatgcccgccataagcgtaagctgcgtttaggcgcgctgaagggcaaccagttcacgctgatcctgcgggaaatcagcgatcgcgacgatgtcgaaaagcgcttgcaggcgattgccgacggcggcgtgccgaactattttggcgcgcaacgctttggtatcggcggcagtaacctgcagggcgctttgcgctgggccgagagcggcgaatcggtgcgcgatcgcaataaacgcagtttttggttgtcggcggctcgcagcgcgttgtttaatcagcaagttgcaattagattaaaaaaaacggaatttaatcaggttgttgatggcgatgcgctacaattagcggggcgcggaagctggtttgtggcaaccaccgaagagttggcggaattgcaggcgcgggtcgataaccgcgaactgatgattaccgctgcgctgccgggcagcggcgactggggcagccaacgcgacgcgctggccgccgagcaagccgcgatagccgaagaaacgtcgctacaggcgctgctggcgcgcgaaaaagttgaagccgcgcgccgggcgatgctgctgtatccgcagcaattgtgctggaactggtgggatgatgtcactgttgaactgcgcttctggctgccagcgggaagttttgccaccagcgtggtaagggaacttatcaatacaacgggtgactatgcgaatattgctgagtaa

SEQ ID NO: 90321 - DNA, 480 bp, Enterobacter aerogenes
atgcgaattggacacggttttgacgtacacgcttttggcggtgaagggccaattattattggcggggtacgtattccttatgagaaagggctgctcgcccattccgatggcgacgtcgcgctacacgcgttgaccgacgcgctattgggcgctgcggcgctcggcgacatcggtaaactgttcccggataccgatccggcctttaaaggcgcggatagccgcgagctgctgcgtgaagcgtggcggcggattcaggctaagggatatatccttggcaacgttgacgtcaccatcatcgcccaggcgccaaaaatgctgccgcatatcccgcagatgcgcgtgtttatcgccgaagatctcggctgccatatggacgacgtcaatgtgaaagcgaccaccaccgagaagcttggcttcaccggccgtggcgaaggcatcgcctgtgaagcggtggcgctgctgcgtaaggctgcgcaatga

SEQ ID NO: 90322 - DNA, 711 bp, Enterobacter aerogenes
atggcagccacttttccgggcgtttgcgccgtggtgccggcagccggttttggccgccgtatgcaaacggagtgcccgaaacaatatctctcaatcggtaacaaaacgattctcgaacattcggtcgccgcgctgctggcgaacgaacgcgttcagcgggtggtgatcgccgtcagccccggcgacgtccgctttagtcaacttcccttagcccatcatccgcaggtcaccgtcgttgacggcggcgccgagcgcgccgattcggtactggcggggctaaaagcgttagcggatgcgcaatgggtgctggttcatgatgccgcgcgaccgtgcctgcatcaggacgatctctcgcgactgctggcgctgagcgcgacaagccgcgtcggcggcatactggcggcgccggtgcgcgataccatgaagcgtgccgaaccgggcaaaaccgcgatcgcccataccgttgaacgcaatgatttatggcatgcgctgacgccgcaatttttcccgcgtgaactgctatttgactgcctgacgcgcgcgctggatgaaggcgcgaccatcaccgatgaagcgtcggcgctggagtactgcggcttccatcccgaattggtcgccggacgagctgataatattaaagtaacgcgcccggaagatctggcgctggccgaattttaccttacccgttcccgacaccaggagaaggcttaa

SEQ ID NO: 90323 - DNA, 312 bp, Enterobacter aerogenes
atgggtaaattaacgctgctattattagctttgctggtctggctacagtactcgctgtggtttggcaaaaatggtttgcacgactatagccgggttaatgacgatgtctccgctcagcaggccactaacgccaaattaaaagcgcgcaacgatcagcttttcgccgaaattgacgatctcaacggcggtcaggaagcgatcgaagaacgcgcacgcaatgaactcagcatgacccgcccgggcgaaacgttctatcgtctggtgccggatgcctcaaaacgcaatcagggttctgcgcagaataatcgataa

SEQ ID NO: 90324 - DNA, 327 bp, Enterobacter aerogenes
atgcgcaatacccagaacctcagtattattcgttcagaaccgcctccggcggccagcgacgagaccacctggtctttgtcgggcgccgccgtgggctttatttcgtggctgctggcgctgggtattcccttcctcttgtatggcggtaatacgctctttttcttcctctacacctggcctttcttccttgccattatgccggtcgccgtggtggtcggtattgcgctacattcattactggacggcaagctgatttacagcgtttgcgcgacgattttaaccgtcgggctgatgtttggtctgctgttcctctggctgttgggatag

SEQ ID NO: 90325 - DNA, 606 bp, Enterobacter aerogenes
atggcccggcatgacgaaaacgtcgtctggcatgcgcatccggtgacccgagagcagcgcgagcagcaccatggccatcgcggcgtggtgctgtggtttaccggcctctcggggtcgggtaaatccaccgtcgccggggcgctggaagaggcgctgcacgagcttggcgtaagcacctatttgcttgacggcgataatgtgcgccacgggctgtgcagcgatctgggattcagtgacgacgatcgcaaagagaacattcgccgcgtcggtgaagtggctaagctgatggtcgatgccgggctggttgtattgacggcgtttatatctccgcatcgtgcagaacggcagatggtacgtgagcgtttgggagagggacgctttatcgaggtctttgtcgataccccgttagccatctgtgagacgcgggatccaaaaggattgtacaagaaggcgcgggcaggggagttgcgcaattttaccggtattgattcggtctatgaatccccggagaatgctgaaattcatctggatggtgaacaattggtaacaaatttggtgcaccaactattagacctgcttcgacagagcgatattatcagatcctga

SEQ ID NO: 90326 - DNA, 1428 bp, Enterobacter aerogenes
atgaacactacgattgcacaacaaattgctaaagaaggtggcgtagaagcttatctgcacgcgcaacagcacaaaagcctgctgcgttttctgacctgcggcagcgtcgatgacggcaaaagtaccttgattggccgcctgctgcacgatacgcgccagatttatgaagatcagctctcttccctgcacaatgacagcaagcgtcacggcactcagggcgagaaactggatctggcgctgctggtggatggcctgcaggccgagcgcgagcagggcatcaccattgatgtcgcctatcgctacttctcgactgagaaacgcaaatttatcattgccgacacgccgggccatgagcagtacacccgtaatatggcgaccggcgcgtccacctgcgatctggcgatcctgctgattgacgcccgcaaaggcgtgctcgaccagactcgccgccacagctttatctctacgctattagggattaagcacctggtggtcgcggtgaacaaaatggatctcgtcgagttcagcgaagcgcgcttcaatgaaattcgtgaagattatctgaccttcgccgaacaactgccgggcaagcttgatatccgtttcgtgccgctctcggcgctggaaggggataacgtcgccacccagagcgataaaatgccgtggtacagcggcccgacgctgctggaagtgctggaaaccgttgacatccagcgcgaggttgaaagccagccgctgcgcttcccggtgcagtacgtgaaccgtccgaacctggatttccgcggtttctccggcaccgtcgcttccggtacggtcaccgttggccagcgcctgaaggtattgccgtcgggcgtggagtcgaacgtggcgcgtattgtcacctttgacggcgacctgccgcaggccggggcgggggaagcgatcactatcgttctgaaagatgaaatcgacatcagccgcggcgatttgctggttgacgctgaagcctcgctgcctgcggtacaaagcgccagcatcgacgtcgtgtggatggcggaacaggcgctgtcgccgggccagagctatgacattaaagtggctggcaagaaaacccgcgcccgcgttgacgctatccgctatcaggtggacatcaataatctgacccagcgtgaagtcgaaaccctgccgctgaacggcattgggctggtggagctgacctttgacgagccgctggtgctcgatccgtatcaggacaacccggtgaccggcgggcttatctttatcgatcgcctgagcaacgtgacggttggcgcgggaatggtcaacgaaccgcacctgcaggcgcaggccccgacgtcgcagtacagcgcgtttgaactggaactgaatcaattgattcgtaaacacttcccgcactgggacgcgcgcgatctgctgggaggcaagtaa

SEQ ID NO: 90327 - DNA, 909 bp, Enterobacter aerogenes
atggaccaaaaacgactcactcacctgcggcaactggaggcggaaagcatccatatcattcgtgaggtggccgccgaattctctaacccggtgatgatgtactccatcggtaaagattccagcgtaatgctgcatctggcgcgcaaagcgttttatccggggaccctgccgttcccgctgctgcacgtcgataccggctggaaattccgtgagatgtatgaattccgtgaccgtaccgccaaagcctatggctgcgaactgctggtgcataaaaacccggaaggggtggcgatgggcatcaacccgttcgttcacggcagcgccaagcacaccgatatcatgaaaaccgaaggcctgaagcaggcgctgaacaaatacggctttgatgccgcattcggcggcgcgcgtcgtgatgaagaaaaatcccgcgctaaagagcgcatttactccttccgcgatcgtttccaccgctgggacccgaaaaatcagcgtccggagctgtggcataactacaacggccagattaacaaaggcgaaagcattcgcgtcttcccgctctctaactggaccgagctggatatctggcagtacatctatctggaaaatattgaaatcgttccgctgtacctggcggcagagcgcccggtactggagcgtgacggcatgctgatgatgattgatgacgaccgtatcgatctgcagccgggcgagatgatcaaaaagcagatggtgcgcttccgtaccctcggctgctggccgctgaccggcgcggtagagtccaacgcgcaaacgctgccggaaattattgaagagatgctggtatccaccaccagcgaacgtcaggggcgcgtcattgaccgcgaccaggcaggctccatggagctgaaaaaacgtcaggggtatttctaa

SEQ ID NO: 90328 - DNA, 1416 bp, Enterobacter aerogenes
gtggattacttgcccctgtttgccgagttgaaagagagacccgtgctggttatcggcggcggtgaaattgccgtccgtaagattaaattcttgctgcgggcgcaggcgaaggtacaggtggtcgccgccgtcctgtcgccggagctcgctgaacaggttgaacgtcagcaaatcagctggcgggcaaccgcctttgatgagcagcaggtggacgatgtatttctggtgattgccgccaccgacgatcgtgaacttaaccagcgggtgtttgccgcggctaacgcgcgttaccgcctggtgaacgtggtggatgaccagcaactgtgctcattcgtctttccttctattgtcgacaggtcgccgctgctggtggcgatctcctccagcggcaaggcgccggtgctgtcgcgcattctgcgtgaaaaaatcgaagcgctactgcccacaaatttggggcgactggctgaaacggcgagctactggcgccatcatctgaaaacccggctgaccaccaccgaagcgcgtcgtcgcttctgggagcgcgtattcaccgggcgttttgccagcctgatggtggccggtaaccacgcggcggcggaacgggcgctgcaggatgaactcgacaggccggaacgcagcgtgggcgaaattattctggtaggcgccgggccgggggatgctggcttgctgacgctacgcggcctgcaagcgattcaacaggcggacgtggtgttttatgaccatctggtgaccgagagcgtgcgggaactggtgcgccgcgatgccgaaatgatctgcgttggcaagcgcgcgggcgagcactccgtgccgcagcacgaaacgaatcaaatgctggtggaggccgccaaagcggggaaaacggtagtgcgcctgaagggcggcgatccgtttatcttcgggcgcggcggggaagaactgcaggccgccgccgccgccgggatcccgttccaggtggtgccaggcgttaccgccgcggcgggcgcgacggcctatgccggcattccgctgacccatcgcgattatgcgcaaagcgcagttttcgtcaccggtcactataaatctgacagcgcgccgtttgattgggcgctgctggcgaagagccaacaaacgctggcgatttacatgggcaccatgaaagcggcggacatcagcgctcagctgatcgcccatggccgcgacgcgaatactccggtggcggtgatttcccgcggcactcgcgaggatcagcagacgctgacaggcacgttacaacagctcgaacatctggcgaaagatgccccaatgcccgcgctactggtggtgggcgaagtggtacagctgcatcagcagctcgcctggtttcaacacacaacgacagcggaagggtttaactcttctgtggtaaatctggcttaa

SEQ ID NO: 90329 - DNA, 1047 bp, Enterobacter aerogenes
atgttttccgcgatgtgccgccgtctgctgccgctggcgcttggcacaggttttgtcttctccgccgctccggcattcagcgccctgggcgacaccgccaatacccaggcccgccatattgctaccgtcttccccggaagaatgaccggtacgccggccgagatgctatcagccgattatcttcgtcaacagtttgcccagatgggttatcagagcgacgtacgtagctttaatacccgctacatctataccgacagcaatcaacgtaagaactggcacaacgccaccggcagcacggttatcgccgcgcatgaaggccagtctcgccagcaaatcattattatggcgcacctcgatacctacgcgccgcagagcgataaagacgttgagaacaaccttggcggcctgacgctgcagggtattgacgataacgcaatggggctcggcgtgctgctggagctggcggaacatttaaagaacgtccccacccgttacggcattcgctttatcgccaccagcggcgaggaagaaggccgcctgggcgcgcaaaatatacttaagcgcatgagcgaggcggaaaagaaaaatacgctgctggtgattaatctcgataacctggtggtcggcgataagctctatttcaatagcgggcgcagcacgccggcatcggtacgcaagctgacccgcgatcgcgcgctggctatcgcccgtagtcacggtatcgccgcgttcaccaatccagggctgaatccggagttcccgaaaggtactggctgctgtaacgatgccagcgtttttgatagcgccgggatcccggtactctccgtggaagcgactaactggtcattgggtaaaaaggatggctatcagcagcgcagtaaaacccgtagcttcccgcagggtaccagctggcatgatgtacaactggataaccaacagtatatcgacaaagcgctgccgggaaggatcgagcgccgcgggcgcgatgtagtcaaagtgatgctgccgctggtgaaagagctggcgaaagttgagaagaaaaagtga

SEQ ID NO: 90330 - DNA, 735 bp, Enterobacter aerogenes
atgtccaaactcgatctaaacgcgctgaacgaactgcctaaagtagaacgcgtcatggcgctggcggaagttaacactcagctggaaaaactcagcgccgaagaacgcgtggcatgggcgctggaaaacctgcccggcgactatgcgctctcttcaagctttggtattcaggcggcagtcagcctgcatctggtgaaccagctgcgcccggacattccggtgatcctgaccgataccggctatctgttcccggaaacctatcagtttattgatgaattgaccgagaagctcaacctgaaccttaaagtctaccgggcgacggaaagcgccgcctggcaggaagcgcgttacggcaaactgtgggagcagggcgttgaaggcattgagaagtacaatgaaatcaacaaagttgagccgatgaaccgggcgctgaaggagctcaacacccgcacctggtttgctggcctgcgccgcgagcagtccggcagccgggcgcatttaccggtgctggctatccagcgcggcgtctttaagctgctgccgattatcgactgggataaccggacggtttatcagtatctgcaaaagcacggcctgaaataccacccgctatgggagcaggggtatttgtccgttggtgacactcacactacccgtaaatgggaacccggtatggcggaagaagaaacccgattctttggtctgaaaagagagtgcggattgcacgaaggctaa

SEQ ID NO: 90331 - DNA, 1713 bp, Enterobacter aerogenes
atgagcgaaaaacatcctggcccgctggtggtcgaaggtaaactctccgacgccgagcgtatgaagatcgagagcaactacctgcgcggcaccatcgcggaagatttaaatgacggcctgaccggcggttttaaaggcgacaacttcctgctcatccgcttccacggtatgtaccagcaggacgaccgcgatattcgcgcggaacgcgcggcgcagaaactggagccgcgccacgcgatgctgctgcgctgccgtctgccgggcggcgttatcaccaccaaacagtggcaggcgatcgataaatttgccgcggataacaccatctacggcagtattcgtctgaccaaccgtcagactttccagttccacggtattctgaagaagaacgtgaagccggtgcatcagatgctgcactccgttggcctggacgcgctggcgaccgccaacgacatgaaccgcaatgtgctgtgcacctcgaacccgtttgagtcgcagctgcacgccgaagcctacgagtgggcgaagaagatctccgaacatctgctgccgcgtacccgcgcctatgctgagatctggttagatcaggaaaaggtcgccaccaccgacgatgaaccgatcctcggccagacctatctgccgcgtaaattcaaaacgacggtggtgatcccgccgcagaacgatatcgatctgcacgccaatgatatgaacttcgtggcgattgcggaaaacggcaagcttgtcggttttaacctgctggtgggcggcgggttgtctatcgagcacggtaataagaaaacctatgcgcgtaccgccagcgagtttggctatctgccgctggagcataccctggcagtggcggaagcggtcgtgaccacccagcgcgactggggtaatcgtaccgatcgtaaaaacgcgaaaaccaaatatacccttgagcgcgtcggcgtggagaccttcaaggcggaagttgagcgtcgtgccgggatcaaattcgaaccgattcgtccgtacgagtttaccggccgcggcgaccgcatcggctgggttaagggtatcgataataactggcacctgacgctgtttattgagaacggccgtattctggattatccgggccgtccgctaaaaactggcctgctggagatcgcgaagattcacaaaggtgaattccgtatcaccgccaaccagaacctgatcatcgccagcgtaccggaagatcagaaagcgcggatcgagaaactggcccgcgatcatggcctgatgaatgccgtcacggcgcagcgtgagaactcaatggcctgcgtgtcgttcccgacctgtccgttagcgatggccgaagccgagcgtttcttgccgtcgtttatcgacaaggtcgaagaggtgatgagcaagcacggcgttggcgacgagcatatcgtaacccgcgtcacgggttgcccgaacggctgcggccgcgcgatgttggcggaagttggcctggtgggtaaagcccctggccgctataacctgcatatcggcggcaaccgcagcgggacgcgcattccacgaatgtatcgtgaaaatatcaccgagccggagatccttgcttcgctcgacgagctggtagggcgctgggcgaaagagcgcgaagcgggtgaaggcttcggcgactttacggtgcgtgcgggcatcattcgcccggtgctcgacccggcgcgtgatttctgggaataa

SEQ ID NO: 90332 - DNA, 1800 bp, Enterobacter aerogenes
atgacgacacaggccccaccttccaatctgctgccgctaaacccggagcaactggcgcgcctacaggcggccacgactgactttacgccaacccaactggcttgggtgtccggctacttctggggcatgctgaatcagcagcccggcgccgtggtaagcgcgcccgctcaggcggtagaagcgccggccatcaccctgatttccgcttcgcagaccggcaacgcgcgtcgggttgccgaagcgctgcgcgacgatttgcaggccgcgcagctgaacgtgaaactggtgaacgctggcgactataaattcaaacaaatcgccggtgaaaaactgctggtcgtggtgacgtcgacccagggtgaaggtgaaccgccggaagaagccgtcgcattgcataaattcctgttttcaaagaaagcgccgaagctcgatggcaccgccttcgcggtgtttggcctcggcgatacctcctatgagtttttctgccagtccggcaaagatttcgatagcaaactggccgaactgggcggcgaacgtctgctagaccgcgttgacgccgacgttgaatatcaagccgcggcggcggaatggcgcgctcgcgtagtggatgtgctgaaagcgcgtgcgccgacggcagcgcctgcccagcttgcgaccagcggcacagtgaatgaaattcataccagtccatatactaaagaagcgccgctgacggcgacgcttgctgtgaatcagaaaataaccggtcgcgactcggaaaaagatgtccgtcatatcgagatcgatctgggtgattccggcctgcgttatcagccgggagatgcgctaggcgtgtggtatcagaacgatccggcgctggtcaaagagctggtggagctgctgtggcttaagggtgatgaaccggtcacggtagaaggcaaaacgctgccgctggcgcaagcgctggagtggcattttgagctgacggtcaataccgccaatattgttgagaactatgccaccctgacccgcagtgaaacgctgctgccgctggtcggcgataaagcgcagttgcagcactatgccgcgacgacgcctatcgtcgatatggtgcgcttctcgccggcacagctggatgccgaagccttaatcggtctgctgcgcccgctaacgccgcgcctctactctattgcgtcctcacaggcggaagcggaaaacgaagtccacgttaccgttggcgtcgtgcgttatgacatcgaaggccgcgctcgcgccggcggtgcgtccagcttcctcgccgaccgcgtggaagaagatggcgaagtgcgcatctttatcgaacacaatgacaatttccgtctgcctgctaacccgcaaaccccggttatcatgattggcccaggaaccgggattgcgccgttccgcgcttttatgcagcagcgcgcggcggaaggggcggaagggaagaactggttgttcttcggcaatccgcatttcacggaagatttcctctatcaggtggaatggcagagctacgtcaaagagggcgtgctgagccgaatcgacctggcctggtcccgcgatcaacaacaaaaaatctatgtacaggacaaactgcgcgagcagggggctgaagtgtggcgttggattaacgacggcgcccatatttatgtctgcggcgatgccaatcgtatggcgaaagacgtcgagcaggcgttactggaagtgattgccgaatacggcgcgatggacgccgaagcggcggacgaatttttaagtgagctgcgcgttgagcgccgttatcagcgagatgtctactaa

SEQ ID NO: 90333 - DNA, 366 bp, Enterobacter aerogenes
atgatgtccaccacgctgtttaaagatttcaccttcgaagccgcccaccacctgccgcacgtaccgaaaggccacaaatgcggtcgcctgcatggtcactcttttatggtgcgtctggagattaccggtgaagtcgatccccataccgggtggatcatggatttcgccgagctgaaagccgcgtttaaaccgacctacgatcgtttagaccactattacctgaacgatatcccaggactggagaacccaaccagcgaagtgctggccaaatggatttgggatcaaatgaaaccgctggttcctctgctgagcgcggtaatggtaaaagagacctgcaccgcaggctgcgtctatcgcggcgagtaa

SEQ ID NO: 90334 - DNA, 789 bp, Enterobacter aerogenes
atgcagccaattgatccatccactgccttctctatggacttcttctcgctcaaggggaaaaccgctatcgttaccggtggtaatagcggcctggggcaggcctttgccgttgctctggcgaccgccggcgcgaatctgtttgttcccgctctgcgcgaagaacacacgcaaacccgcaaacttatcgaacagcagggcgttgagctggaattcatgctggcggatatcaccgatggcggtatgccgcagcggattatcgccgcctgctgcgaacgtttcggtaccgttgatattctggtgaacaatgccggtatttgtcagttgaataaggtgctgcgctttgggcgaacagactgggatccgatgatcgagactaacctgaccgcagcgttcgagcttagccacgaagccgcgaaaattatggttccgcggcgaagcggtaagattattaatatctgttcggtgttttcttatctcggcggcagctggtcgccggcctatgccgccaccaagcatgcgctggctggcttaaccaaagcctactgcgatgagctgggcccgcataatattcaggttaacggcatcgcgcctggctattacgaaactgccatgaccgctatcacccgcagtatcccaaaggagaaccgacgcgtgctggcgcatatacccgcaggccgttggggagaagcgcaggatttaatgggcgccgttgtgttcctcgccagccgggcttcggattacgttaacggtcatattctggcggtggatggcggctatctggtgcgttga

SEQ ID NO: 90335 - DNA, 672 bp, Enterobacter aerogenes
atgcagtacccgattaacgagatgttccagaccttgcaaggcgagggttactttaccggcgtgcctgccatttttattcgtttgcagggatgcccggttggttgcgcctggtgcgataccaaacatacctgggataagctggccgatcgggaagtgtctctatttagtatcctcgctaaaaccaaagagagcgataagtggggcccggcgaccagcgacgatctgctggcgatcattggccgtcagggatggaccgcccgtcacgtcgtgattaccggcggcgagccctgtattcacgatctcacgccgttgaccgacctgcttgagcaacatggtttcagctgccagattgaaaccagcggcacccatgaagtgcgctgcagccacaacacctgggtcacggtctcgccgaaagtgaacatgcgcggcggctatgatgtgctttcgcaggcgctgcagcgcgccgatgaaatcaagcatccggttggccgcgtgcgcgatatcgaagcgctggatgaactgctggagacgctggccgatgaaaagccgcgtattattgccttgcagccgattagccaaaaagaagatgccacgcggctgtgcattgagacctgtatcgcccgaaactggcgcttatccatgcagacgcataaatacctgaacatcgcctga

SEQ ID NO: 90336 - DNA, 1110 bp, Enterobacter aerogenes
atgaatacattattaattacaggcgttaccggatttctgggtggagcggtattagagaatatcctcaataatgaaaatgggattaatctactgctcctggtgcgagccaataacgatgaagcggctctggcccgggtgaaggaaaacctgcgtaaattcaatattgcagaggagaagctggccgcattaacccccaggcagatcctgctcggcgatttgtcatcaccggagacgttcctgagcgacccgcgcctggagcaggtcactcacgtgatcaacagcgccgccgttgcctcatttggtaataatccgctcatctggaaggtgaatgtcgaaggaacgttcaaatttgctcaacggatgtcccgcgtagctggactacaacgttttctgcacgtcggcaccgcgatgtcctgtaccccggagccagattcactggtcgctgaaagcgttgaattccgcgaacacgccgagcatctggtggagtatacccattccaaatcgacgattgagcgcctgatgcaggagcaatgtccgacgttaccgttagccatcgcccgcccttctatcgtcgttggccatactcatcacggttgccagccctcaagcagcattttttgggtgttcagcatggggctgatgctgcaaaaattcctctgctccctggaagaccgtgttgacgtgatcccggtcgactactgcgccgacgcgctgctgatgttattacaacgcccgttggcgcgtggtgaagtcgtgcatatctccgccggagaagaaaacagcgtgaaatttgcggaaatcgatcgcgcaatggcctcagcgctggagcaggctccggtaggcgaccgatacgcgcaggtcagctacgagacgctggttaaaatgcgccgtgagttgaaagatatttttggcccgtgcaacgagcgcctgatgctcaaagcgatgcgcctgtatggcgccttcgcgacgctgaacgtccgcttcagcaatgataagctgctgagcatgggcatgcctaaaccaccgcgtttcaccgattatatcgaccgctgcgtacaaaccacccgcgggctctctatcccgcagcagatggccgtcgattttaagtaa

SEQ ID NO: 90337 - DNA, 1299 bp, Enterobacter aerogenes
atgtccaaaatcgttaaagtcatcggtcgtgaaatcatcgactcccgtggtaacccgactgttgaagccgaagtacacctggaaggtggtttcgtcggtatggcagctgctccgtcaggtgcttctactggttcccgcgaagcgctggaactgcgcgatggcgacaaatcccgtttcctgggtaaaggcgtaaccaaagctgttgctgcggtaaacggcccgatcgctcaggcagtcctgggtaaagatgctaaagatcaagctggcatcgataagatcatgatcgacctggacggtactgaaaacaaatccaacttcggtgcgaacgcaatcctggcggtatccctggcgaacgccaaagcagctgctgcttctaaaggccagccgctgttcgaacacattgctgaactaaacggcactccgggcaaatactctatgccggttccgatgatgaacatcatcaacggtggtgagcacgctgacaacaacgtcgacatccaggaattcatgattcagccggttggcgcgccaactctgaaagaagccgtacgtatgggttctgaagtgttccatcacctggcgaaagttctgaaatccaaaggtatgaacactgcagttggtgacgaaggcggctacgcgccgaacctgggttccaacgccgaagcgctggctgttatcgctgaagcggttaaagcagcaggctacgaactgggcaaagacatcactctggcgatggactgcgcagcttctgaattctacaaagacggtaaatacgttctggctggcgaaggcaacaaagcattcacctctgaagagttcacccacttcctggaagagctgaccaaacagtacccgatcgtctccatcgaagatggtctggacgagtctgactgggacggtttcgcataccagaccaaagtactgggcgacaaaatccagctggttggtgacgatctgttcgtaaccaacaccaagatcctgaaagaaggcatcgaaaaaggcatcgctaactccatcctgatcaaattcaaccagatcggttctctgaccgaaactctggctgcaatcaagatggcgaaagacgctggctacaccgctgtcatctctcaccgttctggcgaaactgaagacgctaccatcgctgacctggctgttggtaccgctgcaggccagatcaaaactggttctatgagccgttctgaccgcgttgctaaatacaaccagctgattcgtatcgaagaagcgctgggtgaaaaagcgccgtacaacggtcgtaaagagatcaaaggccaggcttaa

SEQ ID NO: 90338 - DNA, 1638 bp, Enterobacter aerogenes
atgacaacgaactatatttttgtgaccggcggggtcgtatcctctctgggtaaaggcattgccgcagcttccctggcagccattcttgaagcccgtgggctcaatgtaactatcatgaaactggatccgtacatcaacgtcgatccgggcaccatgagcccaatccagcacggggaagtgttcgttactgaagacggcgctgaaaccgatctggacctgggtcactacgagcgtttcatccgcaccaagatgactcgccgcaacaacttcaccaccggtcgaatctactccgacgttctgcgtaaagagcgccgtggcgactatctgggcgcaaccgtacaggttatcccgcacatcaccaacgccatcaaagagcgcgtactggctggcggcgaaggccatgacgtggtgctggttgaaatcggcggtaccgtaggcgatatcgaatccctgccgttcctcgaagctattcgccagatggcggtagaaatcggccgtgagcatactctgttcatgcacttgaccctcgtgccatacatggcggcggcgggtgaagtcaaaactaaaccgactcagcactctgttaaagagctgctctccatcggtatccagccagatatcctgatttgccgctccgatcgcgcggttccggccaacgaacgtgcaaaaattgcattgttctgtaacgtcccggaaaaggctgtgatttctctgaaagacgtcgattccatttataaaattccaggcctgttgaaatctcaggggctggacgattatatttgtaaacgattcagcttaacttgtccggaagcaaacctggccgaatgggaacaggtaatctatgaagaagctaacccggcaggcgaagtcaccattggtatggttggtaagtacattgaactgccggatgcctacaaatcggtgattgaagcgctgaaacacggtggtctgaaaaaccgcgtgaccgtcaacatcaagcttatcgattcgcaggatgttgaaacgcgcggcgtcgaaatcctcaaagatttagacgcgatcctcatcccgggcggcttcggctaccgcggcgttgaaggtaagatcgccaccgcgcgctatgcgcgtgagaacaatattccatatctgggtatctgcctgggtatgcaggttgcgctgattgagttcgcgcgcaacgtagcgggcatggaaaacgccaactctacggaatttgtgccagactgtaagtacccggtggtggcgctgattaccgaatggcgtgacgaagaaggcaacgttgaagttcgttccgagaagagcgacctcggcggcaccatgcgccttggcgcgcagcagtgccagctgggtgatgattctctggtccgtcagctgtacggcgagccgactatcaccgagcgccatcgtcaccgctacgaagtcaacaacatgttgttgaaaccgattgaagctgccggcctgcgcgttgcgggccgttccggggatgatcagttggtcgagatcatcgaagtgccgaaccatccgtggtttgtggcctgccagttccacccggaatttacttcgacgccgcgtgacggccacccgctgtttgcaggctttgtgaaagccgcgagcgagtaccagaagcgtcaggcgaagtaa

SEQ ID NO: 90339 - DNA, 792 bp, Enterobacter aerogenes
atgactcaaattgaccgcctgctcggtattatgcgtcgcctacgcgacccggaaaacggctgcccgtgggataaagaacagacctttgccactatcgccccttacacccttgaagagacctatgaagtgctggacgccattgcgcgcgaagattttgacgatctgcgcggcgagcttggcgatctgctgttccaggtggtgttctatgcgcagatggcgcaggaagaagggcgttttgatttcaacgatatctgcgccgccatcagcgacaaactggaacgtcgtcatccgcatatctttggcgatgcttcggccgggaacagtgcggaagtgctggcgcgctgggagcagattaagagcgcggaacgagcggaaaaggcgcaacactcggcgctggatgatattccgcatagcctgccggcgctgatgcgcgcgcataaaattcagcgtcgctgctcggcggtgggctttgactggacctcgcttggcccggtgctcgataaagtgcatgaagagatagatgaagtcatgcatgaagcgcagcaggcggtggttgatgaagctaaacttgaggaagaagtgggcgatttgctgttcgccacggtgaatttgtcccgtcatttaggggttaaagccgaggtcgcattgcagaaagcgaacctcaaatttgagcgccgcttccgcgaagttgagcgtattgtcgccgccagaggtctggaaatgaccggcgttgacctcgaaaccatggaagaagtgtggcaggaagtaaaacgccaggaaactgatctctaa

SEQ ID NO: 90340 - DNA, 2238 bp, Enterobacter aerogenes
atggttgcggtaagaagtgcacatcttaataaagctggtgagtttgacccgaagaaatggatcgcgagtctggggatttccagccagcagtcgtgtgagcgcttagccgagacctgggattattgtcgcgtaacaacgcagggacacccgcaggcggatctcctgctttggcgcggcgtggagatggtagaaattctctccatgctcaatatggatatcgataccttgcgggccgctttactgtttccgctggcggacggcaacgtagtcagcgaagaggtcctgcaagagagcgtcggcaaatccgtcgttaccctgattcacggcgtgcgtgatatggcggcgattcgccagcttaaagccacgcacaccgacactgtctcctcagaacaggtcgacaatattcgccgcatgctgctggcgatggtcgatgatttccgctgcgtggttatcaagcttgcggaacgtatcgctcacctgcgcgaggtaaaagatgaacccgaagatgagcgcgtactggcagcaaaagagtgtaccaacatctatgcgccgctggcgaaccgcttaggcatcggtcaactgaagtgggaactggaagactactgcttccgttacctgcatccagccgaatataagcgtattgctaagttgctgcacgaacgccgtatcgaccgcgaacattacatcgatgagttcgtcggccacctgcgttcagaaatgaaaaatgaaggcgtgaaggctgaggtatacgggcgtccgaagcatatctatagcatctggcgcaaaatgcagaagaagcatctcgcttttgatgagctgtttgatgtgcgcgcggtacgtatcgtcgctgaacgtttgcaggattgctacgcggcgctggggatcgtgcatacccactatcgtcatctgcctgacgaatttgatgattacgtcgccaacccgaaaccgaacggctaccagtctattcacaccgtggtgcttgggccgggcggtaaaacggttgagatccaaattcgcaccaaacagatgcatgaagatgccgagctcggcgtggcggcgcactggaagtataaagagggtgccagcgccggggcgagcggcggtcgcggccatgaagaccgtatcgcctggctgcgtaagctgatcgcctggcaggaagagatggccgattccggcgaaatgctcgatgaagtgcgcagccaggtcttcgacgaccgggtctacgtgtttacgccgaagggcgacgtggttgatctgccggcgggctcaactccgctcgactttgcctaccatatccatagcgatgtcgggcaccgctgcatcggcgccaaaattggcgggcgcattgtgccgttcacctatcagctgcagatgggcgatcagattgagataatcacccagaagcagccgaacccaagccgcgactggctgaacccgaatcttggctacgtgaccaccagccgtggacgctccaaaattcacgcctggttccgtaaacaggatcgcgataaaaacattctcgccgggcggcagatccttgacgatgagctcgagcatctcggcatcagcctgaaggatgccgagaaacatctgctgccgcgctacaactttaatgaactggatgaactgctggcggctatcggcggcggcgatattcgccttaaccagatggtcaacttcctgcaggcgcagttcaacaaaccgagcgccgccgagcaggatgccgccgcgctgaagcaactgcagcaaaaaacctacaccccgcagaaccgcagcaaagacaatggccgggtggtggttgagggcgtcggcaatctgatgcatcacattgcctgctgctgccagccgatccccggcgacgaaatcgtcggctttatcacccagggtcgcgggatttcagtacaccgcgccgactgcgatcagctggcagagctgcagtctcacgcgccggaacgcatcgttgatgcggtatggggcgagagctattcggcgggatattcgctggtggtgcgcgtggtcgccaacgaccgcagcggcctgctgcgcgacattaccactattcttgccaacgagaaggtgaacgtgctgggggtggccagccgcagcgataccaaacagcagctggcgaccatcgatatgaccattgaaatctacaacctgcaggtgttgggccgggtgctcggcaagctgaaccaggtgccggatgtgatcgacgcgcgtcgtctgcacggcggttaa

SEQ ID NO: 90341 - DNA, 1305 bp, Enterobacter aerogenes
atggcgcaattctactctgcaaaacggcgtgtgacgacgcgccagatcataaccgtgacggtaaatgaccttgatccctttggccagggcgtagcccgtcatcagggtaaggcgctgtttatccccggcctgttgccgcaagagcaggcggaagtcgtgctggtagaggataaaaaacagtatgcccgcgctcaggttaaacgccgcctcaacgacagtccacagcgcgttgcgccgcgctgcccgcatttcggcgtctgcggcggatgtcagcagcaacatgcgagcattgaacaacagcagcaaagcaagcgcgccgcgctctcccgcctgatgaaacgtgacgttgacgacattatagccgctgaaccttggggctaccggcgtcgggcgcgtttgagcttgaattatcagccaaagacccaacaactgcagatgggttttcgcaaggccaactccagcgaaatcatcgatgtggtgcagtgccccgttttagtgccccaacttgaggcgttgttacccgcggtgcgcgagtgtttaaccagcctgcaatcacaacgtcaacttggtcacgttgaactggtgcaggcggataatgtcccgctgatggttttacgccataccgccgcgctgacggcggcggataaagaaaaactggaacgtttttcgcaaactcacggtctatccctgtacctcgcgccgcaaagcgagatacttgaacatattcgcggcgatgaaccatggtacacgtcagacggactacgcttagtgttcagtccgcgcgattttatccaggtcaacgatggcgtaaaccagaaaatggtgcgtacggcgctggcctggttagatattcagccgcaggaccgcgttctggatctgttttgcggtatgggcaatttcaccctgccgctggccaaagcggcggcgagcgtggtgggcgtcgaaggcgtacccgcgctggtggcaaaggggcgggaaaatgccgccctcaatgaattgcagaacgtgactttctttcatgaaaacctggaagaagatgttacccggcaggcctgggcgaagcatggctttgataaaattctactcgacccggcaagagccggggcgccgggcgtgatggcgcatattatcaagctggcaccgcggcggatggtctatgtttcatgtaacccggcgacgctggcgcgcgatagcgaagcgttgcttcaggcgggatatcgcattcaacgtctggcgatgctggacatgttcccgcacaccgggcacctggaatcgatagtattgtttgagcgcgagcttacataa

SEQ ID NO: 90342 - DNA, 2751 bp, Enterobacter aerogenes
atgaccaactacagcctacgtgctcgcatgatgattcttattctggcgccgaccgttttgattggtctgctgctcagtattttcttcgttgcccaccgctataacgacctgcagcggcagttggaagatgccggcgccagtattatcgaaccgctggcggtatccagtgagtacggcatgaatttgcaaaatcgcgaggcgatcggccaacttatcagcgtgcttcaccgccgccattccgatatcgtgcgggctatttctatttatgatgctaaaaaccggctgttcgttacctctaacttccagctcgatccgcgggaaatacagctcccgcgcggcgcgcccttccctcgccggctgagcgtcacccgccacggcgacatcatggtgctgcgcacgcctattgtgtcagaaagctatctgcccgatgagtcgccggaaagcgatgctaaaatgccggacaatatgctcggctatgtggcgctggagctcgaccttaaatctgtgcgcctgcagcagtacaaagagatatttatctcaagcgtcatgatgctgttttgtatcggcattgcgctgattttcggctggcgcctgatgcgcgacgtgaccggaccgattcgtaatatggtcaacaccgttgaccgcatccgccgcggccagttggatagccgcgttgaaggttttatgctcggcgagctggatatgctgaaaaacggcattaactcgatggcgatgtcgctggcggcctaccacgaggagatgcagcacaatgtcgatcaggcgacctcggatctgcgcgaaacgctggagcagatggagattcagaacgtcgagctggatctggcgaaaaagcgcgcccaggaggccgcgcgcatcaagtccgagttccttgccaatatgtcgcacgagctacgaaccccgcttaacggcgtgattggctttacccgcctgaccttgaaaaccgatctcaacgctacccagcgcgaccacctgaccaccatcgaacgttcggcgaataatctgctggccatcatcaatgacgtgctggatttctccaagctcgaagcgggcaagctgattctggaaagcattcctttcctgctgcgtaataccctggatgaagtggtgaccttgctggcacattcggcgcacgataaaggccttgagctcaccctcaacattaaaagcgatgtcccggataatgtgattggcgatccgctgcgcctgcagcaggtgatcaccaatctggtgggtaacgcgattaaattcaccgaacacggcaacattgatgtgctggttgaacagcgggcgatgagcaattcgcgagtacaaatcgaagtacagattcatgataccggcatcggcattccggagcgcgatcagtcgcggttgttccaggccttccgtcaggccgatgccagtatctcacgccgccacggcggcaccggcctggggctggttatcactcagcggctggtcaaagagatgggcggcgatatctcattccatagtcagccgaaccgcggttccaccttctggttccatatcagccttgacctgaatccgaacgctattaccgacggtttcgatacccattgcctggcgggcaagaagctggcctacattgaagccaataccaccgctgcgcaaagcacgatggaactgctggcaaccacaccgctggaagtggtctacagcccgacgctgtcagcgctgccggatgcccactacgatattttactggccggtattccggtgtcgatgcgcgatctcagcaaccagcgggaaaaactggtccgcgcttgctcactttccgaaaccctggtgctggggctgccttgccacgcgcaggttagcgccgaagagctgaaaagaaacggtgttaccgcctgcctgcttaaaccattgacctccacgcggcttttcccggtgctgatggcctcttgccgcgcgcagccgccggtgccacagccctatatcgatagcgataaactggcgatgacggtaatggcggtagatgataacccggctaacctcaagcttattggcgcgctgctggacgatctggtgcagcatgtcattctgtgcgatagcggccaggatgccgtagagcaggccaaacagtcgcagttagatctcattctgatggatattcaaatgccggatatggacggcattcgcgcctgtgaattgatccgccatctcccgcatcagcagcagaccccggtgatcgcggtgaccgcccacgcccttgaggggcagcgcgagaaactgctggccgccgggatgaacgattatctggcgaagccgattgaagaagataagcttagcaccctgctgttgcgctatcagcccggcatgcacgtcgccgcgccgcaattagccgaaccggtggagccggttatcgatcataacgtcacgctcaactggcagctggcgctgcgtcaggctgccatgaaaccagacctcgcgcgggagatgctgcaaatgctgctcgcctttatgccggaggtgcgcaataaagttgaagaacagctggttggcgaaacgccggaagggttgctggatttaattcataaactgcacggcagctgcagctatagcggcgtaccgcggctgaaaaaactgtgccatacccttgaaagccagttgcgcgcaggtaccgcgccggaagagctggagccggaactgctggaactgttagacgagatggataacgtcgcccgcgaagcgtgcaagatgggagcgtaa

SEQ ID NO: 90343 - DNA, 1140 bp, Enterobacter aerogenes
atgaagatagtgatcgcgccggattcttacaaagagagcctgagtgcgctggacgtcgccaccgcgatagaaacggggttccgcgaaatttatccccatgcggagtacgttaaagtcccggttgccgacggcggcgagggtaccgttgaggcgatggtggccgcgactcaagggcatatcgtacaggtcagcgttaccgggccgcttggcgagccggtcaacgccttttacggcctctccggcgatatgcgctgcgcctatatcgaaatggcggcagccagcggactggaaagcgtgccgcccacgcgacgtaatccgctactgactacctcctggggaaccggcgagctgattcgtcacgcgttggatgcgggggtttcgcagattattattggcatcggcggcagcgcgaccaatgacggcggcgccggcatggcgcaggcgctgggggcaaaactgttgagcgccgggcaacagcaaattgcgccgggcggcggcgcgctggagacgctggcgcggatcgatctcagtgaactggatccaagattggcggattgccggattgatgtcgcctgcgacgttaccaatccgttaaccggcccgcagggcgcaagcgcggtgtttggcccgcaaaaaggggcgacggcggcgatgattgagcgtcttgaccgcggcctgcaacactttgcgcagattatcgaccgtgatttagatattgacgtgctgagcctggaagggggcggcgcggcgggcggtatgggggcagcgttgtatgcgttttgcggcgccaacctacgtccgggaattgagattgtgaccgatgcgctagggttggcggatttagtggctgatgccgatttagtaattaccggcgaaggtcgcatcgacagccagaccattcacggcaaggtaccggtgggggtggcgaaggttgcgaaacgcttcaacgtgccggtgattgggattgccggcagcctgaccgccgatgttggcgtcgtgcatcagcatggcctcgatgccgtctttagcgtgctctattccgtctgtaccctggacgaggcgctggcgaacgccgccgccaacgtgcggatgacggcacgtaacgtggccgcggtattgcagatgggcggtaagcggtaa

SEQ ID NO: 90344 - DNA, 1341 bp, Enterobacter aerogenes
atgactacatcatcttcaacgccaattgtgaccgctatgcaggttatcccggtcgccgggcatgacagcatgctgatgaacctgagcggcgcgcacgcgccgtacttcacccgtaatatcgttatcatcaaagataactccgggcacacgggcgttggcgaaatccccggcggcgaaaagatccgccagaccctggaagacgccgcgccgttggtggtgggtaaaacgctgggcgagtacaaaaatgtgctgagcgccgtgcgtaaccagtttgccgaccgcgatgccggcggccgcggcctgcaaaccttcgatctgcgcactaccattcacgtggtgaccgggattgaagcggcgctgctggatctgctgggccagcatctgggcgtgaacgttgcttctctgcttggcgacggccagcagcggagcgaagtcgaaatgttgggctacctgttctttgtcggtaaccgccacgcgacgccgctggcttatcaaagccagccggatgaacagtgcgactggtatcgtattcgtcatgaagaggcgatgacgccggaggcggtggttcgcctggcggaggccgcttacgaaaaatatggcttcaatgactttaaactgaagggcggggtgttggccggttttgaagaagccgaagcgattagcgcgctggcgaagcgtttccctgatgcgcgcgtgaccctcgacccgaacggcgcctggatgctggatgaagccatccagataggtaaacagctgaaaggcgtgctggcctatgcggaagatccttgcggcgctgaacaaggtttctccggccgtgaagtgatggccgaattccgtcgggcgaccgggctgccgaccgcgaccaacatgatcgccaccgactggcggcagatgggccatacgctgtcgctacaatcagtggatattccgctggcggacccgcacttctggaccatgcaagggtcggtacgcgtggcgcagatgtgtcatgaattcggcctgacctggggttcgcactctaataatcacttcgacgtgtcgctggcgatgtttacccatgttgccgcggcggcgccgggtaaaattaccgctatcgatacccactggatctggcaggagggcaaccagcgtctgaccaaacagccgtttgaaatcaaaggcggtatggtgcaggtgccggcgacgccgggtctgggcgttgagttggatatggaccgcgtgatgcaggctaatgagctatataagaaacatggcctgggcgcgcgtgatgacgccatggcgatgcaatatttaatcccgaactggacctttgataacaaacgtccttgcatggttcgctaa

SEQ ID NO: 90345 - DNA, 1341 bp, Enterobacter aerogenes
atgaatacccaatccagcccaatcgttaccgaaatgaaggtgattccagtcgccgggcacgacagcatgctgatgaacatcggcggcgcgcataatgcctggtttacccgcaatattgtggtgttaaccgacaacgccggccataccggcgtcggcgaagcgcccggcggcgaagtcatctaccagacgttggtcgatgccataccccaggtggttgggcaggaagtcgctcgcctcaaccgcgtggtgcagcaggtacataaaggcaatcaggcggcggatttcgacaccttcggcaaaggggcatggaccttcgaattgaaagtcaatgcggtagcggcgctggaagccgcgctgctcgacctgcttggcaaggtgttgaatgtcccggtgtgcgaactattggggccgggcaaacagcgtgatgcggtgaccgtgctgggctacctgttctatatcggcgaccgcgaaaaaaccgatttggactatcttgcgcggacgccgggcgaccacgaatggtaccgtcttcgtcaccagcaggcgctgaatagcgacgcggtagtgcgactggcggaggcggcgcaggatcgctacggttttaaagactttaagctaaaaggcggcgtattacctggcgagcaggaaatcgacaccgcccgcgcgttgaaaaaacgcttccctgacgcccgcattaccgttgacccgaacggcgcctggctgctggatgaagcgattacgctgtgcaaagggctgcaggatgtcctgacctatgccgaagatccgtgcggcgctgaacagggcttttccggtcgggaagtgatggctgagttccgccgcgccaccgggttgccggtggcgactaacatgatagccaccaactggcgcgaaatggggcatgcggtcatgctcaacgccgtcgatattccgctggcggacccgcacttctggacgctctcaggcgcggttcgggtggcgcagttgtgcgatgactgggggctgacctggggctgtcattcgaacaaccactttgatatttcgctggcgatgtttacccacgtcggcgccgcggcgccgggcaatccgaccgctatcgatacccattggatttggcaggagggcgatgcgcgcctgacgcaaaatccgctgcagattatcaacggcaaaatcgccgtgccagacgcgccgggactcggcgtggagctggactgggaacaggtgcataaagctcatgaggcctataaggcgctgccaggcggcgcgcgtaacgatgcgggcccgatgcagtatctgattcccggttggacattcgaccgtaaacgccccgttttcggccgtcattaa

SEQ ID NO: 90346 - DNA, 1353 bp, Enterobacter aerogenes
atgagttcattaagtcaggctgcgagcgccgctgaaaagcgcaccaatgctcgctattggatagtggtgatgctgtttatcgtcacatcctttaactatggcgaccgcgcgacgttgtcgatcgccggttctgaaatggccaaggatatcggcctcgatcctgttggcatgggttacgttttctccgcgttttcatgggcctatgtgatcggacagatcccaggcggctggctgcttgaccgctttggttctaaacgcgtctatttctggtccatctttatctggtccgtgtttaccctgctgcagggcttcgtggatatctttagcggctttggcattatcatcgcgctatttaccctgcgcttcctcgtcggccttgccgaatcgccctcgttcccgggtaatagccgcattgtggccgcctggttcccggcgcaggagagagggacggcggtatcgatttttaactccgcgcagtattttgccaccgttattttcgcgccgattatgggttggttgacccatgaagtgggttggtcgcacgtattcttctttatgggcggattgggtattgtcatcagcttcgtgtggctgaaagtgatccacgatcccaataaccacccaggcgttaaccagaaagagctggactacatcgccgaaggcggcgcgttgatcaatatggatcaaaagagcagtgcgcagaaggtgccctttagcgtaaaaatgggccaaatcaagcagttgatcggctcgcgaatgatggttgggatctatatcggccagtactgcatcaacgcgttaacctacttctttatcacctggttcccggtttatctggtgcaggcgcgcggcatgtcgatcctcaaagcgggttttgtcgcctcgattccggcggtgtgtggctttgtcggcggcgtgttgggcgggattatttccgactggttgatgcgccgtaccggctcgctgaatatcgcgcgtaaaacgccgatcgtactgggcatgctgttgtccatgaccatgctgatgtgtaactacgtcaacgcggaatggatgatcatcggctttatggcgatggccttcttcggcaaaggcattggcgcgctgggctgggcggtaatggcggacaccgcgccgaaagagatcagcggcctgtccggcggtctgttcaacatgttcggcaatatttccggcatcgtcacccctatcgctatcggctatatcgtcggcaccaccggctctttcaacggcgcgctgatttacgtcggtatccacgctctggtggcggtattcagctacctggtgctggttggcgatatcaaacgtatcgaacttaaaccgattgcggggcgttaa

SEQ ID NO: 90347 - DNA, 444 bp, Enterobacter aerogenes
atggcagaagtcggaatttttgtcggcacgatgtacggaaactcgctgttggtcgccgaagaggcggaagccattctgagcgggctggggcataaagcgacggtctttgaggatccggaggtaaaagactgggaatcctataccggcaaatacgtgctggtcgtgacctcgaccaccgggcagggcgatctgccggacagcatcgttccgctgtatgaaggcattaaagatatgtatcaaccgcatctgcgctacggcattatcgcgcttggcgatagtacctacgccaacttctgcggcggcggtaaaacctttgatgcattgctgcaggagcagggcgcgcgtcgtattggcgagatgctcaccattgacgccagcgaaaacccggaaccggaaagcgtttccaacccttgggtagaagcgtgggctaaactgctcgactaa

SEQ ID NO: 90348 - DNA, 795 bp, Enterobacter aerogenes
atgctggagatcatttaccaggatcagtggctggtggcggtgaacaaaccatccggctggctggtgcaccgcagctggctggatcgcgacgagaaagtggtagtgatgcagaccgtgcgcgatcaaatcggccagcacgtcttcaccgctcatcgcctggaccggccgacttccggcgtgctgttgatggggttgtcgagcgaggcgggcaggctgctggcgcagcagtttgaacaacaccagatgcaaaaacgctatcacgccatcgttcgcggctggttgactgaagaggcggtactggattatccgcttgtagaagagctggataaaatcgccgataaattcgctcgtgaagataaaggcccgcagccggcggtgacccactatcgcgggctggcgacggtagaaatgccggtcgccaccggccgttacccgaccacccgctacgggctggtggagctggagccgaagaccgggcgtaagcatcagctgcgtcgccatttggcccatctgcgccatccgatcctcggtgacagcaaacatggcgatctacggcaaaaccgcagcgccgctgaacatttcggctgtaatcgcctgatgctgcatgccagtcagctgtcattaacacatccgtttaccggcgagccgctgacgattcgcgcgggtctggatgatgtctggatgcgcgcgctgtcgcagtttggctggcgcgggcttctcccgttaaatgaaagggttgagtttgccgacgacagcggtcaggatgagagtatcgcggataatccagggagataa

SEQ ID NO: 90349 - DNA, 330 bp, Enterobacter aerogenes
atgacccttcacgctagcgtgcgcgatcgcctgcacgccattgaagcgctgctgcgcgaaacaaaccactggcacgaacaggccccggatagccgcgctttcgccagcgagcagccgttttgcctggacacgctcgagccgctggaatggctacagtgggtgctgatcccacgtatgcatcaactgattgccagcggtatgccgctgccgcagaactttgccgtcgcgccctattacgagatggcgctggataaagcccatccggcgcgcgaagctatcgtggccgagttgctgctgctggatgcattattcgcggatgaagacgcctga

SEQ ID NO: 90350 - DNA, 546 bp, Enterobacter aerogenes
gtggatcatcagaccatagaagcgctgcaatcatttacccaacgttactgcgatgcgtggcagcagcgttatgccagcctgccgcgtagcgaagacctttatggcatcccatctccctgtattagcgccagtgaagacgatgccgttttctggcagccgcagccgtttacgttagaacaccatctcgatggggttgaacgggcgctggagattgtggtacaacagccgattcatagttattataccactcagttcgctggcgatatgcacgcccgcttcgcggaacagaacctcactctgctgcaggcatggagcccggatgatttccagcgagtacaggaaaacctcattggtcacctggtggtacaaaaacgtctgaagctatcgccgacgctgtttatcgccacgctggatagcgaactggaggttatttcggtctgtaacctgagcggcgaagtgattaaagagacgctcggtacccgaaaaagagagaccctttctcactcgcttgcgagtttcctgaatcagcttgagccccttctgtaa

SEQ ID NO: 90351 - DNA, 846 bp, Enterobacter aerogenes
atgtcttcttacgataatcatcaggcgctggccggcctgacgctcggtaaatcaacggattaccgcgatacctatgacgcttcgttgctgcagggcgtgccccgcagcctgaaccgcgatccgctcggcctgcatgccgataatctgccgttccacggcgccgatatctggacgctgtacgaactgtcgtggctgaacgccaaaggcctgccgcaggtcgccgtcggctacgtggaactgagcgataccaccatcaatctggtggaatcgaaaagcttcaaactgtacctgaacagcttcaaccagacccgcttcgccgactggcaggaagttcaggccacgctgacccgcgatctcagcgcctgcgcccagggcgaggtcaaggtttcgctgtaccgactcgatgagcttgaagggcaaccggtcgctcatctgcatggcacctgcatcgacgatcaggatatcgagattgataactatcagttcagcgccgactacctgcaggacgcggccagcggtaaagtcgtcgaagagacgctggtcagccatctgttgaaatcgaattgtctgatcacccaccagccggactggggctcggtacagattcagtatcgcgggccgaaaatcgatcgcgaaaaactgctgcgctatctggtgtcgttccgccaccacaatgaattccacgaacagtgcgtcgaacgcatctttaatgatgtgctgcgtttctgccgcccggaatcgctttccgtgtacgctcgctacacccgccgcggcggcctggatatcaatccgtggcgcagcaacggtgaattcgtgccggcaaccggccgtctggcgcggcaataa

SEQ ID NO: 90352 - DNA, 1368 bp, Enterobacter aerogenes
ttgattacacacgttagcccgcttggttcaatggatatgctgtcacagctggaagtggatatgcttaaacgcaccgccagtagtgacctgtatcaactctttcgcaactgctcgcttgctgtgctcaactcggggagcctgaccgataacagcaaggagctactgtctcgttttgaaaacttcgatattaacgtgctgcgccgcgaacgcggcgtgaagctggaactgatcaacccgccggaagacgctttcgtcgatggccgtattatccgttccctgcaggccaacctgtttgccgtgctgcgcgatatcttgttcgtctacgggcagatccacaacaccgtccgcttcccgaatctcgatctcgaaagctcaattcatatcaccaacctggtgttctcgattctgcgcaacgcccgcgcgctgcacgtcggcgaagcgccgaatatgattgtctgctggggcggccactctattaatgaaaatgaatacctgtacgcgcgccgcgtcggtacccagcttggcctgcgcgaactgaacatctgcaccggctgcgggccaggcgccatggaagcgccaatgaaaggcgccgccgtcggccacgcccagcagcgctataaagacagccgttttatcggtatgaccgaaccctccattatcgccgctgagccgccaaacccgctggtcaacgaactgatcatcatgccggacatcgaaaagcgtctcgaagcgttcgtgcgcatcgcccacggtattatcatcttccccggcggcgtgggtactgcggaagagctgctttatctgctgggcatcctgatgcatccggataacaaggcgcaggtgctgccgcttatcctcaccgggccgaaagagagcgccgactacttccgcatgctggacgagttcatcgttcataccctcggcgaatcggctcgccgccactatcgcattattattgacgatgccgcggaagtggcgcgccagatgaaaaaagcgatgccattggtcaaagagagccgccgcgaaaccgacgacgcctacagcttcaactggtcgattcgtatttcgccggacctgcagatgccgttcgatccgacgcacgacaatatggccaatctcaaactttatccggaccaaccggtggaagtgctggccgccgacctgcgtcgcgccttctccggtattgtcgccggcaacgtgaaagaagttggtattcaggctatcgagaaatatggcccttacaagctgcatggcgatccggaaatgatgcgccgcatggacgatctgctgcagggcttcgttgcccagcaccgcatgaagcttccgggcggcagcgcctacattccgtgctacgaaatctgctcctga

SEQ ID NO: 90353 - DNA, 1290 bp, Enterobacter aerogenes
atggaaaccacacaaaccagcactatcgtttcgggtgaatcccgcagcggatggcgcaaaacggataccatgtggatgctgggcctgtacggcacggcgatcggcgcgggcgttttgttcctgccaatcaacgccggcgtcggcggtatgatcccactaattatcatggcgattctggccttcccgatgaccttcttcgcacaccgcggtatgacccgcttcgtgctgtccggtaaaaatccgggcgaagacattaccgaagtcgttgaagaacactttggcgtaggcgcaggtaaactgattacgctgctctacttcttcgcaatctacccgatcctgctggtttatagcgtggcgatcaccaacaccgtcgaaagcttcatggcgcaccagctgcacatgacgccgccgccgcgcgccattctgtccctgattctgattgtcggcatgatgaccatcgtgcgtttcggcgagcagatgatcgttaaggcaatgagtgtcctggtattcccgttcgttatcgcgctgatggttctggcgctgtacctgatcccgcaatggaacggcgcggcgctggaaaccctgtcgcttagcagcgcgtcaacaaccggtaacggtctgctgatgaccctgtggctggcgatcccggtaatggtcttctcctttaaccactcgccgatcatctcctccttcgcggtagcgaagcgtgaagagtacggcgaaggcgcagagaaaaaatgctccagcatcctggcgcgcgctcacatcatgatggtgctgaccgttatgttcttcgtcttcagctgcgtactgagcctgtctccggcggacctggcggcggcgaaagagcagaacatctcgattctgtcttacctggcgaaccactttaacgcaccggttatcgcctggatggcgccgatcatcgcgatgatcgctatcaccaaatccttcctcggccactatctgggcgctcgtgaaggtttcaacggcatggtgattaagtctctgcgcggcaaaggcaaaaccatcgaaatcaacaaactgaacaagctgaccgcgctgtttatgctggtcaccacctggattgtggccacgctgaacccgagcatcctcggcatgattgagaccctgggcggtccgattatcgcgatgattctgttcctgatgccgatgtacgctatccagaaagttccggccatgcgcaaatacagcggccacatcagcaacgtcttcgttgtgattatgggcctgattgccatctccgcgattttctactctctgttcagctaa

SEQ ID NO: 90354 - DNA, 1368 bp, Enterobacter aerogenes
atgatcagcgtattcgatattttcaaaatcggcattggcccatccagctcccataccgttggaccgatgaaagcgggcaaacaatttactgacgacctgattgcgcgcggcctgctggccgacgtcagcaaagtcgtcgtcgacgtttacggctccctgtctctgaccggtaaaggccaccataccgatatcgccattatcatgggactggccggcaatctgccggataccgtcgacatcgacgccatcccgggctttatccaggacgttaacacccacggccgcctgctgctggcgaacggtcagcacgaagtcgagttccctgtcgaccagtgcatgaatttccatgccgacaacctttctctgcatgagaacggcatgcgcattaccgcgctgggcggcgacaaggtgctctacagccagacctactactccatcggcggcggctttatcgtcgatgaagagcacttcggcctgaccaccgaggcgccggttgctgtgccttatccgtacaaaaacgccgccgacctgcagaaacactgcaatgaaacaggcctgtcgctctccggtctgatgatgcaaaacgagctggcgctgcacagcaaagaagagctggaacagcacttcgccgcggtgtgggaagtgatgagcgccggtatcgagcgcggcattaccactgaaggcgtgctgccaggcaaactgcgcgttccgcgccgcgccgccgcgctgcgccgcatgctggtaagccaggacaataccaacagcgacccgatggcggtagtggactggatcaacatgttcgcgctggcggtaaacgaagagaacgccgccggtggccgcgtggtgaccgcgccaactaacggcgcgtgcggtatcgttccggcggtactggcctactacgacaagtttatccgcaaggtgaacgctaactctctggcccgctatatgctggtcgccagcgccattggttcgctgtataagatgaacgcttctatctccggcgccgaagtcggttgccagggcgaagtcggcgtggcctgctcgatggccgcggccggtctggcggagctgctgggcgctagcccggcccaggtgtgcatcgccgcggaaatcggtatggaacataacctcggcctgacctgcgacccggttgccggccaggtgcaggtaccgtgcatcgagcgtaacgccatcgcggcggtcaaagcggttaacgccgcgcgcatggccctgcgccgtaccagcgaaccgcgcgtgtgcctcgataaggttatcgagaccatgtatgaaacgggcaaagatatgaacgccaagtaccgcgaaacctctcgcggcggcctggcgatgaaaattgtcgcctgcgattaa

SEQ ID NO: 90355 - DNA, 759 bp, Enterobacter aerogenes
gtggctgttcatctgttaattgtcgacgcgctcaacttgatccgccgtattcatgcggtgcagggttccccctgcgcggatacctgcctgcacgccctcgaacagcttatcgtccacagccagccgacgcacgccgtggcggtgttcgacgatgaagaccgcgcccacggctggcgccaccagcggctgccggaatataaagccgggcgcgcgccgatgccggaaacgctggaagcggaaatgccggcgctgcgggcggctttcgaacagcgcggtatccgctgctgggcgctgcccggcagcgaagcggacgacctggcggccacgctcgccgttaaagttgcccaggccgggcatcaggcgactattgtctcgaccgataaaggctactgtcagctgctgtcgccgaccattcgcatccgcgactatttccagaaacgctggctggatgcgccgtttatcgccaatgaattcggcgtgacgccggaacagctcccggactactggggcctggcgggaattagcagctcgaaagtcccgggagttgccgggattgggccgaaaagcgcggcacagctgttaacggattatcaggatttagaaggcatctacgcgcggcttgccgaagtgccggagaagtggcgtaagaagcttgaagagcataaagagatggcgtttacctgccgggaaatcgcccgcctgcaaacggatttacagctcgatggcaacctacagcagttgcgtttgccatccgcgtga

SEQ ID NO: 90356 - DNA, 1101 bp, Enterobacter aerogenes
atgaataaggttgtcctctattgtcgccccgggtttgagaaagagtgcgcagcagaaattaccgataaggcagcccgccttgaggtatttggttttgcccgggtcaaagacgactccggatatgtgatttttgagtgctatcagcagggcgatggcgagaagctggtgcgcgatctaccgtttagctcgctgattttcgcgcgccagatcttcgttgttggcgaactgctgcgcgacctgccgccggaagaccgcatcacgccgatcgtcggcatgctgcagggcgtggtggaaaagggcggcgatctgcgcgttgaggtcgcggataccaacgaaagcaaagagctgatgaagttctgccgcaagttcacggtgccgctgcgcgcggcgctgcgtgaagccggcgtgctgaccaactatgaaacgccgaagcgtccggtggtgcacgtgttctttatcgcccccggctgctgttacaccggctactcctttagcaataacaactcgccgttttatatggggatcccgcgcctgaagttcccttccgatgcgccgagccgttcgacgctgaagctggaagaggcatttcacgtcttcattccggcggatgagtgggacgagcgtctggcgaatggcatgtacgcggtggatctcggcgcctgcccgggcggctggacctatcagctggtgaagcgcaacatgtgggtctcttcggtcgataacggcccgatggcgcagagcctgatggataccggacaggtgacctggctgcgtgaagatggcttccgctatcgtccgaaccgcaacaacatctcgtggatggtgtgcgacatggttgagaaaccggcgaaggtggcggcgttaatggcgcagtggctggtgaacggctggtgccgcgagaccatttttaaccttaagctgccgatgaaaaagcgctatgaagaggtgtcgcaaaacctggcctatattcaggcgcagcttgatgagcacggaattaacgcgcagattcaggcccgtcagctgtatcacgaccgtgaagaagtgaccgtacacgtgcgtcgcctatgggcggcggtcggcggccgccgcgacgagcgctaa

SEQ ID NO: 90357 - DNA, 396 bp, Enterobacter aerogenes
atgaccagccgttttatgctgatttttgccgccatcagcggctttatttttgtggctctgggcgcctttggcgcacacgtgttaagtaaatcgctgggtgcggccgaaatggcctggatccacactggccttgagtatcaggcgtttcatacgctggcgattttaggcctgtctgtcgccatgcagcggcggataagtatctggttttactggagcagcgtgtttttggcgctgggaaccgtgttgttcagcggcagcttatattgcctggcgctgtcgcatttacgcctgtgggcgttcgttaccccggtaggcggcgtctgcttccttgccggttgggtattaatgttaattggtgcaattcgtctgaaacgtaagggcgttgttcatgaataa

SEQ ID NO: 90358 - DNA, 999 bp, Enterobacter aerogenes
atggttcagataaaaaaaactaataggttaactgttgtttcctatttgttaaaactcgttaacatctcagtcagaataaccatgtcgaagcgattaccacctctgaatgcattacgtgtttttgatgcagccgcacgtcatctgagcttcactcgcgcagccgatgagctttttgtgacgcaggccgcagtaagtcaccaaatcaagtcactagaggactttctgggcctgaagctgtttcgtcgacgcaatcgctcgctgctgttaacggaagaggggcaaagctattttcaggatattaaagagattttttcgcagctcaccgaagcgacgcgtaaactgcaggcgcgcagcgcgaaaggggcgctaactgttagtttattgcccagtttcgccattcagtggctggtgccgcgactctcaagctttaactcagcttatccggggatcgacgtgcggatccaggcggtggaccgtcaggaagacaaactggccgacgacgtcgacgtggcgattttctatggccgcggcaactggccggggctgcgtgttgaaaaattgtacgccgaatatttactaccggtttgttcgccgttgttgttaaccggtgacaaagcgttgaaaacacctgccgatctggcgcaacatacgctgttacatgatgcctctcgccgcgactggcaaacttatacccggcaactgggtctaaatcatatcaatgtgcaacagggaccgatattcagccacagcgcgatggtgctgcaggcggcaatccatggacaaggcgtcgcactggccaataacgtcatggcccagtccgaaattgaagcaggccgtttggtctgcccgtttaatgatgttctggtcagtaagaacgcgttttaccttgtttgtcatgacagtcaggctgaactgggtaaaatagccgctttccgccagtggattttagcgaaggcggcaagcgaacaagaaaaattccgctttcgttacgaacaataa

SEQ ID NO: 90359 - DNA, 1206 bp, Enterobacter aerogenes
atgaacgcattcaatcccgcccacttccgcgcccagtttccagccctggcggatgccggcgtctacctggatagcgcggcgacggcgctaaaaccgctggccgtgatcgatgccagcgaccagttttatagtctgagcgccggcaacgtccaccgcagccagtttgccgccgcccagcgtcttaccgagcgctacgaggcggcgcgcgaacgcgtcgccagttggcttaacgcctcttccggcaaagatatcgtctggacccgcggcaccaccgaagccatcaatatggtcgcgcagagttacgtgcgcccgcgcctgcatcctggcgatgaaataatcgtcagcgaagccgaacaccacgccaacctggtgccgtggctgatggttgccgaacaaaccggcgcgcgggtggtcaagcttccgctgggcgccgatcgtctgccggatatcactcaactcccttcgcttatctctccgcgcagccgggtgctggcgattggccagatgtctaacgtcaccggcggctgccccgatctgcgacttgctattgatttcgcccatcaggcgggaatgatagtgatggttgatggcgcgcagggcgcggtgcactttccggccgacgtgcaggcgctggatatcgatttttatgccttctccgcccacaagctgtatggcccaacgggtattggcgcgctgtatggcaaaagcgagttgctggcggagatgtcgccatggctcggcggcggcaaaatgattactgaagtctcattcgatggctttaaaacccagcccgccccctggcggcttgaagccgggacgcccaacgtcgccggcgttatcggcctcagcgccgcgctggaatggctgcaggaaatcgatcttacacaggcggaaagctggagccgtagcctggcgacgcttgcggaagatgagctggcaaagcggcccggttttcgttcgttccgctgtcaggattcgagcctgctggcctttgatttcgagggcgtacaccatagcgatatggttacgttgctggcggagtccggcattgcgctacgcgccgggcagcattgcgcgcaaccgctgctggcggcattaggcgtcagcggtacgctgcgcgcctcattcgcgccgtacaatacgcaagatgatgtttatgcgctggtgcacgctatcgaccgcgcgctggaaatactggtggattaa

SEQ ID NO: 90360 - DNA, 429 bp, Enterobacter aerogenes
atgacctcccaacccttaagcaccgcgctcagcgaagcgacgctgcgccagatcttcgccccgctaactcagtgggaagataagtaccgccagttgattttagtgggtaagaaactgccgccattaacggatgaccagcgggcgcaggcgaaagagatcgccggctgcgaaaaccgtgtctggctggggtatcaggttgatgctgagggcaagatgcacttctttggcgatagcgaagggcgtattgtgcgcggcctgctggcggtgctgttagccgcctgcgaaggaaaaagcgcagctgagattttagcgaatgaaccgttggcgttattcgatgagctgggtttgcgcgggcagcttagcgcttcgcgcagccaggggctgcaggcgctaagcgacgcggtgctcgccgccgcccgcgagaactaa

SEQ ID NO: 90361 - DNA, 810 bp, Enterobacter aerogenes
atgtctgtagtaatcagcgatgcctggcgccagcggtttggcggcacggcgcgtttatatggcgaaaaggcgctgcagtgttttgccgaggcgcatgtttgcgtggtcgggatcggcggcgtcggctcatgggcggcggaagcgctggcgcgtaccgggattggcgcgattacgctgattgatatggatgatgtttgcgtcaccaataccaatcgccaaatccacgcccttggcggcaacgttgggctggcgaaagcggaagtgatggccgagcgtatacgtctgattaacccggagtgtcgggtcacggttatcgatgatttcatcacgcccgagaacgtagcggaatacctgggagcgggctttagctatgttatcgacgcgatcgatagcgtcaggccaaaagcggcgctgatcgcctggtgccgtcgttataaagtgccgttggtgacgaccggcggagccggcgggcaaatcgatccgacgcagatccaggtggccgatttggcgaaaactattcaggatccgctggcagcgaaactgcgcgaacggctgaaaagccagtttggcgtagtgaaaaatagtaaaggaaagctgggcatcgattgcgtcttctcgaccgaagcgttggtctacccgcaggcggatggcagcgtatgtgcaatgaaaagcacggcggaagggccgaagcgaatggattgcgcctccggttttggcgcggcgaccatggtgacggcgacctttggttttgtcgccgtatcccatgcgttgaagaagatgttggcaaaagcgcagcgtcagggggaatag

SEQ ID NO: 90362 - DNA, 1098 bp, Enterobacter aerogenes
atgaaaggacgttgggcaaaatatgtagcgacgggggcaatgctggcgatgctcgccgcctgtacctcgaaaccgaccgatcgcggtcagcaatatagtgatggcaagtttacccagccgttttcattggtaaaccaacctgatgcggtaggcgcgccgattaacgccggcgacttctcccagcaggttggtcagattcgtagcgcctctccgcgtctctataatagccagagcagcgtctataacgcgattcaggagtggctgcgttccggcggcgatacccgcacgttacgccagtttggtattgatgcctggcagatgcagggggctgataactacggcaacgtgcagtttaccggctactacaccccggtcgtacaggcccgccacactcgccagggcgagttccagtatcctatttaccgtatgccgccgaaaaacggcaagctcccttcccgcgccagcatctatgccggagcgctcagcgataactacgtgctggcctacagcaactcgctgatggataacttcatcatggacgtgcagggcagcggctatatcgatttcggcgacggttcgccgcttaacttcttcagctacgccgggaaaaacggctggccttaccgtagtatcggtaaagtgcttatcgaccgcggtgaagtgaagcgggaagatatgtcgatgcaggcgatccgtgaatggggcgaaaaacatagcgaagcggaagtccgcgagctgctggaacagaacccatcttttgtcttctttaaaccgcagtcctacgcgccggtgaaaggggcgagcgcggtaccgttgattggccgcgcgtcggtcgcctctgaccgttcgattattccgccgggaaccaccttgctggccgaggtgcctctgctggataataacggtaagtttaatggtcaatacgagctacgcctgatggtggcgctggatgtcggcggggcgattaaaggccagcatttcgatatctaccagggcatcggcccggatgccggtcatcgcgccggttggtataaccactatggccgcgtgtgggtactgaaaaacgcgccaggcgccggtagcgtctttagcggttaa

SEQ ID NO: 90363 - DNA, 1308 bp, Enterobacter aerogenes
atgtataagaacataacttccgcgttaatagcgtgcgggctggttacgcctgtatgggccgctacagacactatttttgatgatcctttttttactgactcacagctcactgtctctgcaaagaattactggaaatatcttaaggaggaaaatgccaatcctaaacatgtacacaacgcctgggggcagggattttcagcagaataccagtctggttattttgcagatattatcggcttcgatgtgtcgtattatagtgcgataaagttgggtgccagcgactatttcaactcccgcggcgtgctttataataatggtacaggtaacaaaaaaagcaacgccgaaggatattccaagttcggccaacgtaacgtgaagcttaactacacgctttctggggctcagttaaacgcgcgctggggatggcagatgctgaaaaattatggcgttatttcaacgtcaaaccggctttctccaacaacgtattccggcgtaagcagtgctgtaagctacggcccatttaccataagaggggcgtggcttgaaaattccatggacagaaactcaccagataaaaagcgattccagaccaataccggtgaatatattagccatctggcaagcggagaaattctttggagagggaaaaatttcgatgcacagtatgcttatggtgagagtaaaaactacctgcaacggcacctgctgtttacgcagtttcgggcggattcgcaactaacgattggaacgcaagtctacggcacccacgcgatggaaagttaccgcgcaatgcctgcgagcaaacgggattttgacaataacgcctggcattttgcgctggacgcgacctggaaaggtgaacgctggaatagcaaaatgggcattggctacaccaatgctaaaaaagcaggtgaagtcgggttttatccacgccacatgagtaaaaattcccggggaacgtttatttctatggcctacgctggcgatgattacatgcgggatggggaactggtgctggcgaacatcaccgaatatcgattaacgccagaattagccgttggcctggcgggaaacatcgggcaatttaactataaaggaaatcatgtccgtaccggagaaatcaacgcctttagccgttgggttccaacgcagtccatgtttaaaaacttcactttttgggcgatgttcgggccgggatggtcatataagacgcaaggtaaaacgccagtccttacggacggtcattatacacgtacaaacacgctgtcgtcggaagtgatcatggaatatcgatttaaggtgttctga

SEQ ID NO: 90364 - DNA, 798 bp, Enterobacter aerogenes
atgaaaaaattatttctgggtgtcttaatggcagttactgccattaccagtccactgctgatggcgaacacgaatgataaaaatgaccagcaggaggtcatcaatatttattttgcgcgccatggtaaaacgctgcttaattcgtttgatcgcgtgcaaggttggattgattccccattgacgaaggatggggtgcaggttgctcaatatttaggtgagggactcaaagggataaaatttgatcgtttttattccagtgatgcggggcggcagcgcgaaaccatggcagtgattcttaaacaggctggcgtaacggattatcatttaacagaaatgacaggtctgcgagaggcgttttttggtggttttgaaggcggttataatgtcgatatggccaatgcaggcgcacacacgctaggaatgacggacagcaaagcgctttttaaagcgatgaaagcaggcacgctctcggtaaaggaaagccagaacgcgctggccaaatccgatcctaaacagctagcggaaaactatgagcaagtaaaagtacggacacaagctgcgctggcaactattgtagaaaatgctcaaaaagagggtgataaaaatattctggccatttcttcaggcacggcgattcagataatgatttccgatctgacggacgacccggccaaaaatctgccattgtcgaatgctgcagtggtgaaaatcacgtatcacgatggtaaatacagcgtgccagaaattggcaccatgaaatacgttgaagcaggcaaaaaatcactaaatcacaaataa

SEQ ID NO: 90365 - DNA, 870 bp, Enterobacter aerogenes
atgaacaagtcatgtattgccgctgcgctgatctctgcattcgcttttaccgcaagcgccgcaccgctaaaaattttgattgtcaacgacgatggttgcgaatccacgggcagtatttcgcttcaggaaaaactcacgcaaaaaggttttgaggtgtggatggttgctccagccaccaatcagagcggcatcggttcagccattaccttcaaaacgggtaaaatctttgatgtaaagaaggctgctgataaacgctactgcttcccgggaacacccgccgatgcggttgattttggcttacggggattactcattaataatccgccggacctggttatttctggcgtcaacgatggcccgaatacaggaatggctcaggtcaattcagggacggtaagtgcggcagccagggctgtacgttatggtttcccggcgattgcggccagcattgggtatatctttaccgaagatgaaatgaagaataaatggccaagtacacataaatattggcctgatgcggtggattatgtggttgatgttgttgaaacgctgaatcataaacaggtttctggaacacctttattgcctaaagggtcgggcttaagcattaactatccgccgctgccaaaatcaaaaattaaaggtgtgcgctatgttgaaaatgagatgttccctaccccacagattggttatgatattttgcctgatggacgcgctaaacaaaccatcaatccggaatcgttaaagacagtagagaacgataccgattccggctggcttaataaaggttatatcacctatagcctctttgatggggcaatgaacgccccgcaattccaggcgcaatatgaagaactgttgagtaaataa

SEQ ID NO: 90366 - DNA, 600 bp, Enterobacter aerogenes
atgcacggcgtaatgaaatatattaatgacagtctcaaactgggtaccatcgttgagcaaagaataaaggagcgggatcttaagcagctagagtccgcgaaaatggacttgatggagcgtatgggaacgtctgtcggtttgcataccgcaggtgtgccttttatctcaagcgcgttgttaagcgtggtaagtttcgctatgccgcagctaacgctttggggggccatctttcaatggttttcctggcccgcgcatgctgtttttgctggtatcatccccacaggtttactctactgtctgctgatcttcccgtcgatgacgctgttctctcgaggttttctggctgcgcttaagttctatctaagtctgattttcctgaccgccgcgctagccgcgggaaatcttatttacgcattcactttggtattcatatgtggcgggcatgccggcttgcttataggcgctttggttggtgtattatttagcgctggcagcatcaaactcgttaacagtgctatgtttgtaaaaacctcagcattttatttgcataatcgaatttggcgctggcaattaaaacaacatgtacagaatacagtatga

SEQ ID NO: 90367 - DNA, 1320 bp, Enterobacter aerogenes
atgataaaaatcctctactggctcatcctcacactgctaagcgcaacggggcttggcgcctggtttcttcaacagcaatatgacgcgcgctccgccgacttccgcatcctgtatcgcgaaatcacagtaaaagtgtcgcagcacgatgccatcatccccctgcttccgtccggtcaaaacgccgccgaagtccagcagatcctgccgcagattgtgcaatggcggcgctatgattccctggagccacgacgccccatcgtcgcgcaaagccccgcacgctactggcttaatcttccgggcatctccctgctgattgatttgaacaccctacttaacagtctcaatgagaaaaagacattcaaacatcttgccattcgttgggacggtaccacgttgtttgaggacggtaccgcatctgccaacacctggtggcgctgggagaaaactgttgccagcccaacacaaccgctgttcattagcgcaggtgataacccgcaatggcatcaactgccgtggtggctgatactttcaccggcactgttctgggcggtgattatctatcttgttaatcagtatcgaaccaataaacgccgacgggatatcgccgatctacgcacccgctatggcgaactgactcgccttaacaccatgggcgagctggccgctggtatcgtgcatgagcttaatcaacctttaaccgccattatgagctataaccaggcggcagtgcgcctgattaaaaaaaacgatcccgtaaagatccccgaactgcttgaggcctcagtgttgcagataaaacgcattgacgccctgctcagccagtttcgtctcaagctaaccagcaagcgcgccgaatatcagccggttgacctaccgtcgctgtggctacgcgtgtgcgaattactggataatgagatccgcgccggtaaagttcgtatctccagccattttccgtcggacctacccgcgcttcctgcgccgccgctgtgggtagagcaaatactgcataatatcgttagcaatgccattcaggcacaaagcataaatgttccaggtagtgcgtggattcatctgcaagccgtgcgggtaaataacggtatcgctttaactcttactgatggcggaccagggttatcatctgaagcgctggagcaggtttttataccgttttataccacccgtactgatggtgtgggactcggcatggcccttgcggatacccttgttcagcgtcttaatggcaagatagaagcgagcaatatcaccggacaaggcgcttgcttccggttatggtttccgctgcgcaatgaggagaagtaa

SEQ ID NO: 90368 - DNA, 618 bp, Enterobacter aerogenes
atggagcagtacatctggttaattgatgacgatgcggcaatacgcgattcattaagtctgctgctctcaaccgttggctggcagacgcaggcgtttgatagcgcacacgcttttcaacatcaggcagggaatctagccgaattaaccggctgtatgctgctggatatccgcatgccggggaaaaccgggctgacgctgctcgatgagtggcgccagctaggtctaaccttgccggttattattatgaccgggcacggtaatattgatttatgtcgtcgcgccttcaaaaatggcgcctttgaatttttaaccaaacccattgatgccgacctgttattcgaagtggtcggcgaagcgatggcgcagcaaaaagcgcatcttgaacgacaacaaatattactgccgctgcaggaaaaactcgccacccttaccgcccgtgagcatgaaatgctccagcagctgcttcagggctactccagtaaagaaatcgcccgtttatgctcgctatcgccgcgtaccgtcgaagcgcatcgcgccaatatttttagcaaacttgaagttaactcgctgcccaaattgttgaagatttacgctgatgtcgccagtggttctaagtaa

SEQ ID NO: 90369 - DNA, 498 bp, Enterobacter aerogenes
atgaaacgtatccttcttagcgccatcctgctcggcagcctggtcacgaccgccagcgccgcaacgggtgttctcagccagaaaaatttgtcagtggagctcgcggataaaatcgcgcaaagcacgctacaggcctgcgccaaagacggctataacgttgccgtcacgctggtcgaccgttccggtacaccgctattaatgaagagaatggataatgccggcccacacaccgtcgaagccagccgcatgaaagcattcaccgcgctaaccactaaaaacgccaccagcaatgtcatgaaaggttctcagtccaacgccggagccgcgaacctgcgagatatacccgattttctgctattagctggcggagtgccggttaagatgggcaaccaggtcattggcgcggttggcgtcggcggcgcgccggggggaaattttgacgaagcctgcgcgattgccgggttgcaatctatcgaaggcgagcttaaccagggctaa

SEQ ID NO: 90370 - DNA, 1311 bp, Enterobacter aerogenes
atgcagttggccctgcatgttctttcggctagctgctacatctccaggccgctgtgccaggatagggataacacgatgttaggctggacttcactacagcgcaatgccgccattgccagcttcttaagctggacacttgatgccttcgattttttcctcctcgtcttcttactgagtgacattgcccagacgtttcatgttgggctggaaaaggtcacgctggcgatactactgacgcttgccgtacggcctatcggcgcgctcatttttggccggctcgccgagaaatatggccgtaagccgatcctgatgttgaatatcatcttcttttcgattttcgagctgctgtctgctgcggcgccgtcattaacgatttttctggtcttaagagtgctatatggcgtggcgatgggcggtatttggggcgtggcgtcgtcgctgtcaatggaaaccattccggatcgttcccgagggctgatgtccggaattttccaggccggttatccgtttggctatctgattgccgccgtcgcttatgggctgctatttgaattactcggctggcgcgggatgtttgttatcggcgctgcgcctattttgctgctgccgtttatctggttctgcgtgcaggagtcaccggtatggctggcgtcacgagagagaaaggaaagcacggcgctgctgccggtactgaaaacgcactggaaattgtgctgttatctggtggtgctgatggcagcgttcaacttcttttcccacggtacccaggacctgtatccggtatttttaaaagtgcagcacggctttgatccgaaaacgatcagtattatcgcggtcacttacaatattgcgtcgatcatcggcggggtgctgttcggttcgctttccgagaagattggccgtaaaaaggccattataaccgcctcgctgctggcgctaccggttatcccgctgtgggcattcgctagcggttcgctgatgctgggaatcggggcattcctgatgcagtttatggttcagggcgcctggggcgtagtgccgacctatctgaatgaactggttccagcgaatacccgcgcggtgctgccgggctttgtgtatcaactgggtaatcttatcgcttcggttaatgcgacgttacaggccacgatcgcggaacatcatggtcagaactatgggctggcgatggcaatcgtcgccggtacggtggcgatcattatcgcgatactgaccttctttggtcaagaaagtcgggcgaagaagataagcggggcggttgagcaaaacgccatgcagcatgtgagtcggtaa

SEQ ID NO: 90371 - DNA, 267 bp, Enterobacter aerogenes
atgaaatcagatatccaactcaacatccgggcgaaggagtcccagcgggcgctgattgatgcggctgccgaaattctgcacaaatcacggaccgactttattcttgagatggcttgccaggcggcagaaaacgtcattctcgaccgccgggtgtttaacttaagcgatgagcaatacgccgaatttatcgacatgctggatgcgccggttgaagctaaccccgctctcgataaattgctggcgagaaaaccacaatgggaaaaataa

SEQ ID NO: 90372 - DNA, 486 bp, Enterobacter aerogenes
atgggaaaaataagcgcgcctgcaccgctatcttcacaccatcagatcgcggaattttgttgtggagaaacggttctcgatcaatggctgaaacagcgaggattgaaaaaccaggcacagggcgccgcgagaacctttgtggtctgcaaggaagagagccatcaggtggtggggttttattcgttagcaaccggcagcgttaatcactcggaagccactggcggcctgcggcgcaatatgcccgatcctatcccggtcatcattctcgcccgcctggcgatcgactgcgcgtttcacggacaggggctgggagctgatttactccatgatgcgctgttacgcagttatcgcgttgccgaaaatgttggcgtacgtgccctgatggtccatgccctgaccgatagcgcgaaacgattctatttacaccacggattcaaagcctcaaccacccaggaacgcacacttttcctcgcgttgcctaaataa

SEQ ID NO: 90373 - DNA, 1617 bp, Enterobacter aerogenes
atgaagaaagtggcgattgtcggcgttgggccgaccgggatctatacttttcattccctggttgaacggggtgaaccgctggagatagtgctctacgagcagggtgaagaggctggcgtcggcatgccttataacgatgagcataactcagcgcaaatgctggcgaatatcgccagtatcgaaatcccccccatctatattacctatctgacgtggctacaaaatcagagcgaagactggctcacccggtatagcattgagcgtgaggccttacatgagcggcaatttttaccgcgcgtgatcctcggcgactattatcgcgatcggttcctggcgctgttagagaaagcaaggttagcgggtttcaaagttagcgtgcgcgaatcctgcgaggttaccgatctccaggcggaacaggatggcgtcaaactgtggattaatcacgcgcccacagcggaacgtgcggattttgccgttatcgccaccggtcatctctggccgcaggacgatgattctccccgcgagtattatcccagcccctggagcggcttgatgcaggcgcagatagccccctgccgggtcggtatcatggggacttcactcagcggcattgatgccgccgtcgccgtcgtcattcagcatggccattttacgactgacgctgatgagagcgtccattttcagcttaatgacgtaagtcataaactccatatcaccctgatgtcgcgaaacggcatcctgcccgaggccgatttctactgtcccatcccctatgaaccgctggaaattgtcacccatcagaggctggaaacggccatcgctgagggtagtgagggattgctggatcgcgtattccaacttatcgtcagggagctggaactcgccgcgccgcactggtgtaagcagataggcttacgccagctcaccgcggatacgttcagcgacgcctggtttatcgacagaaaacgacacgatccctttgcctgggcgcaagccaatttgcaggaagtggaacgcaacaaacagcaacagcataccgtgccgtggcggtataccattctgcgattgcatgaagtgattgagatgattacgccgcatcttaacgaacgcgaccgcgaacgctttaaaacagggctcgcccgggtatttatcgataattacgcggccattccatcggaatcgattcgccgcctgctggcgttacgggaggccggggtgattagtattttgccgctggggtccgattatcaactggatgttcaaccacaactgacggtcatccaccaccacaaccaacgcagcgaatttgacgtctttattgacgccagaggccaaaaggcgctgaagagtaaagacatccctttcccgacgctgcgccagcagcttctcgcctgcggtgatgagatcccggatatcggtgatgattacaccctacaggcgccggcgtgcgctcgcggccgcattgccttcggcgcgctgccgtggttgatgcatgaccgccctttcgttcagggcctcgtcgccagcgcggaaatcggcgccgcgatggcgagagtggtttcacagcaggccagcggtcgccggcgcaagctgtggttcagtcatgaagagtggtga

SEQ ID NO: 90374 - DNA, 1101 bp, Enterobacter aerogenes
atgagtcaactatttagccctgcgcgaattgggaaactggcgctggaaaaccggattgtcatcgccccgatgtgtcagtactccgccgaaaacggcaaggtaaccgcctggcaccgcattcatcttggacagctggctttttccggcgccggtttggtgattattgaagccagcgccgtcgaacccgcgggtcgcatctccccggcggacgtcggcctgtgggatgatgaaaccgaagccgccctgtaccgggtactggaagatgttcgcgcctattcaacaacccgcatcggtatccagctgggacatgccgggcgcaaagcctccgtcgctgccccctggcttggcggtggtcagttagcgctggataacggcggctggcaaaccgtcgctccatccgcgctggcatttcatgacggcgaccgggcaccgaaagcgctgagccatgacgatctggcgcggcttaaacaagcctttgttgatagcgcgcggcgcgctgaacgcctgggaattgaactgatagagctgcatgccgcccacggctatctgctgcatcagttcctctccccattgagcaaccagcgtacagatgaatacggcggttcgctggagaaccgcttacgtttcccgctggaggttttccaggcaatacgggaggcggtcagcgaaaatatcgccgtcggcgtgcgactttcggcgacggactgggtggacggcggttgggatacggcgcaatccatcgtctttagccagcagcttgaagcgctgggttgcgactatattcacgtctccagcggcgggttgtcgccgcagcaggcgattcaggtcggtcctggctatcagttaccgttcgcccatgaaatccgccagcagatcaacgttccggtcattggcgtagggttaattaccgaaccgcagcaggctgaagatgcactgcaaaacggcgacgccgatctaattgccatcgcccgagcggcgctctacaacccacactggccgtggcaggctgcggcggctctgggggcccaggttagggtgccgccgcaatacctgcgttcagaaccgcatgggctgaaaggcacgctaaaatctaatcgctga

SEQ ID NO: 90375 - DNA, 159 bp, Enterobacter aerogenes
atgggtttctggagaatcgtatttactatcatcctgccgccgctgggcgtactgctgggtaagggcttcggctgggcattcattctgaatataattctgaccttgctgggctatattcctggccttattcacgcgttctgggtacaaacccgcgattaa

SEQ ID NO: 90376 - DNA, 1071 bp, Enterobacter aerogenes
atgcaaatgacgatgcgctggtttgggccagacgaagataaagtcactcttgagcagatccgtcaggttcctggagtggaaggtgtggtcggcgcgctgtacgacgtaccggttggcgaagtctggccacgggagaaaattaaggcgttagtcgagcaggcccacgctaacggtctgacgatggaagttatcgaaagcgtgaatattcacgacgcgattaaaatcgggctgccggagcgcgatcgctatatcgccaactatcagcaaactatccgtaacctcgccgcctttggcgttaaggtcatctgctacaactttatgccggttttcgactggatgaaaaccgacatgaactaccggctggcggacggttcgctaacgatggcttttgaaaaagccggcatcgataaaacgctggaacaggtcgttgcggaagtgctcagcaacgccaacggctatgccctgccgggctgggagcccgaacgtttagcgcaggtacagacgttattcgacagctataaagcggtcgatgatgacaaactgcgagaaaatctgctctatttcctggagaaaattatcccggtctgcgaagaggtcggcgtgaaaatggccattcatcctgacgatccgccgtactctatttttggtctgccgcgcattattaaaaaccgcgacgatctcgactggttgtgtcgcgcggtggattcaccggcaaacgggattaccttatgtaccggctctattgccgaggagccgcaaaataatatttatcaaatcctcgcggaattcagccagcgcgggcgcattcatttcgctcatgtcagaaatattaaaatcataaaagacaaagatttctacgaatcggcgcaccctacccactacggctcgctcgatatgtaccgggtgatgcaggcgctgcacgacaacggcttcgacggctatattcgccccgatcatggccgttttatctggggagaaaccggccgcccgggatacggcctgtacgatcgcgcgctcggcgccacttacctgctgggattatgggaagcgctggaaaaccagcacgcctga

SEQ ID NO: 90377 - DNA, 1335 bp, Enterobacter aerogenes
atgtctccagccctggctctgctatgggtggtggtcggtattgcgctactggtcatcatgaatctgaaatacaaagtccacaatattttcgccttgttaattgccggtctgtttgtcgccattatggagggcgtgcccctcgataaaatcgtctcgatggttcagcaaggactgggcggaataatgggacacctggcgctgatcattatattcggcgctatcatcggcaaatttatgaccgaatccggcgccagccagcagatcgccgatacggtcatcaggcgttgcggtacccgttatctggcggtcggcttgatgtttatcggcgttatcttcggcatcgccatgttttatgaagtggcgtttttgattgccatgccgctggttctcaacatcgccagcaaagccaatatcccgtggatgaaactggttataccgacggtcgtcggcgccaccatgggccatagtttatttccgccacaaccggggccggttgcattagtcagcgccttccaggcggatattgttcaggtttatctgtatggcattatcgtgatcatcccggcgctgttctgtgcggggatcctgttacccgcctggcttccaggtatccgcgagatgaagctgaatgccatgattaaaccgcaggaggagaaacctgccgaggcgctgccgtcgtttgcggtcagcattgccattccgctgatccccgcgatattaatgattgcgtcttcgctgattcagtcgctgtttggcgcggcctcttctgcggcaaaattcttccagttcctcggtagcgcggaaattagcatgctgttggcgaccggcgccgcaatctggctgctcggctgccgccgcggtatgaacgccgttcaggttaaccactgcgtcacggactcggtcgccagaattgccaacgtcctgttcgtcatcagcgccggcggcattctcaaacaggttattatcgattccggcgtcggcgaccatatcgttacgatgatgagccacgtcccgctgtcgccgtttattatcgcctggctgattaccgctattattcgtattcttaccggccagggcgccgttgcggcaattacttcagccgggattgtttcgccaatggttaccgcatttcatcttaatccagcgctgatgtgcctggcggtggcctgtggtagtaataccattactttgatgtatgacggcggctttttgctctttaaggaaacgtttggtatctcgatgcgtgatacctttaagacctggggcttactggagctcatcaactcggtggtgggtctgttgatggtgttattactgagtctgtttatttcctga

SEQ ID NO: 90378 - DNA, 546 bp, Enterobacter aerogenes
atgaaactgtggaataaaacgctgattacctctgcattatgcctggcgttgtttggctgcgatgactcatcgaaagtcgacaataaactggatcaggccaaagataacgcggaacaaattaaagatgcggctgccgataaagcgcgggccattaagcaagaagcggataagcagatcgacgacatcaaaacgcaggccaataatgaagcggatagcctgaaaacccaggccagcagtattaaatctgaagccgacaagaaggccgacgcgattgcccaggatgcgaaaaataaagcggatgcggtaaaacaggatgcgcagcaaaaaagcgatgcgatcatgaaagaggcgggaaaaattaaagataacgctatcgttgaagccaaccagctttccgccgatgccgccaataaaaccaaagaaataaaagagagtatcgcgccggagcaagcgccagcacagcaggcgccggccggccaacagttaatatttgagtgcttaccgcggcggtattgtcgccgccgcgatgcgtttctcaggaaataa

SEQ ID NO: 90379 - DNA, 1377 bp, Enterobacter aerogenes
atggttatgtcactctttcactctgtaagcgacctgattggtcataccccgctgttacagctgcataaactggataccggcccgtgcagcctgttcctgaaactggaaaaccaaaaccccggcggttcgataaaggatcgcgtggcgttgtcgatgattaatgaagccgagcgccagggaaaactgcgccccggcggcaccatcattgaagccaccgccggtaataccgggttggggctggcgctgattgccgcgcagaaaggctacaaactgatcctggtggtgccggacaaaatgagccgcgagaaaattttccatctgcgtgcgctgggcgccaccgtgcagttaacccgctcggacgtcaacaaaggtcatcccgcctattatcaggactacgcccgccgtctggcggatgaaacgccgggcgcgttttatattgaccagttcaataatgaagccaacccgttggctcatgccaccactaccgcgccggagctgtttgagcaactcgatggcgacattgacgccgtggtggttggtgtcggctcaggcggtaccctgggcggtttgcaggcatggtttgcgcaacactcgccgaaaaccgaatttattcttgccgatcctgcgggctcgattctggcggatcaggtagagaccgggcaatacggcgaaaccggctcctggctggtggaggggatcggcgaagattttattcccccgctcgcccatctggagaaggtgcgcaaagcgtggcgcgtgaccgatcgtgaagcgttcgccaccgcccggcagctgctgcaagtggaaggtatcctcgccggctcgtcaacgggcaccctgctgacagcagctctgcgctactgccggtcgcagtccaccgctaagcgggtggtcaccttcgcctgcgatagcggtaacaagtacctgtcgaaaatgttcaacgacgactggatgcgccagcaaggtctgctaagccgcccgacgcgcggcgatcttagcgattttatcgccctgcgtcatgatgaaggcgcaaccgtcaccgccgcgcccgacgatacgctggctgccgtccttgctcgtatgcgcctgtacgatttctcccagttgccggtgctggaaaacggccacgtggttggcatcgtcgatgaatgggatctgataagccacgtccagggcgacagccggcgtttcgcgctaccggtcagagaggctatgacccgccatgtcgaaaccctggataagcacgccccggaaagcgcgcttaaagatatcttcgaccgtggacatgtcgtggtcgttactgataacgatcggtttatcggcctgattacccgtagcgacgtcctgaccacctggcgtaaccgactggaacaataa

SEQ ID NO: 90380 - DNA, 1146 bp, Enterobacter aerogenes
atgaaaaatttacagacgctcagcgtccatagcggcatttttaacgaccagcatggcgcggtgatgccaccaatttacgccacctctacctttgcccagcccgcgccgggccagcataccggctatgaatattcgcgtagcggcaatccgacccgccacgcgctggaaacggccattgcagagctggaaagcggtagccggggttttgcttttgcttcaggcctcgcggccatttccacggtactggaactgctggataaggatagccatctggtggcggtagatgatgtctatggcggcacataccggctgattgaaaatgttcgccgtcgtagcgccggtctgcaagtgacctgggtcaaacctgacgatctggcaggcatcgaagccgcgatccgccctgatacgcggatgatttgggtggaaacgccgaccaatccgttactcaagctggcggatcttgcggccattgccgagattgcccgtcgacataacattatcagcgtcaccgataatacctttgcctcaccgatcatccatcgccctatcgaactgggctttgatatcgtggtgcattcagcgaccaaatatctcaacggtcattcggatgtcgtcgccgggttggcggtggttggcgacaatccgacgctggccgagaagttgggctatctgcaaaacgccgtcggcggcgtacttgacccattcagcagcttcctgacgctgcgcggcattcgcaccctggctctacgggtggaacgtcatagcagcaacgctctgctgctggcggaatggctggagcagcagccgcaggtcgagaaagtgtggttcccctggctcgccagccatccccatcacgatctggcccgccgacagatggccctgccaggcggtatgatttccgttgtggtcaaaggagatgatgactacgccgggcgcatcatcaaaaaactacggttatttacgctggcggaaagcctggggggtgtggaaagcctggtgagccagccattcagcatgacgcacgcctccattccgctggaacagcggctggcgaatggcataacgccgcagttgattcgactctcggtaggtattgaagatccgcaagacctgatcgctgactggcgaaacgcgctacgtgagtaa

SEQ ID NO: 90381 - DNA, 165 bp, Enterobacter aerogenes
atgagcagagcgcatcaccatgaactcgataaacgcggtaaacacccggcgcgagaagagccgggtaaacacggcgagatcccgcggaaacgggatgatagcgacgatcaccgaagcgatccctatcatccgacggaaaacgccaaagcggtatgtttctgctga

SEQ ID NO: 90382 - DNA, 405 bp, Enterobacter aerogenes
atgaggaaaaagctaatcgcgacactctgtttgttactcaccgctggcgtctgggctgaagagaagggcggttttaaaaacgatgccgcaccgccgccgccgcaccagctggacgacggctatcgcggtatggaggatggccggattatgaccattgagcaggcgaaaaccatgcacgacggcgcgactatttccctgcgcggcaatgtgattaagcatgaaggcgacgaccgttatctgttccgtgataaaactggcaccattgcggccattattccggcagccgtttttgatggtcaggacatcaagccagacaaactggtgagcatcaacggaagcctggatagtaaaatgacgccgccgctggtgcgggttgataagctgcgcaaacaagcgcccaattaa

SEQ ID NO: 90383 - DNA, 504 bp, Enterobacter aerogenes
atggacaataatcaacaggatccgccagagataaacgagaatctacaggcgttacgcttcgagtataacttccggcgctatggggtggtttttctcgccattattatcattgctgcattatgcggtttattttcatctggcttcctgagctccgcccatcatgagaattccgcttcatcgttaacggtagactatgaccgttttgccaggttaatgagcgaaaccgaagtcaatgttcaggtaaaaaacagtggcctcgctcatacctcagtggatttttcacccacgttattaagccattaccaaattggtgatattcgaccgcagcccgataaaatgtacagcgctaacggtcatctgatactggtttacaatgaaaatagcagtggcgcgccgctttcgctgtggttatctatcacgccaaaaacatttggcaaactttccacgacactacaggcgaaccggcaacctgccgtcacctttagccaatttgtctttccttag

SEQ ID NO: 90384 - DNA, 447 bp, Enterobacter aerogenes
atggaaatggtgctcagagccgtcgcaatctatcttatcttattgattatatttaaagttgctggcagaagaacgcttatgcaactcaccagttttgatctgattttactgttgattatcagtgaggccacgcagcaggccatgctcagcaccgactattctgttaccggttcaatgctgactattgtcacgatggtcagcgtggatattttatttggctatataaagaagcgcttttctcaggctgagaattatcttgatggttcgccgacgatcgtcgtagaaaatggtgttgtcgctgacgataaaatgaaaatggtcaatatctctgtggatgacatattgctcgccgcgcgacagcaccatggtatatatcaacttgagaagattaaatttgcgatcctcgaacgtaacggccagatttcaattattccgaccgaagcgtag

SEQ ID NO: 90385 - DNA, 507 bp, Enterobacter aerogenes
atgactgatattgaaaactatcacgattggttgcgtgacgcgcacgctatggaaaagcaggccgaatcaatgcttgaatcaatggtaaaacgaaccgacagctatccggaattatgtacccgccttgagcagcatctttttgaaacccgtcggcaaattaccgtactggatgatattattgcgcgcaacaatatttcccgctcggttcttaaagactcaatgagtaaaatcgccgcgatgggacaatctattggaggaatgtttccacaagatgaagtggtgaaaggggtgatcagcggttacgttttcgagcagtttgaggtcgcctgttatacctccttattaaccgccgcgcaaaaggtcaacgatcatgattcgattgcggatttagaaagtattttggcggaagagagaggcatggccgaatggctgctgcaacataacccggatattacggagcaatatattattcgctccgaaacgccgggttttgatgctaagctttag

SEQ ID NO: 90386 - DNA, 501 bp, Enterobacter aerogenes
atgaaaatacaaaccattgaagatatttttatccatttattatcggatacctacagcgcggaaaaacagttaacccgcgcgctggctaaactatcccgcgccagcgcatgtgaagagttgcaaacggcattcagcgctcaccttgaggaaacacagggccatatagaacgtattgataagctccttgaacaaaatgatcaaattcgcctgaaacggatgaagtgtgtggcgatggaagggcttatcgaagaggccaacgaagtgatcgaagcgacggaaaagaacgagatccgcgatgctgcgctgatagccgccgcgcagaaagttgaacactatgaaattgcggcctacggtacgctgtgtacgctggcagagcagctcggctataaagccgcggtgaaattgctggcggaaacgctggaagaagaaaaagacgctgatatgaaattaacggacatcgccgttggacacgtcaatcaggatgcccaacagtccgcttaa

SEQ ID NO: 90387 - DNA, 186 bp, Enterobacter aerogenes
atggcagaacacagaggtggttcaggtaattttgcagaagaccgggaaaaagcatctgaagccggacgtaaaggcggacagcacagcggcgggaattttaaaaatgacccggaacgtgcatccgaagccggtaaaaaaggcggtaaaaacagccatggcggcggccgtaaatccggtgatagctag

SEQ ID NO: 90388 - DNA, 885 bp, Enterobacter aerogenes
atggataatgacaaactgcgtaccaaccattggccacaaccccctttccccgatcaaccgcaaacgcctcccggcctggccgccgaaatggaacccacaccggatcatggtgaagtcagctacagcgggtcaggacggctacagggtaagaaagcgctgattaccggcggagactccggtattggtcgcgccgtggccatcgcctttgcccgcgaaggcgcggatgttgccattaactatcttccggaagaacagagcgatgcggacgccgtcatcgcgcttatcaaagcggaaggccgtacagcggtggcgataccgggcgatattcgcgtggaatccttctgtgaaacgctggtggaaaaagcagtaagcggtcttggcggtttggatattgttgtgaataatgcaggacgtcagcaatactgtgaaaaaattgagcaactcaccaccgccgatttcgatgctaccttcaaaaccaacgtctatgcgccgttctggataaccaaagccgcgctgccgcacctcaaagcccaaagcgtgattatcaacacatcttcagtacaggcttttaaaccgagccctattttgctggattatgcccagaccaaggcctgcctggtggcattcaccaaatcgctggccaagcagttagggccgcgtgggatccgggtcaatgcggtcgctcccggcccgtactggacggtgctgcagtcaagcggcggacagccggcggaaaaagtgcaaaactttggcggcgatacgccacttgggcggccagggcaacccgttgagatcgccccgctgtatgtgactctcgcctctgatgcctgctcgtatgcctccggtcaggtctggtgttcagacggcggtgacggcgtactttaa

SEQ ID NO: 90389 - DNA, 915 bp, Enterobacter aerogenes
atgagcatcgaaaaattaacccagcagccgctaacgattggcgtggaactgccgctggacaatgactggtcgacaagcggacagctaaaacggcagcgcgacgggcgaccgtttggcgtgccggatatgagcgagcacgcggagcgcattaaactggcggatacgctcgggtttcgcgctgcctggatccgcgatgttccgctgtacgatccgcagtttggcgatgcggctaacgtctttgaagcctttacctacctcggctatttatcgagcctgacgcaaaatattttgctgggcacggcggcggttgtgctgccgttacgtcagccatggctggtacgtaaagccgccgccacggtgcaggcgctcagcggcgaccggctgctactgggcatcgccagcggcgacaggccggtcgaatacccgctatttggtgaagactacgccagccgcggcgagcgtttccgtcacggcgtgagcgtgctgaagggcgagaccgatcgtcagctggagccgggcctggagttgctgccagccaaaccgaccccgccgctgctggttgctggtttggcgcaacaaacggcgcaatgggtaggcagtaatatggatggctggcttgcctatcctggccagcctgacgagcacgttagccgcgtcaggctgtggcgccgggtagcgggcgagaaaccctatatcagctttatccatctggatctgcaagatgacgccaatgcgccgattcaacgccatcgtttcggcatcagcagcggccgccatggtctcattcaggaattaaatgcgatgcgcgatgccggcgtgaaccatatcggcctgcattttcgtcgcaaccagcgcccgctggccgagacgatgcaggagattggcgaactggtgctgccggcattccattattaa

SEQ ID NO: 90390 - DNA, 984 bp, Enterobacter aerogenes
atgataaaaaccgacgcctggctgtggaaaaggcacgcctccccgcttctgcttgaacgccatgagaaaacactagtcacgcccgctgacgatcaggtgctgatcgagaaccgcgccattggtcttaatccggtcgactggaagctgatggccggtctctccgacgcctggcaggaggatcagatccccggcgtcgacggtatgggggtgattaccgccgttggccgcaacgcccgccaccttcgtcccggcacgcgtgtgatgtatcacaccgacctgcgttttgacggtagctttgcccgccatacattagtcagcgcccaggcggtgattgcggttcccgatcatatcagcgacctcaccgctgcggcgctaccatgccctggtctgacggcgtggcaggcagcgcaaaagatcccccttccggctggcgagaatgtgttggtcagcggcgccggcggcgctgccggcagtctgctaagccaattactgattgagagcggcgctaacgtctacgtcacggccagcgccacgcatcacccgaaactactggctcgtggggtgattcaggcctttgattatcaccatacttcctggccgcaggagctaaaacgcgcgctggcgggtaaatcgctgtatgccgctttcgataccgtaaatcagcaaaatgccctttcgcttgccgggttgctcggctactacggccatctggtctgtatacaagaccggctcgagcacgcgccgctaccggcgtttactaccagtatctcattgcatgaggtcgcgctggcggcaatccatccttacggtactcagaggcagtggagtcgattacgtcaggccggggaaaacatgctgcagcaaattggccgcggcgaactgatgatgccgccgatagaaagcgtcagtttcgacgagatcccacaggcgctggaaaggctaaaacagaacaataacggtattaagtacgtagcggtgctgtaa

SEQ ID NO: 90391 - DNA, 249 bp, Enterobacter aerogenes
atgttacgcgattatttaaaactggattctgaagaccaattagttgaacaacaaagcggtcatcaacctagccagcagtataccgaagtgactgagtgggtgatcctcaataaagagggtaagaaaaaaggccgcgtctccctgtttgataaatttaatactcgccgctcgtggaacgttaattttcgtattacccaatttgataacagcggtaaagttatcgttgaccaactgacagacgctatttaa

SEQ ID NO: 90392 - DNA, 1200 bp, Enterobacter aerogenes
atgagttcttgcattgtcgctgaagagagcgcgattaacgcccgcccggcgtggcgcgccgtgtatgcgctggcgttgggggtctttggcctgatcgtcgctgaatttctaccggccagtttactgacgccgatggccagcagcctgggcgtgagtgaggggatggccggacaggcggtgaccgccacggcgttaatcgctctggtgacggggttattgattacctctgcaacccgcaatatcgaccgtcgctgggtactgatgttcttttccgtattgcaaatcatctccagtctgatcgtggcctttgccggttcactggagttcctgctgctgggacgcttgctgcttggtatcgctatcggcggcttctgggcgatgtcgacggcgacggcgatgcggctggttccggcggcgatggtgccgaaagcgctggcgattatcttctcggcggtgtcgattgccaccgtagtggcggcaccgctgggtagctatcttggcgcgctcattggctggcgtaacgtctttatcatctgcgccgtaccgagcctggttgcgctactgtggcagctatgggtactgccgtcgatgcgcccggagagtgctggcagctttagtacgctctttaaggtactgcggcggccgggaatggttggcggcctgctggcttcgattttgatttttggcggccacttcgctttctttacctatctgcggccgtttctcgaaaccgtggcgctggcaagtgtagaaggggtgtcgttgattttgctggggttcggcgtggccaactttattggcacctcgcttgccgggcatctgctggcgcgcagtttgcgtttgacgctggcgctggtgccactggcgatgagcttgctggcgctgatgatggtgctgtatggtcatattgcgctactggatggcctgttggtcgccctgtggggatttgcattcggcctggtgccggtggcctggtcaacctggcttgccactacggtaccggatgaagcggaaagcgcagggggattattagtcgcggcgatccagctggccattagcgccggggctgccggcggtggggcaatatttgatatcagcggcgccagcggcgtatttaccggcagcgggctgttattattaagcgccatgctgattgtctttattggcgtcagggtgacgccgccggtcagaaacaattaa

SEQ ID NO: 90393 - DNA, 960 bp, Enterobacter aerogenes
atgagccagcaaaccttagatctgaccagcgagctgttacagggcatgcgactgtcgggagtgaaataccgacggattgaaacctcgcgtcctttcggcgtggagtttaattcggttcctggcaaagcgcagtttcattttgtcagccgcggcccgctgctgctacaaatgagcaacggtaaacagttctcgcttgagagcggcgatgcggtgtttattcccaatagcgatgcgcacgccctgctctcagatagcaaagccgcgcgggtgaatgtgatggagctcgacagcaaaccggtctgcgggacggtttcctgcataaaaaacgcgggctgtgttaataccgaagagaatgcggttatcttcagcgcctgtatggattttgaattaggcggaatgcagccgctggttcgggccatgccggaggtaatgctggtgagtagcctgttaagcgcccgcccggaaatccagccgctgctggcggcaatggagcgtgaatccctgacgcgtcaggtgggctatgccggcattctggcacgtctcgccgacgtcgtcgcggcgctgatcgtccgcgcctgggtggaatgcggctgcggtaacgctaccggctgggtacaggtactgcgcgacccgaagctatcgcgcgcgatatatgctatgcatcagcagcccggcgtcaactggaaggtggaagacttagcccgcgaatccggcctgtcgcgttcggtgttcgccgaacgttttctcaccgccaccggtaccacgccggcccgctacctgacagaattacgcatgcgcctggcggtgcagtacatcagccatgaaggcgaagcgctggaaaaagtcgccttccgcctcggctacaactcgctcgccgcctttagccgcgcctttaaacgcattaccggcaaagcgccgggagcgctacgcaatggggtcaatgaacaagcggtaacctga

SEQ ID NO: 90394 - DNA, 267 bp, Enterobacter aerogenes
atgcacacgtcaaaagatccgcttcacggcgtgacgctcgaagcgttactcactgaccttgtggccagatatggctgggatgaactggcccgacatatcaaaatcaactgtttcaaaagcgatccgagcattaagtcgagcctgaaatttctacgccgcacgccgtgggcgcgtaaagaagtggaaaacttttatctcgattcgctggaagggctcatcgacaaacccgccgacgctggcccgtgggccaactggcagaagaaataa

SEQ ID NO: 90395 - DNA, 1029 bp, Enterobacter aerogenes
atgaacgccacgactttgccgattctcgatctggcccgctataccaaccctgctgaaaagagcggttttcttgccgacctccgccaggccgctcgcgatattggtttcttttatcttattaatcacggcgtggacgccggattgcaaactgaagttcaacgccaggcgcgacgcttttttgctcttgatgatagcgaaaagcagcaagtggcgatgattcattccccgcactttcgcggctataaccgcgcggcttccgagctcactcgcggccagccagactggcgcgaacagtttgacatcggcgccgaacgcccggctttaactctcgccgaaaacgcgccacgctggcagcgtctgcagggaccgaacttatggcccgccgcgctaccgtcgctgaaaccgaccctactgggctggcagcaggcgatgaccggcgtcgggatgaccttgctgcgcgcgtttgccgaagcgctacagttgcctgccgacgcctttgacgcgctgtatggcgataaaccgaatgaacatatcaaactgattcgctaccccggtcagcgtgaaaccaaaagcgcacaaggcgtcggcgcgcataaagattccggattcttaagcttcctgttacaggacgagcaaaaaggactgcaggtggaagtcgcgccggagcactggatcgacgccacgccgctcgcgggcagctttgtggtgaatatcggtgagctacttgagctggcgactaacggttacctgcgcgccaccgttcatcgcgtggtctcgccgccggcagaacaggaacgcctctcaatcgccttctttcttggcgcgcagctcgatgccgtggtgccggtgtaccgcctgcccgcccatctggcgcaggaagcgctcggcccggatagcgatccgcaaaatccgctgctgcgggatgttggctggaattacctcaaagggcggctgcgttcccacccggatgtcgccgaacgttattaccaggatgtttttcgcgaacgtactgagcaactgatcgtttaa

SEQ ID NO: 90396 - DNA, 807 bp, Enterobacter aerogenes
atgaaatatgccgcattcaaactggcaggggtcgctttatctctttctctggcatggacatccgcccaggctgccgcgctgcgcgttgccgctgacccggtaccacacgctgaaatcctcaattacatcaaaaaaatcgatcccagcctcgatatcaaagtggtcgaactcaccagcggcgttaacgccaacgagctgctggcgaatggcgacgttgatgccaactacttccagcacgttccgtatctgaaggatcaggaaaaagcgctgggtaagacctttgccgtcgccgctacggtgcatattgaaccgctgggtatttattcccgtaagcacaaagactttaattccgtcccggaaaacgggaccgtcgcggtgccgaacaacaccaccaatctcagtcgcgccttgttcctgctacaaaaccaggggttaatcaaactcggcgctaaattcaccaacccggcgaccacgttagccaccccgaaagacatcgtggaaaaccccaaacatctgaagatcctcgaaattgaatcgccgcagatcccgcgttccctggacgatgtcgatttagcggtcattaacggcaactacgcgctggaggcgggactggtaccggcgaaagatgcgttaggactggagagcgcgaacaacaacccttacgccaatatcctggtaacgacgccgcagttggctaatgacccacgcattaaagcgctggccaaagatctcacctcgccgcaggttgccgaatttattcgcaaaaactataacggctcggttatcccggttgcgccgcaatcatga

SEQ ID NO: 90397 - DNA, 792 bp, Enterobacter aerogenes
atgattgaggtcgtcgggctgagtaaaacctatgccggaacaggccgaccggcgttaaacgacgtgtcgctgcagatcccgaaaggcgcgatttatggcattctcgggcgcagcggcgcaggaaaaagcacgctgatccgctgtctcaatttactcgaacggccctctgcgggccgaattgtggtgaacgggcaggatatcactcagttagacaaagccggtttacgtcagcaccgtctgcgcaccggaatgatcttccagcacttcaacctgctgcatgcccgcaacgtggctgacaacgtcgcggttccgctggaaatcgccggtgtcgacaaacgtgcgcgccgcgaacgcgtgctcgagttgctggagttagtgggactggcggataaagcaaccgcctttccatcccagctttccggcggtcaaaagcagcgcgtcggcatcgcccgcgcgctggcggccggcccggatgtgctgctatgcgatgaagcaaccagcgccctcgatccggaaaccaccgcctcggtgctggcgttactggccgatatcaatcagcggctcaatctgaccattgtgctcattacccatgagctggaagtcgtcaaaacgctgtgcgatcacgcggcgctgctggagcatggcgaagtcatcgagagcgggaaaatcgccgatctgctggtggcgccgtggtccagattacgtcagtcgttactgcataatccgcaggcggagcaggatttcctcgcccgccacggctttcacgggaggcctttatgcgtagtcgcatga

SEQ ID NO: 90398 - DNA, 672 bp, Enterobacter aerogenes
atgcgtagtcgcatgagctgggaagatttatggcccttattatgggaaggcagcctggaaaccctctatatggtagggctggcggcgctgtttaccattttaatcggcctgccggtcggcgtgttactgtttgtctcccggcgcaacggcctggcgccgatgccgaaactgaacgcgctgctgggggcgattatcaattttggccgctcgctgccgtttattgtactgctcattgcgctgatccccttcacgcgtttgattatcggcaccaccttaggcagcaccgccgccgtcgtgccgattaccatcggcgcttttccgttcttcgcgcgactgaccgaaaacgcgctcgacgaagtggattacggacgcattgaagccattctgtcgatgggcggtaatctgtggcacgttatctttaaatcgctgctgccggaggcgctaccgaccctgcttgccgggatcaccctgactatcgtgatgctgattggcttttcatccatggcgggcgtcattggcggcggcggtcttggggacctggcgattcgctacggttatcagcgttttaacgatcaggtgatggtcggtacggtgctgattctggtggtgatggtccagggcgtacaaatgatcggcgacaggctggtacgacagcttgcccatcgccgctaa

SEQ ID NO: 90399 - DNA, 1047 bp, Enterobacter aerogenes
atgaatcagcatttaccgcgattacttaatattcgttatccgattattcaggcgccgatggcaggggtgtcgacaccgtccctggctgcagcggtaagcaacgccggaggattgggttcgctggggctcggcgcgtcgacagttacgcaggcgcaggcgcttattgaacaaacccggcagctcaccgatcgtccctttaacgtcaaccttttctgtcatacgccgtcgcgccgcgatgccgttcaggaagcgcagtggctggcgcggttggctccggcgtttgcccgttatcacggcacgccgccgaaacagcttaacgagatttatcagaccttccatcaacatcaatccatgctcgatatgctgcttgaacagaagccggcagtggtgagttttcattttggcgtgccgtcgtcagaggttattcgccgcttccagcaacagggaacggtgacgatggcgtccgccacctgcgtcgacgaagcgcgattaattgcgcaagcgggtattgatgtcgttattgcgcaagggtatgaggccggtggccatcgggggatttttgacccacacggcgacgatcgtcaaatgagcaccttcactctgcttcaggctctaaagcaggctgtcgatttacccattgtcgccgccggcggcatcatgcatggggcggcgatagccagcctgatgcagctcggcgcgtcgggcgttcagctgggaaccgcatttttattgtgcccggaagcgggtatagatagtggatatcgacaggcgctcacgcaaaatagtgacgttgtcacatttttgacggcggctatttcgggtcggccagcacgctgcgttaaaaatagctggcacgaaatcggcgaaggagaaattcccgcctatccgctcgcttatgacgccggaaaagcgctggcgacggcggcaaaagcgcagggcgatcatggtttcggcgcgcactgggcgggacaaggggtggcgatgattcgcgaaatgccggcggcagagctggtcagggttctcgtgaaggaaggcggcctgcagtag

SEQ ID NO: 90400 - DNA, 888 bp, Enterobacter aerogenes
atgaaccacaccacattactgatctttaaactggtggccgaaacccaaagcgtcactcaggcggcgaaacaacttggtcgcgcgcagtccaatatcaccacgcgcattcagcagcttgaagaggagctggaagccgagcttttcgtgcgcggaaacaagaagatgctgctttctcccgccgggcaaaacttcctcagctacgcgcggcgaattttaagccttgccgaagaagccaaactggcactgcacccggcacggccaacgggaacgttaaagctcggcgcgatggaagcctgtgccgccagccgcctgccggccatattgcctttgtttcagcaacgctgcccggacgccgacctgacattgcgtaccatgcccacccgtcagctgactgaactggtcgaaaactccacgttggactgcgcgctggtttcactgccggccggtccggacggcagccttcaatgcccacagacgcttgaatatctcccgctttttatcgaacaactggtccttatcgcccctgtcgaggggcgcaactaccgttttgccgccttcccggcaggatgttcctaccgccagcacggcatcgagtatctgcagcagacgggagcacacgtggacatcgtcgatgtcagctcctatcacgcgatgatggctaacgtcgccactggtcgctacgcctgtttgctcccggaaagcgttctggccctgctcacgctacccgcaggctgccagacgcattacgtcacccaggccgccacccagcttatctggcgccgcgggtatgtatcgccgattctcgacgtcctgcgccagttattgctggcgccggccgcaggcaaccagcccggcggctcccagcaacacgccgctggccgtcaatag

SEQ ID NO: 90401 - DNA, 1167 bp, Enterobacter aerogenes
atgcgacaaatcaggccggagataaacgctttcttattagcgctggcaggggcgacggtattaatgattggtatgggttacggccgcttcgccttcaccgggatcctgccggtgatgttaagcgatcagatcctgacgctgcgtcaggggaatctggccgcctccgctaattatgccgggtacctgctgggggcattgttactggcgaaggcaaagccggagcaggcgaccagaatgaatattgtctcggtcattctgacgctaatttgtctggcgctactggcctggctgcgttcgccgctggctatcattatcctgcgcgggttggccggggtactcagcgcggtaacgcttatctccgcctcgttatgggtactgcaacatatgaaacatcataacggcgcgccggtactgtttgccggtgtcgggatggggatttttttgtcggcggagtttattgccgccggtaaagcgctggcgtttagcagtcagcaaatctggctactgtgcgccatcacggcgacgatgctgtttttatgcgccttgcgcggattattaagcccggcggattcgctgctggcgttaaacagcaggcccgcaacaacgatgccgagcgacaatgggcgcacgagcgatgcggtaaaattgctgctgatttatggcctcgcgggcttcggctacatcatcaccgcgacctatttgccgctgtttttgcacggcgcgctatcgggtatcgacccggtgcacctgtgggcggtatttggtctcgcggcggtaccttcctgttttatctggcaccaactcgtactgaaaattggctatcagcgggcattttgtagcaatctcgttattcaggccttcggcgtggccttaccagcgtggagccactcattcaccttttgtttgttgagcgcgctgctggttggagcgaccttccttgggacggtaaccatcgccttgtcagagggcaagcggctaaatcaggcggtaaaatttaatatgatcgccgcgctaacggcgacttacggcgtcggacagataatcgggccgctggtcgccgatgggttatacagcctgacgggatcgtttaacccttcactattgacggccagcggcgtgttgctgggagccgccgggctggttgcctgcggccggcgccagcaataa

SEQ ID NO: 90402 - DNA, 1329 bp, Enterobacter aerogenes
atgaaaaaccgctataaatctctggttgatcgctatgcggcagccatccgcagcggtgcgctggcggctggctgccaactgccgacccatcggcaattggtcgttgaacacggaatttcgctggctaccgcgacgcgggtctaccgtgaactggcgttaatggggctggtcagcggcgaaacgggacgcggcacttttgtgcgtgaactgagcttgccgccggggctgggtgtcgatcagcacgccattgccccggacatgatcgatcttaatttcaactctccggcgttgccggaacaaaccgttctcctgcgcgaggcattaaaaaaactgtctggcgcgggcgatctggaggcgttgttacgctatcaaccgcacgccggacgcatgagcgaacgggaaatagtggcccagcatcttaacagacagggtatggcggccagcgccgggcaggtcgctatcgttaacggcgctcagcatgggctggcggtcacgctcggcggcctgctgcgtcccggcgatgtggttgcggcagatgcattgacctatccgggatttcgcgctctcgccaggctctatcaacttgaactggttgctatcccgcacacaacacaagggccggatctcgacatgcttcgcagcctgtgtgaaaaacggcgggtaaaagcgatttacaccatgccgacgctgcataaccctctcggctgggtaatgaatctggcgcagcgtagtcaactggttgatattgcccgccagttcgatttgttcatcattgaggatgccgcctatgcgtggttgattgaaaacgcgccgccgccgctgatgtcgctggcgcctgagcgtacggtctatgtgtgcggtttttcaaaaaacatcgccaccggtttacgggttggcatggtggtatgccgcgaagcgttaatgccggcgatagagcggacgatccgcgccaccagctggaatacgccggccttaacgacggcgctggtctgcggctggatccaggatgggacgctggcccggctcgaaaccataatgcgcgcagatgcgcggcggcggcaggccatcgcccgtcaggcgctggctggcttaccaatgattggcaatgaaaatgcctggttcctttggctgccgttgggcgaggagatccgcgccgatcgcgtcgtgaaacagctgctaaccatgaatatcgctatttccaccgccgaaccgtacagcgtcggtcgtgatgcaccgcacgctttgcgtgtggcgctggcgtctccgagcctcgataaactgagcgctgcgctgaagataatgcggcctattatcgagtacggcgtttaa

SEQ ID NO: 90403 - DNA, 879 bp, Enterobacter aerogenes
gtgcacaaccgtcgcgcttccacttctatatccggttggataaacggttttatcggcgtcgctatttttagcggctcgctacccgccacccgcatcgccgtgcaggagttcgatccttttttcctgactttctgccgtggggcgattgccggggtgcttgcgctgggcctgatctggcttttacgcctgccgcgcccgcaagcgggacaatggcgttcactggcgctggttgccggcggcgtggtcatcggttttccgctgctgacggcgctagcgctgcagcgggtgacgtctgcccactcaattgtttttattgggttattgccgctagcgacggcgattttcgcggtgatccgcggcggtgagagaccgcgccctgccttttggggattctcgctgctgggcagcgtgctggtggccagtttcgcgctggccggtaatgtcgggatctccgtcgcgggcgatctgctgatgctggcggcggtagtggtctgcggattgggttatgccgaaggggcgcgcctcacccgagagcttggcgggctggcggtcatctgttgggcgctgctcctgtccctgcccctgatggtgctagcctgcggcttaacgattcccatcagcttcagtggtatcagtgcgtctgcatggacagcgctggcctatgtctcgttattcagcatgctggtaggctttatcttctggtatcggggactggcaatcggcggtattgcggcggtcggtcaactccagctattgcagccctttttcggcctggcgctggcggcactgctccttcatgaatcagtgagcccgttgatggttgtcgtcacgcttggcatcattttctgcgtgatcggttcgaagcgctttgcccgttga

SEQ ID NO: 90404 - DNA, 174 bp, Enterobacter aerogenes
atgaaacaattacttatattgcttgttgtttttgctgtatccgcctgttcaggaggttcctcatcatcctcggggatggcgccgggtcagggccttgattcgcaaacctgcatgaacaacaccattgatgctaacagcgcctgcggccattcggttgcgccacagtttaattga

SEQ ID NO: 90405 - DNA, 1185 bp, Enterobacter aerogenes
atgaccacttctgtcagcaccactcagcttaacctgcgaattatttccatcgtggttttcacctgtatctgctatctctccatcggcctgccgctggcggtgcttcccggctacatccactatcagctcgggtacagtacgctaatcgccggagtcgttatcagcctgcagtacatttcaacgctagtaagccgcccgcatgctggccgctataccgatatctgggggccaaaaaaggtcgttagtctcggcatcatctgctgcatgttaagcggactcttcaccctcgcggcggtgatgttgcaagctataccgcttctcgccgtcagcgccctgttgattggccgggttttcctcggcgtgggagaaagctttaccgccaccggggcaacgttatggggcattaaaaccgttggcgcgattcacacctcgcgggtgatttcatggaatggcgtcgcgacctacgtggcaatggccgtcggcgcgccgctgggggtgatgctcaatagttattttggcatcagcggttttgccgtagtggtagtgctggttgcgctaattggactgctctttgcccgcacgcgacaggatgtcagcgtaaccgccggagtgagagcgccattccatgtggtagtgcgcagaatctggccctacgggctgggactggcgcttgggactgtcggctttggcgtcatcgccacctttattaccctctatttttcggctcaccactggcaaggcgcggccttcaccctctctctcttcagcatcggttttatttgtatacgcctgatccttggcaacaccattacccgctacggcggcgtgccggtgtcgcttgtctgcttcgtagtggagtgtcttggattattgattatctggcaggcgccgtcggcgtgggtcgccggtattggcgcattcctcaccggttctggtttctcgctggtcttcccggcgctgggcgtcgaggcggtgaaacaggtagaagaacaaaaccagggcacggcgctgggtacctattcagcctttctcgatttggcgctgggtttgaccggcccggttgccggttgggtggcgggttattatgcgcttgatacgctgtatctgctggctgcggtggtcgtcgccatggcgtttatcctgctgcttcgggttcgtctgcaacagaccaggacgaacgtatga

SEQ ID NO: 90406 - DNA, 291 bp, Enterobacter aerogenes
atgcatcaaagtttcaaccagcgcgtccatttttactactgcattctggtcgcgctgaaaatccacgtaaaaacgaaaaaatcgggcggagcgagagggaaaaataactttcttctcaaatggttgcgtaaagcgcaggacaacaacatctttcacccagatatcaccagcgaaatcgaatggctacgcggaaaaattatccaggccggtcatgatactgaccttgagccgatgctggaattcgtctatgccaccgcccggcgcgccgaaatgctgaaagatgccgactga

SEQ ID NO: 90407 - DNA, 801 bp, Enterobacter aerogenes
atggccttaaccatcagggtattactggaaaatcgccttgcggcgcacgccgatccggcgttgactgccaaagccggacttagcctgctccttgaggatgaaaccagcaaagtgctgtttgatgccggccctgacggcagttttcttaagaatgcgcagcggatggggattaaactggataacttgaccgcggcggtattatcacacggccattacgatcactgcggtggcgtcccctggctgccggaggggagccgaattatttgtcatccacagcttagccaaccgcgctatgccgctatcagccttggccggcacgtacgcaaaatcaaaaaactgtcgcttgagctcgactattcccgctttcgcatggaatgctaccggcagccgtttgccatcagcgaacgtctgttgtggtccggcgagatcgtggtaaaccgtccgcaatcctttggcgttttagccagctctccgttgacgcctgattatatcgtcgatgaaggcgtccttatctatctttccgaccacggtctggtcatcatctgcggctgcggacatcgcggcgtagagaacattgtgcggcattgtcagaatatcaccggcatcgagcgggtccacgcgttgatcggcgggctacacctgcgcgccgcatccgtcgccagggtctggcaggtgagaagttacttacatcagctgcaggtggagaaaattttggcctgccactgtaccggcgcctggggaaaactgtggctcgccggcgcacaggcgccggctacaggggatattttgcagctagcttaa

SEQ ID NO: 90408 - DNA, 765 bp, Enterobacter aerogenes
atggcagactggaatccctcgctgtatctgaaatttgctgatgagcgcacccgaccggcggctgagttaacggcgcgtattgcgcaacagccggtcaagctggctgtggatctgggctgcggtccaggcaacagcacggccttactgcgtgcagcgtggcctgaagcgcgaattattggcgttgataattccgccgccatgctggcacaggcggcgcaagcgcttcccgattgtgagtttatcaccgcaaatatagaagactggcagccatctgagcccgcagacgtgatctatgccaatgcctctttacaatggctcacagaccatcaaacgctgttcccgcgactggccggccagttaagcgatggcggcgttctggcggttcagatgccggataactggcaagagccctctcataccctgatgcgtcaggtcgctgaagagctgggatttccggaaagtggccgacagccgctcccccgcgtccagcagtattacgacatgctgagcaacagcggctgcgaggtggatatctggcgcaccacctattatcaccctctggaatcgcaccaggcgatcgttgactggctgcaggcgaccggtctgcgcccgtatctgcaaaatcttgatgaagcagaaaagaacgtgtttttagagcgttatctgacgctgttacaacaacattatccgttacagtgtaacggaaaggtactgttattgttcccgcggctgtttattgtcgcgcgacgcctggttaacgcgtag

SEQ ID NO: 90409 - DNA, 774 bp, Enterobacter aerogenes
atgctgccattggagagacaagagaagatattggaaatcattaaagacaaaggggtggtcagtgtcgtcgaactggtcgaggcgctgggcgtgtcgcatatgacaatccggcgcgatattcagcgcctggagcagcttaacgtgctggccagcgtatcggggggtgtggcacttccgcaacgaacccgcctgctgaatgaaccttcgcatcgcgataaaacgcttatgttcccccaggaaaaggaggctattggtctggcggcgcttaagcatattcccgcgaacagcaccgtctatctggatgccgggaccacgacgctcgcactggccgaaaacctggttgagcgtcaggacttgctgatcatcaccaatgatttcgccattgccaatttgatgattgaacgcgggcaatgtgaattgatccataccggcggacgcttatgccgtgagaatcagtcgaccgttggccacctgacggcaaaaatgctggagaacctgtttatcgatgtcgcgtttatttcggcgtcatcatggaatttgcgcggactgtcgacgcccaacgaaaataaagccatcgtgaaacagactgtggcgaaggtaagtgaaaaatgtatcctgctaagcgactcatcaaaatatggaaaaatggcgaattacctgatcctgccgctgagcgagcttgatgtcatcatcagcgatgaccggcttagcggcagtgtggtaaatcagctgaatgcgcttaacgttgatgtcgaactggcgactacgcgttaa

SEQ ID NO: 90410 - DNA, 1269 bp, Enterobacter aerogenes
atgagagcaggcataattgccgatgattttaccggcgcgacggatatcgccagttttctggctaataacggaatagcgaccagcctgtttagcggcgtccccggtgaagattaccagggcgatgcgcgcgcattagtcgtgagtctgaaatcacgttctgtaccagccgaagaatctgtgacactgtcacttaatgcgctgcactggttgcaacaacaggggtgcgatcgcttttattttaagtactgctccaccttcgatagcacgagaaaggggaatatcggcccggtcaccgatgccttaatggatgcgctgggagtcgcaaccacgattatctccccggcgttgcctattaacggtcgtacggtgtatcagggacatttattcgtagaagaccgcctgctacaggagtccggtatgcgcaatcatccggtcaatcccatggatgacagcgatctgcgccgtttgatggaacgccagtctcgcggcacatgcgctcttatcaatgtgcagattctggagtccggcgaggcagccgtgcgcgacgagatccaaactttatccgcctcgggttatcgttatatcgcgctggacgcaataaacgagaaacatctgcaaattcaggggcaagcgttgcacgatatgaagctggttaccggtggttccggcttagccgcgggtctcgcgcgttgctgggccaacgccacggagccttcccttccctttagcgtcaccacgccagcggcctgtacggtagtattatccgggtcctgctctatgagaactcaggcacaggtggaaaaataccgccaactggcgccaacgctggccgtggacgtggcaggattgcttgataaacgctggacgcttgatgagtattgcggtcagatcgttgaatggctgcaccagcagtccgacgcggccatggcgccaatggtttacgccacgacttcggtcgcagagctgcacaacatccaacagcgctatggcgccgagccaagtcggttgatcgttgagacgctgttttctcaattagcaaaacaacttgcgcagcaaggcgtgagccggttcatcgtcgcgggcggagagacctccggcgcggtaacgcaagcgcttgatattcaccatttcactatcggcgccgcagtctcacccggcgttccgtggatcaaggcagattcccggccgcttttcctgctgctcaaatcgggtaattttggcgatgacaatttctttgcccgcgcgcagaccgcggaggcttgtgcatga

SEQ ID NO: 90411 - DNA, 630 bp, Enterobacter aerogenes
atgaacgagtcatccttacgccaacagatggtctctatcgctcgctctttctttaatcgcggctatgcaaccggttcggctggcaatctttccgtccagcttgctgacggcacgattctggccaccccgacaggctcctgtcttggcgagcttaacgccgaagaattgtcgcacgtgactctgagcggtgaattgctctcgggtttaaaaccctcaaaagaggtgagttttcatctcgcgctgtaccgcaacaatccgcagtgtcgcgccgtcgtccatctgcattgccattacctgacggccctatcctgcctgcaggacctggacccggctaataccctgccggcctgtacaccgtatgtggtcatgcgggtcggcgaaataccgctggtcccctatttccgcccaggcgatccgcagattggccaatggctcggcgaacgcgccgcgaagcataaggcttttttgctggctaatcatggcccggtggtggtgggtaaatcgctacgcgatgccgccgacaatctggaagagatggaagcgtccgcccgcctgttcttcacgttgaaaaacagcccggtgaactatctcgatcatcaacaaatgactgtgcttcgaggaatgcaataa

SEQ ID NO: 90412 - DNA, 780 bp, Enterobacter aerogenes
atgttgaaacttgctgccaatttatcgatgttattcggcgaaaatccgcctctggagcgcttctccctggcggccagagccggttttaatgccgttgagatgtggttcccttacgaatatcccgtagagaccgtcgcccgcgaattagagaaacatcacctcaagcttatcggcattaatactccggcaggcaataccgcacgcggcgaatggggattatcggctttacctggtcgtaaagaggaagcccgcaaagccattgatttagccattcagtatgctgcggctctgcagtgcccggcgatacatgttatggcgggcgtcaccgaagggttcgatcggcagcactgtgcggacacgtttattgacaacgtacgctatgcggcggatctggccaaaccgcataacatcaccattttgcttgaaggtttatcgccagccacccgtccgggttatttattttccagccaatatcaggcgatggaatatattcgccaggcgaaccgcgacaatattcgactgcagcttgatattttccatgcccagcaggtcgatggcaatctaacgtatttattgaaaaactataaagagtatatcggccatattcagattgcgtcggtaccggcgcgccaggagccgattgacggcgaagtggattatcaatggattttcgccgtactcgagcaggaaaaatatgatggttacgtcgccgcggaatatagtcctcgcgccggaacgcaagccggactggattgggcacaagcctggttaaacaactaa

SEQ ID NO: 90413 - DNA, 1317 bp, Enterobacter aerogenes
atgtcaaaccactctgcgttgagcctggagggcgttgcgcctgccataaatgaagagttagtgtggaagaaagttgtccgccgcacgctgcccttattaatgatttgctatattctggcctatcttgaccggatcaacgtcagtatcgctaaattacaaatgtcgagcgatctggcattttccgacaccgtttacggtatcggtgcgggaatatttttcatcggttttttcttttttgaaattcccagtaatatgatccttcatcgctttggcgccagacgtttacttggcggtttacttatttcctgggcgctcattgcgccgctgacggcatttgtgcgcacgccgctggagttttataccgtgcgcttctttttaggcgtggcggaatctggcttttatcccggggtaattctgtatctttcgttctggttccccagctatcgccgcgggcggatgttcgccctctttgctaccgccgtaccgctttccgggatcctcggcgctccgctctccgggtggattatgggccattttcatgagtacggcggtctcgctggctggaagtggctgtacattatcgaaggcgcgccatctctgctcattggcgtgctggtgatatttctgcttaccgaccgcattgcgcaggcgaaatggctgtcagatgacgaaaaagcgttgctcgaggcgcgactgcgcagcgatggcagccataagaccgaacagcatggttcgatgctggctgttttgaagaatccgaaggtgtggttactgacttttatctatttctgcctgattgccgggttctataccgtcagtttttggatgccaacgctgattcacaacgccggtgaaggcgatgtgctgaaagtcggattgttaaccgctattccttatgccgcagcgatagtcaccatgattgccgcttcgcgcagcgccgataaacgtagagaacgtcgctggcatctcgccgccatcgccgtcatgagcggcctggggatgattattgcggcgctgttcagccacgatctggtgattgcgatgatcggtttaacaattggcgccgccggcggattgagcaccctaccactcttctggagcctgccgacggcctttcttggcggcgcttccgccgcggtcggtatcgcggtaatcaactcctttggcaatctcgccggctttgttgccccgtggattatgggcctgctcaccgatatgacccattcgacgctaaccggcaccttaatcatctccgcgacgctgtttatcggcgctgcggcgatattccgtatccctgcccgtatggttaaccattaa

SEQ ID NO: 90414 - DNA, 984 bp, Enterobacter aerogenes
atgaataataaattaacgattgccgtcaccggcgccgccggatttcttggctcccaactggtcaaggcgctacttcagcgtggttcgctaagcggcccgcagggtgaaacgcaggaaatcggtagactgatcgctatcgaccgcgtggcgttacaggggattgacgatagccgtttacaggtattaaccggcgacatcagcgataacgaatggttacgtagcgcgattcccgctcaggtcgatagcgtctttcatttagctgccatcgtttcaagccaggcggaacaggacttcgagctggggatgaaaattaacgttgatgccttccgccaactgctggagcacctgcgtcagttgccgcagagcgtcaaactggtgaccaccagttcggtggcggtattcggcggcgacttgccggaaaaagtgagcgattcacaggtatggttgccgcagagttcttacggcacgcaaaaagccatttgcgatctgttactggcggattacagccgtcgcggttggcttaatggcagaagcctgcgcatgcccaccatcgtcgtgcgcccggggaggcccaatcaggcggcatcgagttttgccagcggtattatccgcgagccacttaatggggaatccgccgtttgcccggtcacggcggattcccgtctgtggctgttgtcgccccgtaacgcaattaaggctttaattcacgggcacgaactggctgaggcacagttgacggacggtcgggtgattaatctctgcgggctgtcggtcagcgtcgaacagatgatcgcggcgttgcgccaggttgccggcagtgaagtcgcgcagcgtatcaccttcacgcccgatgccgccattgaacgcattgtcaattcgtggcccggcgatttcgacacgcgctatgctcagcgtcttgggtttagcgccaaccacagcttcagcgaaatgatcgaagagtatatggcagattacctcaaatag

SEQ ID NO: 90415 - DNA, 441 bp, Enterobacter aerogenes
atgaatatagacatacgtgaacctactgaccgggattacagcgcctggcgagcgttatgggaggggtacacgcagttctataatagcccgcagccggaaaccgtcaccgaacatacctggcgacgtctgctggatccgcagtctccggtgatcggtcgggtagccgtggttgagggcgaggtgctgggatttgctatctgcgtacttcacgaaggcacctgggtaacgacgcctgtctgttatctggaagacctgtttgttgcaccaaaagcccgcgggcggggagtcgcgagaacgctgattcgaaccctgcaggctgaaggtaaaattcagggatggtcgcggctgtactggcacacccgtcacgataatcctgcacgccgactgtatgatgaattcacccctgcggacgattatgttcgatatctgatgaagctctag

SEQ ID NO: 90416 - DNA, 1452 bp, Enterobacter aerogenes
gtgaaaaccttaaaccgtcgtgatttccccggcgcgcagtaccctgaacgtatcatccagtttggcgaaggtaacttcctgcgcgcgtttgttgactggcaaattgacctgcttaacgagcatactgacctgaatgctggcgtggtcatcgtccgacccatcgccagcgatttcccgccgtcgctgagcactcaggacggcctctataccacgattattcgcggactgaatgaaaagggcgaagcagtcagcgatgcgcgtcttattcgttcggtaaaccgcgaaattagcgcctacgccgactatgacgaatttctgcgcctggcgcacaatccggatattcgctttgtcttctccaacaccaccgaggccggtatcagctaccatgccggggaccgttttgacgatgccccggcggtaagttatccggcgaaactgacccggctgctgttcgaacgcttcagccattttgccggcgccgccgataaaggctgggttatcatcccatgtgagctcatcgattataacggcgaggcgctgcgtgaactggtgctgcgctatgcgcgtgaatgggcgctgccggctgctttcgccgcctggcttgcagaggcgaacaccttctgttcgacgctggtggaccgcatcgttaccggctatccacgcgatgaagcggagcagattgaaacgcagcttggctataaagacgcctttcttgataccgccgagcacttttacctgttcgtgatccaggggccgaaatcgctggccgccgaattgcgcctcgataaattaccgctcaacgtgctgattgttgacgatatcaaaccctataaagaacggaaggtcgcgattctcaacggcgcgcataccgcactggtgccggtagcctggcaggcggacctggataatgtcggtgaagcgatgaatgacgcggaagtctgctcatttgttgaaaaagcgatataccaggagattatcccggttcttgatctgccgcgcgatgagctggaatcgttcgccagcgcggtaacaggacgcttccgcaacccctatatcaaacaccagctgttatccatcgccctcaatggcatgactaagttccgtacacgtatcctgccgcagctgctggcagggcagaagcaaagcggtaaattgccaccgcgcctgactttcgcgctggcggcattgatcgccttctaccgcggtgagcgtaacggtgaagtctacccggttcaggacgacgcggagtggatcgcacgctttcagacgctgtgggcgcagcatcgcgatggccagctttcaacgcaggatctggtaacgtcggtgttgtcggtagaatcgcactggcagcaggatctgacgcaggtgcctggactgacggcgcaggtaacggctaatctggatgctatcttacgtgacggcatgcgcagcgccgtaaaaccgctgtgctaa

SEQ ID NO: 90417 - DNA, 540 bp, Enterobacter aerogenes
atggccacacctatttcacttcgcacgctgacgcgtgaatctattcttgaatcccttccgcaattaaatgaaatcctcgccagctgcgttaacggcggggcttcggtcagttttatgcagccgttttcgccggacaccggcgagcgcttctggcagcggatggcgcaaagcgtcgccgccggtgagcggattgtgctggcggcagaaaatcaacagcggcagatagtggggaccgtccagttgattatcgaccaaccggaaaaccagccgcaccgtgccgatgtcgccaagcttttggttcaccaaaatgcgcgccggcaggggatcgccgggttactgatgagcgagcttgaggctattgcactggcgcacgggaaaaccgtgctggtgctggataccgccaccggcagcggcgcggagagcttctatcagcagtgcggctggcaaaaagcgggagaaattccgcagtttgccttaatgcctgacggggaaatgtcgggtacctcgctgttctataagatcctcccgacgacagaataa

SEQ ID NO: 90418 - DNA, 1422 bp, Enterobacter aerogenes
atgtcttcactgtcgattcggtcattcacgctatttcgcgaggatcaaccggtgcgcgatgcgctggtgttattcacgctgacgatcctgctgcactttatgggcgctatgttacgtctggtgcaggagctctcgttcttttggccgctcaatgccgttatggcaggtattttcgcacgctacgtctggctaaatcgcagctatttttacgctatttgttttgccgcgatgctggtttatgacggcctgacttcccgttggggcatgggttttgcgtcgctgctgattaacttctccaatatcgtcttcatcgtcattctggcgcaactggtgctgtgggataagcggcgtgccgattcgatgccggggccaattaacgctctgaatcttttctgttattgcctgctggcggcgctggtgtgcgcagcggttggcgcgttgggctctgttgatgttgaacgggcgacttttattccgcaactggcggactggtttagcgagcaattctcgaccgcggtcctcatcctgccgtttattctgaccctgacgctgccatcggtgctgggccgctttcgctttagccaactactgccggtgatagcgctggtgttatcgatagcgctcggcgtggcggtaggcggcgccggaagcctgactttcccgctgccggcgctgatctggtgcgcgattcgctatccattgccgctgacctgcctgttgacgtttattaccggtatcactgagattctgctggtggcaaattcgcttatccatctgtcgccggatgcgcgtccgcagccgtggcagctgttttcaacccgtcttggcatggcggcgatgctgattagcccggtgatcgtggcgaccagcgtcgaggcaatcaacaacctggtaaaacagctggcgctccgcgctgacttcgattttcagacccgggtttactctcgttccggtttgggcgaggcgctgaaacgccaggcgccgcacccggataaacagctctcggtgatggtgctggacatcgatggttttaaacgggtgaatgatacctggggccacgaatgcggtgactgcgtgctgacccagtttgcccagcgcgtgcgtgagctggcgggcgaagagggaatggtggcgcgtatcggcggggaagagtttgccgttgcggcgctgctcgataatgctcaacaatcccatctactggcggaaaaaattcgccaggggatagaatcggaaacgttcacctgggggcagcagcgtattcgtctgacggtgagtctcggcttgcagcgccgcgaagtcggtgaaggacggatcgccgagctgtttaatcagctgctgatggaagcggatgacctgttagtcaacgccaagcaggccgggcgcaatcgtgtttgcgtgcaggcgctgcccgacggcgtatga

SEQ ID NO: 90419 - DNA, 369 bp, Enterobacter aerogenes
atgtctgcaatggaaaatctgttcgcccggcttgggcgttcaacgttccgctctcgtttccacctcggggtgaaagagcggcagtattgttatgataaagggccggagattatcgacagccacgcggcggattttatcgctaaacggctggctccggcgcagattgctaatgacggtaagcagacgccgatgcgcgggcacccggtatttatcgcccagcacgctacggcgacctgctgccgcggatgtctggaaaagtggcatgcgatcccgcgcgggcgtgaactgagcggcgaggagcagcgttacgtcgtacaggtgattcaccactggctggtgatggaaatgaacgcgattaccaaccgttaa

SEQ ID NO: 90420 - DNA, 927 bp, Enterobacter aerogenes
gtggcgacggttattaataatgcaatgctggatgccgttctggcagaaatcaggccgctgatagggcgcggcaaggtagcggactacattccagccctggcgcgcgtcagcggcaataaactgggcgtcgccatctgtacggttgacggccagcactatagcgccggcgatgcccacgaacgtttctcgattcaatctatctcgaaggtgctcagtctggtggtggcgatgaaccattatcaggaagaggagatctggcagcgcgtcggtaaagatccttccggccagccctttaactctttactgcagctggagatcgagcagggcaaaccgcgtaatccttttatcaacgctggggcgttggtggtctgcgacatgctgcaaagccgcctgagcgcgccgcgtcagagaatgctggagatcgtgcgtcggctgagcggggtggacgatatcgcctatgattcggtggtcgcgcgctccgagttcgaacactccgcgcgtaacgccgccatcgcctggctgatgaaatccttcggcaatttccataatgatgtcgccacggtgctacaaaactatttccactactgttcgctggaaatgagctgcgttgagctggcgcggaccttcctgtttctcgccgatcgggggattgccccgcatctggcgaacccggtcatcgcgccgattcagtcacgtcaggttaacgcgctgatgatgaccagcggcatgtaccagaacgccggcgagtttgcctggcgtgtcgggctgccggcaaaatccggcgtcggcggcggcattgtggcgattgtgccgcaggagatggcgattgcagtgtggagtcctgaacttgatgaagcgggtaactcgctggcggggatcgccttactggaaaaactcacccaacgtttaggaagatcggtattctga

SEQ ID NO: 90421 - DNA, 1386 bp, Enterobacter aerogenes
atgaatttatctgccacccatgcggtttccgtgaacccgaccactggtgaagtcgtgtcgtctctgccgtggtcaaccgaacaacaagtggattcagccattgccctggcgcaacagggttttcgccagtggcgccaggtaacggtcgccgatcgtgccgccgcgctgcgtaaagtcggcagcgcaatgcgcgcccgcggcgaagagctggcgcaaatgatcagccttgaaatgggtaagcccatcgcccaggcgcgcggcgaagtgagcaaatcggctaatctctgcgactggtatgccgaacatggcccggcgatgctggcgaccgaagccacccaggtagaagataataaggcggtgattgaataccggccgctggggccgattctggcggtgatgccgtggaacttcccggtctggcaggttctgcgcggcgcggtaccgattctgttggcagggaatagttatctgctgaaacacgcaccgaacgtgatgggctgcgcgcagctgctgggcgaactgtttgccaaagcgggtctgccggctggcgtctttggctggatcaacgccaccaatgaaggcgtctcgcaaattatcaatgatgatcgtatcacggcggtcacggtgaccggtagcgtacgcgccgggcgggcaatcggcgctcaggccggcgcagcgctgaaaaaatgcgtgctggaactcggtggttccgatccctttatcgtactcaacgatgccgatctggacgaagcggtaaaagccgccgtcatcggccgttatcagaacagcgggcaggtctgcgcggcgtcgaaacgctttatcgttgaggcgggtatcgccgacgcttttactaaaaaattcgtggccgcggtggcggcgctgaaaatgggcgacccgcgcgacgagcaaaattacatcggcccgatggcgcgttttgatttgcgcgatgaactgcatcaacaggttgaagccacgctgaaggaaggggcgacgttattgcttggcggcgagaaaatcgccggcgccggcaactactacgcgccaacggtactggccaacgttaccccggagatgaccggtttccgtcaggagcttttcggcccggtggctaccatcagtgaagcccgcgacgccgcgcatgcccttgaactggctaacgatagcgagtttggcctttcggcaaccgtctttacgtcaagcagcgcggaagcggagcgttttgcgcgtggtctggagtgcggcggggtgtttatcaatggctacagcgccagcgatgctcgcgtggcgttcggcggcgtgaagaagagcggctttggtcgggaactgtcgcatttcggtttgcatgaattctgcaatattcaaaccgtatggaaagaccgccgctaa

SEQ ID NO: 90422 - DNA, 879 bp, Enterobacter aerogenes
atggaccttacccaacttgagatgtttaacgccgtcgccagtaccggcagtattacccaggccgcgcagaaggtgcaccgcgtcccgtcgaatctgaccacccgcattcgccagctggaggccgacctcggcgtcgagctatttattcgcgagaaccaacggctgcgtctgtcgcccgccgggcacagttttttacgctacagccagcaaatcctggcgttagtcgatgaagcgcggatggtggtcgccggcgatgagccgcaggggctgttttccctcggctcgctggaaagcaccgctgcggtgcgcatccccaccacgttagcccttttcaaccagcgttacccgaagatccacctggcgttgtccaccggcccttccggcaccatgattgacggcgtactggagggcgcgctcagcgcggcgtttgtcgacggtccactggttcatcccggtctggaggggctaccggtgttcccggaagagatgatgatcgtcgccccttatggccatgcgccggtaacccgcgccagcgaggtcaacggcgcgaatgtctacgcatttcgcgccaactgctcctaccgccgtcattttgagagttggtttcacgccgaccgagcgacgcccggaaggatccatgaaatggagtcctaccacggtatgttagcctgcgtaatcgccggcgctgggctggcgctgatcccacgcagtatgctggagagtatgccaggccatcagcaggtttccgcctggccgctcgccgaagagtggcgctggctgacgacctggcttgtgtggcgacgcggcgcgaagacgcgccagctggaggcatttattgaattgctgaacgaggaccgtcaggcggcaagcgcgacatga

SEQ ID NO: 90423 - DNA, 762 bp, Enterobacter aerogenes
atgaagggatataatcggttagagcagattatggacttcctgaaaagccataatctggtaacggtcgaccaactggttgcggtaactaacgcctcgccggcgaccattcgtcgcgatctgattaaactcgatcaggaaggggtcattagccgtacccacggcggcgtgacgctcaaccgatttattcccacgcagccgacgacgctggaaaaagcgcagcgtagccctcaggagaaatacgccatcgccagggcggcggcgtcgcttatcaaggctggcgatgccattgtgctggacgccggtaccaccatgattgaactggcgcgacagattacgcatctgccgctgcgggtcatcaccagcgatctgcatatcgcgctgtttctggctgaattcaaacagattgaggtgacgattatcggcgggcgcatcgatgacagcagccagtcgtgtattggcgagcatgggcgacgcttgctgcagaatgtgtggccggatctggcattcgtcagctgtaacggttgggatttgcaaaagggcattaccgcgccgacggaagagaaggcggcgctgaagcgcgatctgatcgccaacgcccggcggcggatcctgctggccgacagttcgaaatacggcgcctggtcgctgttcaatatcgcgcacctcgactcactcacggacatcatcaccgatgcgcatttgccaggggagacccgtgatgcgctccaggaactctcgccgcggctgattatcgccgattaa

SEQ ID NO: 90424 - DNA, 987 bp, Enterobacter aerogenes
gtgtctaacatgattgcggtaacgatgggcgacccggcgggcattggtccggaaattattattaaatcactgagcgaaggggaactgagcggtgcgccggtagtggtcgtgggctgcgcgcagacgctgcggcgaatcctggcgctgaacattaccccgcgtgcggagttgcggattattgagcacccgagagaagcgctgttttcacccgcgacgattaacgtgattgatgaaccgttaagcgatccgcaggcgttgcggccaggcgaagtccaggcacaggccggcgatttggcgtatcgctgcatcaagcgcgccaccgcgctggcgctggcgggcgaagtcaaagctatcgccaccgcgccgttgaataaagaggcgttacatctggccgggcaccatttccctggacacaccgaactgctggcccatctgacgcagaccaaagattacgctatggtgctgtacaccgataagcttaaggtgatccacgttaccacccatatcgcgctgcggcgtttcctcgataccctaagccagtcgcgggtggagacggttatccgggttgccgatgattttttacgccgcgtggggtattcgcagccgcgcatcgcggtagccggagtgaacccgcacgccggtgaaaacggtctgttcggcgatgaagaaatccgtatcatcgccccagcggttgccgccatggaggcgcagggtatccatgttgtcggaccgtgcccgccggacaccgtcttcatgcagtgccacgaaggcatgtacgatatggtggtggcgatgtatcacgatcaggggcatattccgctcaagctgcttggattttatgatggggtgaatatcaccgccgggctgccgtttatccgcacgtccgcggaccacggcaccgcctttgatattgcctggacaggtaaagcgaagtctgagagcatggcaacctccattgagctcgccatgcaaatcgcacaggaataa

SEQ ID NO: 90425 - DNA, 1236 bp, Enterobacter aerogenes
atgagctgcggcgataaccctgttctggtgctggcagatgactttaccggggccaatgatgctggtgtcagtttggcggaagcgggcctggcggttgaggtggcttttaacgccggccatcagtccaccacccgggcgttggtcctcaatagcgatagtcgggcgctttccagggcgcaggctgcggagaaagtgaacgcagtactccgtgatgcggcaaatttcgccgccgtctggcaggtgaagaaaatcgactccaccctgcgcggcaatcccggcgcggaactggaggcgatgatgcgtgcgcggagctgctctgtcgcggttgtcgcgcctgcctttccgggtgcagggcgtataacccgcggggggcgctgttatgtccacggcgtagcgcttaatgaaacagaattcgccagcgaccccaaaaccccggtcactagcgccgatattgggcaattgctcgccatgcagagccagctgccgtgccgttcgcttgacgtgcgacagctggaagccgccctcgcggaagagagcgaccaaccacgagtgttgattattgatgccgaagaagacgagcagctggatgaggttatcgccgcggtagccagccgcgcgcggcaaacgctgctggtgggctctgcggggatctgcgaggcgctggcgcgctatctgcgccgggatgcggccgggccgttgttggcggtggtcggctccatgagcgaaatagcacaggctcaggtcgccgctttggccggccatccgcgggtcgagcggatcgggattgataccgcccgcgcctttaacggcgacgccctggccgatgcccggcgaatcgccgcggtgcttgcggcaagtcatcattgcgtggttaccacctgcgcggacagcgctgcccggcacggtattgaggcgcagtgccgtgaacgcggggtgagccgcgcgtcgctgggagaacggatctgcgcttatctcgcgcaggtcacccaacttgccgttgagttacatgcgcccggggcgctttatttgtccggcggcgatgtcgctatcgccgtcgctcatgcgctcggcgcgcaggggtttcatataaccggccgggtggcgcaatgcgtgccgtacggccattttctcggaagtcgctggccgcgtccggtgatgaccaaagcagggggattcggtacggagaccacgctgcgggatgtcgtgaattttattgaggagaaactgagtgtctaa

SEQ ID NO: 90426 - DNA, 1167 bp, Enterobacter aerogenes
gtggcgacgattaacagcacgattatcagcggcgcgggcgccatatcagccctgaagccagtgctggcaggtaaaaagcgcattttactggtcaccgatgcgaacgttggtaagttggcagcgaccaaacagatccaacatctgctgggcgagaataacgttgatgtgaggatcgtggattccgtaccggcagagcccagccaacatgacgtggcgcaaattgttgaccaactcgcgggagcgcaaccggagatggtcgtcggtatcggcggcggcagcgtcctcgacgtggcgaagctgctctcggtattacttcatcccgcctcccctgcgctcaacgcgctgatcgacggcgagaaaccgcgcctgcgtctgacatcgctgctgatacccgccaccgcaggcaccggctcggaagcgacaccaaacgccatcctggctattcccgagcgtaataccaaagtggggattatctccccgctactgctgccggatttcgtggctctgttgccggaactgaccaccagtatgcctgcggccattgccgcctccaccggcatcgatgcgctgtgtcatctactggagtgctttacttcaaccgtcgctaacccggtgagcgataacgccgccttaatcggcctgcataagctggtgcggcatattgagcgttccgtaacccacccgcaggatcttacggcgaaactggagatgctatgggcctcgtactacggcggcgtggctatcaatcatgccggtacgcatctggtgcatgcgctctcctacccgcttggcggcacctggcatctgccgcacggcgtcgcgaacgccattctgctggccccctgtatgcaggtcgtacgcccgcacgcggtggataaattcgcccaggtctgggatctgatcccggacgccgatctgactttgaataacgaagagaaatctcatgcgctggtctgctggctggcgcaactggtgaaacgcctggcgctgccggacaacctcgccgcgctgggtgtaccaccagagagtattgaaacgctaagcgccgcggcgctggaagtaaaacgattaatgaataatgccccatgcagcgtgaaccaggacgaagtccaggcgatttaccagacgctgtttccacagtcatctcatcagggagaagagaaataa

SEQ ID NO: 90427 - DNA, 885 bp, Enterobacter aerogenes
atgcatcattccattcgcggcgtgttaaccgccattgttaccccctttaccgccagcggtgaacttaatttgacggcgctgtgccaacaggtagaacgacagctggccgccggtaatggcattttttgcggcggaaccaacggcgagtttttcgtcctcaatgaagcggaaaaaatagctgttgccgaaacctgcgtcgaggcggttgccggacgcgcgccggtggtggcgcatattggcgaagtgtcgacgcgggaaaccattcgtcttggccagcagatagcaaagtcaggcgtcgacgcggtgtccgtcatcaccccgtggttcgtgccgctgaaacaagatgagctggtaagccactacacggcgatcgccgatgcgctgagcgtaccggtatttctgtataacatcccggcgcgcaccggtaacaccattgaaccgcaaaccgcacgtcagctggctgcgcatggcaacatcattggcatcaaagatagcgccggtagttatgagagtcttaaggactttcttgatgcggtgaaagatatcgacggttttaatgttctgaacgggccggattcgttgattcatcagggtttcgttgacggttgttcagcctgcatttccggattggctaacgttgcgccacgggagattaacgcgatttggtcaaccttccaggcaggcgatattgaagcctccaggctggcgcaggaaaacgtcaccggcctgcgtaccgatctctacaaagtcgccttttcccccgccgcggtgaaaaaagcattgcagctgatgggccatgaggtcggcgatagccgctacgcggtgcagtttagcgcatctcaactgcagcaaatacgtggaatcatcgcgcagtatcttaattaa

SEQ ID NO: 90428 - DNA, 1413 bp, Enterobacter aerogenes
atgaatcattttaccactgaagatacctttattattgttggcattgtcatcgcctatatcttatttaccacctggctgacgttccgtattagaagtaaaaactccggggattttatggagggctcgcgcgcgatgccggcctttattgtcggtatcctgctgatgtcggaatatatcggcgccaagtccactatcggaaccgcacaggccgcctttgagagcgggattgccgcctcctggtcggtgttgggcgccgccattggctttccactatttggcctgatactggttaagcgcatctataacactggcaaaattactatttccggggcgattgccgagaaatacggcaccagcaccaagaatattatttccatcattatgatttacgccctgttgctggtgaacgtcggtaactacgtcagcggcgcggcggccatttctacggtattaaaaatcaatttacccctcgcggcgtttattaccgccattgttagtactttctattttgcctttggcggtatgaaaggcgtagcctgggtcaccatgctgcacagcgcattaaaatatgccggtctactcattattatgggcttcgcgctggcaaaaaccggcggtttcacgccgatgatcgagaagatgccggattactactggacctgggatggcaattttggcgccggcacgatctgcgcctggcttatcggcaccatcggctccatcttctgtactcagtttgtcattcaggctatcagctcgacaaaaaacgtaaaatcggcgaaacgctctacctggattgcctttttcttctgcctgcctatcgccttcgcgatcgccattatcggcgtggcggcgaagtttttacacccggaaatcaacagcctgtacgccctgccggtgttcctgcaagatatgaacccgtggcttgccgggttagtgacaacgtcacttattgcttcaattttcgttagcgtcagtaccgttgccctggcgattgcctcgctggtggtaaaagatttttacgtgccgtggcgcaatccaacgccggagcaggagtttaaagccacccgttgggcctcgctgatcatcggttttctgccgcttatttttgtgctgctggtaccggaagtgctgaagctctccttctttacccgcgccatcaggctctctatcaccgtcgtcgcggtcatcgccttctatgcgccgttctttaagagcgcccgcggcgcgaacgctggccttatcggcgcctgcgtggtgacttcggcgtggtatttgctcggcgatccgttcggcatcaataacatgtacatcgcgctgatcaccccggccctgattatggttatcgaccgcctgatccccaataaagcgcaacaatcatccccggcccccattgaacaacgtggagtgtaa

SEQ ID NO: 90429 - DNA, 1167 bp, Enterobacter aerogenes
atgaccaccaccccaacttttgacggcgtaattcgccaacaccaacaggatcctcatctggcatgggcaatgttgccctccggctgcccgcaaaaccatgccgccaatcttttgccgctgcccgatggcacgctgctgtgcgtatggttcgggggttcacaggaaggaaaagcggatatttcagtctggggggcgcgtttagcgccgggcgccacaacgtggagcgaagcagtaaagttatccgacgatccgcagcgttcggaacagaacccggtgctgtttcaggctccagatggcgtgctgtggctgttatggaccgcgcaacacgccggcaatcaggacaccgctattgtgcgttatcgccagtcgcgcgatggaggaaagcactggggcgcaatcgccaccctgctcgatgaacccggcacctttattcggcaacccatcagcgtgatgcccaacggcaactggttgctgccggttttctattgtcgtacccggccgggggagaaatgggtcggtaacgatgatgtgagtgcggtaaaaatctcagccgatggcggcaagagctggcgcgacgtggcggtaccgcagagcctcggctgcgtgcatatgaatatcaccccgctggccgatggctcgctggtcgccttcttccgcagccgctgggccgatcatatctggtacagccggtcgacagattttggcgaaagctggtcagcgccgatccccaccacgctgccaaacaataactcgtccattcaggttaccacgttgagcaacggcgatctggcactggtgttcaataacatgagcgcagcaggcgccagcgagcgtcgggcatcgttatacgatgaaatagaagatgatgacggtcgtaaagagcctgaacgcactggcaaaaccgccttctggggcgcgccgcgtgcgccaatgaccgtggcgatttccgctgacggcggtaaaagctggccatggatgcgcaaccttgatgagggcgacggctactgtatgaccaacaattccgaacaaaaactgaaccgcgaattgtcctaccccagtattaaacagggtgaagacggtaatttacacattgcctatacctggtaccgacaggccatcaagtatatccgcgtatcgccgcagtgggtgaaaggagaaatcgcatga

SEQ ID NO: 90430 - DNA, 474 bp, Enterobacter aerogenes
atgatcatcggtaatctgaacgccctgcctcaggcggggttgccactggcgttacggcaaatcctcagccgtcctgaatgttctcttgccgccctgacagcccgtgaagatggtcgctttcagcctgctgatagcgactggtactgcaccatcggcaccgcgcaaacccaggcggcagaacagcgacataccgaataccaccaccagtgggccgatattcaggtcattttaagcggaaaggagactattcatgccggtacgctgtacagcggccaacccgacgatgaacaacgcaaaccagatctctttatcagccagcagacgccgcaaagcgtcacgctgcatttgcatgccggcgacttcgcggtctttctgcccggcgaaccacaccaggcgctatgcgcctttgcaacacccgccccggtgaggaaagcggtatttaaagtaccgcgcagcatgctggaggcgccatga

SEQ ID NO: 90431 - DNA, 678 bp, Enterobacter aerogenes
atgaagcaggcactggtcacaggcgccagttcggggatcggcgcggcgattgtggggcaactgctggcggagggctggcaggtgctcgggctaagccgctccgcgccgccattcgctcatgaaggcttcaggcatctggcagtcgatttgagcgaccgccaggagctggttgatgctctgtcgtcggtaccgacgccgcaggcgattatccatgccgccggtatgatggcggcggcgccgctaggagaacttgacgcactgcgtggcgagacgttatggcgtctgcatgtggatgcagcgcagaccttagccaaccgctttgcgcccgttatgagccgcggcggtcggattatccttttgggtagccgaacctctcgcggagcggcaggccgttctcagtatacggcaaccaaagcggcgctggtggcgctggcgagaagctgggcggcggaacttgccgcggcgggcattaccgttaacgtggtcgcccccggcgccaccgatacgccaatgctgcgccagccagggcgggagagttcgccgccgaagacgccgccgctcggtagattgattaagccacaggaagtggtgtcgctggtgagctggcttcttagcgaagaggccgcggccatgaccggacaagagctggtaatgtgcggcggcgcctcacttagttag

SEQ ID NO: 90432 - DNA, 798 bp, Enterobacter aerogenes
atgaaagaaattagtttttacctggtcgatgccttcagcgatcgcaattttggcggcaacgcggcggcggtgtgcccgctcagcgaatggctgcctgatgaaacgcttttaaaaatggcgcagcagcataatcaatccgaaacggcgttttttgttcgtaccgacagcggctatgagctgcgctggttcactacccttgatgagattaatctctgcggtcacgccaccctcgcagcatcgcacgtgatttttgaatatctcgatcacccttcggcaaccatcgtattcagcacccgttttgtcggtgaactgcgggtgacgcgcagtggcgattggctgacgctggatttccccgcctggcaaacgacaccggtgcgcgacgtgccgccgtcactgttcgccgggttgggtatcgatgacgcgctggaggtgcgggaagggcgtgattacctggtggtgctacgcgaccgggcgcaggttgaagcggtacgtccgaatatggcgctgctggaggcgctggataagcggatttgcatcagcgccgccgacgaggagtacgattttgtcagccgatttttctgtcccggtgatggggtgccggaggatccggtaaccggttcaacccacagtatgctgatcccctactggggagcgaagctcaataaaaccgacctgttggcgcgccaggtgtcggcgcgcagcggcgagctgcgctgccagtggcgcgatgaccgcgtattgattagcggccaggcgaccacctatctgcgcggcacggtctatttgcgcgaaagttaa

SEQ ID NO: 90433 - DNA, 1200 bp, Enterobacter aerogenes
atgcttacaaatacggtctcacgcagagtcgcgtggctgcgggtcgtcacgctggcaattgccgcctttatctttaataccacggaatttgctccggtcggtttgctgtctgatatcgccgacagcttcggcatggaaacggcccaggtcgggatcatgctgaccatttatgcctgggtagtggcattgatgtcgctaccgttcatgctgctgaccagccaaatggagcgccgtcgcctgctcattggcctgttcgtgttatttatcgccagccacgtattgtcatttttcgcgtggaacttcacggtgctggtggtgagtcgaattggcattgcgttcgcccatgcggtgttctggtcgatcacctccgcgctggctattcgtatggcccctcccggcaagcgcgcacaggcgctaagtcttatcgccaccggtaccgcgctggccatggtgttcggcatccctattggccgtatcgtcgggcaatatttcggctggcgcaccaccttcctggccattggtcttggcgctttagcgacgctggtgtgcctggcgaaactattgccggcgctgccaagcgaacattccggttcgctgaagagcctgccggtgctgttccgccgtccggcgctgctcggcatttatctgctgacggttatcgtggtgaccgcgcactacacggcatacagctatattgaacccttcgttcaaaccgtcgctggtcttagcggtaacttcgccaccctactgctgttagtgctcggcggcgcaggtattatcggcagtattgtcttcggcaagctgggcaatcaacatgcttccgggctgattaccaccgctatcggcctgctgctaatatgcctgctgttgctgctacccgcctcaaggaacgccaaccagctgatgctgctcagcgtgttctgggggatcgcgataatggtcatcggcctcggcatgcaggtgaaagtgctggcgctggcttcggatgctaccgatgtcgcgatgtcgctattttcgggtattttcaatattggtataggcgccggcgcgctggtcggcagccaggtgagtacgcagctgtcgatgtcggcgataggctacgttggcgcagtgccggcgctggtggcgctggtctgggcagtgatgatttttcgccgctggccaacgccgcttgatgaacagcaagcgcatcactcatga

SEQ ID NO: 90434 - DNA, 669 bp, Enterobacter aerogenes
atgctggaactctttaaagcaatagggatcggtctggcggtgattttaccgctggcgaacccgctcaccaccgtggcgctgttcctcggcctggcgggcaatatgaacaacgccgagcgtaaccggcaatcgttgatggcatcggtgtatgtcttcgcgatcctgatggtggcgtggtatgccggccaggtggtgatgaataccttcggtatttccattcccggtctgcgtatcgccggcgggctgatcgtggcttttatcggttttcgtatgctgtttccgcagcagaaagcccatgattcgatggaagcgaagatcaaatcggaagaactgcaggatgaacccacggcgaatatcgccttcgtgccgttggcgatgcccagcaccgccgggccgggcaccattgcgatgattatcagctccgcctcgacggtgaagcacggcgtcgatttccctgattgggtcgtattggcggcgccgccgattatcttcgcgctggtggggatcattctgtggggctgcctgcgaagttccggggcaatcatgcggctggtggggaaaggcggcatagaagcgatttcccgcctgatgggtttcctgctggtctgtatgggggttcagttcatcattaacggcgtgctggagattatcaccaactatcacgcctga

SEQ ID NO: 90435 - DNA, 435 bp, Enterobacter aerogenes
atggaaaacaccaacaatctgttcaacgagatgatccctctcggccgattgatccagatggttaaccagaaaaaagatcgactgctcaacgactacctttcacccatggatatcaccgctacccaatttcgggtgctctgttccattcgctgcgaggtatgtacgacacccgttgagctgaagaccgttctgtcggtcgatccaggcgcaatgacgcgcatgctcgacagactcgtctgcaaaggctggatagaacggttgcccaaccccaatgacaagcgcggtattctggtgcaactgactccagaaggcgcagccctttgtgagcactgtcatcaggttgtgggtcaaaaattgcaccaggaactaacaaaaaatctaacggcagacgaagtggtcatgcttgagcaactgctcaagaaagtcctgccgtaa

SEQ ID NO: 90436 - DNA, 384 bp, Enterobacter aerogenes
atgtccagacgcaataacgacgccatcactatccatagtattttgtcgtggatcgaagagaacctggaatctccattgtcgctggagaaagtttcggagcgctcaggttactccaaatggcacctgcaaagaatgttcaagaaagagaccggccactcgctgggccagtacatccgcagtcgtaagctgacggagattgcgcaaaaactcaagcagagcaacgagccaattttgtatctggctgaacgttacggttttgaatcgcaacagacgctgacgcgaacgtttaaaaactacttcgatgttccgccgcacaaatatcgcatcaccaacgttccgggagaatcccgctacctgatgccgctaaataattattgttgttaa

SEQ ID NO: 90437 - DNA, 207 bp, Enterobacter aerogenes
atgaaattattcgctaccgccgccatcgtgctaatggcgctggctgcaggccagagttacgcggagcaaaccaccactccggttcgccacaataaccgggatgcgatgattattccttcggaacataacgactcgccgtttgattttaatcacatggctgccggcaatgataaatcggatgagctgggcgtaccgtattacaactaa

SEQ ID NO: 90438 - DNA, 915 bp, Enterobacter aerogenes
atgacgcgcagagatggactgctggcaatgctggtagtggtggtgtgggggcttaattttgtggtgattaagctcgggttacacaatatgccgccgctgatgctggcggggttacgttttttgttggtggcgtttccggcgctgctgttcgttgcgcgacccaaaataccgctgcgtctgctgctgggctacggcctgagcatcagtttcggccagttcgcctttttattctgcgcgatcaacctcggtatgccggccgggctggcttctctggtgctgcaggcgcaggcctttttcacaatcgtgctgggcgcttttgtctttggcgagcggttacagggaaagcaggtcgccggtatcgcgctggcgatttttggcgtattggtactggttgaggccagcctcggtggccagcacgtgccgctggtcggttttatgctgactctggcggcggcgtttagctgggcctgcggtaacattttcaacaagaagattatgtctcagcagcacaagccgccgattatgtcgctggtggtgtggagcgcgttgattccggttttaccgtttatgctggcgtcgtgtattgttgatgggccgcaggcgatggcggaaagcctggtgaatatcgacgccacgaccgtgctatcgctcatgtatctggcgtttgtcgccactattgttggttacggtatctggggagcgctgctgggacgttatgaaacctggcgggtggcgccgttgtcgctgttggtgccggtggtcgggatggccagcgcggctctgctactcggtgaacggctcaatggcctgcagctgttgggggcggcgctgattatgggcgggctctacattaacgtgtttggtctgcggctggtgcgcccgggcgcggcgcgggataaaaaagccccgcgttag

SEQ ID NO: 90439 - DNA, 1185 bp, Enterobacter aerogenes
atgacaaccaccatcaggcgctcaacggtagcgctgttggcgtcgtcgttgctgttaaccatcggccgcggcgcaacgcttccttttatgacgatttatctcacccgtcggttccagctggaagtcgatgtcattggctatgcgctctccgtcgcgctggtcgtcggcgttatcttcagcatgggcttcggtattcttgccgataagttcgacaaaaaacgctatatgctgatcgccatcgtggcgtttatcgtgggctttatcgccatccccgcggtcaatagcgtggcgctggtggtgttctttttctcattgatcaactgcgcctattcggttttctccacggtactgaaagcctggtttgccgacgtgctgacgccggagaaaaaagcgcgcatcttttcgctcaactataccttcctcaatatcggctggaccgttgggccgccaatcggcaccctgctggtaatgcagagtattaacctgcctttctggctggctgcgctgtgcgccgccttcccgctggtgtttattcagctcttcgtcgagcgcacctctgccgccagtgcggaaggcatcacgccgcagtggacgccgtcggtgcttttgcgcgaccgcgccttgctgtggtttaccttttccggcttgctggcgtcatttgtcggcggctctttcgcctcctgcatttcgcagtatgtgctggccgcaggcaccagcgacttcgcggaaaaagtggtcgcggtagtgctgccggtcaacgccgcggtggtcgtcgcgttgcaatatgccgtcgggcgacggctttcggcgcgaaacatccgcccgctaatgaccttcggcaccctgtgctatgtgttgggtctcggcgggtttatcctctccggtaataatctgctgatgtggggcatttccgccgccatctttacccttggcgaaattatttatgcgccgggcgaatatatgctgatcgatcagattgccccacccggtatgaaagccagctacttttccgcccagtcgttaggctggttaggcgcggcgttcaatccgatgctaaccgggataatcctgacccatctgccgcattggtcgctattcttcattttaatgctggcgatagtcgccgcctggctgatgattttccgcggcatgaacgtgcgtccgtggcaaaccgtacaggcgtaa

SEQ ID NO: 90440 - DNA, 471 bp, Enterobacter aerogenes
atgaacagcagtacccgagtcaaacaattacgtctgcagcgcgcctggtcccaggaacagcttgccgaactggctggcgtcagcgttcgcactatccagaggatcgaaaacggcgatcgcccggggttagaaaccctgagcgctctggcggcagtgtttgagataaatgtggccgaactcagcgacgatgcgcctgtcggtcacgaagcgtcgctcgatttacggatcgaagaagcgaaaagccgtctgcatcaggagagccgttttttccgctcgctaagcgtggcggtaacggtttgcgttttgttgctggtgattaattatttcacccaaccggatgtctactggtcagtgtgggtggcgatcgtctggggtgcattattgctactacggggattacgtctgtttgtctttgccgggtggatccgccactggcgacaggcacgcctacagcgcctgctgcgcaaatag

SEQ ID NO: 90441 - DNA, 1104 bp, Enterobacter aerogenes
atgcaacgtcaccaggccccgttccgtgcagatattgtcggcagttttttacgtcctgacgctattaagcaggcgcgcctgcagctggcgcaaggcaatattgatgccggccatctgcgtgaaattgagaatgaagccatccgccaactggttcagcagcagtgcgattgcggcctgcacgtggtgaccgacggtgagttccggcgcgcgtggtggcacttcgacttcttcgacggtctggaaggcgtggaacgttacgattcagagaaaggtattcagttcaacggcgtacagaccaaagcgcacggcgtgcgcgtgaccggtaaactgggcttcggcaaccatccaatgctggaagatttccgctttttgaaaagcgtcagcggcaatgcgcagccgaaaatgaccatccccagccccagcgtgctgcacttccgcggcgggcgaaaagatatcgatagcacggtatacccggacctggccgaatactttgacgatttagcaaccacctggcgtgacgcgatccgcgctttctatgacgctggctgccgttatctgcaactcgatgacaccgtctgggcctatttatgttcagacgaacaacgccagcaggtacgcgaacgtggtgacgatccggacgaactggcgcgtacctatgcccgggtgctgaataaagcgctggaagggaaaccgcaggatctgaccgttggtctgcacgtctgtcgcggtaacttccgttcgacctggatttcagagggcggctacgagcccgtggcggaaattctcttcggcggcgtcaacatcgatgcgttcttcctcgaatatgataatgaccgttccggtgattttgccccgctgcgctttatccgaccaggccatcagcaggtggtactggggctgattaccaccaagaatggcgaactggaaaacccggaaggcgtgaaggcgcgcctgcaggaggcggcgcagtatgtgccgctggagcagatttgcctgagcccgcagtgcggctttgcctccaccgaagagggcaattcgttaagcgaagcccagcagtgggataaagtgcggctggtcacagggatcgccgcccaggtctggtaa

SEQ ID NO: 90442 - DNA, 414 bp, Enterobacter aerogenes
atgagtgttgtaagccaatttacaccagccgccccggtcgatgccgctgcctggtttgcccataaattgagtttcgaaaccgactgcgcggatgtccatcacgccatgcagcacggcgaacaggactttgtgctactgcacgtgattggcagtcatgatgtgtttgcccgtcgccacctgcctggcgcgctgcatctgccgcatcgcgagatcaatgccgcgcgaatggcgcagtggccctcggaaacgctgtttgttgtctattgcgccgggccgcactgcaacggcgcggatattgccgccttaaagctggcgcagcttggcagaccggtaaaaatgatgctcggcggcctgaccggttgggcggatgaggggttcgcatttagcctcagcgaagccagcaacatgaaataa

SEQ ID NO: 90443 - DNA, 1002 bp, Enterobacter aerogenes
atgacagaaaacgctgaaatcctgacaacccgcaatgtgacactgtcaccaccaaaagtcgtcgttctggcctatgacggcctgtgtacatttgaattcggcgtggcggtggagatttttggcctcccgcgcccggaaatgggggaaagctggtatcggttcgcggtcgccgccgtcgatgatggcgagcttcgcgccaccggcggtatccgtatcgtcagcgatggcgggctggcgctgcttgatgaagcggacaccatcgtggtgcccggctggcgtggtatagaaagcgatgttcctcaagcgttgtgccaggcgctggcggctgcgtacgcgcgcggctgcagaatcgtttctatctgttccggggtgtttgtgctcgccgccgccggattgctcaatgggcggcaggccaccacccattggcgttatactgcccggctgcagcagcgttttccgttgattgaggtggtggaagacgtgctgtacgttggcgatgcgcggctgatgacctccgccggcagcgccgcgggcatcgatctctgtctgcatctggtgcgcgaagatttcggccatgaagcggcgaatatcgtcgcacggcggctggtggtgtcgccgcaccgcgacggtgggcaggcgcagcaggtgattcgcccggtggctacagcgcgtgaaagccagcgcctcggccagctgtttgattacctgcatcagcatctcgctgagagccataccctcgcctcgctggcgcaacggatggatatgagcccgcgcactttcttgcgccgttttcaacaggcgaccggcaaatcaccggcccgctggctgctcgatgagcggttgcttcgcgcccgccagcagctcaccgacagccgcctcagcatcgacagaatcgccgaaatctgcggtttcgctaatgccagtacgctacgtcatcactttcgccagcatttcgccgtgagcccgctgcaatatcgaaaaaagttttccccccgtcagtga

SEQ ID NO: 90444 - DNA, 216 bp, Enterobacter aerogenes
atgaaaaaagagtgtcgcgtcgttatctataaagaggggctgctgggcagtatgttttttggcgaagcgaaagccgatcccgataaaatgagccggttcctcactgagtacacgcagcagggctgggaagtcaaaaccatggcggtcgaacgccgccgcagcgcactgttctggtcgcgcgaagcgtatttatttgtgcttgaacgcgccatctga

SEQ ID NO: 90445 - DNA, 957 bp, Enterobacter aerogenes
atgaaattccctggcgtaccggaaaatgaagaagaaagactgaaatcgctatatctggcggacctgctcgatacccgtgatgatgagcgtttcgaacgcctcactcggctggctaaaaaaatttttcaggtgccggtggtacttatcagcctgctcgaccgggaacggcagtggctgctcgcctgtcaggggctggggattcgccagacccggcgcgatatctctttttgcgcccacgccatcttgcaggacggcgccttcatcgttaacgatgcggtcaatgacgatcgtttttatgataacccgctggtgacgggcgaaccctatatccgcttctacgcgggctatcctgtccatctgcccgatggcgccgtggccggtacgctatgcctgattcataccacgccgcgcgagtttaacgatgaagagatcgccgtcctcaaggatctggcgtatatcgtcgaggatgagttccaggtgattggcatggcgatgaccgacagtctgaccggcatcgctaaccggcgcggcttttaccgcatcggcgataaacgtttccgtacgcttaccagcaatgcaacgccgtttagcctggtcttttttgatctcgataaattcaaacccattaacgatctgtgggggcatgcggaaggtgacgaggtgctaaaaaccttcgcggcgtttctggcgcaacatctgctgccaggcgaggttgtcggccgtttaggcggcgatgagttcgccgccatcattacccgcaacgggcgtgccgacacattcttgcaaaagctgcgtgagagtgtcgatcattacaaccagacgtcaggaaaaccctataacattaattactcttacggcgagctacagagcgatgtcagccgttatccgacgctcggggatatgctaaaacaaagcgatgaagtgatgtattcacgcaagcgtagaaagaccttataa

SEQ ID NO: 90446 - DNA, 249 bp, Enterobacter aerogenes
atgaacgatgattttcaggcgattaagaacgaatttgcgaagtatgccgatgcggcgcaagggaccgcggtggcttttgccatgtatgaagatttagcccgacggctggcaacttacttccacaacctcgatcagcttaacaaacgacgttttctgctgaagctggaagagggggaacgcgaaattggcacccagggcagctatgactggtatggggcgctgacgcgcttttcatcggctgcgcattaa

SEQ ID NO: 90447 - DNA, 129 bp, Enterobacter aerogenes
atgaaaaacaacgtatttacgctgccatcagcgcaaattatcaacaaccagcagaagataataaaatcgacaagcgacgagaccgggggaatgggcaaaaaaaaccgccatgtgactggcggtgaataa

SEQ ID NO: 90448 - DNA, 1065 bp, Enterobacter aerogenes
atgcagcgccgttcagccactttagaagatgtcgcccgcgaggcgggcgtttcgcagcagacggtttcgcgggtggtgaataacccacagatagtggcgcagcgcacccgtgaaaaggtgctgcgcgcgatgcagacgcttcactatgtacctaaccgttcggcacagctattggcgggcaaagcggcagcgtcgatagggcttatcacggcgtcgttaaccttacacgcgccgtcgcaaattgccgcggcggtgaaacggtatgccggtgagcaggggctggaggtcgccatcgccatgccggcgcacagtgattatccggcactgcaggcgcggctggatgagtttcgcgcccagcatattcgaggcgccgttatcagcctgccgctggagagcagcgtcgccgaacggctggcggcggaaaatacggatatcgcctgcctgtttctcgatgtctcgccggaaacggatgtctcctgcgtgcgttttgatcatcgtgatggctgcggcgcctgcgtgcgtcacctttgggaattagggcatcgcgagtttggcctgttggccgggccggaaagctcggtatcggcgcggatgcgccttggcagctggcgcgagacgctgcaccggctgggggtcagtcaatcgattacggtgttcggcgactggagcgccgccagcggctggcaaaaaacctttgagttgctgcataaaaacccgaaattaagcgcgatcgtggtcgccaacgatcagatggcgctcggggtgttaagcgcgctggcgcagcttaatcggcgcggcagccaggcgatttcggtgaccggctatgacgatacggcagatagcctttactttcagccgccgcttaccaccgtcgcccaggattttgatctgttaggccgccgggcggtggaattactgatgcagcagatggcggcgccgaccggtagcctgcgcgaactgctgccggcgcggctggtggtacgccagtcgacgtggccgctcgcggcgcaggacaataccgcgccgctgatcgctgaactcaaagcgctggtagagaagctatga

SEQ ID NO: 90449 - DNA, 3108 bp, Enterobacter aerogenes
atgcaacgatatgattcaggcgccgttcgcggccccgcttttcacgaagtcctggcccgcgaggactggcagaaccagactatcacccacctcaaccgcctgcccgcacatcccacttttgccagctggcgcgatgccgatgcggcgcgcgacaaccgcccttctgaccgccgtcgtcaactggacggcgaatggcaattttcctatgcccgcagtccgtttcaggtggatgccagctggctgcagcatgacctgcccgacagtcgcccgacgccggtgccctcaaactggcaaatggagggttatgacgcgccgatatacagcaacgtccgctatccgattgataccgtgccgccgcgggtgcccgaagacaaccctaccggctgctattcgctacagttgaccgtcgatgaggcgtggcgggccgaagggcaaacgcaaattatctttgacggcgtcaactccgcctttcatctgtggtgcaacggcgaatgggttggctactcccaggatagccgcctgcccgccgcctttgatttaagcccgtatctgcagcaaggcgccaaccgcttgtgcgtgatggtgatgcgctggagcgcgggcagttggcttgaagatcaggatatgtggcgcatgagcggtatcttccgttcggtctggttgttgcataaaccgcaggcccgcctcagcgatgtgcaattaaccccgcagctcgatgcgcgctatcgcgatgcgcaattgcaggtcaaacttagcgtcgaggccgcgtctgaagcgctggcggcgctggaagtggaggttgcgctgtgggatggcaaaacgcgccttgccagccagcgccagccgctgggtacgccgattattgatgaacgcggcagctacggcgagcgggcaatcatcaatctcgacgtcgaacgcccgcggctgtggagcgccgagcagcctcattgctaccgcgcggtggtatcgctatggcgcggcgagacgttgcttgaagcggaaggctgggatattggttttcgccaggtagaaatccgtgacgggctactgttgctcaacggcaagccgctattgatccgcggcgtcaaccgccacgaacatcatcatcagcgcggccaggtggtcaacgaagaggatatggtgcaggacattctgctgatgaagcagaacaatttcaatgccgtgcgctgttcgcactaccccaacgcgccgcgctggtacgagctatgcaaccgctacggcctgtacgtggtggacgaagccaatatcgaaactcacggcatggtgccgatgaatcggctgtctgacgatccggcctggcttgccgcttacagcgcgcgcgtcacccgtatggtccagagcaaccgcaaccatccctcgatcattatctggtcgctgggtaatgagtccggctgcggcgacaaccatcaggccatgtaccaatggttgaagcacaacgatccttcgcgtccggtacagtatgaaggcggcggcgccgacagcagcgccaccgatattatctgcccgatgtacgcccgcgtcgagcgcgaccagccgttcccggcggtacccaaatggtcgatcaagaagtggatcggtatgcctggcgaacaacgcccgctgatcctttgcgaatacgcccacgcgatgggcaatagcctgggcaatttcgccgattactggcaggctttccgcgactatcctcgcctgcagggcggttttatctgggattgggccgaccaggcaatcgagaaaacattcccggatggtagcgtcggctgggcctatggcggcgatttcggcgataaacctaacgaccggcagttctgcatgaatggcctggtattccccgaccggcgcgcccatccttcgcttatcgaggccaaacatgcgcaacagtatttccagttcgctttgctggagcaaaatccgctgcggattgctatcaccagcgaatacctgttccgcgccaccgataacgaaacgctgcgctggcgcgtagagtgcgccggagaaacgatagccaacggcgacttagcgctggcgctgcagccgcaagaacgggcggaattgattcttagcgacagcctggccctgccgcgcggcgcccgcgatgtctggctgcagctcgaagtgatccagccgcaggcgacgtcatggtctgagcccggtcaccgcgtcgcctggcagcagctagcgcttaccgcgcctctggcgctagctgagacctccgccgaaggcccggcgccggtcctgaccatcaaacccgcgatctacgaggttagcgtcggatcccagcgctgggttatcgatcgccagagcgggcgtttaagcgaatggtattgcgctggagaacagcagctgctgacgccgctggaggatcagtttgtccgtgcgccgctggacaatgatatcggcgtcagcgaagtcgaacgtatcgatccgaacgcctgggtcgaacgctggaagaacgccggtctgtattcgttgacgacccgctgcgtgaaatgcgaggcgcaacagctggcacgggaggtgatcgttgatagccactggcactatctgcgcggcgaggagacggtcattgccagccactggcgcatgatcttcaccgccgacggcaagctccagctcaccgttgatggcgaacgtgccgccacgttaccgccgctggcgcgcgtcgggctgcgcttccaggtcgccgaacaacacgctgaggtcagttggttgggattagggccgcacgaaaactatccggatcgcaaaagtagcgcctgtttttcacgctggcaacagccgctgcgcgagatgagcacgccctatatcttccccagcgaaaacggtctgcgctgcgattgcaaagcgctggactggggatgctggcacgtcgcaggccagttccacttttcggtgcagccgtacagcacggaacagctgatgacgaccgatcactggcatcgcatgacgccggaaaaaggcgtctggatcaccctcgacggccagcatatgggcgttggcggcgatgattcctggacaccaagcgttctgccacagtggctgctgctcgagacacactggcactatcaggttacgcttcattgtcaataa

SEQ ID NO: 90450 - DNA, 1266 bp, Enterobacter aerogenes
atgaaactctctgaactcacgccccgcgaacggcacaattttatctatttcatgctgttctttttcttttactatttcattatgtcggcttactttccctttttcccggtatggctggcggaagtaaaccatttaacgaaaaccgaaacagggattgtgttctcctccatttcactgttcgcgataattttccaaccggtgtttggcctgatttcggataagctcgggctgcgtaaacatctgctgtggaccattaccgtactgcttattttattcgccccattctttatttttgtcttctcgccgctgctgcaaatgaacattatcgccggcgcgctggtggggggaatttatttaggcgtggtattttccagcggttccggcgcggtcgaggcctatattgaacgcgtcagccgcgccaaccgttttgaatacggcaaagtacgcgtctcgggctgcgtcggctgggccctgtgcgcgtcaattaccggcatcttattcggtattgatcctaatattaccttctggatagcctccggttttgcgctggtgcttggcgtgttgctatggctatcgcgtccggaagccagcagcagtgcgcaggttattgacgccatcggcgccaaccgccaggccttttctctgcgtacggcggccgaactgctgcgaatgccgcgtttctggggatttattatttatgttgtgggcgtcgccagcgtatatgacgtttttgaccagcagttcgcaaacttttttaaaggctttttcgccacgccgcagcgcgggaccgaagtttttggctttgtcaccaccggcggtgaattactcaacgcgatgattatgttctgcgccccggcaattattaaccgcatcggcgcgaaaaacgccctgctgatcgccggtataattatgtcgatgcgcattctcggatcttcatttgcgacttcggcggtggaagtggtcattttaaaaatgctgcacatgtttgaattaccgttcctgctggtcgggaccttcaaatatatttcttccgcatttaaccctaagctttccgccaccctatttttaatcggctttaacctgtcgaaacagctttccggcgtagtgctttcggcctgggtcgggcggatgtacgacaccgtgggttttcaccaggcctacctgatcctcggctcaatcaccctgagctttaccctggtatcgctatttaccttaaaaggcggtaagacgctgctgcccacggcagagtataacaacgcggcctga

SEQ ID NO: 90451 - DNA, 1116 bp, Enterobacter aerogenes
atgattaaccgtattcgtatcaataatttccgttcagtcagagagattgaactggaactggggcctctgaacattgtgtttggccctaacggttgcggaaaatcgaatatctacaaagcaatccatctgttaaccgcctcggctaacggccagttctccagctatgtcagcgaggagggcgggctggagaacatcatgtggtcaggcaagcaggcgccgaccgaccgccacccacggcgtctgcaaatcgcctgcctgaccgatgaatttgaatatgaactgcaggtggggtttccggaaaaactgccgtatccgacgcaattcatgctcgacccgatcgttaaagaagagaatatctggctgtcgggctttaaccgccggccatcatcgcgtgtactgcagcggaaaaaccaggcggccttcctggtcgacgtcaacggtgaaaaaagtaccttcaccgataccatttacgaaaacgagtctattttcggccagcttggcgagccgcatcgttttccggaagtgtcgcgcgtgcgggagaccatgcgccgttggcgtttttaccatgagtttgccatcggcaggctttcaccgctgcgccagccgacggtcggctaccgttcgccggtgctcgatagcgatggcggcaatctggcggcggcatttcagactatcgtcgaaattggcgctgaggagttgctgcatgaaatcctcggcgaagcgttccccgactgtacctttttctgtgagaacgacaactcgcggttcgtgatgaagatgcgccgggaggggatttatcggcctctgctggcggcggagatgtctgacggtaccctgcgttttttatgcctggcggttgccttgctcagcccacgaccaccggcctttctcgccattaatgagccggaaaacagcctgcatcgtcagatgttcccggcgctggcgcgactgattgtcgaagcatcacgctatagccagatctggctcaccagccactcggcggaactggcgcaattgatctcggcgcgtgcgcagagccgcatctacgaattggaaaataacggtgggcaaacgcaaattagagcggcgttgccgtcatccctgacggaacgttaa

SEQ ID NO: 90452 - DNA, 261 bp, Enterobacter aerogenes
gtgcacccgttaattaaggtcatgctggtgggcggcaaagcagatggtctgctggtcagcgtcgccgacaccgcgacggaagtttccgtcacgcctgcgcagtacggcgcgccatccgggcttccgctgaactaccgggtggtgtcgcaggttattgataatgaacgcctgtttttcggcgtgtttagtgatacacacctggatgccgataagctcgccagagtcgcgctgacgcgcgggatgaaaaaatcgctcagttga

SEQ ID NO: 90453 - DNA, 2040 bp, Enterobacter aerogenes
atgacggacaataatccctttttacacgtcagcctactgccgtaccaggcgccgcattttgatttgattgaagatagtcattatcgcccggcttttgatgagggcgtacggcgccagcgcgaggagatcgcggcgataatcaataacccggcgccggtggattttgacaataccctggtcgcgctggagcagagcggtcagttgctggggcgggtgacccgggtctttttcgcgatggccggggcgaataccaatccgctgatacagcaactggacgaacagttttccgccgagctcgccgagcttggcaacgatatctggctcaacgatgcgctgtaccagcgagtcaaacaggtttggcagcagcgcgacgccctgagtctggatccggagtcgcgtcgtctgctcgaggtgagctggcagcgttttcagctggcgggagccgcgttggcgcaagagcagaaaaccgcgctaaaagcattgaataccgaggaagcgttgctgcaaagtcagttccagcagcgtctgctggcggcggtgaagtccggcggtctggttgttgattatcaacaccagcttgatggactggccgcggatgagattgccgccgccgccgatgccgcgcgcgacaaaggcctgcatgaccgttggctgctggcgctgacaaatactactcagcaaccggcgctgcaggcacttgccgatcgccagacccggcacaatttgttcgctgcgggctggacgcgtaaccagaagggcgatgccaacgacacccgtgaactggttttgcggctggcggaaatccgcgcgcgtaaggccgaattgctgggcgtcgccgattacgcgagctggtcgatggccgatcaaatggcgaaaacgccgtctgaggcgcttgcctttatgcgccgcatcgcgcctgcggcccgccgacgcgccgaacaggagcttgccgacatccagcaggttattgatgaagagggcggtgattttcaggccgcggcctgggactggttatattacggcgagcaggtgcggcgcgctaaattcgccatcgatgaagcgcagctaaaaccctatttcgctctggaccgggtgctggaagatggcgttttctggaccgcctcccaactgtttggcatccgttttgtcgaacgttttgatattccgctttaccatcccgatgtgcgggtctgggaaatctttgatgccaacggcgaaggcatggcgctgttttacggcgattatttctcgcgtgatagcaaaagcggcggcgcctggatggacgtatttgtcgagcaatcgacgctgcgtgcccagcgtccggtgatttacaacgtttgcaactaccagaaaccaaaagccggcggctgcgcgctgctatcctgggatgacgtcatcacgctgttccacgagtttggccatgcgctgcacggcctgttcgctaaccagcgttatgcgagcctttcaggcaccaatacgccgcgcgatttcgtcgaatttccgtcgcagatatacgaacattgggcccgcgagccgcaggtcttcgcccattatgcgaagcactaccagaccggcgaagccatgccggacgatctgcgagacagcatgttccgcgcctcaacgttcaataagggttatgacatgagcgaactgctggcggcggcgctgctggacatgcactggcacagcgtcaccccacaggggctgccgcaggatgtcgatgcttttgaacagcaatcgctgcgcgaggagcagatggatctggcggcggttccgccgcgctatcgcagcagctatttctcacatattttcggcggcggttatgcggcgggctactatgcctatctgtggacgcaaatgcttgccgacgacggttatcagtggtttgtcgagcaggggggattaacccgggaaaacggtcaacgtttccgcgaggcgatcttatcgcgcggtaacagctgcgatctcgaagcgctgtatcgcgactggcgcgggcacgatccgctgatcgaaccgatgttgaaaaatcgcggtttgtag

SEQ ID NO: 90454 - DNA, 750 bp, Enterobacter aerogenes
atgattattctggtgactggtgcaactgctggatttggcgaatgtattactcgtcgttttattgctaacggccacaaagtaatcgccaccgggcgtcgtgaagaacgcctgaaggcgctcaaagaggagcttggcgataacctgtataccgcgcaactcgatgtgcgtaatcgcgccgccatcgaagagatgatcgccgggttgcctgcacagtggcaggctatcgacgtcctggtgaacaacgccggcctggcgttaggtctggaacccgcccatcgcgccagcgttgaagattgggaagacatgatcgataccaacaataaaggcctggtttacatgacccgcgcggtgctgccggggatggttgagcgtaatcgcggccatattattaatatcggttcgactgccggcagttggccctacgctggcggtaacgtctacggcgcgaccaaagcgttcgtgcgccagttcagcctgaatctgcgtaccgatttgcacggcaccgcgattcgcgtcaccgatgtcgagccgggcctggtaggcggcaccgaattctccaacgtacgatttaaaggcgacgatgcgaaagccggtaaaacctatgagaacacccaggcgctgacgccggaagatgtcaccgaagcggtgtggtgggtcgcgaatctgccgaaacacgtcaacataaacacgctggaaatgatgccggtcagccagagctttgccggtctcagcgtccatcgtcagggctaa

SEQ ID NO: 90455 - DNA, 687 bp, Enterobacter aerogenes
atggccgcagaaacgcaactgaatccgacccagcccgtcaatcagcaaatctatcgcatccttcgccgggatattgtccattgcctgatcccgccgggaacgccgctgtcggagaaagaggtgtcggtgcgatttgatgtctctcgccagccggtacgcgaagcttttatcaaattggcggaaaacgggctgattcagatccgcccacagcgcggcagttatgtgaataaaatctcgatgacccaggtacgcaacggctgtttcgtgcgtcaggccattgagtgcgcggtagtacgccgcgcaggttcgatgatcaacgatgaacagctctatcagctggagcaaaacctcaaccagcagcgggtggcggtagagcgtcagcagctcaatgattttttccagctcgatgacgaatttcaccagaaattgtctcttatcgccgactgccagctggcgtgggacaccattgaaaatattaaagcgaccatcgaccgggttcgttatatgagtctcgatcacgtgaccccgccggatatgctgctgcgtcagcatctcgatatttttcatgcgctggaaaaacgcgatcttgatgccgtcgaacaggcgatgaatatccacctgcatgagattagcgagtcggtattgttaattcgtcaggaaaatagcgagtggttcagcgaagaataa

SEQ ID NO: 90456 - DNA, 432 bp, Enterobacter aerogenes
atgtacaaaaaaatactgttgccggtcgatgtttttgaaatggatttaagcgataaggccgttcgtcacgccgattttttagcatctgccgaagagggtgaaatcacgttgctgaacgtgctgccaaacagcaccagttctttgctgcgcggctttacggcggatattcgtaaatttgaagcctatatgaaagaggagtcggaaaagaaaatgcgcgatctctcgcggttgttttctaccccggcttcgcggatccatacccacattgtttttggtaatgtgcgtgatgaaatattagcgctgagcgaaaaagaaaagtttgacgttatcgttattggctcacgtaaaccgggtatttcaacccaccttcttggttcaaacgctgaatccgttttacgctatgccaacgttccggtgttagtggtgcggtaa

SEQ ID NO: 90457 - DNA, 1464 bp, Enterobacter aerogenes
atggaaaacacgcttttaaacgccagggcaacgcttccttcttacgatcgcagcaagctggtttctcgcatcgttcatctcggttttggggctttccaccgcgcccatcaggcggtatatgccgatatccttgccgccgaacacggcagcgactggggctataccgaagtgaacctcattggcggtgagcagcagattgccgatttgcaacagcaggacttgctctatacggtggctgaaatgtccgccgatgcctggaccgcgcgcgtcgtcggcgtggtgaagcaggcgatgcatgcgcaggtcgatggcctggaaagcgtgttggcgaaaatgtgcgaaccacaggtggcgattgtctcgctgaccatcaccgaaaaaggctactgccactctccggccaccggccagctgcagctcgataacccgctgattgccgccgatctgcaaactccacaccagccgaaatcggcgccgggcgtggtggtagaagcgctggcgcgccgtcgcgccgccggtctgccggctttcagcgtgatgtcctgcgataatatgccggaaaacggccacgtaatgcgcaacgtagtttgtgcgtatgcccgcgccgttgatgacgaactggcgcagtggattgagcagaacgtgacgttcccttccacaatggtcgaccgcatcgttccggccgtgaccgcagatacgctggataaaattgaacaactcaccggggtgcgcgatccggctggtgtggcctgtgaaccgttccgccagtgggttatcgaagataacttcgtggctggtcgtccgcagtgggagaaagccggtgcggagctggtcactgacgtggtgccgtttgaggagatgaagctgcgtatgctcaacggcagccactcgttccttgcttatctgggctatctcgccggttatcagcatattaatgattgcatgcaggatgagaactaccgccgcgccgcgcaggcgttaatgttgcaagagcaagcgccgacgctgaaagtacagggcgtcgatctggcgcgttatgctggtttgcttattgagcgttatagcaatccggcgcttaagcatcgcacctggcagattgcgatggacggtagtcagaaactcccgcagcgtatgcttgattccgtgcgctggcacctggcgcatcacagtgatttcagcctgctggcgctgggtattgccggctggatgcgctacgtgagcggcgtcgatgatcaggggcaggcgattgaaatcagcgatccgctgctgccggtaattcaacaggcggtgcagggcagtaaagagggtagcgaacgcgtgcaggcgctgctgggtattaaggccattttcggcgatagcctgccgcaggaagcgcgttttgtcgatgcggtgacggcggcgtatctctctttacagattcacggcgcgaaggcgaccgttgccgaatgggctaaagcccagtaa

SEQ ID NO: 90458 - DNA, 1383 bp, Enterobacter aerogenes
atgacgacagctaaaaaagagagaagcacctcggatctaattcgcgccgcggtatccggttggcttggcacggcactggagtttatggattttcagctttattctttaggcgccgcgctggtctttcatgagatatttttcccggagcagtcggcggctatggcgctgatattagcgatgggaacctatggcgcaggatatattgcgcggatcgttggcgctttcatattcggtaaaatgggggaccgcatcgggcgtaaaaaggttctgtttattaccatcaccatgatgggaatttgtaccacgttgatcggcgttttacctacctatgcgcagatcggtatttttgcgccagtgttactggtgaccctgcgtattatccaggggctgggggcgggcgccgaaatttccggcgccggaaccatgctggcggagtatgcgccaaaaggcaaacgcggcatcatctcttctctggtggcgatgggcaccaactgcgggacgctgagcgccacggccatctgggcgataatgttcttcctgctcgatcgcgaacaactcatcgcctggggctggcgtattccgttcctcgcgagcgtcgtggtaatgatctttgccatctggctgcgtttgaatctgaaagagagcccggtatttgaacaggtcaacgaagccgatgaaattcaggctaaagccgccgccgcgcaaaacacgttcggcgcaatgttaaaaagtaaatcattctggctggcgaccggtttacgctttggacaggccggtaattccggtttactacaaacatttctcgcgggatatctggttcaaaccctattatttgataaagcgattccgaccgatgccttaatgattagctcagtgattggttttattactattccgctgttaggttggttgtcagataaagttgggcgccgtttaccttatattatcgttaatatttcggccattattctggcctggccgatgctggccattattgtcgataaaagctatagcgccagcaccattatgctatcgctgattgtcattcataacgtggcggtgctgggcttgttcgcgctggaaaatattactatggcggaaatgttcggatcgcgtaatcgcttcaccagaatggctatctcaaaagaggccggcggtctggtggcggtgggattcgggccggtgctggccggtatcttctgtaacgtaaccggttcgtggtggccgattgtcgcgatgctgatctgctattcagctatcggtctcatctcgtccttgctgatgccggaagtgtgcgaccgtgacctgagtctggaccacgatgcggcggacgccggtacgcgccaggcgctgagcgcgaacggccaatacgcgaaatcctaa

SEQ ID NO: 90459 - DNA, 1020 bp, Enterobacter aerogenes
atgaagagcattgttatccaacagccaaacgcgctggcgattgaagaacggccgctgccgcagccgggaaatggagaagtgcgggtaaaggtgaaactggcgggaatttgcggctcagatagccacatctatcgtggacataacccgttcgccaaatatccccgggtcatcggccacgagtttttcggcgtgattgatgccgtgggcgagggggtgacggataaagtcgtgggccagcgggtgacggttgatccggttatcagctgcggccactgttatccctgttcggtcggtaagcccaacgtctgcgcttcgctggtggtgctgggcgtccatcgcgatggcggttttagcgaatacgcggtggtgccggccaaaaatgcctggccggtgccggagaacgtgagcgaccatcatgcggtaatggttgagccctttaccattgcggcgaatgtcaccgggcaggctaaaccacgcgaacaggatatcgcgctggtctacggcgccgggccgatggggctgaccaccattcaggtgctcaagcgcgtctataacgtgcggcaggtcatcgttgccgatcagatccccgagcggctgcagatggcgcagcaaaacggcgccgacttgaccatcaataataaggaacagccgctggcgcaggcgctggaatcgcagggtatccggccgacgctgattatcgacgccgcctgccatccggcgattttcgcagaggccatcgcactggcctcgccggcgggcaggatcgtattgatgggcttttctaccgaaccttcaatggtggcgcagcaggggattaccggcaaagagctcactatttattcttccagactcaatgccaataaattcccgctggttcttgagtggttggcaaacggattaataaatcctgatcggctcatcacccatcagtttgctttcgagcatgtagtcgatgccatgacgttatttgaagaagatcgcaagcattgttgtaaggtgttattaaccttcaacgcataa

SEQ ID NO: 90460 - DNA, 1215 bp, Enterobacter aerogenes
atgaagatcgttgccgccgacgtgttcgttacctgtccagggcgtaacttcgtcaccttaaaaatcaccaccgatgaagggattgtcggcctcggtgatgccacgctaaacggccgtgaattgtcggtcgcctcatacctgaaagatcacctttgtccgcagctgattggccgtgatgctcaccgcatcgaagatatctggcagttcttctacaaaggtgcttactggcgccgcggcccggtgaccatgtcggcgatttccgccgttgatatggcgctgtgggatatcaaagccaaagccgccggaatgccgctttaccaactgctgggcggcgcctcgcgcgaaggggtgatggtctactgccacaccaccggtcattccattgatgaagtgctggacgactacgcccgccatcaggaaatgggttttaaggcgatccgcgtgcagtgcggtattccggggatgaaaaccacctacggcatggccaagggcaaaggtcaggcatacgagccggcgaccaaaggcgtgtggccggaagaacagctgtggtcaacggaaaaatatctcgattttaccccgcggctgtttgccgccgtgcgcgaaagatttggctttaacgagcacctgctacacgacatgcaccatcgcctgacgccaatcgaggcggcgcgctttggtaaaagcattgaggagtatcgcctgttctggatggaagatccgaccccggcagagaatcaggcgtgcttccgcttaatccgccagcataccgtcacgccgattgccgtgggcgaagtctttaatagcatctgggattgcaaacagctgattgaagagcagctcattgattatatccgcaccaccattacccacgctggcgggatcagcggcatgcggcgtatcgccgattttgcttcgttgtaccaggtacgcactggttctcatgggccgtcagatctctctccggtatgtatggcggcggcgctgcatttcgacctgtgggtgccaaatttcggtgtacaggagtacatgggctattccgaacagatgctggaggtcttcccgcatagctggcgttttgacaatggctatatgcatccgggcgataaaccggggctgggcatcgaattcgacgagaagctggcggcgaaatatccctatgaacccgcctgtctgccggtggcgcgcctcgaagatggcacgctgtggaattggtaa

SEQ ID NO: 90461 - DNA, 1284 bp, Enterobacter aerogenes
atggctacacaaacccttgccagcgaagctggcgccaaacccgtgcgcattggccgggtgcaaaaagtcaccctgacgctgctgtttatcgccggtatcgtcaacttcctcgatcgttcgtcattaagcgtcgccggtgaggctattcgcggcgatctcgggctcagcgcgaccgaatttggcgtactgctttccgccttctcgctatcatatggtttcgcgcagctgccctcgggtattttgctcgaccgcttcggcccgcggatcgtattgggggcggggctgattttctggtcgctgatgcaggcgctgaccggggtagtgaactcctttagccattttattttactgcgcattggcctcggaattggcgaagcgccgtttatgccggcgggggtaaaatccattaccgactggtacgtacaaaaagagcgcggtaccgcggtcggcatttttaactcgtcaacggtgcttggccaggcgattgcgccgccagcgctggtactgatgcagatagcctggggctggcgcaccatgttcgtggttatcggccttgccgggatcgttgtgggcctgtgctggtacgcgtggtatcgcaaccgcgcgcagttcgatctgcagcaggaggagcgccagtatctggcggcgccggaaaaagcgcgcccaacgctggtattcagcgagtggctggcgttgttcaaacggcgcaccacctggggaatgattttaggcttctccggggttaactataccggctggctgtatatcgcgtggctgccgggttatctgcaggcgcagcagggattgagcctggcgaaaaccggctgggtggcggcgatcccgttcctggccgcggcggtgggcatgtgggtcaatgggctggtggtcgatgcgctggcgcgccgcggttacgatctggcaaaaacgcgcaaaacggccattgtggttggcctgacgctttctgcgctcggctcgctgctggtggtgcaatcaaactcgccgacccaggcggtggcgtttatctccatggcgctattctgcgtccactttgccgggacctcggcctgggggctggtacaggtgatggtcagcgagaataaagtcgcgtcggtggcggcgattcagaacttcggcagctttgttttcgcctcttttgcaccggtcgtcaccggttgggtggtggataccacgcactccttcaacctggccttggttatcgccgcctgcgtgacctttgccggcgcgctgtgttatttcttcatcgtaaaagaccgcatcaattaa

SEQ ID NO: 90462 - DNA, 327 bp, Enterobacter aerogenes
atgctgaaaaccacgttacttttctttgctaccgcgctgtgcgaaatcatcggttgttatctgccgtggctatggctgaagcgggaaggttcgccgctgctgttgatcccgacggcgatggcgctggcgatgttcgtctggctgctgaccctgcacccggaggccagcggcagggtgtatgccgcctatggcggcgtctacgtctgtaccgcgctgctgtggctgcgtttcgttgacggcgtgaagctaagccactttgactgggcgggggcggcgattgcgctgtgtggtatgctgatcatcgttgcaggctgggggcgggcttaa

SEQ ID NO: 90463 - DNA, 342 bp, Enterobacter aerogenes
atgaaaatgacacgcaataaacgctggtgcctgaccgccctgctggcggcaagcgcaatggtctataccgcttcgtccttcgcgcaaaccgacaaactggtgatcgagtccggcgacagcgcgcagagccgtcagcaagccgcaatggaaaaagagcagtggaacgatacccgctcgctacggcagaaggtgaataaacgcgcggagaaagagtgggacaaaaccgacgtcgccttcgatgcgcaggataactgccagaagagcgctaacgtcaacgcctactgggaacctaacaccctgcgctgtcttgaccgccgtaccggtcgcgttattacgccataa

SEQ ID NO: 90464 - DNA, 561 bp, Enterobacter aerogenes
atgtctgacgcccctcacgtcaaactccgcccgcttgagcgcgaagacctgcgcttcgtccaccagcttgataataacgccagcgtaatgcgttactggtttgaagaaccttacgaggccttcgtcgaactctctgacctttacgacaaacacattcacgatcaaagtgaacgccgtttcgttatcgaatgcgatggcgaaaaagccgggctggttgaactggtggagataaaccacgttcaccgtcgcgccgagttccagattatcatctccccggaatatcagggcaaagggctggcgacgcgcgccgctaagctggcaatggactatggctttaccgttctgaatctgtataagctgtatctgattgttgataaagaaaacgaaaaagcgatccatatctaccgcaaactcggttttatggtcgaaggcgagctgattcacgagttctttatcaacggcgaataccgcaatactattcgcatgtgcctgttccagcatcagtaccttgagaaacatcgtcctcaaggccagacgctactcaagcccaccgctcagtaa

SEQ ID NO: 90465 - DNA, 711 bp, Enterobacter aerogenes
gtgaataaactgtttttgctgatcccggcggcgttgctgctcagcgcctgcgataagccgtcagcgccggcagcgtttaccccggagatggccagtttttccaatgagtttgagttcgatccgctgcgcggcccggttaaaacgtttactcagatcctgttcgacgaccagggcgaaatggtgaaacgggtgcgtgcccaggtgtcggcagaaggctgttttgatctgctggattttaccgacctcgaaaacaaaaccggcgccacgctggtacttgacgcgaattactatctggatgcgcaaacgcaggagaaacgcctgcggctgcaggggaaatgccagctcgccgagatgccggcggcgggcgtcagctgggagaccgatgacaacggctttgtggtgacggctcgcgggaaagaaagcacttccagctatcgctacgacagcgaaggttatccgctgggcaaaaccaccaccgcgaaagatgagcgcttcagcgtcgtatcgacgccgtccaccgatccgcgtaaaaagcttgattacagcgcggttagcgtatttaacgaccgcgcgttaggcaaggtcaatcaaacctgcgactatgacgatcacgacaacccgatccgctgcgagatgcaggttgtcgatgaaagcgtccagccggcggtgacgcgacactacagcatcaaaaacagtatcgactattactga

SEQ ID NO: 90466 - DNA, 273 bp, Enterobacter aerogenes
atgaaactatccccatggttatgcgcggtcctgctactggattcggcatccgcactggcagcgccggactcctgcgagcgggtaaagggcgagatccagcaaaagatcatcaacaacggcgttccggcttctggtttcagcctggccattgtaccgaacgatcagcctgaccagcccggcgctcaggtggtgggccactgcgctaacgacaccttcaagataatctatacccgcaacggcgacgcgacggcgaccgattcagacgggcaataa

SEQ ID NO: 90467 - DNA, 720 bp, Enterobacter aerogenes
atgtcctacccagaacatcccggcggcgtcagccgtcgcaacctcataaaatcctcagcaatcggttccctggccctggctgccggcggtctgtcgctgccgttcagtctacgcgccgcggccgccgccgtgcagcaagccaccggagcagaagaaaaaaccgtatggggggcctgctcggttaactgcggcagtcgctgcgcgctgcgcctgcacgtccgcgacgacgaagtggtgtgggtggaaaccgataataccggccacgatatctacggcgatcatcaggttcgcgcctgcctgcgcgggcgctctattcgccggcgtatcaaccaccccgatcgtctaaactacccaatgaaacgcgtcggcaaacgcggcgaaggaaagttcgagcgcattagttggaccgaagcgctgaataccatcgccgaaagtctgaaacgcgtggtaaaagagtacggcaacgaagcggtctatattaactactcttccgggattgtcggcggcaatatgacccgctcttccccttccgcctcgccggtgatgcggctgatgaactgctacggcggatcgctcaaccagtacggcacctacagtacggcgcagatcgcctgcgccatgccctatacctacggtagcaacgacggcaacagcacctcggatattgaaaacagtaaactggtggtgatgttcggcaataacccggcggaacccgcatga

SEQ ID NO: 90468 - DNA, 702 bp, Enterobacter aerogenes
atgtctataagcgcacagcagctggcggcacaaaaaaacatctcctgggtcatcgcggagaagatcgcccaaaaaattctcaccggcgaatatccgccagagagcattcttcctggtgaaatggaactgggcgaacagtttggcgtgagccggacggcagtacgagaagcggtaaaaacgctggcagctaaaggcatgctgcttccgcgcccgcgtatcggaactcgcgttctggcacgcagcagctggaactttctggataaagagctgcttgcctggtggctgacggaagataattttgccgaggtggttagccattttctggtgatgcgtagcagcctggagcctcaggcctgttttctggcggcgataaacggcacctccgagcagaaagcgcagctcaatacgctaatggaagaaatgatcgagctgaaaagacattttatccgcgaacgctggattgaagtcgatatggcctggcatgaacatatttatgcgatgagcggcaacccgtttctcacctctttcgcgtcgttattccattcggtatatcagacctatttcacctcgattacgcaaaatgaagtcgttaaactcgatctacaccaggctattgttgacgccattcaggaaagcgacggtccacgcgcgcagcttgcctgccagacattattgaacaccccaaaccacacaggtaaataa

SEQ ID NO: 90469 - DNA, 1398 bp, Enterobacter aerogenes
atgaccgggaagaaagggctgagtatggccggactgccatggattgcggccatggctttctttatgcaggcgctggacgccactattcttaataccgcgcttcccgcgattgcgcatagcctcggtcactccccgctggcgatgcaatccgccattatcagctacaccctgacggtagcgatgctgattccggtgagcggctggttggccgatcgctttggcacccgcaaggtctttatcgttgccgttagcctgtttaccctgggctccctcgcctgcgcgctttccacttcgcttcccgaattggttgtcttccgcgtcatccaggggatcggcggcgcaatgatgatgccggttgcgcgcctggcgctgttacgcgcctatccgcgtagcgaactgctgccggtactcaacttcgttaccatgcccggactggtcggccccatcctcggccctgtactcggcggcgtgttagtcacctgggccagttggcactggattttcttgattaacatcccgattggcatcatcggcattctctacgcccgcaaatatatgccggacttcaccacgccccgccgtcgtttcgacaccagcggttttgtgctttttggtttaagcctggtgctgttctccagcggtattgagctctttggcgagaaaatcgtcgccagctggatagcgctggccgtcatcgccctgagcgtcgtgctcatgctggcctatattcggcatgctcgtcgccatcccactccgctgatttcgctctctctatttaagacccataccttctctgtcgggatcgccggtaacctggcgacacggttaggtaccggctgcgtgccgttcctgatgccgctgatgctacaagtcggtttcggctacccggccattatcgccggctgcatgattgcgccgacggccatcggctcgataatcgccaagtcgaccgtcacgcagatcctgcgctggtttggttatcgcaaaacgttggtgggagtcaccatctttattggtttgatgatcgcgcagtttgcgctgcagtcgccgggaatgccgctgtggctgctactactgccgctatttgtactggggatggcgatgtccacgcagttcacctcgatgaacaccattacgcttgctgatttaaccgatgacaatgccagtagcggcaacagcctgctcgcggtaacccagcagctgtcgattagccttggcgtagccattagcgcggcggttctgcgtttttatgaagggtttgataacgccagtaccatcgaacaattccactatacctttatcacgatgggtgcgatcaccgtggtgtcagcgttgatgtttatgctgctcagagccaaagatggccgcaacctgataacggagcggcacaagcactaa

SEQ ID NO: 90470 - DNA, 984 bp, Enterobacter aerogenes
atgaaggatgtggcccgcgtcgcgggcgtttccacctcgaccgtttctcacgtcattaataaagaccgctttgtcagcgaggcgattaccgccaaagttgatgcggcgatcaaaagtcttaactacgcgccttcggcgctggcgcgcagcctcaagttaaatcagacgcgaaccatcggcatgctgatcaccgccagtactaacccgttctattcggagctggtgcgcggcgtggaacgcagctgtttcgagcgcggctacagcctggtgctatgtaataccgaaggcgatgagcagcggatgaaccgcaatctggaaacgctgatgcaaaaacgcgtcgatggtctgctgctgctgtgcaccgaaacgcatcaaccttcccaggagatcatgcagcgttatccgtcggtgccgacggtgatgatggattgggcgccgttcgacggcgacagcgatctgattcaggataattcgttgcttggtggcgatatggcgacccagtatctgatcgatcgcggtcatacccgtattgcctgcattgccgggccgctggataaaacgccgtcgcgactgcggctggagggctatcatgcggcgatggcgcgcgccgggctggatgtcgccgaaggttatgtcattaccagcgattttgaatttggcggcggttttactgcgatgcagcaactgctggcgttaacgccacggccgcaggcggtctttgtcggtaatgatgcgatggcggtcggcgcgtatcaggcgctgtatcagtccgggttgcatattccgcaggatatggcgctggtggggtatgacgatattgaactggcgcgctatatgaccccgccgctcaccaccattcatcaacctaaagatgaactgggagagctcgctatcgatgtgctgattcaccgcatggcggatcccgggcaaaaacagcagcgcgtgcagctcactccagagctggtgattcgcggttcagcttag

SEQ ID NO: 90471 - DNA, 933 bp, Enterobacter aerogenes
atgatgaaaaccgcaggcaaacttgtcgtccttggcagcatcaatgccgatcacattcttaaccttgaatccttccctactccaggtgagaccgtcaccggaaaccactatcaggtcgcgttcggcggtaaaggcgctaaccaggcggtggctgccgggcgtagcggcgcggatattgccttcatcgcctgtaccggcgatgacgacattggcgaacgcgtccgccgccagctcgcgagcgataacatcgacgtggcgccggtgcgtaccgttgctggcgaatctactggcgtcgcgttaattttcgttaacgcggaaggtgagaatgtcatcggtattcatgccggcgctaatgcagcgctatcggtttctcaggtagaggcggagaaagaacgtatcgccaacgcgcaggcattgttaatgcagctggagtcgccgctggagagcgtgatggctgccgcgaaaatcgctcatcagcatcagacgacggtggtactcaatcccgcaccggcgcgtgaactttcggatgagctattggcgctggtggatgttattacgccgaatgaaaccgaagcggaaaagctgaccggtattcgcgttgagagcgacgacgatgccgcgaaagccgccagtgcgcttcatgcgaagggaattggtacggtgatgattactctcggcagccgcggcgtttggttaagctgcgagggcgaaagccgccgggttccaggatttaaagttcaggccatcgatacgattgccgctggcgacacttttaatggcgcatttgtcaccgcgctgctggaaggccgtgaagtgtcagacgccatccgttttgcccatgccgccgccgcgattgccgtcacccgtaagggggcgcaaccgtctgtgccgtggcgcaaagagatcgacgaattcttgcgtcaacaggggtaa

SEQ ID NO: 90472 - DNA, 891 bp, Enterobacter aerogenes
atgaatatgaaaaaactggcgaccctggtctctgctgttgctctaagcgcgaccgttagcgcaaacgcgatggcgaaagataccatcgcactggttatctctaccctgaataacccgttcttcgtttctctgaaagacggcgcgcagaaagaagccgataagctgggttacaacctggtggtgctggattctcagaataacccggcaaaagagctggcgaacgtacaggacttaacggtgcgtggcgctaagctgctgctgattaacccaaccgactccgatgctgtcggcaatgcggtgaagatggcgaaccaggctaaaatcccggtcattacccttgaccgccaggcttctaaaggtgatgtggtgagccatattgcttccgataacgtgctgggcggtaaaatggccggcgactatatcgcgaagaaagtcggcgaaagcgcgaaagtgattgagctgcaaggtattgctggtacctctgcggcgcgcgagcgtggcgaaggtttcaaacaggccgtggcggcgcataagttcaacgtactggccagccagcccgctgacttcgaccgtactaaaggtctgaacgtgatgcagaacctgctgacggcgcatccggacgtgcaggcggtgtttgcgcagaacgacgaaatggcgctgggcgcgctgcgtgcgctgcagactgcaggaaaatctgatgtgatggtggttggatttgacggtactccggatggcgaaaaagcagtaaatagtggcaaactggcagcgactatcgcccagttgccggagcagatcggcgttaaaggcgtcgaaaccgctgataaagtgctgaagggcgaaaaagtggatgccagctatccggttgagctgaaactggtcattaagcagtaa

SEQ ID NO: 90473 - DNA, 966 bp, Enterobacter aerogenes
atgactacccaggctgttactggtcgccgctatttcactaaagcgtggctgatggagcaaaaatcgctgatcgccctgctggtgctgatcgcgatcgtttcgaccatgagccccaacttttttaccgtcaataacctgttcaatattctgcagcagacttccgttaacgccatcatggcggtcgggatgacgctggtcattctgacatcggggatcgatctgtccgtcggttctctgttggcgttgaccggcgccgtcgcggcgtctatcgtcggtatcgaagtgaatgcgctggtggccgttgccgccgctctggcgctcggtgcggctattggcgcggtgaccggggtgattgtcgcgaaagggcgtgtgcaggcgtttatcgccactttggtaatgatgctgctgctgcgcggcgtgacgatggtttacaccaacggcagcccgatcaacaccggctttagcgataacgccgatctgttcggctggttcggtatcggacgcccgctggggatccctacgccggtatggattatggcgattgtcttcctggcggcctggtacatgctgcaccatactcgcctgggtcgttatatttatgccctgggcggtaatgaagcggcgacgcggctttccggcatcagcgtaaatagagtgaaaatcatcgtctatgcgttatgcggaatgttggcttcactggccgggatcatcgaagtggcgcgtctttcctctgcgcagccgacggcggggacgggctatgaattagacgcgatcgcagcggtcgtacttggcggcactagcctggccggtggtaaaggtcgtatcgtcggcacgctgattggcgcgctgatccttggcttcctgaataatggtctgaaccttttaggcgtttcttcctattaccagatgatcgtcaaagcggtggtgattttgctggcggtactggtagataacaaaaagcagtaa

SEQ ID NO: 90474 - DNA, 1506 bp, Enterobacter aerogenes
atggaagctttattacagctgaaagggatcgataaagcgttccctggcgtcaaagcgctctccggcgcggcgctgaatgtctatgccggccgggtgatggcgctggtaggggaaaatggcgccggtaaatctacaatgatgaaggtactgaccggtatctatacccgtgatgccggttctttgctgtggttaggtaaagaaacgacctttaacggcccaaaatcctcacaggaagccggtatcggcattattcaccaggaactcaacctgatcccgcaattaacgattgccgagaacatcttcctcggccgcgagttcgtgaaccgctttggcaaaatcgactggaaaaagatgtatgccgaagcggacaagctgctggcgaagctgaatttacgctttaacagccagaagctggtgggcgatctgtcgattggcgatcagcaaatggtggaaatcgctaaagtgctgagcttcgaatcgaaggtcatcattatggatgagcctacagatgccctgaccgataccgagaccgaatcgctgttccgcgtcatccgcgaattgaagtcgcaggggcgcggtatcgtctatatctcccaccgcatgaaagagatcttcgaaatctgcgatgacgtcaccgtatttcgcgacgggcaatttattgccgagcgcgaagtggcttcgctggatgaggatcgactgatcgagatgatggttggccgtaagctggaagatcaatatccgcatctcgataaggcgccgggcgcggtacgtctgaaggtcgataatctctgcggctccggtgtggaaaacgtgacgtttaccctgcgtcagggcgaaatcctcggcgtcgccgggctgatgggcgccgggcgtactgaactgatgaaagtgctgtacggcgcgctgccgcgtagcagcggttccgtgacgctggatggccatgaagtcgtcacccgttcgccgcaggatggcctggcgaacggcattgtctatatctccgaagaccgtaagcgtgatggcctggtgctcggaatgtcggtcaaagaaaacatgtcattgaccgcgctacgctacttcagccgggcgggcggcagccttaagcataaagatgaacagcaggcggtcagtgatttcattcggctgtttaatgtgaagacgccttcaatggagcaggcaatcggcctgctttccggcggtaaccagcaaaaagtcgctatcgctcgcgggctgatgacccggccgaaagtgctgatcctcgatgaaccgacccgtggcgtcgacgttggggcgaagaaagaaatctaccaactgattaaccagtttaaagccgatggcctgagcatcattctcgtctcttcggagatgccggaagtgctgggcatgagcgatcgcatcattgtgatgcatgaagggcatctcggcggtgaattcacacgcgagcaggccacccaggaagtattgatggctgccgctgtgggcaagcttaaccgtgtgaatcaggagtaa

SEQ ID NO: 90475 - DNA, 420 bp, Enterobacter aerogenes
atgaaaaaaggcaccgtacttaacgctgatatttcttccgttatctcccgcctcggtcataccgatacgctggttgtttgcgacgccggattgccggttccccgcagcagcgcgcgcattgatatggcgcttactcagggcgtaccttcttttatgcaggtactggaagtcgtaacggcggaaatgcaggttgaggcggcggtcatcgcggaagagattaaaacccataatccgcaactccacgcgacgttgctcaatcatcttgagcagctgcagcagcaccagggaaatacgattgaaattcgttacaccagtcatgagcagttcaaaaaacaaaccgcagatagtcaggcggtaattcgcagcggggagtgttccccgtatgcgaatattattctctgtgccggcgtcactttctga

SEQ ID NO: 90476 - DNA, 1869 bp, Enterobacter aerogenes
atgagcactgataataaacaatcgttgccggcaataacgctggcggcaatcggcgtggtttacggcgatatcggtaccagtccactgtatactcttcgcgaatgtctgtcaggccagtttggctttggcgttgaacgcgatgcggtgtttggctttctgtcgctgattttctggctgttgatctttaccgtatcaattaaatacatcaccttcgtgatgcgggcggataacgccggcgagggcgggatcttaacgctgatgtcgctggcggggcgtaacacctcggcaaagatgacctccgtgttggtgatcctcggcctgattggcggtagcttcttctatggtgaagtagtaataaccccggcaatatcggtgatgtcggcgatagaggggttggaaattatcgccccacagctggatacctggattgtccccatctccattattgtgctgaccctgctatttgctattcaaaaacatggtaccgggatggtcggcaagctgttcgcgccaattatgctgatctggttcctgttgctggcggtgcttggcgcgcgcagtatcctcgataacccggaagttctgcaggcgctgaacccttactgggcagtacatttcttcctgcagtacaaaacggtatcctttattgcgcttggcgcggtggtgctgtcgattaccggtgtggaagcgctgtatgccgatatgggccacttcggcaaactaccgattcgcgtggcgtggttctcggtggtgctgccatcactggtgcttaactattttggccagggcgcgctgctgctgaagcacccggaagccattaaaaacccgttctttctgctggcgccggaatgggcgctgatcccgatgctgattatcgcgaccctggcgacggttatcgcctcgcaggcggtgatttccggggtcttctcgctgactcgccaggccgtgcgtctgggctatctgtcaccaatgcgcattatccatacttcggaaatggagtccgggcagatttacatcccgttcattaactggctgctgtacgtttctgtggtcatcgtcattgtcagcttcgagcactcttctaatctggcggcggcgtacggtattgcggtaacgggcaccatggtgttgacctccattctttcggcgaccgtggcgcgcaaaaactggcactggaataagctgtttgtcggcctgatgctggtggccttcctgtgtatcgatattccgctgttctcggcgaacctcgataaaatcgtctccggcggctggttgccgttatcgctgggcctggtgatgtttacggtgatgaccacctggaagagcgagcgtttccgcctgctgcgccggatgcacgagcatggcaactcgctggaagcgatgatctcctcgctggagaaatcgccgccggtgcgcgtaccgggtaccgcggtctatatgtctcgcgccctgaacgtgatcccttttgctctgctgcataacctgaaacacaacaaggtgctgcatgaacgcgtgattctgctgactctgcgtaccgaagatgccccgtatgtgcataacgttcgccgcgtgcagattgagcaactgtcgccgtcgttctggcgcgtcgtggcaagctatggctggcgtgaaacgccgaacgtcgaagaggtgttccatcgctgcggcctggaagggttgagctgtcgaatgatggaaacgtcgttctttatgtcccacgagtcgctgattattggcaaacggccatggtatctgcgcctgcgtggcaagctgtatctgctgctgcagcgtaacgccttgcgcgcgccggatcagtttgaaatcccgcccaaccgggttattgagctcggtacgcaggtggaaatctga

SEQ ID NO: 90477 - DNA, 1500 bp, Enterobacter aerogenes
atggctcaatcacatttactggcagaaagaatttcccgacttagcgccgccctggaaaaaggactctttgaacgcagccacgcaatacgtctgtgcctgctggctgcgctcagcggcgagagcgtattcctgctgggtccacccggcatcgcgaaaagcctcatagcccgccggcttaagttcgctttcaagcaagcgcgcgctttcgaatatctgatgacccgcttctccaccccggaagaagttttcggcccgctgtcgattcaggcgctcaaagatgaagggcgctatgagcgtttaacggcaggctatctgccagaggcggaaatcgtcttcctggatgaaatctggaaagccggcccggctatccttaataccctgctgacggccatcaacgaacgccacttccgcaacggcgcccatgaagagaaaatcccgatgcgcctgctggttgcggcgtcgaacgaacttcccgaagcggataacagcctcgaagccttatatgaccgcatgctgatccgcctgtggctggataaagtacaagataaaactaacttccgctcgatgctggtgagccaacaggatgaaaacagcaatccggttcccgaaaacctgcaaatcagcaccgaagagttcacccagtggcagcatgacattggtaccgtgaagttgccggacaatgtcttcgagctggttttccaactgcgccaacaattagatgccttgcctaatgcgccttacgtttccgatcgccgctggaaaaaagccatccgtctgctgcaggccagcgccttctttagcggccgcgacgccatcgcccctatcgacctgatcctgttgaaagattgcctgtggcataacatcgaaagcatgaatctgatgtctcagcagttggaatccctgatgaccagccatgcctggggccagcaggcgatgctgactaaactgggcgctatcatccaacgccgcatccaaatccagcagcagcacagcgataaaaccgcgcttaaagtcacgcgcgtgggcggcatgttcagccgtaagccgcattatgaactgccggacggaattgaaggcgagacgttgacgctgcttctccagcaaccgctgaaattgcacgatctcgaagtcattcatatcgccttcgaacgcgaagcgctggtcaactggctggaaaaaggcggcgagatccgcggcaagctcaacggcatcggttttgcccagccattgacgatggatgtcgatgccagccagcacctggtggtgcgcgacgtcagcctgcaaggctcacgcctgtcgctgccaggcagcgaatctcaggaaaatatgccagccgagatccgccagcagctggaagcgctggatgacgagtggcaccagcaacataaccgctttagcgaacagcaaaaatgcctgtttattcccggcgactggctggggcgtatcgaagccagcctgcaggacgtcggcgcgcaaattaaacaggcgcgccagccatga

SEQ ID NO: 90478 - DNA, 1449 bp, Enterobacter aerogenes
atgacgctcgacatgctgaatgtcatgctggcggtcagcgaagaagggatgatcgaggagatgctgctggcgctgctggcctctcctcaactggcggtgttctttgaaaaatttccgcggctgaaaaatatcatcgccgccgatattccgcgctggcgagaagcggttcgcgcccggctcaaagagacgcaaatccctcccgaactggacgccgaagtgcagatctatcagcaggctcagctgctttcaacgtcgcaatttattgtgcaactgccgcagatcctcggcaagctgcataagctacagtcaccctttgccgctcaggcgcagcagctggtggacgataacgcgaccttcaccccagcgctacatactctgttcttacaacgctggcgcttaagcctcgtggtacagaccaccaccctcaaccagcacctattagacgatgagcgcgatcaactgctcagcgaggtgcaggaacgaatgacgctcagcgggcagctagagccggtgctggtggaaaacgacaacgccgctggccgcctgtgggatatgagcgccggcgagcttaaacgtggcgattatcagctgatcgtgcgctatggcgattttctcagccaacagccggaactgatgcagcttgctgagcagttgggcagatcgcgggaagccaaactggtgccgaagaaagatgcgccgatggagaccttccgcgcgatggttcgtgaaccggcaacggtaccagagcaggtcgatggcctgcagcaaagcgacgatattctacgtctgttgccgccagagttggcaacgctcggcatcaccgaactggagttcgagttctaccgtaagctggtggaaaaacagttgttaacctatcgcctgcacggcgacgcatggcgggagaaaataaccgaacgcccggtaacccggcaggattttgatgagcagccgcgggggccatttattgtctgcgtagatacctcaggttcgatgggcggctttaacgagcaatgcgctaaagccttttgtctggcgctgatgcgcgtcgcgctggcggataaccgtcgctgctacatcatgctgttctccagcgaagtggtgcactacgagctaaccggcccgcaggggcttgaacaggcgatccgttttttaagccagcgttttcgcggcggcaccgatctggccagctgttttcgcgcgatcgttgaacgtttgcaaagcccgcaatgggtcgatgccgatgcggtggtgatttccgattttatcgcccagcggttgccggatgaggtggtcaataaggtgggggagttgcagcacaaacatcagcaccgttttcacgcggtggcgatgtcggtacacggcaaacccggcatcatgcgcatcttcgatcatatctggcgctttgataccggattgcgtagccgcctgctgcgtcgctggcggcgttaa

SEQ ID NO: 90479 - DNA, 993 bp, Enterobacter aerogenes
atgaaaaccgcatacatcgcaaaacaacgccagattagtttcgttaaatcccatttttcccgtcagctggaagagaagcttggcctgattgaagtgcaggcgccgatcttaagccgcgtaggagatgggacgcaggacaacttgtccggctgcgagaaagcggttcaggtaaaagtgaaaacactgccagacgcccaattcgaagtggttcattcactggcgaagtggaagcgtcaaaccctgggacaacacgacttcagcgcgggcgaagggctgtacacgcacatgaaggcccttcgccccgatgaagaccgcctcaccccaattcactccgtttacgttgaccagtgggactgggaacgcgtcatgggcgacggcgaacgccatactggcacgttgaaagcgaccgttgaggcgatctacgccgggatcaaagccaccgagctggcggtaagtcaggaatttggcctgacgccattcctgccggaacagatccactttattcacagtcaggagctgctgagccgttatccggatctggatgccaaaggccgcgagcgggcgatcgctaaagagcttggcgccgtcttcttaatcggtatcggcggtaaactgtctgacggcaagcgccacgatgttcgcgcgccggattatgacgactggagctcgccatcggcggagggttttgccggcctgaacggcgatatcctggtgtggaacccggtgctggaagacgcttttgagctttcttctatggggatccgtgttgacgccgaggcgctgaagcgccagttggcggtgaccggcgatgaagaccgtctgcagcttgaatggcaccaggcgctgctgcgcggcgaaatgccgcagaccattggcggcggtattggccagtcgcgtttaaccatgctgttgctgcagcttgaccatatcggccaggtacagtgcggcgtatggcccacgcagttgcgtgaaagcgtcgccgctctgttgtaa

SEQ ID NO: 90480 - DNA, 459 bp, Enterobacter aerogenes
atggaaaattatcagatcgacaatctggaccgcggcattcttgatgccctaatggcgaatgcgcgcaccgcttacgccgaactggccaaacagttcggcgtgagtccaggtacgattcacgtacgcgtagagaaaatgaaacaggcgggcataattacgggggcgcgaatcgacgtcagcccgaaacagctcggttatgacgtcggctgcttcatcggcattattcttaagagcgccaaagactatccttccgctctcgcccagctggagagcctggaggaggtgaccgaggcttactacaccaccggccactacagcatctttattaaggtgatgtgtaaatccatcgatgccctgcagcaggtacttatcaacaagatccaaacaatcgatgaaattcagtccactgaaaccctgatcgtgctgcaaaacccgatcatgcgtaccatcaagccctga

SEQ ID NO: 90481 - DNA, 441 bp, Enterobacter aerogenes
atggcagacattacacttatcagcggcagcaccctgggcagtgcggaatatgtagcagaacatctggcggaaaagctggaagaagcgggctacagcactgatatccagcacggtccgctggttgacgatctgcaggcagaagggatctggttagttatctcttctacccatggcgccggcgatattccggacaacctggtccccttttatgaagcgttgctggagaagcaggtcgatctttctgccgttcgctttggcgcggtgggtatcggtagccgcgaatatgacactttttgcggcgcaatcgacaaactcgaagcagcattaaaggccaacggggcaaaacagatcggtgaaacgctgaaaattaatgtcctcgaacacgagattcctgaagatccggccgaggtttgggtgggatcctggaaagatttactctga

SEQ ID NO: 90482 - DNA, 1890 bp, Enterobacter aerogenes
atgttttatcaggatccttttgacgtcatcatcattggcgggggtcatgcaggcactgaggccgcgatggcagcagcgcgaatgggccaacaaaccctgcttttgacacacaatatcgacacgctggggcagatgagctgcaacccggcgattggcggcattgggaagggacacctggtaaaagaagtggacgcgctcggtggtctgatggcgaaagcgatcgatcaggcaggtattcagtttaggatactaaacggtagcaaaggcccagctgtccgcgctacccgcgcccaggccgaccgcgtgctgtatcgccaggcggtacgcaccgcgctggagaaccagccgaacctgatgatcttccagcaggcggtagaagatctgattgtcgaaaacgatcgtgtcgtcggcgcggtgacccaaatgggcctcaagttccgcgctaagtcggtggtactaaccgtcggcaccttcctggatggcaaaatccacattgggctggacaactacagcggcggtcgcgccggcgatccgccgtcgatcccgctgtctcgccgtctgcgtgaactgccgctgcgcgtaagccgcctgaaaacgggtactccgccgcgtattgacgcacgcaccatcgattttagcgtgctggcgcaacagcacggcgataacccgatgccggtcttctcgtttatgggttccgcggatcaacatccgcgccaggtaccgtgctatatcacgcacaccaacgagaaaacccatgatgtgatccgcagcaacctcgatcgcagccccatgtacgccggggtgattgaaggtatcggcccacgttactgcccgtcgatcgaagacaaagtcatgcgctttgccgatcgcaaccagcatcagatcttccttgaaccagaagggctgacttcaaacgaaatttatccaaacggtatctccaccagcctgccgtttgatgtacaaatgcaaatcgtccgctcaatgcaggggatggaaaacgcgaagatcgttcgccctggctatgccattgagtacgatttctttgacccgcgtgacctgaagccgacgctggagagcaaatacattcagggtctgttcttcgccggccagattaacggcactaccggttatgaagaagccgccgcacagggtttgcttgccggtcttaatgccgcccgcttctcagcggaaaaagagggttgggcgccgcgtcgcgatcaggcctaccttggcgtgctggtggatgatctgtgcacacttggcaccaaagaaccgtaccgcatgtttacctcccgtgcggaatatcgcttgatgctgcgtgaagacaacgccgatctgcgcctgaccgaacaggggcgtgagctggggctggtggacgatgagcgctgggcgcgtttcaacgagaaactggaaaacattgaacgtgaacgtcaacgcctgaaaaccagttgggttaacccgctggcggaaagcgctgccgaagtgaacgctcacctgactgcgccgctatcgcgtgaagccagcggcgaagatctgctgcgtcgcccggaaatgacctacgaacagctggttcagctttctccgttcgcgccgggcctgcaggatcaacaggcggcagagcaggttgagattcaggttaagtacgaaggctatatcgctcgtcagcaggacgaaatcgaaaagcagcagcgcaacgagaatactttgctgccggcaacgctcgattaccgtcaggtatccggcttgtccaacgaggttattgccaagctgaacgaccataaaccgtcatcgatcggccaggcatcgcgtatttccgggattaccccggcggcaatttctattttgctggtgtggctgaaaaagcaggggatgctgcgccgcagcgcctga

SEQ ID NO: 90483 - DNA, 624 bp, Enterobacter aerogenes
gtgctcaacaaactttctcgtctgctggatgaagcgggtatttcgctcaccgatcaccagaaaaaccagctggtggcgtatgtcgggctgctggataagtggaacaaagcctataacctgacctctgttcgcgatcctaacgagatgctggttcgccatatcctcgatagcattatcgttgcgccatatctacagggctcccgctttatcgatgtgggaaccggcccgggcctgccgggtattccgctggctatcgtgcgcccggaatctcatttcacattactggatagccttggcaagcgtgtgcgcttcctgcgccaggtccagcatgagctaaaactggataacatcacccccgtgcagagccgtgtggaagcgtttcccgccgagccgccgtttgatggcgtcattagccgcgcttttgcctcgctgaacgacatggtgagctggtgccaccacctgccggcggcagatgggcatttctacgcgttgaaagggcaggcgcaggaaagtgaaatggcagacctgccagaaggttaccaggtttgcgacgtgattaaactgcatgtaccccagttggaaggggagagacatttggtggtcattaagccaaacgccttataa

SEQ ID NO: 90484 - DNA, 381 bp, Enterobacter aerogenes
atgtctatgtcgctcgtgagtcgaaacgttgctcgaaagcttctgtttattcagttactggcagtaatagcaagtggactgctgttcagcctcaaagaccccttctggggcatctccgccatatgcggaggtttggcagtcgttttgccaaacgcgttgtttatgatttttgcctggcgccatcaggcgcatacaccagctcaaggccgagtggcctggaccttcgccttcggtgaagcattcaaggtgttgctgaccttcgccctactggcgatggcgctggcggtttttgaagtggtatttttgccgctgatagtgacgtgggttttggtgctggtggtacaaattctggctccagctgtaattaacaacaaagggtaa

SEQ ID NO: 90485 - DNA, 816 bp, Enterobacter aerogenes
atggcttcagaaaatatgacgccgcaggattacataggacaccatctgaataaccttcagttggacctacgtacattctcgctggtggatccgcacaaccccccagccaccttctggacgctcaatattgactccatgtttttctcggtggttctcggtctgctgttccttgccatgttccgtaacgttgctaagagagcgaccagcggcgtaccagggaaattccaaaccttcatcgaaatgatcatcggcttcgtccatggcagcgtcaaagacatgtaccatggcaagagcaaggtcatcgcgccgctggcgcttaccgtgttcgtctgggtattcctgatgaacctgatggacctgctgccaatcgacctgattccttatatcggcgaacacattttcggcctgcctgcactgcgcgtggttccgtctgctgacgtgaacatcaccctgtcaatggcgcttggcgtgttcatcctgattattttctacagcatcaaaatgaaaggcgttggtgggttcgttaaagaactgaccatgcagccgttcaatcactgggcgttcattcctgtcaacttaatccttgaaggggtaagcctgctgtccaaaccggtttctctcggtctgcgactgttcggcaacatgtatgccggtgagctgattttcattctgattgctggtctgttgccgtggtggtcacagtggattctgaatgtgccttgggccattttccacatcctgattattacgctgcaagccttcatcttcatggttctgacgattgtctatctgtcgatggcatccgaagagcattga

SEQ ID NO: 90486 - DNA, 240 bp, Enterobacter aerogenes
atggaaaacctgaatatggatctgctgtacatggctgccgctgtgatgatgggtctggcggcaatcggtgctgcgatcggtatcggcatcctcgggggtaaattcctggaaggcgcagcgcgtcaaccggatctgattcctctgctgcgtactcagttctttatcgttatgggtctggtggatgctatcccgatgatcgctgtaggtctgggtctgtacgtgatgtttgctgtcgcgtag

SEQ ID NO: 90487 - DNA, 471 bp, Enterobacter aerogenes
gtgaacatgaacgcaacaatcctcggccaggccatcgcgtttgttatcttcgtatggttctgcatgaagtacgtatggccgccgttaatggctgccatcgaaaagcgccagaaagaaatttctgacggtttagcttctgcagaacgcgctaagaaagatttggaccttgcacaggccaacgcgaccgaccagctgaaaaaagcgaaagcggaagcccaggtaatcatcgagcaagcgaacaagcgtcgctctcagattctggacgaagctaaagctgaagcagaacaggaacgcaccaaaatcgtcgcacaggcgcaggctgaaatcgatgccgaacgtaaacgtgctcgcgaagaactgcgtaagcaggttgctatcctggctgttgctggcgccgagaagatcatcgaacgttccgtggatgaagctgctaacagcgacatcgtggataaacttgtcgctgaactgtaa

SEQ ID NO: 90488 - DNA, 534 bp, Enterobacter aerogenes
atgtctgaatttgtaacggtagctcgcccctacgccaaagcagcttttgactttgccgtcgaacacaaaagtgttgagcgctggcaggatatgctggcgtttgccgctgaagtgactaaaaacgaacaaatggcagagcttctctccggtgccctggcgccggaaacgctctcagatgcgtttatcgctatctgcggcgagcaacttgacgaaaacggtcagaacctgattcgggtgatggctgaaaatggtcgtctgaaggtgctcccggatgttcttgagcagttcattcacctgcgtgcggccagcgaggccatcgcagaggtagatgttatttctgccaaccaactgagtgaagaacagcttgcgaagatctccggcgcgatggaaaagcgtctgtcacgcaaagttaagctgaattgcaaaatcgataagtctgttatggcaggagttatcatccgctcgggtgatatggtcattgatggtagcgtacgcggccgtcttgatcgcctggcagacgtcttgcagtcttaa

SEQ ID NO: 90489 - DNA, 1542 bp, Enterobacter aerogenes
atgcaactgaattccaccgaaatcagcgaactgatcaagcagcgcattgctcagttcaatgttgtgagtgaagctcacaacgaaggtactattgtttctgtaagtgacggtgttatccgcatccacggcctggccgattgtatgcagggtgaaatgatctccctgccgggtaaccgttacgctatcgcactgaacctggagcgcgactccgttggtgcggttgtgatgggtccgtatgctgacctcgccgaaggcatgaaggttaagtgtactggccgtattctggaagttccggtcggtcgtggtctgttaggccgcgtagtgaacaccctgggtgcgccaattgacggtaaaggtcctgttgagcacgatggtttctcgccaatcgaagttatcgctccgggcgttatcgatcgtcaatccgtagaccagccggtacagaccggttacaaatctgttgatgccatgattccaatcggccgtggccagcgtgagctgatcatcggtgaccgtcagaccggtaaaaccgcgatggcaatcgatgcgatcatcaaccagcgtgattccggcatcaaatgcgtatacgtagctatcggccagaaagcgtccaccatctctaacgtggtgcgtaaactggaagagcacggcgcgctgtccaacactatcgttgttgtggcgaccgcttctgaatctgctgcgctgcaatacctggcgccgtatgccggttgcgcaatgggcgaatacttccgcgaccgcggtgaagatgcgctgatcgtttacgatgacctgtctaaacaggctgttgcttaccgtcaggtttccctgctgctccgtcgtccgccaggacgtgaagcattcccgggcgacgtgttctacctccactcccgtctgctggagcgcgcatcccgcgttaacgcggaatacgttgagaagttcaccaatggtgaagttaaaggtaaaaccggctccctgactgcgctgccgattatcgagacgcaagcgggtgacgtttccgcattcgttccgaccaacgtaatttccattaccgatggtcagatcttcctggaaaccaacctgttcaactccggtattcgtccggcggttaacccgggtatctccgtatcccgtgttggtggtgctgctcagaccaagatcatcaagaaactgtccggtggtatccgtaccgcgctggcgcagtatcgtgaactggctgcgttctctcagttcgcatccgatctggacgaagcgactcgtaagcagctgagccacggtcagaaagtgaccgaactgctgaaacagaaacagtatgcccctatgtctgtagcacagcagggcctggtactgttcgctgctgaacgcggttacctcgaagatgtggaactggcgaaaatcggtagcttcgaagccgctctgctggcttacgttgaccgtgaccacgctccgctgatgcaagagattaaccagaccggtggctataacgacgagatcgaaggcaagctgaaaggcatcctcgactccttcaaagcaacccagtcctggtaa

SEQ ID NO: 90490 - DNA, 864 bp, Enterobacter aerogenes
atggccggcgcaaaagagatacgtagtaagatcgcaagcgtccagaacacgcaaaagatcaccaaagcgatggagatggtcgccgcctccaaaatgcgtaaaacgcaggatcgcatggcggccagccgtccatatgcagatactatgcgcaaagtgattggtcaccttgcgaacggtaatctggaatataagcacccatacctggaagaacgcgacgttaaacgcgtgggctacctggtggtgtcgaccgaccgtggtctgtgcggtggcttgaacattaacctgttcaaaaaactgctggcggatatgaaagcatggtccgataaaggcgttcagtgcgacctcgcaatgatcggctctaaaggcgtgtctttctttaactccgtgggcggcaatattgtggcccaggtgaccggtatgggtgataacccgtccctgtccgaactgatcggcccggtaaaagtgatgttgcaggcctacgatgaaggccgtctggacaagctttacgttgtcagcaacaaatttattaacaccatgtctcaggctccgaccatcactcagctgctgccgttaccggcttcagaagatgatgatctgaaacgtaagtcctgggattacctgtatgagcccgatccgaaagcgctgctggataccctcctgcgtcgttatgtggagtctcaggtttatcagggcgtggtagaaaacctggccagcgagcaggccgcccgtatggtggcgatgaaagccgcgaccgataatggcggcagcctgattaaagagctgcagttggtatacaacaaagctcgtcaggccagcattactcaggaactcaccgagatcgtctcgggggccgccgcggtttaa

SEQ ID NO: 90491 - DNA, 1383 bp, Enterobacter aerogenes
atggctactggaaagattgtccaggtaatcggcgccgtggtcgacgtcgagttccctcaggatgccgtaccacgcgtgtacgatgcccttgaggtacagaatggtaatgagagcctggtgctggaagttcagcagcagctcggcggtggcgtagtccgtgctatcgccatgggttcttccgacggtctgcgtcgtggtctggaagttaaagaccttgagcacccgatcgaagtcccggtaggtaaagcgactctgggccgtatcatgaacgtcctgggtcagccgatcgacatgaaaggcgacatcggcgaagaagaacgttgggctatccaccgcgcggcgccttcctatgaagagctgtccagctctcaggaactgctggaaaccggcatcaaagttatcgacttgatgtgtccgttcgctaagggcggtaaagttggtctgttcggtggtgcgggtgtaggtaaaaccgtaaacatgatggagctgatccgtaacatcgcgatcgagcactccggttactccgtgtttgcgggcgttggtgagcgtactcgtgagggtaacgacttctatcacgaaatgaccgactccaacgttctggataaagtatccctggtttacggccagatgaacgagccgccgggaaaccgtctgcgcgttgcgctgaccggcctgaccatggctgagaaattccgtgacgaaggtcgtgacgttctgctgttcgtcgataacatctatcgttacaccctggccggtactgaagtatctgcactgctgggccgtatgccttcagcggtaggttatcagccgactctggcggaagagatgggcgttctgcaggaacgtatcacctccaccaaaaccggttctatcacctccgttcaggcggtatacgtacctgcggatgacttgactgacccgtccccagcaaccacctttgcgcaccttgacgcaaccgtggtactgagccgtcagatcgcgtctctgggtatctacccggccgttgacccgctggattccaccagccgtcagctggatccgctggttgttggtcaggaacactacgacaccgcgcgtggcgtacagtccctgctgcagcgttatcaggaactgaaagacatcatcgccatcctgggtatggatgaactgtctgaagaagataaactggtggtagctcgcgctcgtaagatccagcgcttcctgtcccagccgttcttcgtagcagaagtatttaccggttccccgggcaaatacgtttcgctgaaagacaccatccgtggctttaaaggcatcatggaaggcgaatacgatcacctgccggagcaggcgttctacatggtcggttccatcgaagaagccgtggaaaaagccaaaaaactttaa

SEQ ID NO: 90492 - DNA, 420 bp, Enterobacter aerogenes
atggcaatgacttaccacctggatgtcgtcagcgcagagaaacagatgttctctggcctggtcgagaaaatccaggtaacgggtagcgaaggtgagctgggtattttcccgggtcacgcgccgctgctcaccgccattaagcctggtatgattcgcatcgttaaacagttcggtcacgaagagtttatctatctgtccggcggcattcttgaagtgcaaccgggcaacgtgatcgttctggccgatacggcaattcgtggtcaggatctcgacgaagcgcgagccctggaagcgaaacgtaaagcggaagagcacatcaagagctctcacggcgacgtggattacgctcaggcgtccgcggaactggccaaagcgatcgctaaactgcgcgttatcgaattgaccaaaaaagcgatgtaa

SEQ ID NO: 90493 - DNA, 1371 bp, Enterobacter aerogenes
atgtcaaacagtgcgatgagcgtggttatccttgccgcaggcaaagggacccgcatgtattccgatcttcctaaggtgctgcatactctggccgggaagccaatggtgcaacacgtcattgatgcggctaaagatttaggcgctgccgcggtacacctggtgtacggccacggcggcgatctgctgcgtcaaacgttgcatgaagataacctcaactgggtgctgcaagcagagcagctcggtaccggccatgcgatgcagcaggcggcgccgttcttcaatgatgatgaagatatcttgatgctctatggcgatgtgccgctgatttcggttgaaaccctacagcgcctgcgcgccgcaaaaccgcagggcggtattggcctgttgacggtgaagctggatgatccaaccggttatgggcgtatcacgcgtgaaaatggccaggtgacaggtatcgttgagcataaagacgccagcgaagctcagcgccagattcaggaaatcaataccgggattctggttgctaacggcgcggacctgaaacgctggctggcgaagctcaccaacaataacgcccagggcgaatactacatcaccgatattatcgcgatggcccatcaggaaggtcatgagatcgttgcggtgcatcctcagcgcctgagcgaagttgaaggggtgaacaatcgcctgcaacttgcgcgtctggaaagagtgtatcagtcagagcaggcggaaaaactgctgttggcgggcgtgatgctgcgcgatccggcgcgtttcgatctgcgcggcgtgctgaaacacgggcgcgatgtcgaaattgatactaacgttattctgcaaggtcatgtcgtgctgggcgatcgcgtgaagatcggcgccggctgcgtcatcaaagacagcgtcatcggtgatgactgcgaaatcagcccgtatagcgtggttgaagatgcgcagctgcaggccgcctgcaccatcggcccgtttgcgcgtttgcgtccgggggctgagctgctggaaggcgctcacgtcggcaactttgtcgaaatgaagaaagcgcgtctgggcaaaggttcgaaggcaggtcatctctcctacctcggcgatgctgaaattggcgacaacgttaatatcggcgcgggtactatcacctgtaactatgatggcgcaaataagcataaaacgatcatcggcgatgatgtgtttgtcggttctgatacgcaactggtcgcgccggtcagcgtcggtaatggcgtgacgattgccgcgggcaccaccgtcacgcgtaatatagctgacaacgaactggtgctaagtcgcgtgccgcaggtccacaaacagggctggcagcgaccggtgaagaaaaagtag

SEQ ID NO: 90494 - DNA, 1830 bp, Enterobacter aerogenes
atgtgtggaattgttggcgcagtcgcgcagcgtgatattgctgaaatccttctcgaaggtttacgtcgtctggaataccgtggctatgactctgccggtctggctgtggtcgataacgaaggtcatatgacccgcgttcgtcgtctcggtaaagttcagatgctggctcaggcggtagaagagcaaccgttacacggcggtaccgggattgcccatacccgctgggcgacgcacggcgagccgtctgagagcaatgcgcatccgcatgtttctgaacatattgcggtggtccataacgggatcatcgagaaccatgagccgctgcgcgccctgctgcagtctcgcggctatgtcttcgtctctgagaccgataccgaagttatcgcgcatctggtgcactgggagctggaacagggcggtaccttgcgtgaagccgtactgcgtgcaatcccgcagctgcgcggcgcctatggtacggtgatcatggatacccgcgatccggggacgctgctggcggcacgctcaggcagcccgctggtcattggcctgggcatgggcgaaaactttatcgcttctgaccagctggcgctgctaccggtgacccgccgctttatcttcctcgaagagggtgatattgccgaagttacccgtcgtacggtggtgattttcgataaatccggcgcggaagtgaatcgccaggagatcgaatctaatctgcagtatgacgccggtgataaggggatttatcgccactatatgcagaaagagatttatgagcagccgaacgcgattaagaacaccctgaccgggcgcatcagccatggcgaggtcgatctcagcgagctggggccgaatgccaacgcgctgctgtcgcaggttgagcatatccagattgttgcctgcggaacctcgtataactccgggatggtctcccgttactggttcgaagcgttagccggcgtgccgtgcgatgtcgagattgcttcggaattccgctaccgcaaatccgcggtgcgccgcaacagcctgatgatcaccctctcccagtccggtgagacggcggataccctggcggcgctgcgcctctctaaagagcttggctatctgggttcgttggccatctgcaacgttccgggctcttcgctggtgcgcgagtctgacctggcgttgatgaccaaagccggtaccgaaatcggcgtggcatcgaccaaagcctttaccactcagctgaccgtgctgttgatgctggtggcgaaactggcgcgtctcaagggccaggatgcggctatcgagcaggatatcgtgcatggcctgcaggcgctgccgaaccgtatcgagcagatgctgtcgcaggataagcgcatcgaacagctggcggaacgtttctccgataagcatcacgcgctgttccttggccgcggcgatcagtacccgatcgcgctggaaggggcgctgaagctgaaagagatctcctacattcatgctgaagcttatgcggcgggcgagctgaaacacggcccgctggcgctgattgatgccgaaatgccggtcatcgttgttgcgccgaacaacgaattgttggaaaaactgaaatccaatattgaagaagttcgcgcccgcggcggtgaactgtacgtcttcgccgatggagacgccggtttcagcggcagcgacaacatgcacatcatcgagatgccacatgtcgaagaggtgattgcgccgatcttctacaccgtgccgctacagctgctggcttatcacgttgcgctgatcaaaggcaccgacgttgaccagccgcgtaacctggcgaaatcggtgaccgtagagtaa

SEQ ID NO: 90495 - DNA, 579 bp, Enterobacter aerogenes
atgaaaaacttatgtggtaataatttcttagcgcttctcaagcatggtgtggaaatcgatcaacttatcaagcgaagagatagagatgagatcgcgcagcatacaacaacagatatgatgagtttgtctcatgggcaacgcttatcaccttctccgctagttcctgcttgtatttatttgatattaattgttattttttcagttaatgcggcttttatattgcagagtctccaacttactccgccccgttttctggctttctactttccgctgctattaggggttattgttataaccagcttagctgcagggttagtaggtcgaggtcatgctgttggattacgtatttttatgtacctatatctcgccaatttgtttgttttttgtctagtcctggcgcttgccgtcatcgcagatgaagctattgctgccaataaggtcattctttttatgtgtgagatagccgtactctggttaggccgtagattgatgaatggaacggcttttacactgtttacgctttatcgccgtacgatcaggcttgctatggttgcccaacatctcaacgttgccagatga

SEQ ID NO: 90496 - DNA, 1041 bp, Enterobacter aerogenes
atgaacgttatgcgtaccaccgtcgcaacagttgtcgccgcgaccttatcgatgagcgctttctctgctttcgcagcagcaagcctgactggcgcaggtgcaactttccctgctccggtgtatgccaaatgggctgatacctatcagaaagaaacgggcaataaagttaactaccagggtatcggttcctctggcggcgttaaacagattattgcccacaccgtggatttcggtgcttctgatgctcctctggctgatgacaaactggcgcaggaaggcctgttccagttcccgaccgttatcggcggcgtggtgctggcggttaacctgccgggcgttaaatccggcgagctggtgctggatggtaaaaccctcggcgacatctatctgggcaaaatcaaaaaatgggatgacgaagcgatcgctaaactcaaccctggcctgaagctgccggctcagaacatcgccgtggtccgccgcgcggatggttccggtacttccttcgtcttcaccagctatctggcgaaagtgaacgaagagtggaaatctaaaattggcgcaggctctaccgtaaactggccaaccggcctgggcggtaaaggcaacgacggtatcgcagccttcgttcagcgtctgccgggcgctatcggctacgtcgagtatgcttacgctaagcagaataacctggcctacaccaaactgctgtccgctgacggcaagccggtcagcccgacggaagataacttcgctaatgcggcgaaaggtatcgactggagcaagtccttcgctcaggacctgactaaccagaaaggtgaaaatgcatggccgatcacctcaaccactttcatcctcgtccacaaggcctccaataagccggagaataccgcggaagtgctgaagttcttcgactgggcatacaaaaacggcggcaaagaagcgaatgcgctggattacgccagcctgccggacagcgtggttgagcaggttcgcgccgcatggaaaaccaacgtgaaagacagcagcggtaaagcgctgtactaa

SEQ ID NO: 90497 - DNA, 960 bp, Enterobacter aerogenes
atggctgcaaccaagccggcattcaaccctccggggaaaaagggtgacatgatcttcagcgcgctggtgaaactggctgcgctgattgtgctattgatgctgggtggcatcatcgtttccctcatcatctcttcatggccaagtattcagaaatttggcttttcctttttgtggaccaaagagtgggatgcgccgaatgaaatcttcggtgcgctggtaccgatttacgggactctggttacctcaattatcgcgttgttgatcgccgttccggtgagcttcggcatcgcgctgttcctgactgaactctccccggcctggctaaaacgcccgctgggtatcgctattgagctgctggcggcaatcccgagtatcgtatacggcatgtggggcctgtttatttttgctccgctgtttgcgacttacttccaggaaccagtcggcaacgtcctttcgacgatcccgtttgtcggcgcgctgtttgccggcccggcgttcggtatcggcatcctggcggccggcgtcattctggccatcatgatcattccttatatcgccgccgtaatgcgtgacgtcttcgagcagacgccggtgatgatgaaagagtccgcatatgggatcggctgcaccacgtgggaggtaatttggcgcatcgtgctgccgttcaccaaaaacggggtgattggcggcgtcatgctcggcctgggccgcgcgctgggtgaaaccatggccgtcacctttattatcggtaacacctatcagctcgacagcgcttcactgtatatgccgggcaacagtattacctcggcgctggccaatgaattcgcggaagcggaaagcggcctgcacgtagcggcgctgatggaactgggtctgatcctgttcgttatcacctttatcgttctggccgcgtcgaagttcatgattatgcgtctcgctaagaacgagggggcacgctaa

SEQ ID NO: 90498 - DNA, 891 bp, Enterobacter aerogenes
atggcaacgatcgaattgcaaaccaccgccgcgctggcggaatcccgtcgcaagatgcaggctaagcgccgcctgaagaaccgcatcgccctgaccctgtcaatggcgaccatggcgtttggcctcttctggcttatctggatcctgatgtcgaccattacgcgtggcatcgacggcatgagtctggcgctgtttaccgaaatgacgccgccgccgaataccgcgggcggcggtctggcgaacgccctggcgggcagcggcctgctgatcctgtgggcgaccgtttttggtacgccgctgggtatcatggccggtatctatctggcggagtacggcagaaagtcggtactggcggaaatcatccgctttattaacgatattctgctttccgcgccatctatcgtcgtggggctgttcgtctacaccatcgtggtggcgcagatgcagcacttctccggctgggcgggtgttatcgcgctggcgctgctgcaggtgccaatcgtgattcgtaccactgaaaacatgctgaagctggtgccggatagcctgcgtgaagcagcctatgcgctggggacgccgaagtggaagatgatttccgcgatcacccttaaggcgtcggtatccggcattatgaccggtatcctgctggccattgcccgtatcgccggggagacggcgccgctgctgttcaccgcgctctccaaccagttctggagcaccgatatgatgcagccgatcgccaacctgccggtgaccatttttaaatttgccatgagtccgttcgcggaatggcagcaactggcatgggccggggtattgattatcaccctgtgcgtcttgctgctgaatattctggcgcgcgttgtcttcgcgaagaagaaacacggttaa

SEQ ID NO: 90499 - DNA, 774 bp, Enterobacter aerogenes
atgagtatggtgaacgcgaatccgggtaaaatttcagttcgtgacctgaacttctactacggcaaattccatgccctgaagaacatcaacctggatatcgctaagaaccaggtgacggcgtttatcggcccgtcaggctgcggtaaatccactctgctgcgtacgttcaacaagatgtttgagctgtacccggagcagcgtgcggaaggcgaaattctgctggatggcgacaatattctcaccaatacccaggatatcgcgctgctgcgcgcgaaagtagggatggtattccagaagccgacgccgttcccgatgtctatctacgacaacatcgccttcggcgtgcgtctgttcgagaagctgtcgcgcgccgatatggacgagcgcgtacagtgggcgttgaccaaagccgcattatggaatgaaaccaaagataaactgcaccagagcgggtattctctctccggtggtcagcagcagcgtctgtgtatcgcccgcggtatcgcgattcgcccggaagtgctgctgctcgatgaaccttgctcagcgctggacccgatctccaccgggcgcatcgaggaacttatcaccgagttgaagcaggattacaccgtcgttatcgttacccacaacatgcagcaggctgcgcgttgttccgaccatacggcatttatgtatcttggcgagctgattgaattcagcaacacggacgatctgtttaccaagcccgctaagaagcaaactgaagattatattactggccgctacggttga

SEQ ID NO: 90500 - DNA, 726 bp, Enterobacter aerogenes
atggataacttaaatcttaataaacatatttccggccagttcaacgccgaactggagtacattcgcacccaggtaatgaccatgggtgggctggtggagcaacagctttctgatgcgatcaccgcgatgcacaatcaggacagcgatctggcgaagcgcgtaatcgatggcgacaagcaggtcaatatgatggaagtggcgatcgacgaggcctgcgtgcgcatcatcgctaaacgtcagccgaccgccagcgacctgcggctggtgatggcgatcatcaagactatcgccgagctggaacgtattggcgacgtggcggataaaatctgccgcaccgcgctggagaagttttcccagcagcaccaaccgctgctggtgagcctggagtcgctaggccgccatactgtacagatgctgcatgatgtgctggatgcctttgcgcgtatggatcttgatgaagcggtacgtatctatcgcgaagacaagaaagtcgatcaggaatatgaaggcatcgtgcgtcaactgatgacctatatgatggaagattcacgtactattccgagcgtcctgaccgcattattctgcgcgcgctctatcgagcgtatcggcgatcgctgccagaatatctgcgaatatattttctacttcgttaaaggccaggatttccgtcacgtaggcggcgacgaactggataaactgctcgcgggtaaagatccgaaagagtaa

SEQ ID NO: 90501 - DNA, 1635 bp, Enterobacter aerogenes
atgattagaagaaatatgatcgcttcagcgatggttttgctggcgccgctttcttattcaacaaatcttattgccggacagcttacggttgaacaacgattggagcttctggaaaaagcgcttcaggacacgcaaaaagaactcaagaaatatcaggatcaggagaaaaaaagaaaccaggtttgggccgcctggtcgcaaccggtaaatagccagaagagccagagtgcgaaagcgcctacggcgacccaagcggccgttaagccagacgcggtactggtcaaaaatgaacagccggcgcagggtggtgagccagcctatagcgccatgacgctgaaagattttagcaaattcgtgaaagatgaaattggctttagctataacggctattaccgttctggctggggaactgcctcgcacggctcgccaaaatcgtgggccatcggttcgcttggccgtttgggtaacgagtattccggctggtttgatttacagcttaaacagcgcgtttttcaggaaggcgacaaacgtgtggacgccatcgtgatgctcgatggcaacgtgggtcagcaatattctgccggctggtttggcgacaacgccggcggcgaaaactaccttcagttctcggatatgtacgtcaacactaaaggctttttgccgtttgccccggaagcggatttttgggtcggtaagcacggtgcgccgaaaatcgagatccagatgctggactggaaaacacaaagaaccgatgcggcagctggcgtagggcttgaaaactggaaagtgggcgccggtaaatttgatatcgcgctggtgcgcgaagatattgatgattacgaccgctctttgactaataagcagcaaattaataccaataccctggatgtgcgttacaaagatattccgctgtgggacaaagcctcgctgatggtcagcgggcgctatgtcgccgccaatcaaagctcatcagagaaatataaagaggggaatgaaggttactaccaatggaaagatacctggatggtgggaacttcgttaacgcagaaatttgataacggcggctttaacgagttctcattattactggcgaataactccatcgccagcagcttctcgcgctatgccggttcgagcccgtataccaccaataatgggcgctattatggcgatcataccaacggcaccgccgtgcgcttaacctcgcagggggaaacctatttgcgcgatgatgtcattatggcgaatgcaatcgtctactcatttggtaatgacgtctatagctatgaaaccggcgcccattcagactttgaatctattcgcgctgtgattcgtccggcatatatctggaataaatataatcagaccggcgttgaattgggctacttcaaacagcagaacaaagatgtgacgggcaagaaatataacgaatccggttataagaccaccttattccataccttcaaagttaataccagtatgctgacctcgcgcccggaaatccgtttttatgcgacttatattaaagccgaagatatcgacctggataaggccgctaacaataccaccgcggtttttgaagatggcaagaacgaccaattcgcactcggcgcgcaggccgaaatttggtggtaa

SEQ ID NO: 90502 - DNA, 1167 bp, Enterobacter aerogenes
atgaaacgacatgcaatctacttcaccctggcgctggctggcgccacatttacggcacacgccgcgccgctgccgacgatgcctgatgccgccattcctgtcagccaatatattactcaggtgaatactgataacagtgtgactttccggttatttgcccccgatgccaggcgtgtttccgtcgtcacggggtcgacgccggatacctttgtctctcatgacatgaccaaagatacccagggcgtatggacgtggaagagcgatcgcctggccgccaatctttatgagtactacttcgacgtggacggttttcgttctgtcgataccggcagccgttatcagaagccgcagcgccaggtgaataccagcctgatactggtgcccggcagcattcttgacgatcgggcagtcccgcacggcgatctgcgtaccgtcacctaccattcgacggcgcttaagtcagaacgccgcgtctatgtctggacgccgccgggctataacggcagcggcgaaccgttgccggtgctctatttctaccacggttttggcgatagcggcctgtcggccatcgaccaggggcgcatcccgcaaatgatggataacctgctggcggagggcaaaatcaagccgatgctggtggtggtgccggataccgaaaccgatattccacaagcgatcgcggaaaacttcccgccgcaggagcggcgtaaaaacttctatccactcaatgcgaaagccgcagacaacgaattgatgcacgacatcattccgctgatcgattcccgatttaacgtgcgtaaagatgccgacggccgggcgctggcggggctgtcgcagggcggttaccaggcgctggtgtccgggatgaaccatcttgagagcttcgggtggcttgccacctttagcggggttacgacaaccacggttcccgatgctggcgtggaggcgcagttgaataaccctgacgccatcaataagcaactgcgtaactttacgctggtggttggcgaaaaagacgccgtcactggcaaagatattgccggcctgaaaagcgagctggaaaagcagaagatcaaatttgattaccactcttatcctggcctgaatcatgaaatggacgtctggcgtccggcctatgccgagtttgtgcaaaagctctttaaataa

SEQ ID NO: 90503 - DNA, 720 bp, Enterobacter aerogenes
atgaaattgattgtgacggaagattatgaagagatgagcctggtcgcctgccatcatcttttaggctatatcacgatgccgcgacggatgaatctggcggtgacggcggggagtaccccaaagcgcatgtatgagcatttgaccgccgccatcaaagggaaatcattctatgatcgggttcactattacaactttgatgagattccttttcgcggccagcagcgtgaaggggtgacgatttccaacctgcgccagctgttttttactccagcgcaaatcaaagaagacaacatccataaattgacgctggagaacgcggctcaacacgatcgccgcctcgaagaggccggcggtcttgacctggtcgtgctggggctgggtgccgacggccatttttgcggcaacctgccgaacactacacgttttcatgatgagacggtcgaagtaccgattcagggggagctgattggcattgtcgcgaacggcgaaatggggggcgatttcaatgtggtgccggatagctatgtcaccatggggccgaaaagcgtgatggcggcaaaaaacctgctgctgattgtcagcggcgcggcaaaggcgcaagcgctaaagcaggtggtggaaggcccggtcagcgaactggtgccggcctctgtactcaagttgcacccttcgttggtgattattgcggataaagcggctgcggcggaattgcagcactaa

SEQ ID NO: 90504 - DNA, 666 bp, Enterobacter aerogenes
atgacccaaccacaagcagtatttttcgattgtgacggcacgctggtcgatagcgaggtgatttgctcacgcgcctatgttcacatgtttcaggaattcggtattacgctggatttagccgaaatttttaagcgcttcaagggcgttaagctgtacgagattatcgacaccatcaacgctgaatatggcgttaacctgcagaaagagaccctggagccggtgtatcgcgccgaagtcgcccgtctgttcgatagcgagctggagatcatccccggcgccgctgcgctgctggacgcggtgaagatccccatgtgcgtggtgtcgaatggcccggtcagtaaaatgcagcattcgctcggtagaacgcagatgctgcaccacttcccagaccggctgtacagcggttacgacattcagcgctggaaacccgacccggcgctgatgttccatgcggcagaggccatgcaggtacaagtcgaaaactgtattctggtcgatgattccagcgcgggagcccaatcaggaattgccgcgggtatggaagtcttttacttctgcgccgacccgcacaaccaaccgatcgatcatccgaaagtaacgacctttaccgatttagctgagctgccggcattgtggagagcgcgtggctgggatattactcgttaa

SEQ ID NO: 90505 - DNA, 1338 bp, Enterobacter aerogenes
atgagtcaacaaccaaccagccagtcttctggccagggtctgctggagcgcgtatttaaactgcgcgagcacggcaccacggtgcgcactgaagcgatcgccggtttcaccacgttcctgacgatggtctacatcgtcttcgtgaacccacaaattcttggcgtggcgggtatggataccagcgctgtctttgtgaccacctgtctgatcgctgccttcggcagcattctgatgggtctgttcgcgaatctgccggtggcgctggcgccagcgatgggtctgaatgccttctttgccttcgtggtagttcaggcgatgggcctgccgtggcaggtgggtatgggcgcgattttctggggcgccgttggcctgctgctgctgaccctcttccgcgtacgctactggatgattgccaatatcccggtgagcctgcgcgtgggtatcaccagcggtatcgggctgtttatcggcatgatgggcctgaagaacgccggcgttatcgtggcgaaccaggacacgttggtcagcatcggcaacctgacttcccacagcgtgctgctgggcgtgctcggattctttattatcgctatcctggcatcgcgtaatattcatgccgccgtgctggtctccatcgtcgtcaccaccctgttgggctggatgctcggcgatgtgcactataccggcatcgtctccgcgccgccgagcgtgacctcggttgtgggtcaggtcgatctggccggttcgctgaaccttggcctggcgggcgtgatcttctcgttcatgctggttaacctgttcgactcctccggcaccctgattggcgtcaccgataaagccgggctggcagatgcgcagggtaaattcccacgcatgaagcaggcgttgttcgtcgatagcgtgtcgtctgttgccggctcctttattggcacctcttcggttacggcctatatcgaatcctcctccggcgtttcggttggcgggcgtactggcctgaccgccgttgtcgtaggtatcctgttcctgctggtcatcttcctgtcgccgctggcggggatggttccggcctatgccgccgctggggcgctgatttacgttggcgtgctgatgacctcaagcctggcgcgcgtgaagtgggatgacctgacggaagcggtaccggcgtttatcaccgcggtgatgatgccgttcagcttctcgatcaccgaaggtatcgccctgggctttatttcctactgcgtgatgaagattggtaccggccgtctgcgtgaactcagcccgtgcgtgatcatcgtttcgctgctgttcgtgctgaaaattgtctttatcgatgcgcattga

SEQ ID NO: 90506 - DNA, 567 bp, Enterobacter aerogenes
atgtctgatacgttgaaagttgttacgttactcggaagtctacgcaaaggttcttttaatgccatggttgcgcgcacgctgccgggcattgcgcctgcgggcatggaaatctccgcgctgccgtcaatcggcgatatcccgctgtacgatgccgatatccaacaggaagagggattcccgcagagcgtgcaggcgatcgcgaaacaaatccgcgaagcggacggcgtggtgatcgttactccggaatataactactcggtacccggcggtctgaagaacgctatcgactggctctcgcgtctgccggaacagccgctggccggtaagccggtgctgatccagaccagctccatgggcgccatcggcggggcccgctgccagtatcatctacgccagattctggtcttcctcgatgcgatggtcatgaacaagccggaatttatgggcggtgtgattcagaacaaagtcgatccgcaggcgggtgaagtggtcgatcagagcacactggaccatctgcgcggccagttgaccgcctttggcgattacattcagcgggttaaagcataa

SEQ ID NO: 90507 - DNA, 738 bp, Enterobacter aerogenes
atggcaacgcattttgcaagagggatactcaacaccagggagccgctatcgacgcgtttgtcggcggcatgtcatcaatccgcacgtaacctacccgaataccgacagagccgctatcgcgcctcgcgttcgctgctcgctgaactgcttttcatgctttatggtatcggcgagctgccggaaatcatcagcgaacccaatggacggcccgtatttcgcgatccccaccttccccgcttttccatctcttatgccgggaatatcgtcggcgtagcgctgacgaccgaaggtgactgcggtctcgatatggaactgcaacatgcctcgcgtggcgtccatccgctacatgccgccgatcgctatgtcttcaatagcaatgagaatttatggattaacatccagcacgatccggatgaagcccgcgcccaactggtggcgctgcgccgcagcgtgctgaagctcaccggtgaagcccccgtgcgagtacaactgcttccggggtctggtcgcctgcgtaccgctggcacccaatcgattgaagccatctgtgatgctgaaacgttgctggtgtggtcaatcgccgtcaccccgaatatcgggccgctgaaggtctgggaatatgatagtaaagagggctggcgctgcctgcctgatgcgcaaacgcgcgccaaagagactgacgcgcgcctgatgcgctttaccagcttaccggtagaaaaagtattctccctcaactga

SEQ ID NO: 90508 - DNA, 960 bp, Enterobacter aerogenes
atgaagaaatccctgtcgagtctcgatcttaatctcctgctgtgcctgcagcttctgacccaggagcgcagcgtcacccgcacggcgaaacggatgaacgtttcgccgtcggcggtgagtaaatcattagccaagttacgcacctggtttgacgatccgctgtttgttaaaacaccgctagggctggcgccaacgccgttaatgagcagcatggagcaggatcttgccgactggatgcagatgggcaatcagatcctcgataaaccgcaccacactatgccaagcggcctgaagttcgagctggcggcagaatcaccgctgctgatgatcctgttcaacaccctctcccaacaaatttatcaacgttatccacaagcgctgatccgtttacgcaactgggattacgactcgctggatgccatcattcgcggcgaggttgatatcggtttttgcggcaaggaaacccatccgcgttcgcgcgaacagctgagcctgctgccgtggtatatcgattttgatgtcctgtttagcgacctgccgcaggtgtggctgcgcgccgatcatccggcgctcaatgaagagtggaacctggcggctttcctgcgctatccgcacatcaatatctgctgggaacaaagcgatacctgggcgctggatgatgtgctacatgatctgggccacaaacggaccgttgccctgaccctgcccggctttgagcagtcgctgtttatggcggcgcagccaaatcacaccatgatagccaccgcgccgcgctattgtcagcactataatcagcagcatcatctgccgctggtatcgcgcccgctgccgctggagccgcagctactggaaaaaatgcgcgtgccgttcaccctgctgtggcataagcgtaatagctataatccaaagatcgtatggctcagagaaacccttaaacagctctattccaatacgctgtag

SEQ ID NO: 90509 - DNA, 1185 bp, Enterobacter aerogenes
atggcacgctttcttatctgcagtttcgcattggtactgctctatccatccggcattgatatgtatctggtcggtctaccgcgcatcgcccaggatcttggcgccagcgaggcacagctgcatatcgccttttcggtctatttagccggcatggctaccgcgatgctttttgccgggcgagcggcggataaatccgggcgtaaaccggtcgcgattttcggcgccatcaccttcatactggcctcgttgttgtgctcgcaggcgcataacagcacgcattttctgattggccgctttatccaggggatcggcgcgggaagctgctacgtcgtcgcttttgccgttctgcgcgatacgctggacgagcgccgccgcgccaaggtactgtcgctgcttaatggcattacctgcattattcccgtcctcgcgccggtacttggccatctgatcatgttgaaatatccgtggcagagcctgttctacaccatgacaggcatgggggtgatggtggggttattgtcggtgtttatcctgcgtgagacgcgcccgacaacgcatccgcaggcagacgcacagcacaatggcgccgctgagtcgctgctaaaccgttttttcctcagccgcatagtcattacgactctcagcgtcaccgcaattttgacttacgtaaacgtctctccggtgctgatgatggaagagatgggtttcgaccgcggaacttattcaatggcgatggcgctgatggcaatggtcagcatggccgtgtcgttctccacgccgttcgctctgacgctttttaaaccacgtaccctgatgctgacctcgcagacgttgttccttatcgctggcgtggtattgagcctcgccgccagccagcccctcaccatgctgggattaggtatgatctgcgcgggtttctcggtcggctttggcgtcgcgatgagccaggcgctaggtcctttcacgctgcgcgcgggcgtcgccagttccgctctcggtatcgctcaggtctgtggttcttcgctgtggatttggctggcggctatcatcgggctgagcgccatgaatatgctgatcgggatactcattgcctgtagcatagtcagtattgttctgatactggtcgtctcaccggcgcgcgcgacgcaagataatgaagaaatccctgtcgagtctcgatcttaa

SEQ ID NO: 90510 - DNA, 1365 bp, Enterobacter aerogenes
atgagccataacgacactatcgtcgcccaggcaacccctccgggacgcgggggtgtgggcatcctgcgtatctccggccttaaggcgcgcgacgtcgcgcaggcggtactcggcaagctgccgaagccgcgctatgccgactacctgccgtttaaagacgccgacggtacgccgctggatcaggggattgcgctgtggtttccggggccgaactcctttaccggtgaagatgtcctcgaactgcagggccacggcggcccggtcattctggatctgctgctcaaacgtattctgaccttgcccggcgttcgcatcgccaatccgggcgagttttccgagcgcgcgttcctcaacgacaagctcgacctggcgcaggcagaggccatagccgaccttatcgacgccagctcagagcaggcggcccgttcggcgttgaactccttgcaaggggccttctccgcgcgtgtgaaccatcttgtggaagcgctcactcacctgcgcatctacgtggaagcggcgattgatttcccggatgaagaaattgatttcctctccgatggtaaaattgaagcccaactgaacgacgtgatcgccgatctcgatgccgtccgcgccgaagcccgtcagggcagcctgctgcgtgaagggatgaaagtggtgatcgccggacggccaaacgccggtaaatccagcctgctcaacgcgctggccggacgagaagcggcgatcgtcaccgatatcgccggcaccacccgcgacgtactgcgcgaacatattcacatcgacggtatgccgctgcatatcatcgataccgcaggcctgcgtgacgccagtgatgaagtggagcgtatcggcattgaacgcgcctggcaggagatcgagcaggcggatcgggtgctgtttatggtcgacggcaccaccaccagcgccgttgacccggcggagatctggccggactttatcgagcgcctgcccgctaaactgccgattaccgtggtgcgtaataaagccgacgtcaccggcgaagcgctggggctcagcgaagtaaatggccactcactaatccgcctgtcggcgcgtaccggtgaaggggtcgaggtgctgcgcaaccaccttaagcagagcatgggcttcgataccaacatggaaggcggcttcctcgcccgtcgtcgccacctgcaagcgctggaaacagctgcggaccatctgcagcagggcaaaacgcagttgctgggcgcctgggccggtgaattactggcggaggagctgcgtctgtcgcaacaggcattaagtgaaatcaccggcgaatttacctctgacgatctgctgggccgcatcttctccagtttctgtatcggtaagtaa

SEQ ID NO: 90511 - DNA, 1647 bp, Enterobacter aerogenes
atggattcgcaacgcaatcttcttatcatcgctttgttgttcgtgtctttcatgatctggcaagcctgggagcaggacaaaaatccgcaaacccagcagcagaccacgcagactacgaccacagcagcgggtagcgccgcagaccagggcgtaccggccagtggccaggggaaactgattacggttaaaactgatgtgcttgatctgaccatcaacaccagcggtggtgatgttgagcaagcgctgcttccggcttacccgaaagcgctgaaatctactgaaccgttccagttactggaaaccacgccacagtttatctatcaggcacagagcggcttaactggtcgtgacggcccggataacccggctaacggcccgcgtccgctgtataacgctgataaagatgcgtatgtactggctgacggccagaacgaaatcgttattccgctgacctacaccgacaaagcgggcaacgtcttcaccaaaaccttcaccctgaaacgcggtgattatgcggtgaacgttggctacaacgtgaaaaacgtcggcgaaaaaccgctggagatctcctccttcggtcagctgaagcaaacggcagcgctgccatcaagccgcgatacgcaaaccggcggtctgtctaccatgcacaccttccgtggcgcggcgtactccactgctgattcgaaatacgaaaaatataaattcgatactatcgtcgacaacgaaaacctgaacgtcagcaccaaagacggttgggtagcgatgttgcagcagtacttcaccaccgcgtgggttccgcataacaacggcaccaacaacttctataccgctaacctcggtaatggcgttgtcgctatcggctataaatcacagccggtactggtgcagccaggtcaaaccgacaagctggaaagcgtgctgtgggtcggcccggctctgcaggataaaatggctgccgtcgcgccgcacctggatctgaccgtcgactacggctggctgtggttcatctcccaaccgctgtttaagctgctgaaattcatccacggcttcctcggcaactggggcttctcgattatcgtcatcacctttatcgttcgtggcatcatgtacccgctgactaaagcgcagtacacctccatggcgaagatgcgtatgctgcagccgaagattcaggcaatgcgcgagcgtctgggcgacgataaacaacgtcaaagccaggaaatgatggcgctgtataaagctgaaaaagttaacccgctgggtggctgcttcccgctgattattcagatgcctatcttccttgcgctgtactacatgctgagcgcctcggttgaactgcgtcatgcgccgtttatcctgtggatccacgacctgtccgcgcaagacccgtactacatcctgccgatcatcatgggcgcgaccatgttcttcatccagaagatgtcgccgaccaccgtgaccgacccgatgcagcagaagatcatgacctttatgccggtcatcttcacggtgttcttcctgtggttcccgtctggtctggtggtgtactacatcgtcagcaacctggtaaccattattcagcagcagctgatttaccgtggtctggagaagcgtggcctacatagccgcgagaagaaaaaatcctga

SEQ ID NO: 90512 - DNA, 327 bp, Enterobacter aerogenes
ttgttaactcccagtcatttcactttcgtcttccagcagccacaacgggctggcacgccgcaaatcaccatcctcggccgcctgaattcgctggggcatccccgcatcggtcttaccgtcgccaagaaaaacgttaagcgcgcgcatgaacgcaatcggattaaacgtctgacgcgtgaaagcttccgtttacgtcaacatgaactcccgccaatggatttcgtggtggtggcaaagaaaggggttgccgacctcgataaccgtgctctctcggaagcgttggaaaaattatggcgccgccattgtcgcctggctcgcgggtcctga

SEQ ID NO: 90513 - DNA, 1401 bp, Enterobacter aerogenes
gtgtcactttcgctttggcagcagtgtcttgcccgattgcaggatgagttaccagccacagaattcagcatgtggatccgcccattgcaggcggaactgagcgataacacgctggcactgtatgcgccaaaccgttttgtgctcgattgggtaagggacaaatacctcaataatatcaatgggctcctcaatgacttttgtggtgcggacgctccacagctgcgctttgaagtgggcgcgaagcctgcggcgccgtcccaccaggggacggccaacgtcgccacggcgatcccggccgctcaggtgcaaaccgcgcgcgtcgcgccggctgtcgcccgtcagggctgggataacgttccggcgccggcagagcccacctaccgttccaacgtcaacgtcaagcatacgtttgataacttcgtcgaaggtaaatctaaccagctggcacgcgcggcggcgcgtcaggtggccgataacccgggcggcgcgtataacccgctgttcctttatggcggcaccggtctgggtaaaacccacctgttgcacgccgtcggcaacggcatcgtggcgcgtaagccaaatgctaaagtggtttatatgcactccgagcgtttcgtgcaggacatggttaaagccctgcaaaacaacgccatcgaagaatttaaacgctattaccgctccgttgacgccctgctgatcgatgatattcagttcttcgccaataaagagcgttcgcaggaagagttcttccacaccttcaatgccttgctggaaggtaatcagcagatcatcctcacttcggatcgttatccaaaagagatcaacggcgttgaggatcgtctgaaatcgcgctttggctggggcctgacggtggcgatcgagccgcctgaactggaaacccgcgtcgcgatcctgatgaagaaagccgatgagaacgatatccgcctgccgggcgaagtcgcgttctttatcgctaagcgtctgcgttcgaacgtgcgtgagctggaaggggcgctgaaccgcgtcattgctaacgccaactttaccggccgggcgatcaccatcgatttcgtgcgcgaagcgctgcgcgatttactggcgctgcaggaaaaattagtcaccatcgacaatattcaaaagacggtggcggagtattacaagattaaggtagcggacctgctgtccaaacgccgctctcgttcggtggcgcgcccacgccagatggcgatggcgctggccaaagagctgaccaaccacagcctgccggaaatcggcgatgcgtttggcggccgcgaccataccaccgtgctgcacgcctgccgtaagattgagcagttgcgtgaagaaagccacgatattaaagaagatttttccaatttaatcagaacattatcctcgtga

SEQ ID NO: 90514 - DNA, 1101 bp, Enterobacter aerogenes
atgaaatttaccgtagaacgtgaacatttattaaaaccgctgcaacaggtgagcggtccgttaggtggtcgtccgacactgccaattctcggtaacctgctgcttcaggtcgcggacggcacgctgtcgctaaccggtaccgatctggaaatggaaatggtcgcgcgcgtgtcgctgattcagccgcacgaagcgggcgccaccaccgttccggcgcgtaaattctttgatatctgccgcggcctgcctgaaggcgcggagatcgccgtgcagcttgaaggcgaccgtatgctggtgcgctccggccgcagccgcttctcgctgtcgaccctgcctgccgccgatttcccgaatctcgacgactggcagagcgaagtggaatttactctgccgcaggcgacgatgaagcgcctgattgaagccacccagttttcgatggcgcaccaggacgttcgttactacttaaacggcatgctgtttgaaaccgaaggtagcgaactgcgcactgtcgccaccgacggccaccgtctggcggtttgttcaatgccgctggaagagtcgctgccgaaccattcggtgatcgtgccgcgtaaaggggtgattgagctgatgcgtatgcttgacggcggcgatacgccgctgcgcgtgcagatcggcagcaacaatatccgcgctcacgtcggcgattttatcttcacctcgaagctggttgatggccgtttcccggactatcgccgcgtattgccgaaaaacccggataaacaccttgatgccggctgcgacattctcaagcaggctttcgcccgcgcggcaatcctctcgaacgagaaattccgcggcgtgcggctgtacgtcagcgagaaccagctgaaaatcaccgctaacaacccggagcaggaagaggcggaagagattctcgatgtcacttattcgggcagcgagatggaaatcggctttaacgttagctacgtgctggatgtgctcaatgcgctgaaatgcgagaatgtgcgcattctgctgacggattccgtatcgagcgtgcagattgaggatgcggcttcacagtccgccgcctatgttgtcatgcctatgagattgtag

SEQ ID NO: 90515 - DNA, 1074 bp, Enterobacter aerogenes
atgtcgctatcccgactcctaatcaaagatttccgcaatatcgaaaatgcggatctcgctttatcccccagctttaacttcctggttggcgcaaacggcagcggcaaaaccagcgtgctggaagctatctatacgctcggccatggcagggcgtttcgcagtttgcaaattggccgggtgattcgtcacgagcaggattcgtttgtcctgcacgggcgtttacagggcgaagagcgggaaaccgccatcggcctgaccaaagacaaacagggcgacagcaaagtgcgtatcgacggcaccgatggccacaaggtggcggaactggcgcacctgatgccgatgcagctgatcacgccggaggggtttactttactcaacggcggccccaaatacagaagagcgttccttgattggggatgctttcataacgaagccggattcttcaccgcctggagcaacctgaagcgcctactgaaacagcgcaacgccgcgctgcgccaagtgagccgctatgcgcaactgcggccgtgggacctggaattaatcccgctggcggaacaaatcagccgctggcgtgccgaatacagcgccgctattgtcgaagacatggcggatacctgtcagcaatttttaccggaattcaccctcaccttctctttccagcgcggctgggaaaaagaaacgggctacgccgaggtgctggagcggaatttcgaacgcgacagaatgttaacctacaccgcccacggtccgcataaagcggattttcgcattcgcgccgatggggcgccggtggaagacaccttgtcgcgcgggcagcttaagctgctgatgtgcgccctacgactggcgcagggcgagttcctgacccgcgaaagcgggcggcgctgcctgtacctgatagatgattttgcctcggagcttgacgatgcccggcgcgggttgcttgccagccgcttaaaagccacgcaatcgcaggttttcgtcagcgcaatcagcgctgaacacgtaatggacatgtcggacaaaaattcgaagatgttcaccgtggaaaagggtaaaataacggattaa

SEQ ID NO: 90516 - DNA, 2415 bp, Enterobacter aerogenes
atgtcgaattcttatgactcctccagtatcaaagtcctgaaagggctggatgcggtgcgtaagcgcccgggtatgtatatcggcgacacggatgacggcaccggtctgcaccacatggtattcgaggttgtggataacgctatcgacgaagcgctcgcaggttactgtaaagacatcgttgttactatccacagcgataactccgtctccgtacaggatgacggccgcggcatcccaaccggcattcacccggaagagggcgtctccgcggcggaagttatcatgaccgtcctgcacgccggcggtaaattcgatgataactcctataaagtgtccggcggtctgcacggcgtaggcgtctcggtggttaacgccctgtcgcagaagctggagctggttatccaacgcgataacaaagttcacaaacaaatttatgagcacggtgtgccgcaggcaccgctggcggtaaccggtgaaaccgaaagcaccggtaccatggtgcgtttctggccaagcctggaaacctttaccaacgtcactgaattcgaatacgaaatcctggcgaaacgtctgcgcgagctgtcgttcctcaactccggggtctctatccgcctgcgcgataagcgcgacggcaaagaagaccatttccactacgaaggcggcatcaaggcgtttgttgagtatctcaacaagaacaaaacgccgatccacccgaatatcttctatttctccaccgaaaaagacggtatcggcgttgaagtggcgctgcagtggaacgatggtttccaggaaaacatctactgctttaccaacaacattccgcagcgcgacggcggtactcacctggcgggcttccgcgcggcgatgacccgtaccctgaacgcctacatggataaagaaggctacagcaaaaaggcgaaagtcagcgctaccggcgacgatgcgcgtgaaggcctgattgccgtggtttccgtaaaggtgccggatccgaagttctcctctcagactaaagacaagctggtctcctccgaggtgaaatcggcggttgaacagcagatgaacgaactgctgagcgaatacctgctggaaaacccgtccgatgcgaaaatcgtggtcggcaaaattatcgacgccgcgcgtgcgcgtgaagccgcgcgtcgcgcccgtgaaatgacccgtcgtaaaggcgcgcttgacctggcaggcctgccgggcaaactggcggattgccaggaacgcgacccggcgctgtctgaactgtacctcgtggaaggggactccgcgggcggctctgcgaaacagggccgtaaccgtaagaaccaggctatcctgccgctgaagggtaaaatccttaacgttgagaaagcccgcttcgataaaatgctctcttctcaggaagtagccacgcttatcaccgcgctgggctgcggcatcggccgcgatgagtacaacccggataaactgcgttatcacagcatcatcatcatgaccgatgcggacgtcgacggctcgcacattcgtaccctgctgttgaccttcttctatcgtcagatgccggaaatcgttgaacgcggtcacgtttacattgctcagccgccgctgtacaaagtgaagaaaggcaagcaggaacagtacattaaagacgacgaagcgatggatcagtaccagatctccatcgcgctcgacggcgcgaccctgcacaccaacgccagcgcaccggccttagccggcgagtcgctggaaaaactggtggccgagtacaacgcgacgcagaaaatgattggccgcatggagcgccgtttcccgaaagcgatgctcaaagagcttatctatcagccgacgctggccgaagccgatctgagcaacgagcagaccgtcacccgctgggttaatcagctgattagcgagctgaacgaaaaagagcagcacggcagccagtggaagtttgatattcgtgaaaacagcgagctgcagcagttcgagcctatcgtgcgcgtgcgtacccacggcgtcgataccgactacccgctggataacgagttcatcaccggcgcggaataccgccgcatctgcaccctcggcgagaagctgcgcgggcttatcgaagacgacgcgtttatcgaacgcggcgagcgccgccagccggtagctagcttcgaacaggcgctcgactggctggtgaaagagtcgcgtcgcggcctctctatccagcgttataaaggtctgggcgagatgaacccggatcagctgtgggaaaccaccatggatccggacagccgccgcatgctgcgcgtcaccgtgaaggatgcgattgccgccgaccagctgttcaccaccctgatgggcgatgccgttgaaccgcgtcgcgcctttatcgaagagaacgccctgaaagcggcgaacatcgatatctaa

SEQ ID NO: 90517 - DNA, 813 bp, Enterobacter aerogenes
atggctattaaactgattgcaattgatatggacggcacgctgttgctgccggaccataccatttctccggcggtgaaaaccgccatcgcggcagcgcgcgcccgcggcgtgaacgtggtgctgactaccggccgtccttacgctggcgtccatagctacctgaaagagttgcacatggaacagccgggcgattactgcatcacctataacggcgcgctggttcagaaagccagcgacggcagcaccgtggcgcaaacggcgttaagctacgatgattatcgcttccttgagcaactctctcgcgacgtcggctcgcatttccacgcgctcgatcgtaatacgctttataccgcgaaccgcgatatcagctactacacggtgcatgaatcctacgtggcgaccattccgctggtattctgcgaagcagaaaaaatggaccgtaatattcagctgctgaaagtgatgatgatcgatgagcctgccgttctcgatcgggccatcgctcgtattccggcggaagtgaaagagaagtataccgtgctgaaaagcgcgccgttcttcctcgaaatcctcgataaacgcgtcaataaaggcactggcgtgaagtcgctggccgatacactgggtattaagccggaagaaattatggcgattggcgatcaggaaaacgatattgcgatgattgaatttgccggcgtcggcgtggcgatggataacgctatcccgaccgttaaagaagcggcgaatttcgtcaccaaatcgaaccttgaagatggcgtcgccttcgccattgaaaaatacgttttagcctaa

SEQ ID NO: 90518 - DNA, 1014 bp, Enterobacter aerogenes
atgaataaaaatcaccttttgatgttggttgcgctgccttttctctcttttcaggcctgcgcggccgcagaaccaacggctcaacttgagcccatatatgcctggcacggtagcgaaccggcggatctgcccgcgcctgacaatagccaggccgcggcgccggaatcgacatcggtattgccttttttaggcgatgaagcccgaaagcgtggctacgtcctaccgctgccatttggcgtcggcgttaactatatggatatgcggcagaatattaatgtcgatagcattaattttaccggtttatcgttaggtaatttttcactagataatgccttccagattggcgtcggtaatacgcgagaaagtagcaaaaccgagacccttaagctggatgcctggctgctgccgtttatgaacgtctatggtctggttggacacactaaaggccattctatctcgcaaatcgccgttggcctgaaagggccgaatggtaaagtggtgcctatgccaggtatgcagaatcttgattttcgtcttgattttaaaggcactacctacggcgtcggtaccacgctggtgggcggcgtcggcaactggttcacggtattagatgccaactatacgcagacgcgttttgatatcctcgacggcagcattgatgctttcaccttttcgccgcgtttgggctatcgtttcaatacgccgtcggtagatgcgctgcatctgccgaacgggaagctgaatgtctgggtcggcagcatgtatcaggatgtgcagcaagaatttaagggcagcctgaacgatctgtcgatgccgtcgacgatgctgaaaaacatggtcaatctggccaacaagaacggcaacggtcgctttgatgtgaaacagcatctgcagtcgccgtggaacgtgctggtgggcgcgcagtatgagatgacccggaactttaatatcactacggagtttggttttgccgaacgtaatagtttctttatcgccggcgagtatcgcttttga

SEQ ID NO: 90519 - DNA, 1140 bp, Enterobacter aerogenes
ttgagccgaccgtttaaccctatcctgctgttgctaacctgccttgttattgggcaggcgcaggcacaggcgcttagccgcgaaaaaatcgacggctggttgcaaaaccttggcgccagcgacaagtttgacgccagcaaaggcatcgactggggcgtcatgcccgggccattttatacgccggagctggggcttggattgggtacggctgttgtgggcatgtatcgcccggacccacatgacaccatcagccagaactccacgctgacgcttagcggctacgtcagctccaccggcgcgtttggccttagcgttaaaaactatgcctttttcgacaatgatttgtggcgggtatttgttgaaggctcgatggccaacacaccgacttactactggggacaaggttttcacgccggcgacaaagacaatgagaaagaaaaatataccgcccaggtgctgacattgcgcccgatgctctaccggcagctcatcgataatgtttatctgggggcggggtggtcgctggcggcgcaaaatgccgatgagatggaccatgacgatctgccgaaaatagaaaacaccccgcaggggccatcggtattcagctccggcgccagtattgatatcaactgggacgatcgcgattttgtccccaacccacgcaagggccaatacgccgattttcgctatacccactatgcgccggggctcggcagcgacacgcgttttgatgagtttcgcctgcactacagccgctatcaggccctgagcgataaaagcgtgctggcctgggaagcggatggcacatttactcagggcgatgtgccgtggagcatgatgccgctgctcggtagcgatgagcgtatgcgcggctactaccaggggcgctaccgcgataaaaacgtggtcagctctcagctggaatatcgtcgtcagttgacgtggcgacacggcgttgttgcctgggtcggcgcgggcaccatggggccatccattgattccctgaacgacggacgctggctaccttcggcaggcgtcggctaccgctttgaattcaaacctcgcgttaatattcgcctcgactacggtgtcggcaagggcagcagcggcttttacttccaggtcggcgaagcgttctaa

SEQ ID NO: 90520 - DNA, 690 bp, Enterobacter aerogenes
atgactctcaataaaaccgatcgcatcgtgatcacgctgggcaaacagattgtcagcggtaagtacgtaccgggttcggcgctaccggccgaagcggaactgtgtgaagagtttgaaacttcgcgcaacatcatccgcgaagtgtttcgctcgctaatggcgaagcggctgatcgaaatgaagcgttatcgcggcgcgtttgtcgctcccagaaaccagtggaactacctcgatactgaggttctgcagtgggtactggaaaatgattatgacccgcgtcttatcagcgcgatgagtgaagtgcgcaacctggtagagcccgccattgcccgctgggcggcagagcgcgccacctcgagcgatctggcggaaatcgagtcggcgctcaatgacatgatcgccaacaaccaaaaccgggatgcctttaacgaggccgatattcgttaccacgaagcggtgctgcagtcagtacataacccggttttgcagcagcttagcgtggcgatcagttcgctgcagcgggcggtatttgaacggacctggatgggcgatgaaggcaacatgccaaaaaccctgcaggaacataaagcgctatttgacgccattcggcatcaggatagcgacgcggcggagcaggcggcgttgacgatgatcgccagctcgacacgaaggctcaaggaaatcacatga

SEQ ID NO: 90521 - DNA, 879 bp, Enterobacter aerogenes
atgacggctcgctacatcgcaatagattggggatcgacgaatttacgcgcctggctttatcagggcgaagaatgcctggaaagcaggcaatctgaagcaggcgtaacgcgcctgaacggtcgctctcccgctgcggtgttagcggaaattacccaacactggcgcgatggcgccacaccggtggtgatggcagggatggtcggcagcaacgtgggctggaaaatcgccccctatttgccgcttcctgccgctttctcggacattggccagcagttaactgccgttggcgacaatatctggataattcccggtctttgcgtttcccgtgacgataaccataacgtcatgcgcggagaagaaacgcaactgctgggcgcacgcgccttagccccttcatctgtctacgtgatgccgggaacccactgcaaatgggtactggccgatcgcctgcaaattcacgattttcgtaccgttttgaccggtgagttgcatcatctgttgcttcagcactcgctggtgggcaccggcttaccgccgcaggaaacgtccgctgccgcattcgcggccggtctgcagcgcggtatcaacaaccccgccgtcctgccgcagctgtttgaagttcgcgcttcgcacgtgctgggcgcgctgcctcgcgagcaggttagcgaatttctttccggcctgctgattggcgctgaagttgccaccctcagcgacacattcgccggacagcaggcgatcggcctcgtcgccgggtcatcattaacgtcccgctatcagcaggcatttcgcgccattggccgtgaagtcaccgcggttgcgggcgatacggcatttcagacaggaataaggagcatcgcttatgcagtggcaaactaa

SEQ ID NO: 90522 - DNA, 618 bp, Enterobacter aerogenes
atgcagtggcaaactaaccttccgcttatcgctatcctgcgcggcattacgccagacgaggcgctggctcacgttggcgccgttatcgacgccggtttcgacgcggtcgaaatcccgctgaactcgccgcagtgggagaaaagtattccgaaggtcgtcgatgcttacggcgagcaggcgcttatcggcgcgggcaccgtgctgcaaccggagcaggtcgacaggctggcggccatgggctgtcggctgattgtgacgccaaacattcaaccggaagtgatccggcgagcggtgggttacggcatgaccgtgtgcccaggctgcgccaccgccagcgaagcctttagcgcgctcgatgccggcgcgcaggcgctgaaaatcttcccgtcatcggcttttggaccggattacatcaaagcgttgaaagccgtgttgccgccggaggttccggtctttgccgttggcggcgtgacgccggaaaacctggcgcagtggattaatgccggttgtgtgggggctgggctgggtagcgatctctatcgcgccggccagccggttgaacgtaccgcgcaacaggcagccgcattcgtaaaagcgtatcgagaggcagtgaaatga

SEQ ID NO: 90523 - DNA, 1149 bp, Enterobacter aerogenes
atgaaaataaccaatatcaccacgtaccgtttacctccgcgttggatgttcctgaagattgaaaccgatgaaggcattgtcggctggggcgaaccggtgattgaagggcgcgcccgcacggtggaggcggccgttcatgaatttggcgactacctgattggccaggatccggcgcggattaacgacctgtggcaggtgatgtaccgcggcggcttttatcgcggcggcccgattatgatgagcgccatcgccggtattgaccaggcattatgggatattaaaggtaaggtcctgaatgccccggtctggcaattgatgggcgggctggtgcgcgacaaaattaaagcctacagctgggtgggcggcgaccgccccgccgaagtgattgacgggattaagaaactgcgcggcattggtttcgacacctttaaattaaacggctgcgaagagatggggctcatcgataattcccgcgcggttgatgcggcggtgaataccgtggcgcaaatccgcgaagcgtttggcaatgaaattgagtttggtctcgattttcatggccgcgttagcgcgccgatggctaaggtattaattaaagagctggagccatatcgcccattatttattgaagaaccggtattagccgagcaggcggaatattatccacggctggcggcgcaaacgcatattccaattgccgccggcgaacgtatgttctcgcgctttgaatttaaacgagtactggaagcgggcggggtggctattttacagcccgatttgtcgcacgcaggcggtattaccgaatgctataaaattgccggaatggcggaagcctatgacgttgggctggcgccgcactgcccgctggggccgatcgcgctggcggcttgtctgcacgtcgatttcgtttcacataatgcggtcttccaggagcagagcatggggatccactacaacaaaggcgccgaactgcttgattttgtgaaaaataaagaagatttcaatatgaaaggcggcttctttaaacctctgatgaagccggggctgggcgtagaaatcgatgaggcccgcgtgattgagttaagtaaaaatgcgccggactggcgaaatccgttgtggcggtatgaggatggatctgtcgccgaatggtaa

SEQ ID NO: 90524 - DNA, 1293 bp, Enterobacter aerogenes
atggatatttcagttaccgctgtaaaaaccgggcgtcgccgttatctgacgctcatcatgatctttattaccgtggttatttgttatgttgaccgcgccaacctcgccgtcgcctcggcgcatattcaggaggagtttggtattagcaaagcggaaatgggctacgtattttccgcctttgcctggctgtataccctctgtcagatccctggcggttggttccttgaccgcgtgggatcccggcttacctactttatcgctatatttggctggtccgtggcgacgttgttacaaggcttcgccaccggcttaatgtcgcttatcggtttacgcgccattaccggcatcttcgaagcgccagccttcccgaccaataaccgcatggtgaccagctggttcccggagcacgaacgcgcctctgccgtcgggttttatacctcggggcaatttgtgggcctggccttcctcacgccgctactgatctggatccaggagctattaagctggcattgggtatttatcgttaccggcgggatcggcattatctggtcgttaatctggtttaaggtttatcaaccgccgcgcctgactaaaagcatcagcaaagccgagctcgactatatccgcgacggcggcggcctggtggatggcgatgcgccgctgaagaaagaggcgcgtcaaccgttatcaaaagcggactggaagctggtctttcaccgtaagctggttggcgtttaccttgggcagttcgcggttacctcgacgctatggttcttcctgacctggttcccgaactacctaacccaggaaaaaggcatcaccgcgctgaaggccggttttatgaccacggtgcccttcctcgccgcgttttttggcgtcctgctctccggctggctggcggataagctggtgaaaaaaggttactcgctgggcgtagcgcgcaaaacgccgattatctgcgggctgctgatctccacctgcatcatgggggcgaactataccaacgaccccgtgtggatcatggcgctgatggcgctggcattcttcggcaacggctttgcgtctatcacctggtcgctggtctcctccctggcgccgatgcgcctgatcggcctgaccggtggggtgtttaactttgttggcggactgggtggtatcaccgtaccgctggtgattggttatctggcgcaggattatggctttggcccggcactggtttatatctccgtggtggcgctgatcggcgcgctgtcttatatcctgctggtcggcgatgtgaaacgtgtaggctaa

SEQ ID NO: 90525 - DNA, 1227 bp, Enterobacter aerogenes
atgaaacaagtcacttttgctccccgtcaccatcagcttaccaatatcaatacctggaccccggacagccagtggctggttttcgacgtccgcccgtcgggggcctctttcaccggcgagaccattgagcgggtgaatatccatagcggcgccgttgagacgctctatcgcgccgctgacggcgcctgcgttggcgtggtcaccgtacacccgacgcaagataaatacgtttttattcacggccctgaacacccggatgccaactggcattacgattttcatcaccgccgcggggtggtgagctggcagggtgaaacccgcaatcttgatgcgctggatattaccgcgccttatacccccggcgcgctgcgcggcggcagccatgttcatgtcttcagccctgacggccagtttgttagcttcacctataacgaccacgtactgcacgagtacgatccggcgctggatctgcgcaacgttggcgtggccgcgccctatggcccggtgagcccgcagggcacgcatccccgtgaatatgccggcagccactggtgcgtgctggtgagccgtaccacggcgaacccattaccgggcagcgatgagatcaatcgcgcctatgaagagggatgggtgggtaatcatgccctggcgttcattggcgatacgttggcggaaaacggcgacaaagtgcctgaactgtttatggtgacgctgccgtgggatgaggcgggctggaagcggcagggcgatatgccgctggccggtacagcaacgacgctgcccgcgccgccggcaggcataagccagcgccgcttgacctttacccaccagcgccgctatccggggctggtgaatgtaccgcgccattgggtacgcgccaatccgcaggccaccgagatcgcctttctgatgcgtgatgacgcaggcgttgtacagctgtggcttatcccgcctgcgggcggcgagccgcgccagctgacacatacggtaacgggcatccagtcagcatttaactggcatccgtcgggcgcgtggctgggatgtgtggtggaaaacaaaatcgcgctctgcgatgcccgcagcggcgcggtaagttatttgacgaccgatcgcgaaaatccgccgtccgcggatgccgtcgtattttcaccggatggcaaatacctggcgtggatggaagacgtcgacggttatcgccagttgtggataaccgaaacgcagcgctag

SEQ ID NO: 90526 - DNA, 330 bp, Enterobacter aerogenes
atgaaaagcggattgttaaagctggtcctgttcagcgggatgattagtttgggcggttgctccagcgtgatgtcgcataccggcggcaaggaaggaacctacccaggcacacgctccagcgcccatacgctgggcgatgacgacactaactggggcgtgaaatcgctggtggccctcgatatgccgttcaccgcggtcatggacacgctactgctgccgtgggatttattccgcaccgatagctcggtcaaatcgcgcgtcgaaaaaagcgagcaggagacgctggcgaccaactccgtcatcccgccagcgccaatgccttcgcgctaa

SEQ ID NO: 90527 - DNA, 270 bp, Enterobacter aerogenes
atggctttccatcatggacaagccgttatgacccggaatacccctcaggcgtatcctcattgggtgacactactaaaatgggtgtgccccgacgcttttcaaggccttttcggccaaatttttttgcagtttgctggcgaatgcttagactggttgcaaagcacaaaaggcaaagtgcgatactcgccacagtgcagtgcaataacgctaggcattcacgggacggctcgttataaccgaagtaaccccgataaaatgacggaagagtga

SEQ ID NO: 90528 - DNA, 414 bp, Enterobacter aerogenes
atgcgtaatttcgatctctccccgctttatcgttctgctattggtttcgaccgtctgttcaacctgttagaaaataatcaaagccagggcaacggcggctaccctccgtataacgttgaattagtagatgaaaacaattaccgcatcgcgattgccgtcgccggttttgcggaaagcgaattagagataaccgcgcaagacaatcttctggtggtgaaaggctcccatgccgccgagcagaaagagcgcacctacctgtaccagggtatcgcggagcgcaacttcgagcgtaaattccagctcgccgataacattcatattcgcggcgcgaacctggtcaacggcctgctgtatatcgatctggaacgtgtgattccggaagcgaacaaaccgcgccgtatcgaaattaactaa

SEQ ID NO: 90529 - DNA, 429 bp, Enterobacter aerogenes
atgcgtaactacgatttatccccactgctgcgtcaatggatcggttttgacaaactggctaacgccctgcaaaccgccggtgaaagccaaaccttcccgccctataacatcgaaaaaagcgacgataaccattaccgcattaccctcgcggtagccgggttccgtcaggaagatttggatattcagctggaaggtacgcgtctgaccgttaaaggcacgccgcaggccgctgaaaaagagaccaaatggttgcaccaggggctggtgaatcaggccttcagcctgagtttcaccctcgcggacaatatggaagtctccggcgccacctttaccaatggcttattgcatatcgacttaacccgccacgagccggaagtcgcggccccgcagcgtatcgccattagcgagcgcccggcactgaatagttaa

SEQ ID NO: 90530 - DNA, 1662 bp, Enterobacter aerogenes
atgagtgatatagcattgaccgtcagcgtgttggcgctggttgcggtggtgggattgtggatcggtaatgtcaaaatccgcggcgttggatttggtatcggcggcgtgctgtttggcggcattatcgtgggccactttgtggatcaggcagggattacgctgagcagcccgatgctgcattttatccaggaattcggcctcattctcttcgtctataccatcggtattcaggtcggtccgggcttttttgcctcgttacgcgtctccggacttaagctcaatctgttcgccattcttatcgtcgtacttggcgggctggtgacggcgatcctgcataaactgttcaatattccgcttccggtcgttctcggcatcttctctggggcggtcactaacacccccgcgcttggcgccgggcagcaaatcctgcgcgatcttggcctgccgtttgatgtcgtcgatcagatggggatgagttacgcgatggcctacccgtttggtatctgcggcattttgctgaccatgtggctggtgcggctgttctttcgcattaatgtggaaaaagaggtgcagcagtttgatgagagcagcggcaacgggcacgctcatctgcataccattaacgtgcgggtggagaacccgaacctgaataatatggcgattcaggatgtgccaatgctcaacagcgacaaaattatctgctcgcggttgaagcgcgatgagctattgatggtgccggcgccgggtacgcttatccagcatggcgatctgctgcacctggtcgggcggccggaggatttacacaatgcgcagctggtgattggtaaagaggtggcgacttcgctctcaacgcgcggaaccgatctcaaagtggaacgtgtggtggtcactaacgagaaggtcttagggaagaaaatccgcgatctgcactttaaacaacgctatgacgtcgtgatctcgcggcttaatcgcgccggggtggagctggtggccagcagccatgccagcctgcagtttggcgacattcttaacttagttgggcgtccacaggccattgacgcggtggccaatgaactcggcaacgcacagcaaaagctgcagcaggtacaaatgctaccggtgtttatcggcattggtctcggggtgctgctggggtctattccgctgtttattcccggttttccggcggcgttgaaactggggctggccggcgggccgctgattatggcgctgatcctcgggcgtatcggcagcatcggcaagctgtactggtttatgccgccgagcgctaacctggcgctgcgcgaactcggtatcgtgttgtttctggcggtggtggggctgaagtccggcggcgattttgtcgacacgctgctccacggcgaaggactcagctggatagcctacggtattttcatcaccgctatcccgctgctgacggtgggcatactggcgcggatgctggcgaagatgaactatctgaccctctgcggcatgctggccggctcaatgaccgacccgccggcgctggccttcgctaacaatctacacgctaccagcggcgcggcggcgctctcctacgccacggtttatccgctggtgatgttcctgcggataatcacccctcagctactggccgtgctgttctgggggctgagttag

SEQ ID NO: 90531 - DNA, 747 bp, Enterobacter aerogenes
gtgatctacaaatctattgctgacaaactgcgtttacggctcaactcttccgatttcaacattggcagcccgttaccgggcgagaaaaaactggcgcaggagttcggcgtggcgcgcatgacgattcgcaaagccattgacctgctggtggaaagtggattagtggtgcgccgccacggctccggcacctatgtcgcgcgcaaagatgtacaccatgagaccagcaacctgaccgggctggcggaagttctgcgccagcagggtaaagaagtggtgagtcaggtgttgatattcgaagtgatgcccgcgccgccggctatcgccagtcagctgcgaattaaaattgatgaacggatctatttctcacgccgggtgcgctacgtcgatggtaaaccgctaatgctggaggacagttatatgccggttaaactgttccgccatctgtcgttgggtcatctggaggggtcgaagttcgactatatcgagaaagaatgcggtatcaccatcagcggcaactatgaaaccctcaccccggtactggcggataaacagctggcacgctcaatgaacgtgccggaacagacaccgctgctgcgcattacctcgctttcctacagcgatagcggcgaatttcttaactattccgtgatgttccgcaacgccagcgagtatcaggtggattaccacctgcgccgggtccaggcacagagcccgctaactcagcccccagaacagcacggccagtag

SEQ ID NO: 90532 - DNA, 1623 bp, Enterobacter aerogenes
atgctcagtcaaatacaacgctttggcggcgccatgtttaccccggttttgctgttcccatttgccgggattgtggtgggtatcgccattatgctgcgtaacccgatgtttgtcggtgaagcgctcacggcacccgatagtctgttcgcgcaaattgttcacatcattgaagagggcggctggaccgtctttcgtaatatgccgctgattttcgccgtcggcctgccgattggcctggcgaagcaggcccagggccgggcctgcctggcggtactggtcagttttcttacctggaactacttcatcaacgccatggggatgacctggggccacttcttcggcgttgattttaccctggatcccacggcgggaagcggcctgacgatgattgccgggattaaaaccctggataccagcattatcggggccatcgttatctccggcatcgtcaccgcgctgcacaatcgttacttcgataaaccgctgccggtgttcctcggtatttttcagggatcgtcgttcgtggtgatagttgcctttctcgcgatgatcccttgtgcctggctaacgctgctcggctggccgaaggtacagatggggattgagtcgctgcaggctttcctgcgctcagccggcgcgctcggggtgtgggtttacatctttcttgagcgcattttgatcccgaccggcctgcatcactttgtctatgggccatttatctttggtccggcggtagtggaaggcggcatccaggtctactgggcgcagcatctgcaggaatttagccagagcgttgaaccgttgaaaacgctgttccctgagggcggttttgcgctgcatggcaattcgaaagtctttggttcggtgggtattgcgctggcgctttacttcaccgccgcgccgcaaaaccgggtgaaggtcgctggtttgctgatccccgccaccctgaccgcggtgctggtgggcattaccgagccactcgagtttaccttcttgtttatctcaccgctgctatttgccgtgcatgcgctgctggcggccaccatggcgacggtgatgtatatctgcggcgtcgtggggaacttcggcggcggcctgctcgatcagttcctgccgcaaaactggatcccgatgttccatcaccacgcgtcgatgatgtttatccagataggcatcggcgtctgctttaccggcatctacttcgtcatcttccgcaccctgatcctgcgcctgaacctgaaaacgccgggtcgcgaagacagcgaaatcaagctttacagcaaagcggattatcaggaggcgcgcggtaaaaccagcgtggcggcagctgcggaaaacaagctgggtcaggccgccggcttcctgcaggcgctgggcggggccggcaatattgaaagcatcaataactgcgccacccgactgcgtattgcgctggtggatatggcgaaaacacaaagcgacgaggtgtttaaagcactcggcgctcacggcgtggtccgccgcggcaacggcattcaggtcattgttggtctgcatgtcccgcaggttcgcgaccagctggaaaccttaatgaaagattctttatcgaccgaacacaccaccatgacggaggcagtatcatga

SEQ ID NO: 90533 - DNA, 1323 bp, Enterobacter aerogenes
atgaaaaaattctcagttgttatcgcaggcggcggcagtacctttacccccggcatcgttttaatgctgttggcaaaccgcgatcgtttcccgctgcgggcgctaaaattttatgacaacgacggcgcgcgtcaggagactatcgccgaagcctgtaaaattatcctcaaagaacaggcgccagagattgagttcagctacaccaccgacccgcaggccgcctttagcgatgtcgacttcgtgatggcgcacatccgcgtcggcaaatacccgatgcgcgagcaagatgaaaaaataccgctgcgccacggcgtgttgggtcaggaaacctgcggaccgggcgggattgcctatggtatgcgctctatcggcggcgtgctggagttggtggattacatggaaaaatattcgccaaacgcctggatgcttaactactccaacccggcggcgatagtggctgaagctacccgccgcctgcgacctaatgcaaaaattctcaatatttgcgatatgccgatcggcattgaagggcggatggcgcaaatcgtcgggctgaaagaccgcaaacagatgcgcgtgcgttactacggccttaatcacttcggctggtggacctcgattgaagatctcgatggcaacgatttgatgccgaaactgcgcgagtatgtggcgaaatacggctatgtaccgccatcgaacgacccgcacaccgaagccagctggaacgatacgtttgccaaagcgaaagatgtacaggcgctggatccgcaaacgatgccaaacacttacctgaaatattatctgttcccggattacgtggtcgcgcactccaacctggagcgtacccgcgcgaatgaggtaatggatcatcgggagaaaaacgtctttagcgcctgccgggcgattattgccgccggtaaatcttccgcgggcgatctggagatcgacgaacacgcgtcgtatatcgtcgatttagcgacggctatcgcctttaacactcaggaacgaatgttgttgattgtgccgaacaatggcgcaatccataactttgatgccgacgcgatggtagagatcccttgtctggtcggtcataacggaccggagccgttgacggtgggcgatattccgcatttccagaaagggatgatgagccagcaggtggcggtggaaaaactggtggtggatgcgtgggagcagcgttcatatcacaagctgtggcaggcgattacgctatcgaaaaccgtaccgagcgcctcggtggcgaaagcgatcctcgatgacctgattgccgccaataaagcgtactggcctgagctgcattaa

SEQ ID NO: 90534 - DNA, 348 bp, Enterobacter aerogenes
atgaaaatttcccgcattggtgaagcgccggattaccgcttttcgctggccaatgaacgcacctttctggcgtggatccgtacggcgctcggctttctcgccgcgggcgtcgggctcgatcagctggcgccggattttgccactccgcttattcgcgaagtgctggcgctgctgctgtgcctgtttgccggcgggctggcggtgtatggctatctgcgctggttgagtaacgaaaaggcgatgcgcctgaagcaggatcttccctatacccgtacgctgctggtgattagcgtcctgctgctggcggtcgtggcggtggtgatgctgctggtgctgtatggcggataa

SEQ ID NO: 90535 - DNA, 363 bp, Enterobacter aerogenes
atggcggataaacgccgggcgcggcgggagagtgatcctggtttgcagccggagcgcacctcgctggcgtggttccgtactctgcttggctacggggcgctgatggcgctggcgattaagcataactggcatagcgccgggctggcgttctggatatcgattggcgtactggcagtggtggcgatcattctctggcgctacacccgcagccgccatttaatggatgtcggcgagagcgattttttgcagccgggagcagttcgtgacaaatttttgatctccctcgcagtgctttcgctgtcattattgtttgctgtaacgcatctacggcagattattttatttcttaaggatgtgacatga

SEQ ID NO: 90536 - DNA, 489 bp, Enterobacter aerogenes
atgacaggatgtcggacagaatgccactccctcgctcataacgaaccggcagtgcaggaggtgaaagtttatcgccaccattgccagcaaccgctgcagttctatcgggagctacgcgcacagggcgtgcgcgccgttcgttttattccacagctcagagcggaagatgccaatgcatggggaaatttcctttgcgccattttccacatctgggcgcgggaagatattggccgcataacgattacgttatttgaggaaaccctgcgtatctggtgcggcgaaccgctgcgcgaacaacggcaggtggccgccaatagcgcctgttttgtctgtgcgtggcggcgattatgcgcaggcgacgacgatccgctctgtgaaggctaccgccagttctatgtcgccagcgcgccctgtatgcgggtcatgcgcgatctgcgtaaacagcagcggtcaccgggcgaactgatgccgctgctgcgggcgatttaa

SEQ ID NO: 90537 - DNA, 1329 bp, Enterobacter aerogenes
atgaaaaacgctgacctgacccaattaaccgcgaccttcccgcttgtgcaggagctgatcgcgctgaaagaaaccacctggtttaacccggcgacgacgacgctggcgcaaggtttgccctatgtcggcctgaccgccgaagatgtaaaagacgctcacgaacgcctgcagcgcttcgcgccgtatctggcggaagcctttccggaaacggccgccaccggcgggattatcgaatcagaagtggttgccattccggcaatgaaacgccgcctcgagcaacaattcaatcagccgattcacggcgaactgttactgaaaaaagatagccacctgccgatttcgggctccattaaggcgcgcggcggcatttatgaagtgctgacccatgcggaaaagctggcgctggaagccgggctgctcaccatcgcagatgattatcgcaaattgctgacgccggaattcaaacagttcttcagccaatacagcatcgccgtcggttctaccggcaacctcggtatgtcgattggcatcatgagcgcgcgcatcggttttaaggtcacggtgcatatgtcggcggatgcccgcgcatggaaaaaggccaaactgcgcagccacggcgtaacggtcgttgagtatgaagaagattacggcgtggcggtcgaacaggggcgcaaggcggcggaatccgacccaaactgctttttcatcgacgatgaaaactcgcgcacgctgttcctcggctatgccgtggccggcgagcgcctgaaagcgcagtttgcccaggcaggacgcgtggtcgatgccgatcacccactatttgtctatctgccatgcggcgttggcggcggccccggcggcgtcgcattcggcctgaaactggcgtttggcgaccacgttcactgtctgttcgccgaaccgacccattccccatgcatgctgctcggcatttacaccgggctccatgaccagattgcggtgcaggatttagggatagataacctgaccgccgccgatggtctggcggtcggccgcgcttccggcttcgttggccgggcgatggagcgcctgctcgacggcctgtataccctcaacgatcaaacgatgtacgacatgctgggctggctggcaacgtcggaaaacattcgccttgagccgtccgcgctggccggtatggccgggccgcagcgcgtctgcgccagtaaagcgtaccatcagctacaaggtttgagcgacgaacggctacgccacgccacccacctggtatgggcgaccggcggcggcatggtgccggaagaagagatggcgcagtatctggcgaaggggcgttaa

SEQ ID NO: 90538 - DNA, 1338 bp, Enterobacter aerogenes
atggaatctcaaatctgggtggtatgcacgctatttatcagtatcgtgttaatcgttttaacgatcgtcaaactgaagtttcatccgtttctggcgctcctgctggcgagctttttcgtcggcgcgatgatgggcatggggccgctggatatggtcaacgccattgagagcggtattggcggtacgcttggtttcctggcggcggtgatcggtctcggtaccatcctcgggaagatgatggaagtctccggcgcggcggaacgcatcggcctggcgctgcagcgctgtcgctggttgtcggcagacgtaattatggtgctggttggcctgatctgcggtattacgctgtttgttgaagtcggcgtggtgctgctaatcccgctggcgttctccattgccaaaaaaaccaatacctcgctactgaagctggccatccccctgtgtaccgcgctgatggcggtgcattgcgtggtgccgccgcatccggccgcgctgttcgtggcgaataaactcggcgcagatatcggtacggtcatcgtctatggcctgctggtgggcctgattgcctcgctggttggcggcccgctgttcctcaagctgctcggcaaccgcctgccgtttaaaccggtgccgaccgagttttccaaccttgaagtacgcgaagaatcgacgctgccctcgctcggcgctacgctatttaccgtgctgctaccgattgggctgatgctggtgaaaaccgtcgctgaattgaacatggctaaaggcggcacgctgtatatgttgctggaatttatcggcaacccgatcaccgcgatgtttattgccgtctttgtcgcttattacattcttggtattcgtcgccagatggggatgggcgtcctgctgacccatactgaaaacggcttcggatcgattgctaatattctgctaattattggcgcgggcggcgcgttcaacgcgattttgaaatccagcggcctggccgatagcctggcggtgatcctctcgaatctgcatatgcatccgattctgctggcctggctggtggcgctgatccttcacgccgccgtcggttccgctaccgtggccatgatgggcgccaccgctatcgtcgccccgatgctgccgctgtatcccggcgtaagtccggagatcatcgctattgccatcggttccggcgcgattggctgcacgatcgtaacggattccctgttctggctggtgaaacaatactgtggcgcaagcctcagcgaaacgttcaagtattatacgacggcgacatttatcgcttctttacttgcactcgccgccaccttcctgctttctttcatcatctaa

SEQ ID NO: 90539 - DNA, 924 bp, Enterobacter aerogenes
atggatgtgatgaaagagatgggtaatcggctgctgaacggctggcagttatcaaagctgtacacctttgaagtcgcggctcgccatgagtcgtttgcactggcggcggaagagctgtcgctgacgccgagcgccgttagccatcgcatcaaccagctggaagaagagctgggtattcagctatttatacgttcgcaccgcaaggtggagctgacccgcgaggggcggcgggtattctgggcgttgaaatcctcgctggatagccttaaccaggagattctggatattaaaaatcaggagctctccggcacgctgacggtgtactcgcgcccgtcgatcgcgcagtgctggctggtaccggcgctgggcgatttcactcgccgctatccgtccatctcgctgactgtgctcacgggcaacgataacgtcaatctacagcgggcgggtatcgatctggcgatctattttgatgatgcgccgtcatcacagctaagccatcattttctgatggatgaagcgatcgtgccggtatgtacgccgaattacgcgcaacagcagcagttaatccacaatccaggcaatctgcgctactgcacgttgctccatgaccgccaggcatggagcaatgattccggtaccgatgagtggttcagttgggcgcagcaatttgcgattgaattgccgcaatcgtcgggtatcggcttcgatcgttctgatttagcggtgattgcggcgatgaatgacgtcggggtagcgatggggcgtaaacggctggtgcagaagcggttagaaagcggggagcttatcgcgccgttcggcgacatgacgctgaagtgtcaccagcactactatgtgacgaccctgccgggccgtcagtggccgaaaatcgacgcctttatcgaatggttgcacagcctgacataa

SEQ ID NO: 90540 - DNA, 1185 bp, Enterobacter aerogenes
atgaaacggcataagaacttcaatttgttgttgatgctggtactgctggtggccgttggccagatggcgcagaccatttatattccggctatcgccgacatggcggtatcgcttaacgtccgcgaaggggcggtacaaagcgtgatggcggcctatctcctgacgtacggcatttcccagctgttctacggcccgctctccgaccgcgtgggccgccgcccggtgatcctcgtagggatgtctatttttatgctggcgacgctggttgccatcaccacccatagcctgccggtgttgatcgccgccagcgccatgcaggggatgggcaccggcgtcggcggcgtgatggcgcgcaccctgccgcgagacctgtatgaaggcgcgcagctgcgtcacgccaatagtttgttaaatatgggaatactggtcagcccgctgattgcgccgctgctcggcggcatccttgataccctgtggaactggcgcgcctgctacgctttcctgctcatactgtgcgctggcgtgacgattagtatggcgaaatggatgccggaaacgcgcccacaaggcgcgccgcggacgaaactactggccagctacaaaacgctgttcggtaccggcgcctttaactgttacctgttgatgctggtgggcgggctggccgggattgcggtgttcgaagcctgttccggcgtgctgatgggcgcggtcctcggcctgagcagtatggcggtcagtattctgtttattctgccgatcccggcggcgttcttcggcgcgtggttcgctggccgtccgaataaacgcttctcaacgctgatgtggcagtcggttatctgctgcctgctggcgggaattatgatgtggttgccgggactgttcggcattatgaccgtctggacactgctggtgcctgcggcgctgttcttcttcggcgcgggtatgttgttcccgctggctaccagcggcgcgatggaaccattcccgttcctcgccggtaccgctggcgcgctggttggcggcctgcagaatatcggctccggcgtgctggcctggctgtcggcaatgatgccgcaaaccgggcaaagcagcctcggcctgctgatgatgttaatgggtctgttgattctgctgtgctggctgccgctggcctcgcgctttaccagccaccagcagccggtctaa

SEQ ID NO: 90541 - DNA, 834 bp, Enterobacter aerogenes
atgaccatcaccgtattctgcattttgcttttcgccgcactgctccacgccagctggaacgctatcgtcaaagccagcggcgataaaatgtacgcggcgataagcgtcagcgggtcggcctcgctgatcgccctggtgatgctccccttcgcgccacagccgacgctggccagcgccccctatctggtggtgtcatgtgcattacaggtggtgtatacggtactggtggcgaagacctatcaggtgtcggatatgagccagacctatccgctaatgcgcggcaccgcgccgttgctggtcgcggctatcagcgtgatatttctcggcgatcgcttatcgccgctagcctggttggggattggcgtcatctgcctggcgattctggcgatggcctttaacggccgcgtcagttcccgcaaaggcatcatgctggcgctgatcaacgcctgttttatcgcgggctatacgctggtggatggtaccggggttcggctggcgggatcggcgctcggctataccctgtggaccttttttatgaacggttgctgcctgctgtgctgggcgatggtggcgcggcggcgcgaagccagccgttatttacgccagcactggaaaaaaggcatcctcggcggcgtcggcaccatgggatcctacggcctggcgctatgggcgatgactcaggcgccgctggcggtggtcgccgcgctgcgtgaaacctccattctgttcggcgcgctgatcgcgtttatcgtcctgaaagaacagctggtagcgctgcgcatcgttgccgcctgcggtattgccgccggagcaatcctgctgcgcctctcatag

SEQ ID NO: 90542 - DNA, 447 bp, Enterobacter aerogenes
atgccaccgctattaattgccgcaacaacgccggaggagccggggttcgttgcgctgcgcgccgaaagccttgaacagcacttcaatatgctgcgccgtctggcggaaaactggcaaagcggcaaaaaccgctttaacgcccctggtgaaaagctgctgggcgcgttcgtccgtggccagttagttggggtctgcggtctgaacgtcgaccccttcagccagcagccgcgggccgggcgcattcgccatctctatattcgcgatagccatcgccgccagggaattggccagcagctgctggtctcggtcatcacgcattccggcgcctggttcgatttccttaacactcatgccccggcgcaggcctggcccttttatgaacgctttggtttccgcccggtatacgatgagccgcgggtcacgcatcgcctgttctgctcgctgtaa

SEQ ID NO: 90543 - DNA, 1689 bp, Enterobacter aerogenes
atggcaagttcgggcaccacatcaaacacaatgcgctttaccggcgcgcagctggttgttcatttactggaacgccagggtatcactatggtcagcggcattccgggcggctccatcctgcccatctatgatgccttgagccaaagcacgcagatccgccacatcctggcgcgccacgagcagggggcgggttttatcgctcaggggatggcgcgtaccgaaggtaaaccggcggtctgcatggcctgtagcggccctggcgccaccaacctgattaccgccatcgccgatgcccgcctcgattctattccgctggtctgcatcaccggccaggttccggcctcaatgatcggcaccgacgccttccaggaagtcgatacctacggcatctctatccccatcaccaagcataactacctggtgcgcgacatcgccgagctgccgcaggtgatgagtgacgccttccgtattgcccagtccgggcgccccgggccggtgtggatagacattcctaaggacgtacaggcggcgaccattgagctggaagcgctgccggagccaggcgagcgcgccccggcaccggcatgcgcgcctgaaagcgtgcgtgaagcggcggcaatgatcaacgcggcgaaacgcccggtactgtatctgggcggcggcgtgattaatgcgccgcaggcgatccgtgagctggcggaaaaagccaacctgccgaccaccatgaccttaatggcgctgggtatgctgccgaaggcgcacccgctgtcgctggggatgctggggatgcacggcgcacgcagtactaactttattctgcaagaagctgatttactgattgttttaggcgcgcgttttgatgaccgggcgattggcaagaccgagcagttctgcccgaacgcgaagattattcacgtcgatatcgaccgctcggagcttggcaaaattaagcaaccgcacgtagcgattcagggcgatgtggcggaggtcttagcccagcttattccgcagattgaggcgcagccgcgtgatgagtggcgccaactggtggctgatttacaaagagaattcccctgcgccatcccgcaggaaagcgatccgctctcccattacggcctgattaacgccgtggccgcctgcgttgatgatgaggcgatcatcaccaccgatgtgggtcagcatcagatgtggacggcgcaggcctatccgctcaaccgtccgcgccagtggctgacttccggcggtctcggcaccatgggcttcggcctgccggcggccatcggcgcggcgctggcgaatccgcaacgtaaggttatttgtttctccggtgacggcagcctgatgatgaatattcaggagatggccaccgccgccgaaaatcagctggatgtaaaaattatcctgatgaacaacgaagcgctggggctggtgcatcagcagcagagcctgttctatcagcagggcgtcttcgccgcgacctatccggggatgattaactttatgcagatagctgccggttttggtctgcaaacctgtgatttaaataacgaatccgatccgcaggcggcgctgcaggcgattatcgaccgcccaggtccggcgttgatccacgtgcgaatcgacgcgcagcaaaaagtgtatccgatggtaccgccgggtgcggccaatactgagatggtgggggaataa

SEQ ID NO: 90544 - DNA, 288 bp, Enterobacter aerogenes
atgcaaaagcaacacgataacgtcattctggaactcaccgtccgcaaccacccaggcgtcatgacccacgtctgcgggctatttgcccgccgcgcgtttaacgttgaaggtattctctgcttgccgattcagggcagcgagcacagccgcatctggctgctggtaaatgatgaccagcggctggggcagatgattagccagattgaaaagctggaagatgtcaccaatgtggcgcgtaaccagtccgatcccaccatgtttaacaaaattgcggtgttcttcgaatag

SEQ ID NO: 90545 - DNA, 594 bp, Enterobacter aerogenes
atgactaccatcgcccttattgacgatcatttgattgtccgctccggttttgctcagctgctggggctggaagctgattttcaggttgtcgctgaattcggctgtggacgcgaggcgctggcggggctaccggggcgcggtgtacaggtctgtatctgcgatatctcaatgccggatatttccgggctggagctgttaagccagctgcctaaggggatggcgaccatcatgctgtcggtgcacgatagcccggcgctgatcgagcaggcgctgaacgccggcgcgcgcggcttcctgtcgaaacgctgcagtccggatgaacttatcgccgcggtccgcacggtggcggcgggcggttgctatctcacgccggatatcgccatgaagctggccgccgggcgccaggatccgctcaccaaacgcgaacgccaggtggcggaaaagctggcgcagggtatggcggtgaaagagatcgccgctgagctcggtctgtcgccgaaaaccgttcacgttcatcgcgccaacctgctggaaaaactgggcgtcagtaacgacgttgagctggcgcgccgcatgttcgatagctggcaatga

SEQ ID NO: 90546 - DNA, 1506 bp, Enterobacter aerogenes
atgaacaccgtcgtttcacgattgctgtcggtgatcggctgcgcctttatcttctcagccgcctggttctgcctgtggagtatcagtctgcatctggtggaacgcgcggatttagcggtgctgctgtttccctttggcctgcgtttagggctgatgctgcaatgcccgcgtggctactggccggtgctgctgggagccgagtggctgcttatcttctggctggcgcaggaagtggcgctggcgcatccgataatattgatgaccggaagtctgctgaccctgctgccggtggcattgatttcacgctatcgccagcagcgagactggctgacattgttgcgccagggcggggcactgatcgccgcctcgctgctgcaatcgctgccgtggctggcgcaagaaggcagtgagggactgaccgcgctgttgttgacgctgaccggcggcctgacgctggcgccgacctgcctggttatctggcattatctgaccagtaccgtctggcggccgttggggccgtcgctggtgtcgcagccggttaactggcgtggccggcatctgatctggtacctgctgctctttaccgtcagcctgtggctacagctcgggttgcccgccgaactctcccgctttacccctttttgtctggcgctgccgattatcgctctcgcctggcactacggctggcagggggcgctgatcgccaccctgatgaacgccattgcgttgattgccagccagacctggcacgatcacccggttgatttattgctttcactgctggcgcagagcctgaccggactgctgctgggggcggggatccagcgattgcgcgagcttaacctgtcgctacagaacgagctggcgcgtaatcggcggctggcggaacgcctgctggaaacggaagagagcgtgcggcgtgacgtggcgcgcgagctccacgatgatattggccagactatcacggcaattcgcacccaggcggggatcgtgcagcgtctggcgccaaacaacgccagcgtacggcagagcggccagttgatagaacagctgtcgctgggggtttacgactctgtgcgaagactgcttggtcgtctgcgtccgcgccagcttgacgatctgccgcttgaacaggcggtacgttcgttgatgcgtgaaatggaactggaagaccgcggtatcgtcagtcatctcgaatggcggattaacgaggcggggctgagcgaaaaccagcgtgtgacgctgtttcgcgtttgccaggagggactgaataatatcgtcaagcacgccagcgccagcgccgtcaccctccagggctggcagcaggatgggcgattgatgctggtgctggaagatgacggctgcggcctgccgccggggtcgaatctgcagggattcggcctgaccggcatgcgtgagcgcgtgacagcgctgggcggtacgttaactatctcctgcacacacggtacccgcgtgtgcgtcaatttaccgctgcgttacgcctga

SEQ ID NO: 90547 - DNA, 1329 bp, Enterobacter aerogenes
atgtttgcctttttaaaagcgccgccggacgccgcgccaattagcgataaacgcgagctggacgagcgttatcgttactggcgtcgccatattctgcttaccatctggcttggttacgcgctgttttatttcacccgaaaaagctttaatgccgcggttcccgagatcctcgccagtaacgtgctgacccgcagcgatatcggcctgctggccacgctgttttacatcacttacgggctgtcgaaatttttctccggtatcgtcagcgaccgctccgacgcccgctattttatggggctggggctgattgccaccggggtggttaatatcctgttcggtttttctacctcgctgtgggccttcgcgctgctgtgggcgctgaatgccttcttccagggctggggctcgccggtgtgcgcccgactgctgacggcctggtattcgcgaaccgaacgcggcggctggtgggcgctgtggaataccgcgcataacgtcggcggcgcgctgatcccaatggtcgtgggcgcggcggcgctgcattacggctggcgaatggggatgacgattgccggctgtctggcgatcctcgccggactgtatctgtgctggcggcttcgcgatcgtccgcaggcggtgggattacccgccgtgggcgactggcgtcacgatgcgctggaaatcgcccagcagcaggaaggcgccgggctgacgcgcaaagagatcctgacccgctacgtgctggccaatccctatatttggctgctgtcgctgtgctatgtgctggtgtacgtggtgcgggcggcgattaacgactggggcaatctgtatatgtcggagacgcttggcgtcgatctggtgaccgctaactcggcggtgaccatgtttgagctgggcggttttatcggcgcgctggtggcaggatggggctcggataagctgtttaacggcaatcgcgggccgatgaatctgatcttcgccgccggaattttgttgtcggttggcgggctgtggctgatgccgtttgccagctacgtcatgcaggcggcctgcttcttcaccaccgggttcttcgttttcggcccgcaaatgctaatcggcatggcggcggcggaatgttcgcataaagaagccgccggggcggccaccgggtttgtcggcctgttcgcttatcttggcgcctcgctttccggctggccgctggcgcaggtgatggatatctggcactggaccggattcttcgtggtgattgcgattgccgccggcatttccgcgctgctgctgctgccgtttttaaacgcgcaggcgccgcgtaccgccagcgaagcgtga

SEQ ID NO: 90548 - DNA, 1392 bp, Enterobacter aerogenes
atgctggcctttctgaatcaggtgcgcaagccgaccctggatctgccgctcgatgtgcggcgcaaaatgtggttcaaacctttcatgcagtcctatctggtggtcttcatcggctacctgaccatgtacctgatccgcaaaaactttaacatcgcgcagaacgacatgatctccacctacgggttgagcatgacgcagctggggatgattggcctgggcttttccattacctacggcgtgggcaagacgctcgtctcttattatgccgacggtaaaaataccaagcagttcctgccgtttatgctgatcctctccgccatctgtatgctgggctttagcgccagcatgggggcgggttcaaccagcctgttcctgatgatcgccttctatgcgctgagcggtttctttcaaagcaccggcggttcgtgcagctattccaccatcaccaagtggacgcccagacgcaaacgcggcaccttcctcggcttctggaatatctcccacaacctcggcggcgcgggcgccgcgggcgtggcgctgtttggcgccaactatctgttcgacggccacgtgatcggcatgtttatcttcccgtcgattattgcgctgatcgttggctttattggcctgcgctacggtagcgactctccggaatcctacggccttggcacggcggaagagctgtttggcgaagcgatcagcgaagaggacaaagagaccgaagaaaatgcgatgaccaagtggcagatctttgttgagtatgtgctgaaaaacaaagtgatctggctgctgtgtttctccaacatcttcctctatgtggtgcgtatcggtatcgatcagtggtccaccgtgtatgccttccaggagctgaagctgtctaaagaggtggcgattcagggctttaccctgtttgaagtcggcgcgctggttggcacgctactgtggggctggttgtcggatctggccaacggccgccgcgcgctggtggcctgcgtagcgctggcgcttattatcgccaccctcggggtttaccaacatgccagcaaccagtacgtctatctggcctcgttgtttgcgctgggcttcctggtgtttggtccgcagctgttgatcggcgtcgccgccgtcggtttcgtaccgaaaaaagcgatcggcgccgccgatggaatcaagggcaccttcgcctatctgatcggtgatagcttcgccaagctgggtcttgggatgatcgccgacggcacgccgatcttcggcctgaccggctgggccggcacctttgcggcgctggacgccgccgccatcggctgtatctgcctgatggccatcgtggctatcttcgaagagcgtaaaattcgccgcgagaaaaagaatcgagttttgcagactgcctga

SEQ ID NO: 90549 - DNA, 465 bp, Enterobacter aerogenes
atgagaggatgcatgatctggataggactggccaccctggtagtggtatttgttgtgggatttcgggtgcttacctctgattcacgccgcgcgattcgtcgcctgagcgaacgccttggcattacgcctgttccgttggaatcgatgatcgatcagctgggaaaaaccgccggtaatgagtatttgcgttacctggagcggccgaatgaagcacatttgcagaatgccgcgcaggtgctgctcatctggcaggtcgcgattgtcgacgccagcgaaaaaaacctgcattactggtatcgcctgatgcaaaaagcgcgtttagcggcgccgattaccgacgtgcagctccgcctggcgcaaggttttctgcgcgagctggacccggatgtgagcgatttacataacctacagcagcgctataacgacctgtttctcccggaagacggcgtgcactggctgcactga

SEQ ID NO: 90550 - DNA, 324 bp, Enterobacter aerogenes
atgacagcaaaaaataaatacaaaagcccggctttcgaagcgatccatagcgctgcgtcggggctattcagcgttggcgcaatcccacaggaaacaatgcgccattttgatgaatcatgtctcggtagcgtagccgcacttcaacccattgaaattaaagcgctacgtgaacaactcaatgttagccaacccgtgttcgctcgttatctgaataccagcgtgtctaccgtgcaaaaatgggagactggcgctaaacgaccgagcggaatgtcattaaaattgcttagcgtcgtacaaaaacacggcctgaaaatcctactgtag

SEQ ID NO: 90551 - DNA, 360 bp, Enterobacter aerogenes
atgcgtatctttaaaaccaaatggttcgccagagaggctagctctcatggcatttccgacgacgagctctatcaggcaattcaatctgcgcttcagggcaaagtggttgatttaggagggggggtttataaaaagcgactcaacaagaatcgcgatcgcgcaatcatccttaccaaaagcgcagggtattggttttatacctttctatatgccaaacaggatatggccaatatcaaccatcgcgaattaatggggtttcgtgagttagcaaaacactatgccaatctctctgaagagaaaacgacggccttagttaaaagtaaagaactggtggagatttgcgatgacagcaaaaaataa

SEQ ID NO: 90552 - DNA, 1185 bp, Enterobacter aerogenes
atgagtcattcaaatgaaaccaaaccccatgcacgcgatctcgcgcggccaaactggtcggcggtcttcgcggttgctttctgcgtcgcctgcctgattaccgtcgagtttttgccggtcagcctgttaacgccgatggcgctggatttaggcatctccgaagggatggccgggcagtcggtgacgacgacggcattcgtcgcgatgttttccagcctgtttatcaccacggtgataggtaaaaccgatcgccgctacgtggttatcctgttttcgctgctgctgaccctttcttgcctgctggtatcgtttgccgatagcttcaccctgctactgctggggcgcgcctgtctgggcctggcgctcggcggtttctgggcgatgtcggcatcgctgaccatgcgtctggtgccgatgcgcgtggtgccgaaagcgctatcgattattttcggcgcggtatcaatcgcgctggtgatcgccgccccgttgggcagtttccttggcgggcttatcggctggcgcaacgtctttaacggcgcggcggtgatgggcgtgctgtgtacgctctgggtgctgaaagcgctgccgtcgcttccgggtgaatcggcggctcagcagcaaaatatgtttggtctgctgaagcgtccgggggtgatggccgggatgtgcgccattttcatggcctttgccggacagttcgccttctttacctatattcgcccggtttacatgacgctcgccgggtttgacgtcgacggcctgacgctggtgctgctgagctttggtatcgccagctttatcggcacctcgctctcctcggtggtgctgaagcgctcggttaaagcggcgctggcgatttcgccgctggtgctgaccgcctgcgcggcggcgctggtactgtggggagaaagcaaaatcgtcgcctcgacggtggcgattatctggggcttcgcgtttgcgctgatcccggtggggtggtcaacgtggatcacccgttcgctctccgatcaggcggaaaaagccgggtcgattcaggtggcggtgatccagcttgccaacacctgcggcgccgcggtcggcggcgttgcgctcgaccacttagggctgctgtcgccgctggtgttgtcaggaatattaatgctgtttaccggcctgctggtgacgaccaaagtgaaggtgaattaa

SEQ ID NO: 90553 - DNA, 810 bp, Enterobacter aerogenes
atgaaccgtattagcgcactgatccttgactgggcaggcaccaccgtagacttcggctctttcgccccgacgcaaattttcgtcgaggccttccgcaaggccttcgatattgagatcacccttgaagaggcccgcgtgccgatggggcttggcaagtggcagcacattgaggcgctgggcaaactccctgctgtcgatagccgctggcaggccaaattcggccgcgcgatgactgccgccgatatcgatgcgatctacgccgcgtttatgccgctgcaaatcgctaaggttgtcgatttttccgcaccgattgccggcgttgtcgacactatcgccgcgtttcgcgccgagggcctgaagatcggctcctgctcgggttatccgcgcccggtgatggaaaagctggtaccagccgctgccgcccagggctacgccccggaccactgggtcgccaccgatgaccttgccgtcggcggtcgtccgggcccgtggatggcgctgcagaacgtgattaccctgggcatagacgatgtggcccactgcgtgaaggtcgatgatgccgcaccgggcatcagcgaagggttacatgccgggatgtggagcgtcgggctggcggtgtccggtaacgaattcggcgctacctgggaggagtaccaggcgatgtcgaaagaggaaatcgccacccgtcgcgagcgggcggcaggcaaactgtatgccgccggggctcactatgtggttgataccctagcggatctgccggaagtgattgccgacatcaacgcccggctggcaaaaggcgaacggccgtaa

SEQ ID NO: 90554 - DNA, 1104 bp, Enterobacter aerogenes
atgacttcacggaactacttgctgctgacccccggcccgctaaccacctcccgtacggtaaaagaggcgatgttgttcgatagctgtacctgggatgatgattacaatctcggcgtggtacagaccattcgccagcagctggtgcagttggctaccccggccgacggttatacggcggtgctgctgcagggtagcggcagctacgcggtcgaagcggtgctcggcagcgtcatcggcgaacaaggcaaagtgctgatcgtcagcaatggcgcctatggcgcgcgtatgattgagatggcgcaactgatgggcatcgcctgccacccttacgactgcggcgaagtctcccgtccagatgcggccgcgatcgaacagatcctgcagaacgacccggcgatcacccatatcgcgatggtacatagcgaaaccaccaccggcatgctgaatccgatcgaagaggtagccgaagtggcaaaacggtacgataaacgctatatcgtcgatgcgatgagcagctttggcggcattccgttggatatcgccgcgctgaatattgattacctgataagctccgccaacaaatgcattcagggcgtgccgggctttgccttcgtgattgcccgcgaatcggaactggccgcctgcaaaggccgttcgcgctcgctatcactggatctgtacgcccagtggcgctgcatggaagataaccacggtaagtggcgcttcacctcgccgacccataccgtgctggcctttgcccaggcgctgaaagagctggcgcaggagggcggcgttagcgcccgctatcagcgctaccgcaacaatcaacgccgtctggtggcagggatgcgcgcgctcggcttccggccactgctcgacgatagcctgcactcgccgatcattaccgccttttattcaccggatgcgccgcagtatcgctttcacaccttctaccagaagctgaaagatcagggcttcgttatctatccgggcaaagtatcgcaaagcgattgcttccgcatcggcaacattggcgaagtctacgacgccgatatcaccgccctgctggcggctatcgacaacgccatgtactggaaacaataa

SEQ ID NO: 90555 - DNA, 720 bp, Enterobacter aerogenes
atgaaatcaccctctggcgagatgccgcaatacctgatgattaaggcgcagctgcaggcgcgtattcaaaacggcgcgttgaaaagcggcgataagctgccttcagagcgcgaactgtgcgcgctgttcaacacgacccggattacggtacgcgagagcctggcgcagctggaggccagcggcgtgatttaccgcgccgaccgccgcggctggttcgtgacgccggagcgtctgtggttggatccgacgcagaacaccaatttccacaagctatgtctcgagcaggggcgcgaaccgaaaacggtgctgcttgaagggcgcttaaccgccgtgccgctggacgtgatggccccgctggcgctgcagcccttcgatcaggtttacctgctgacgcgtctgcgctatgccgacggccggccggtgtgctactgcgaaaaccactgcctgcccgcgcgggtgcctgagctgctgcgccacgatctcaacggcagtctgaccgagatttatcaaactcagtacgacctgatctataccagtatgcatttgtcgttttatcccacctcaatgccgccgcaggccgcagaggcgttgggggtgatggaagggcgcccggcgctgctgttgcgccggctgaattacgatcaacacgggcgtattctcgattacgatattgaatactggcggcatgacagcctgcggatcgaagtcgatacccattga

SEQ ID NO: 90556 - DNA, 1014 bp, Enterobacter aerogenes
atgaaactctcccgacttgctctgctgtccctgttcgcgctgaccagctctccggtttgggcggacggcgtcgtcacggtttactccgccgacggcctgcatgatggcgataacagctggtatcagagccagttcgacgccttcaccaaagcgacgggcatcaaagtgcagtatgtggaaggcggctccggcgcgatcgtcgaacgtctggcgaaggagcgcaccaatccgcaggctgacgtgctggtcacggtgccgccgtttatccagcgcgccgcgaaagagcaattgctggcaacctttaccccgcaaggtagcgcgcagatccccggcgctaacgaccgctacgcgccgctggtgaataactatctgaccttcatctataacggccagttgctgaaaaccgcgccggccagctggcaggatctgctggatagccgctttaagaacaagttgcagtactccacgccggggcaggcgggcgacggtaccgcggtgatgctgcaggcgttccacagcctcggcggtaaagacgccggttttgcgtatctgggtaagctgcaggccaataacgttggcccatcggcctcgaccggcaagctgactgcgctggtcaataaaggcgagctgtacgtcgccaacggcgatctgcagatgaacctgtcgcagatggcgcgaaacccgaacgttaaaattttctggccggcggatgataaaggcgagcgtagcgcgctggcgctgccctacaccatcgggttggtacagaacggaccgaacagcgaaaacggcaaaaagctgatcaatttcctgctggataaaccggcgcaatccagcgtcagcgcgcgctcctggggcctgccggtacgcagcgatgtgacgccggatgacgctaactttaaggcggcgaaagcggcgctcgacggtgtgaagagctgggagccgaactgggatgatgtcgcggtatcgctgtcggctgacattgcccgctggcataaagtgactgatagcgagtaa

SEQ ID NO: 90557 - DNA, 1113 bp, Enterobacter aerogenes
atgttgatgaaaaccaccgtcacttcttccccgtcgctggcggggacttccgggatcaccctggactcgctgcgcgtttcataccacggcaacgtggtcttaaaaccgctgtcattgaccattgaacccggtgaggtgctggcgctgataggcccttccggttccgggaaaaccacggtgctgcgggcgattgccggttttgtgcaaccggctggcggtcggatcctgatcggcgatactgacgtcacccagctgccgccgtacaaacgcgggctggcgatggtggtgcagaactacgcgctgttcccgcatatgaaggtggaagataacgttgctttcggcctgcgggcgcagaagcagcccagggggcttatcgccgagcgggtgaccgaagccttaaaaatcgtcggtatggcggattacgccacccgctacccgcatcagctttccggcggccagcagcagcgcgtcgcgatagcccgcgcgattgccgtgcgtcctcgggtactgttgcttgatgaaccgctgtcggcgctggatgcgcaaattcgtcataacatggtggaagagattgcccgtctgcatcgcgaactgccggaactgaccattctctacgtcacccacgatcagaccgaagcgctgaccctggcggacaaaatcggcatcatgaaagacggttcgctgatcgcccacggcgaaacgcacgagctctatcactatccaccgaaccgctttagcgccgaattcctcggccgcgccaatatcctgcaggcgacggcgctgaaagacagcaccgagccggggctggttagcgtgagctgtggcggcggcctgattaacgccttcagccggggcggcctgcatggcaacaacaagctgttatgcattcgcccgcagcacatgagcctggcgccgcgatcggcaaccagtaatcgtctcaatgctaccctgacctcggtacactggcagggcgatctgacgcatctgctgtgcgatgttgccggcgaagcggtgcggattgtgatgacccacgtgaacccgctgccgcgcgcgggggacaagctggcgctctacttcgaacctggcgatgcggttctgatcgaggtgcaatga

SEQ ID NO: 90558 - DNA, 861 bp, Enterobacter aerogenes
atggcgcaaaccctcacgcttgcgcgtccggcgcgaaacttacgcccttacctgtggctggcattgccgctgctggtgctggcgacgctatttttctatccgctactgttgatcgccgaacaggcattacgtgacgccagcggcaatctaagcctcgtaactttctggcaggtgattgactcaaaacgctttattggcgcgctgctcaataccttacagattgcagtgttcgccacccttggctgcctggtgctcggcagcgtgctggcgctgattctggtatttattccgttccccggcagccaactggtgagccgggtcattgatacttttattgcgctgccgacctttcttatcactcttgcgttcacctttatttacggctcggcggggctgctcaacggcaccctgatggcattgtttgcttttgaactgccgccggtagactttctctattcgattaacggcgtgattctggcggagattaccgtctttacgccgctggtgatgcgcccgctgatggcgggactgcggcagatagataagagccagctggaagcggcgagtattctcggcgcccatccgctacgggtgattacccaggttatcttcccggcggcgctaccggcgctgatggcgggcggcagcctgtgcctgctgttgacgaccaacgagtttggcatcgtgctgtttattggcgccaaaggagttaataccctgccgatgatggtctacagcaaggcgattctggagtcggattacagcgtggcctgcatgattgcgctgattaatattctgctgtcgctggggctgtttatgctctatcggctggcggcggcgcgcactggcgtaaggagttaa

SEQ ID NO: 90559 - DNA, 798 bp, Enterobacter aerogenes
atgttgatttggtcgcgtaaaggccgcgcggcggcgggcgcgctggcggtgacgctttttgccggcgttttcctgctgccgctggcggtgattttactctccagcctgagtaaacaatggaacggcctgctgcccaccggttttacctttacccactttgttaacgcctttcgcggcgcggcgtgggattcgctgttttcgagcctgatggtgggcttctgcgccagcctgttggcgctgctgtgtgggatgtgggcggcgctggcgctgcgccagtatggcgcgacgctacagaaatatcttggcctggcgttttatctgcccagcgctatcccctcggtttccgtcgggctgggcattctggtggcatttagtcagggaccgctgcagatgaacggtactttttggatcgtcctggcggcgcactttgtactgatttccgcctttaccttcagcaacgtaacgaccgggctggcgcggatttccgccgatattgaaaacgtcgcctccagtcttggcgcctcgccgtggtatcgcctgcgtcatgtgacgctgccgctgatgacgccgtggatgatttcagcgctggcgctgagcttatcgctgtcgatgggggaactgggcgcgacggtgatgatctatccgccgggctggacgacgctgccggtgactattttcagcctcaccgatcgcggcaatatcgccgatggctcggcgctgaccattgtgctggtgggcgtcacgctgctgttgatgatgaagcttgagcgcatcgcccgccgattaagccagagataa

SEQ ID NO: 90560 - DNA, 297 bp, Enterobacter aerogenes
gtgcccgcatttatgccggatggcggcataaatgccttatccggcctacggtccgtgcgacctacctttaatttattcactatgctggctgaaactgccggtgttggcggcctcaaaatccccggtggcgctgccgcttaccggggctacagcgctgtgcgatttggtagcccggagaaggcgcaacgcgccgcctccgggaaaacccctggcggcgactggccgccctctgtgcgctccctgtgccatgagagtcataacgcagaagaatatctacggaaaacctcctccccgtag

SEQ ID NO: 90561 - DNA, 123 bp, Enterobacter aerogenes
atgctgcgcttctatgtgaccggcggccaggtggataacgaacacaccgcgaaagtagacggtaccagcgacgagcggctggattcgctgaacatcggcggtatgtttgaggcgtggttctga

SEQ ID NO: 90562 - DNA, 315 bp, Enterobacter aerogenes
atgaaatggttcaaagcaatacctgccttttgcgcaacgcttctggtcgccgtatctctggcaggctgtgccggatcgtccaccaaagaaagcaccggcggttatattgacgataccgtggtaactaccaaggtaaaaagcgcgctgtttaacgaaaaagatatcaaatcctcagaaattagcgtgcagacctttaaaggccgcgtacagctgagcggtttcgtatcgtcggctgagagcgctaaacgggcggtagaggtcacccgtcgcgtgcagggcgtgcgcgtggttgagaacgacctgcgaatcaaataa

SEQ ID NO: 90563 - DNA, 567 bp, Enterobacter aerogenes
atgtaccaacgttacgcaggactgattttcgatatggatggcaccatcctcgataccgagccgacgcatcgtaaggcatggcgtgaagtactgggccgttacggtatgcgttttgatgagaaggccgtggtcgcgctcaacggttctccaacctggcgtattgcccaggcgattatcgagctgaatcaggctgatttagatccgcatcgtctggcgcaggaaaagaccgtcgccgtcaaagcgatgttgctggatagcgtacgcccgttaccgctgatagaggtggtaaaagagtggcatggccgtcgcccgatgtcggtcggtaccggtagcgaaagcgctgttgccgaagcgctgctggcgcatcttggcctgcgccactacttctccgcggtggtggctgccgatcacgtggcgcagcataagcctgcgcccgataccttcctgctgtgcgcggagcgcatgggcgtcgcaccggaaacctgcgtggtcttcgaggatgccgacttcggtctggaggcggcgaagctcgcgggtatggatgctgtggatgtgcgtctgttgtga

SEQ ID NO: 90564 - DNA, 429 bp, Enterobacter aerogenes
gtgagcgacgcgctgtcgctcctgtcgctttttgccagcagctttttaagcgccactttactgcccggtaactcagaagtggtgctggttgctatgcttcttacgggggcaagtcaaccgtggatgctggtattaatagcaacaatcggcaatagccttggaggggtaactaacgttattctggggcgcctgtttccgctgcgcaagcaatcgcgctggcaggagagggcaaccggctggcttaaacgctatggcgcggtgacattattattgagctgggcgcctgttataggcgatttgctgtgtttactagcgggatggatgcgcatttcctggggaccagtgctcttttttttatgccttggtaaggcgttgcgttatatcgtcatagcggcggcaacccttcagggcatgacgtggtggcactaa

SEQ ID NO: 90565 - DNA, 1557 bp, Enterobacter aerogenes
ttgatcccggatgtatcacaggcgctggcctggctggaaaaaaatccgcaggcgctgcaaggcattaaacgtgggcttgagcgtgaaacgctgcgcgttaacgccgacggcacgctggccacgaccggccatcctttagctttaggttcggcgctgacccataaatggattactactgattttgccgaagccctgttggagtttattactccagtggatggcgatgtcgatcatatgctgactttcctgcgcgatgtgcatcgcttcaccgcccgccagctcggcgacgagcggatgtggccgctgagcatgccgtgctatatcgcgccgggtcaggatattgaactggcgcaatacggcacctctaacgttggccggctgaaaacgttgtatcgcgaagggctgaaaaaccgctacggcgcactgatgcaaaccatttctggcgtgcactataacttttcgctgccgatggcgttctggcaggccaagtgcggcgtggaagatgccgaaagcggcaaagaggcgatttccgccggttatttccgctcgattcgtaactactaccgtttcggttgggtgatcccgtacctgttcggcgcgtcgccagcgatttgctcctcgttcctgcagggtaaaccgacgactctgccgtttgagaaggccggaaacggcatgtattacctgccatacgccacttctctgcgtcttagcgacctcggttataccaataagtcgcaaagcaatctcggaattacgtttaacgatctgcacgagtatgtggcaggattgaagcgggcgattaaaacgccatcggaagagtacgctaaaatcggtcttgagaaagacggcaaacatctgcagatcaacagcaatattctgcagattgaaaacgagctgtacgcgccgattcgcccgaaacgcgtgacccgtagcggtgaaacgccgtccgatgcgctgctgcgcggcggcatcgagtacatcgaagtgcgttcgctggatatcaacccgttctcgccgatcggcgtggatgagcagcaggtgcgcttcctcgatctgtttatggtctggtgcgtgctggccgatgcgccggagatgagcagcagcgaactgctgtgtacccgcactaactggaaccgggtgattcttgagggccgtaaaccgggcctgacgttggggattggctgtgaaagcgcgcagttcccgctggcgcaggtgggtaaagatctgttccgtgatttacgtcgcgtggcgcaaacgctagacagcatccacggcggcgaggcctatcaacaagtgtgcgatgagctgctggcgtgctttgacgatccggaattaacgttctcagcgcgcattctgcgttctatgattgaagaagggattggcggtaccgggcgtaagctggctgatgagtatcgtacgatgctgcgcgatgaaccgctggaaattttaagcgaagaagattttatcgccgaacgtgatgcgtcggtcgcgcgacagaagaaagtggaagcggaagatagcgagccgttcgaggcacttttagcacgacacgcgtag

SEQ ID NO: 90566 - DNA, 516 bp, Enterobacter aerogenes
atgccgttgttagatagtttcacagtcgaccatacccgaatggaagcgcctgcggtgcgcgtcgcgaagaaaatgaacacgccgcacggcgatcaaatcaccgttttcgatctgcgattctgcgtaccgaaccaggaagtgatgccggagcgcggtattcatacactggagcacctgtttgctggtttcatgcgcgatcacctgaacggtaatggcgtggaaattatcgacatttctccgatgggctgccgtaccggtttctacatgagcctgattggtacgccggaagagcaacgcgtggccgatgcctggaaagcggcgatggctgacgtgctgaaagtcaaagatcagaatcagatccctgagctgaacgtctaccagtgcggaacctacaccatgcactcgctggaggaagcgcaggatatcgcccgccacatcattgagcgtgatgttcgcatcaacagcaacgatgagctggcgctgccgaaagaaaaactgcaagaactgcacatctag

SEQ ID NO: 90567 - DNA, 768 bp, Enterobacter aerogenes
atgtcgacaacgctctccttttccttccagcaccgcgcgctggtgccatttgcccatgattacgcccacggcgatagcgaaccgatgcattgccacgactgcgctcagttattgcatattctcagcggcgtggttcgggtggaaacgccggtcggattctgggtcgtgccgccggggcgcggcgtctggctaccggcacatacgccgcacgcgttgcgcataaccggcaatgtggccgcacggacgctatttatcgatccgctggcccgtgccgatctgccctctacctgccagatcgtgcagatctcaccgctgctgcgtgagcttatcgtcgcgtcgctggcgctggaagagcgctatttccccggcacccgcgatgaacgtatctatgagctgatgctggatgaaattcgcgggatgtcggtattacctttcggtttgccggaaccgcatagcgatagcctgcgtcggttatgccagcgggtgcgcgaagcgcccggtgaaccgtggggcagccgtgaggcggcgcaagcaggcggaatgagcgagcgtacgctgaaccgccattttcaacagcagaccagcctgacgtggagcgaatgggtgcgccgggcgaagctgatggaggcgctggttcgcctggcgcaggggcagtcggtactacgggtagcgctggatctgggttacggcagtcacagcgcttttagcgccatgttccgccgggtcatggggaccgcgcccagcgactattttcgcccgttggattaa

SEQ ID NO: 90568 - DNA, 1659 bp, Enterobacter aerogenes
atgctgaccaatccttgcgaaaaatacagcccttatccgcctatcgccctgcccgatcgccgctggcccgagcggcaaatcactaccgcgccgcgctggctttccaccgatttgcgcgacggcaaccaggcgctggccgaaccaatggacgccgcgcgtaagctgcagttctgggatctgttgctggagtgcggttttaaagaaatagaggtcgccttcccctccgcctcgcaaaccgatttcaactttgtgcgccagctgattgaggagcagcgcatccctgaagatgtcaccattcaggtgctgactcaggcgcgggaagaactcatagcacgaacctttgaagcgctgcgcggcgcccggcaggcgaccatccatctctacaatgccaccgcgccgctgtttcgcgagctggttttcggcatggaaaaggccgaagtgatcgagctcgccacccgcgccacccggcttattcgtcagcattgcgagcagcagccggacacccgttggcaatatgaatattcaccggaaaccttctgttttaccgagccggaattcgcccttgaaatctgcgaagcggtggcggaaatctggcagccctgcggcgaacggccaatgattattaatctcccggcaacggtcgaagtcaacacgccgaacgtctacgccgatcggattgaatatttttgccgccacttctcgcgccgccaggatgtatgtatcagcgtgcatccgcataacgatcgcggtaccggcgtcgccagcgccgaactggcggtgatggccggcgccgatcgcgttgaaggctgtctgttcggcaatggcgagcgtaccggcaacgtctgtctggtcacgctggcgatgaatctctatagccagggcgtggatccgcagttgcgctttacgcagatgaatcgggtggtagagatcgtcgagaactgcaaccagctcccggtacatccgcgtcatccatgggcaggcagtctggcctacaccgccttttcgggttcacatcaggatgccattaaaaaagggtttgatgcccgtaaaccgggagatcgctggcaaatgccgtatttacctatcgatccacaggatatcggctgcagctatgaagcggtgatccgcgttaacagccagtcaggtaaaagcggcagcgcatggctgattgagcagaaccacggtcttaagctgccgcgggcgttgcagcaggacttcagccagtacgttcagcaagaaacggatagccatggtaaagaaatgacccataacgcattatggcagctgtttcgcagccgttacggcctgctggcgcagccgacgctggcgttactcgactatcagagcgacggccagcaggatggcgaactgacgttacaggctgcgctgcggatgaatggcgaaacccgccgcttgaacggacgtggtaacggtttgttatccgccgccgctaacggcctgagcgcgctgttaaaacgtcatttcgttatcaaggactaccacgagcataccctcggggcgcgcagcgacagccgctccgttgcctatattcgctgcgtctttgccaatggcgaaagtcgatggggcgtcggcattgataatgacgttgcccgcgcgtcgttacaggcgttgtgtaatgccgttcacgccagggattaa

SEQ ID NO: 90569 - DNA, 1539 bp, Enterobacter aerogenes
atgcaacagcaaaaaccgctcgaaggcgcgcaactggtcatcatgaccattgcgctgtcgctggcgactttcatgcaggtgctggactccactatcgccaacgtggctattccgaccattgccggtaaccttggctcgtcgctgagtcagggaacctgggtcatcacctcgtttggggtggcgaacgctatctccatcccgattaccggctggctggcgaagcgcgtcggcgaagtgaaactcttcgtctggtcgacggtggcattcgctatcgcctcctgggcctgcggggtgtcgaacagcctgacgatgctgattttcttccgcgtgattcaggggatcgtcgccggtccgctgatcccgctatcgcagagtctgctgctcagcaactacccgccagcgaaacgctcaatcgcgctggcgctgtggtcgatgacggtcatcgtcgcgccgatttgcggcccgattctcggcggctatatcagcgataactaccactggggctggatcttcttcatcaacgtgccgattggcgtggcggtggttctcatgacgctgcagaccctgcgcggccgtgaaacccgcaccgagcagcggcgtatcgacggcgtcgggctggcgttgctgattatcgggatcggtagcctgcaggtgatgctcgaccgcggtaaagagctcgactggttcgcttccaacgagattatcatcctgaccatcgtggcggtggtggcgataagtttccttatcgtctgggagctgaccgacgataacccgatagtcgacctgtcgctgtttaagtcgcgtaactttaccatcggctgtttgtgtatcagcctggcctatatgctctacttcggcgccattgtattgctgccgcagcttctgcaggaggtatacggctacaccgccacctgggccggtttggcttcggcgccggtcggagtgatcccggtcattctgtcgccgattatcggccgctttgctcataagctcgatatgcggcggctggtgaccttcagctttattatgtatgcggtgtgcttctactggcgcgcgtggacctttgaaccgggaatggacttcggcgcatcggcctggccgcagtttatccagggttttgcggtggcctgtttcttcatgccgctgaccaccatcactctctctggcctcccgccggagcggctggcggcggcgtcgagcttgtcgaactttacccgaacccttgccggctccatcggtacctcaattaccaccaccatgtggaccaaccgcgaggcgttgcaccatgcgcagctcaccgagtcggtgacgccgttcaaccccaacgcccagcagatgtacgatcagctgcagggtatgggaatgacgcagcagcaggcttccggctggattgcccagcagataaccaaccaggggttgattatctccgccaacgaaatcttctgggtttcggcggggatctttatccttctgctaggcctggtgtggttcgccaggccgccgttcagcgccggcggcggtggcgggggcgcacactaa

SEQ ID NO: 90570 - DNA, 1173 bp, Enterobacter aerogenes
atgagcgaaaatgcggcgagccaaactccgcagcaatcaggcagcaagaaagggaaacgcaaaggcgcccttctgctcctgaccttgctctttgttattgtggccgtagcctacggcatttattggtttttagtcctgcgtcattatgaagagaccgatgacgcttatgtggcagggaaccaggtacagatcatggcgcaggtttccggcagcgtgactaaggtctgggccgacaacaccgactttgtgcaacaaggcgatccgctggtcacccttgaccagaccgacgcccagcaggcgtttgaaaaagccaaaacccagctggcggcaagcgtgcgccagactcgccagcagatgatcaacagcaagcagctgcaggcgaatattgacgtcaaaaaaaccgccctcgcccaggcgcaggcagaccttaatcgtcgtatcccgctgggtgccgcgaacctgattggccgcgaagagctgcagcacgcacgtgacaccgtcgccagcgcgcaggccgaactcgacgtcgccattcaacagtacaacgccaatcaggcaatcgtactgggcaccaaactggaacagcagccggcggtgctgcaggcggcgaccgaagtccgcaacgcctggctggcgctgcagcgtacgcaaatcgtcagcccgattagcggctacgtttctcgccgctcggtgcagcctggcgcgcagatcggtaccactaccccgctgatggcggtggttccagccaccaacctgtgggttgacgccaactttaaagagacccagctcgcccatatgcgtatcggccagccggcgaccatcgtcagcgatatctacggcgatgacgtgaagtacaccggtaaagtggtcggcctggatatgggtaccggcagcgccttctccctgctgccggcgcaaaacgccaccggtaactggatcaaagtcgtccagcgtctgccggttcgtatcgagatagatgctaaacagctggcgcaacatccgctgcgcatcggcctgtcgacgctggttgaagtagacaccagcaatcgcgaaggcgagatgctggcaagccaggtacgaagctcgccggtctatgaaagtaatgcccgtgaaatcggccttgagccggtaaataaactgatcgacggtatcatccaggccaacgccggataa

SEQ ID NO: 90571 - DNA, 531 bp, Enterobacter aerogenes
atggatagttcgtttactcccattgagcagatgctcaaattccgcgccagccgccatgaagatttccctttccaggagattctcctcacccgtctctgtatgcacatgcagggtaagctgctggaaaaccgtaacaaaatgctgaaagcgcaagggattaacgagacattatttatggcgctgataacgcttgagtctcaggaaaatcacagcattcaaccttccgagctgagctgcgcgctgggttcgtcacgcactaatgccacccgcatcgccgacgaactggaaaaacgcggctggatcgaacgtcgtgaaagcgataacgatcgtcgctgcctgcacctgcagctgaccgacaagggtcatcaattcttgcgcgaggtattacctccgcagcacaactgtctacatcagctgtggtcttctttgagcaccgcggaaaaagaccagctggagcacatcacccgtaaactgcttggccgcctcgaccaaatggaagaagacggcgcgctggcgggatccctgcgctaa

SEQ ID NO: 90572 - DNA, 996 bp, Enterobacter aerogenes
atgcgacatacaactctccttgccacagcgtttaccgccctcgtcacgaccagcgcgtttgctgccgagctgccgggtaaaggcatcaccgtgaaaccggcgcagagtactatttccgaagaaaccttccagacgctgctggtcagccgcgcgctggagaaactgggctataacgtcgaaaagccgagcgaggtcgactataacgtcgcctacacctccatcgcctctggcgatgccacctttattgccaccaactggcaaccgctgcacgatgatatgtacgcggcggcgggcggcgataaaaaattctaccgtgaaggaaccttcgtcaccggcgcggcgcagggctatctgatcgacaagaaaaccgccgagcagtaccacattaaatccatcgaccagttgaaagatcctaagatcgccaaactgtttgataccaacggcgatggcaaagccgatctcaccggctgtacccccggctggggctgcgaagcggtcatcaaccatcagattgatgcctatgggctgaacaataaagtggtccataaccagggtaactacgcggcgatgatggccgataccatcgcccgttataaagaagggaaaccgattctttattacacctggacgccgtactgggtcagcgacgtgctgaaaccgggtaaagatgtggtctggctgcaggtaccgttctcctccctgccgggagaacagaaagatatcgacaccaagctgccgaacggcgtcaactacggtttcccggtgaacaccatgcatatcgtcgccaacaaagcctgggccgagaaaaacccggcggcggcgaagctgtttagcctgatgaagctgccaattgccgatatcaacgccgaaaacgcgatgatgcatgccggccatgcttcagaagccgacatcaacggccacgttgatggttggattaaagcccaccagcagttgttcgatggctgggtgaaagaagcgctggcggcgcagaagtaa

SEQ ID NO: 90573 - DNA, 1065 bp, Enterobacter aerogenes
atggctgatcaatcaaacccatgggataccgcagcgccagcggataacgcggcgcagtctgccgacgcctggggcaatccaacacccgcgcccgctgacggcggcggcgccgactggcttaacagcgcgcctgcgccgcagccagaacatttcaatattatggatccgttccataaaacgctgatcccgctcgatagctgggttacccacgccatcgactggatcgtgctgcacttccgtcccctgttccaggggatccgcgtgccggtggattatattctcagcgccttccagcaactgttgctggggatgccggcgccggtggcgattattctcttcgcgctgatcgcctggcagatctccagcgtcggcatgggtatcgccaccctgatctcgctggtagccatcggcgctatcggcgcatggtcgcaggcgatggtcaccctggcgctggtgctgaccgcgctgctgttctgcatgataatcggcctgccactggggatctggctggcgcgtagcccgcgggcggcgaaaatcatccgcccgttactggatgcgatgcagaccacgccggcgttcgtctatctggtgccgatcgtcatgctgttcggtatcggcaacgttccgggcgtggtggtgaccattatcttcgccctgccgccaattgtccgcctgacgatccttgggattaaccaggtgccggcagacctcattgaggcctcacgctccttcggcgccagcccgcgccagctgctgttcaaagtccagctgcctctggcgatgccgaccatcatggctggcgtcaaccagacgctgatgctggccctgtcgatggtcgttattgcctcgatgatcgccgtcggcggcctcggtcaaatggtgctgcgcggtattggccgactggatatggggctggcgagcgtcggcggtgtcgggatcgttatcctcgcgattatccttgaccgcctgacgcaggccgtcggccgcgattcccgtagccgcggtaaccgccgctggtacaccaccggacctctggggctgattacccgccctttctgtaaataa

SEQ ID NO: 90574 - DNA, 1203 bp, Enterobacter aerogenes
atggcaattaaattagaaatcaagaatctctataagatatttggcgagcacccgcaacgcgcgttcaaatatattgaaaaaggacttaccaaagagcaaatactggaaaaaacggggctatcgcttggcgttaaagacgccagtctggccattgaagaaggcgagatattcgtcatcatgggactttccggttcagggaaatccaccatggttcgccttctcaatcgcctgattgaacccacccgcggacaggtgctgattgacggcgtcgatatcgccaaaatctcagatgccgagcttcgcgaggtgcgcaggaaaaagattgcgatggttttccagtcattcgccctgatgccgcatatgaacgtgttgaataacaccgcgttcggtatggaactggccggcgtttccgccgaagagcgccagcagaaagcgctggatgcgctacgtcaggtggggctggaaaattacgcccacgcctatcccgacgaactttccggcgggatgcgccagcgcgtcggcttagcccgcgcattagcgatcaaccccgatattctgctcatggatgaggccttctcagcgcttgatccgttaattcgtactgaaatgcaggatgagctcaccaaattacaggcaaagcatcaacgtaccattgtctttatttcccacgaccttgatgaagctatgcgtattggcgatcgtattgccattatgcaaaatggcgaagtggtgcaaattggcacgccagacgaaattctgaataacccggcgaatgattacgttcgtactttcttccgcggcgtcgatattagccaggtatttagcgctaaagatattgcccgccgtagcccggttggcctgattcgtaaaactcccggtttcggcccgcgttcggcgctgaaattattgcaggatgaagaccgtgaatatggctacgtcattgaacgcggtaataagtttgtcggcattgtctccatcgactctctgaaaagcgcgctgagcgaaaatcaggggctcgatgcggcgttaattgactccccgcaggcggtggaggcacaaacgccgctcagcgacctgctctcccacgttggccaggcgccgtgcgccgtcccggtggtggatgaaggacaccagtatctcggcattatttcaaaacgcatgctgctacaggctttagatcgcgagggggcaaacaatggctga

SEQ ID NO: 90575 - DNA, 963 bp, Enterobacter aerogenes
atgacccatttatcgcgcatcagcgccattaactggaataaaatcgaggatgataaagacctcgaagtgtggaaccggctgaccagtaatttctggttgccggagaaagtgccgctgtccaacgacattccgcactggcagaccctgacggctcaggagcagcagttgaccatccgcgtctttaccgggctgacgctgctcgacaccatccagaatagcgtcggcgccccggcgttgatgaccgacgctctcactccacatgaagaggcggtgctgtcgaacattagctttatggaggcggtgcacgcccgctcctatagttcgatattctcgaccctgtgccagagcaaagatgtcgatgccgcctacgcctggagcgaggagaacgctccgctacagcgcaaagcgcagttgatgctcaattactaccaggccgatgagccgctgaagaaaaaaatcgccagcgtgttcctcgaatctttcctcttctattcggggttctggttgccgatgcatttttccagccgcggcaagctgaccaataccgccgatttaatccgcctgattattcgcgacgaagcggtgcacggttactatattggctataaatatcaaaaagggctggaaatcgtcagcgccgcgaagcgtgaggagttgaaaaatttcgcctttgatctgctgatggatctatacgataacgaattggcttatacccgcgaactgtatgccgacagcccgtggcttgacgacgtcaacgcgttcctctgttacaacgccaataaagcattgatgaaccttggctatgaggcgctattcccggcggaaatggccgccgtgaacccggcaattcttgcggcgctgtcgccaaacgccgatgaaaaccacgactttttctccggctccggttcttcttacgtcatgggtaaaactgaagcgaccgccgacgacgattgggacttttaa

SEQ ID NO: 90576 - DNA, 2145 bp, Enterobacter aerogenes
ttggcaacgacaaccgcagaacgtgtaaccgccggggcgtctgatttccacgccctcaatgcgatgctgaatttatacgacagcaacggccgtattcccctggaaaaggaccaacaggcggtcgaagcatttatccataatcacgtgcgtcccaacagcgtaccgttcgccgggctggaggagaaactgcaatggctgagcgacgaaggttattacgatccggcagtgctggcccgctatgagcgacgtttcgtactggccctcttcgcccacgcgcatcaacacggttttcgcttccgtactttcctcggcgcgtggaagttctacaccagctatgccttacgtactttcgacggcaaacgctacctggagcatttcgccgaccgcgcctgcatggtggcgctaaccctggcccagggtgatgaaaccctggcgcgacagctggccgatgagatcctcgccgggcgctttcagccagcgacgccgaccttcctcaacgccggtaaacagcagcgcggcgagctggtctcctgcttcctgctgcgtatcgaagataatatggagtcgatcggtcgggcggtgaactccgccctgcagctgtcaaaacgcggcggcggcgtggcgttcctgctctccaacctgcgcgaagcgggcgcgccgattaaacgtatcgaaaaccaatcctccggggtggtgccggtgatgaaaatgctggaagacgccttctcatacgccaaccagctgggagcgcgtcagggagccggcgcggtttaccttcacgcccatcaccccgatattttgcgtttcctcgataccaagcgggaaaacgcggatgagaagatccgcattaaaaccctgtcgctgggggtagtcattccggatatcaccttccagctggcgaaagaagacgcgcagatggcgctgttctcgccctatgacgttgagcgactgtacggcaaagcctttggcgatatcgccgtcagcgagatgtatgcgcaactggtggccgacgaccgcgttcgtaaacgctggatccgcgcccgcgatctgttccagcggctggcggaaattcagtttgaatccggctatccgtacatcatgttcgaggatacggtgaaccgcgccaatccgatcgccgggcgcattaatatgagcaacctgtgctcggagatcctgcaggtcaacagcgcctccacctttgacgaaaatctcgattacgccaccgttggcgaggacatctcctgcaacctcggctcgctgaatatcgcccacgctatggattcgccggacttcgcccgcaccgtcgaagtagcggttcgcggcctgacggcggtctccgatatgagcgatatccgctcggtgccatcggtggcggcgggtaatgccgcatcgcacgccatcggccttggccagatgaacctgcacggctatttggcccgcgaggggatcgcctacggcagcccggaggggctggacttcactaatctctatttctacaccgtcacctggcacgccctgcgcacctctatggcaatggcgcgcgagcgtggcgtgcgttttgccgggtttgagcagtcgcgttacgccagcggcgactatttccagcagtatttgcagggtgactggcagccgaaaaccaccacggtgcgcgaactgttcgcccgtgcggggattaccctgcccgatcgtgagatgtggcgccagctacgcgacgacgtgatgcgctacggtatttataaccgcaatttgcaggcgatcccgccgaccggttcgatctcttacatcaatcatgccacctccagcattcatccgattgtggcgaaaatcgagatccgtaaagaaggtaaaaccggccgcgtgtactatccggcgccgtttatgactaacgacaatctggcgctgtatcaggatgcctgggaaattggcccgcaaaaaattatcgatacctatgctgaagccacgcgacatgtcgatcaagggctgtcgctgacgctgttcttcccggataccgccaccacgcgcgatatcaacaaagcgcaaatttacgcgtggaagaaaggtatcaagacgctgtattacattcgcctgcgccagctggcgctggaaggtaccgaaatcgaaggctgcgtgtcctgcgcgctgtaa

SEQ ID NO: 90577 - DNA, 411 bp, Enterobacter aerogenes
atgagcctgatcgtctacttctccagcagctcggaaaatacgcatcgctttgtgcagcgtctggcgctgcctgccgtgcgcatcccgctcaacgagcgcgagcgaattcaggtagacgaaccctatattctcatcgtccccagctacggcggcggcgggacggcaggcgccgtgccgcgccaggcgatccgctttttaaacgacccgcataatcgccggctgattcgcggcgtgatcgccgccggtaaccgtaacttcggcgaggcctatggccgggcgggagaggtcatcgcgcagaaatgcggcgtgccgtatctgtatcgttttgagctgatgggtacccagcaagatgtcgacaacgtgcgtaaaggagtaagcgaattttggcaacgacaaccgcagaacgtgtaa

SEQ ID NO: 90578 - DNA, 246 bp, Enterobacter aerogenes
atgcgcattattatttacactcgaaatgactgcgtgcaatgccatgccaccaaacgcgcgatggagagccgcggtttcgccttcgatatggtcaacatcgaccaacaccctgaagccatcgacatgctgcgcgagcagggattccagcaattaccggtggtgatggccggggaaacccgctggtccggcttccgcccggatatgattaatcgcctgcgtcccaccgcggctacggccagcctatga

SEQ ID NO: 90579 - DNA, 432 bp, Enterobacter aerogenes
atgaccacattacgtcagccgtacagcgaactgagcccggaaatctataaggggttggttcaggccagcatagcgctggaaaaaagcgaattgggcagcacgatggtggagctggtctatttgcgggtgtcgcaaattaacggctgcgctttttgccttgagatgcatagcaaagcgttacgcaaagccggcgttgcccaggacaagctggatgcgctggcaggctggcgcgtaagcgcccacttcagcgccgcggaacgcgcggccctggcatgggcggaatcggttactgatatcgcagccagccacgctgaagatgaggtgtacctgcctttagaagagcattttaccccccgccagattagcgatttaaccttcgccatcagcctgatgaacgccttcaaccgacttgcggtcgcgatgcggatgtaa

SEQ ID NO: 90580 - DNA, 1359 bp, Enterobacter aerogenes
atggaagccaaaaaagtgccgcactaccagcgtatcgcccgacagctgaaatcagcgattgagaatggcgagctggccccgggaagccgcctgcccgcgagccgggtttatgcgcaggagcttggcgtgtcgcgggcgacgattgaaaatgcctggggcgagctggtggcccagggttggctggagcgccgcggccaggcgggtacctttgtcagcgagcgcctaagcccgcggcaggtcacggctcagcgcccgacggcaggccagggatcctccgcgccgcagccttttcaaatggggctaccggcactggatcttttcccgcgcggggtgtgggcgcgggtgatggggcggcggctacggacgcaatcgcgcttcgacctcacgcccggcgatccctgcggcgaaccggttctccgtcaggcgattgtcgactatttacgtctgtcgcgcagcatcgagtgccagccggagcaggttgtgattagcggcaactatgcggcctcaatggcgctaattttgcgtaccctcgcgcaaccggggcagcatatgtggatggaggatccgggatatccgttcattcggccggtggttagcgcggcgggggtcaatatcgatccggtaccgattgaccaacagggaatggatatcgactgggcgcaggcacactctccgcaggcgcgctttgcgctgttgactccagcgcatcaaagcccgctcggcgtggccctatcgctggagaggcgccgccaggtactgcagtgggcggcgcagcgcgatagctggattattgaagatgattacgacagtgaatttcgctatcaggggaaaccgctaccgccgctgaaaagcctcgatgcgccacagcgggtactgtacgccgggtcatttagtaaatcgatgtttcccgcgctgcgcgtcgcgtggctggtggtaccgctgccgttggcggcgcggtttcgccgtcaggctgaattgagccactgtaatgtaccgaccttatggcagcagacgttggcggacttcatcaatgaggggcatttctggcgccatctgaaaaaaatgcgcgccagctacgcgttgcgcaggcagtggctggagtcggcgctgcaggcgcagggttttcaggtggtaccgcagtccggcgggatccaactggtgatggcggtgaagggagacgatcgcgagcaggcccggcgctgccaacgagccgggctggcggtgcaggcgttgagcgattggcgcatgcttagccgcggtgagggcgggctattgatgagttttacgaatataacgtcggcggtgatggcgcgtgaagtagtaggcgaattaaagcaagcgctggccagcgtggaataa

SEQ ID NO: 90581 - DNA, 348 bp, Enterobacter aerogenes
atggctaaccgtgtgaaccgcaacgatattgatgaaagcgccgaggatattcataacgaagtcagccaattagcggatacgctggaagaagtgctgaaatcatggggcagcgatgcgaaagatgaagctgagaatgcgcgcaaaaaagcgcagtcgctgctgaaagagacgcgtgcccgcctgaacggcaatacccgcttgcgccaggcggcctatgataccgttgaacgcgcccgggatgccgccggctgcgccgacagctacgtgcgcgataaaccctggcagagcgttggcgcggccgccgccgttggggtatttattggcgttttgcttaatttacgtcgataa

SEQ ID NO: 90582 - DNA, 363 bp, Enterobacter aerogenes
atgtatttaagacccgatgaggtggcgcgtgttcttgaaaaagccggcttcaccatggatgttgtgacgcaaaaagcgtatggatatcgccgtggcgataattatgtttatgtgaaccgcgaagcgcgcatggggcgtaccgctttagttattcatccggcgctcaaagagcgcagtaattcactggctgaacctgccagcgagattaaaacttgcgaccattatgaacagtttccgctctatttggcgggggatgcgcagcagcattacggcattccccacggttttagttcgcggatggcgcttgagcgttttctgaatgggctgtttggcgaagctcagccgcagatgtctcacggctaa

SEQ ID NO: 90583 - DNA, 450 bp, Enterobacter aerogenes
atgttctctgctcaatcccgcttgcgtcatgcggtagcagacacctttgcaatggtggtctactgcaccgttgtcaatatgatgatcgaaattttcctctccggaatgacctttgagcagtcgttatcttcacgcctggtcgcgatcccggttaacattattattgcggtgccttatggcttctatcgcgacttcgccatgcgtcaggcgcgccgaatcagcacctcgggatggatgaaaaacattgctgacgtcgtcgcatatgtgactttccagtcaccggtgtatgtattgattctactgtcggtaggcgcagactggcatcaaattgccgccgcggtcagttcaaacattctggtatcaatgatgatgggcgcagtgtacggctactttctcgacttctgccgtcgcctgttccgcgtcagcccttatcagcaagctaaagcctga

SEQ ID NO: 90584 - DNA, 438 bp, Enterobacter aerogenes
ttgttttattttttcgatttgggatttttgatctttatgtcttttatgttacaaaaactgaataatattcgctcactgcgtgctatggcgcgtgaattctccactgacgtgcttgaagagatgctggaaaagctcaggatcgtcactgaagaaaaacgcgctgagcagcagaagacgcaacagcagcaggcagaatatcaggagaaaattaatacctggctggaattaatggttgctgatggtatttcacctgatgaattagtgctgcatgaaatggccccggcgaagagcagtaaaaagcgtaagccgcgtcccgctaaatatcgttataccgaccataccggcgcagaaaaaacctggaccgggcagggacgtatgccgaagccgatcgctttagccgtcgcgcaagggaaatcgcttgagagcttcctgatttaa

SEQ ID NO: 90585 - DNA, 180 bp, Enterobacter aerogenes
atgtttgcaacaggcgatctggtacaaccgcgcgtcggcgggccaaaattgaaggtagtggaagtgaatggcgatagtctggtcgtcgttcaggcaagtaacgagcagggtgaaaagtttactctgaaagcggttgatgttacgccttataccgaagaaggcgatttcggcgtctgctaa

SEQ ID NO: 90586 - DNA, 903 bp, Enterobacter aerogenes
atgaagtatatcattttacttattattataattgctgtgctctacgtccattatcgcggaaaggttcgctatcgtttctggcggcagctttccgatcattcaacttttaccgcgccccttaatggctttatgtaccttttttctcgcgtgccaaatacgccgtatctacgcccggagacttttccagagttggcgatattacaaaagaactggttggttattcgtgaagaggggattaacctgcagcgtctggagcaaataaaagcggcggaaaaatataatgatgccggatttaactcattctttaaaaccggctggaaacgtttttacctgaaatggtatgaagacgcgcatccctccgccagccagctatgtccaaaaacgaccgagctgctgcgtgggattccttcggttaaagcggcaatgttcgccacgctacccgatggtagccgtttgcctcgccaccgcgatccttacgccgggtcgctgcgttttcatctcgggctggcgacgccgaatgatgaccgctgttttattgaagtggacggcgaacgctacagctggcgcgatggtgagggtgtgctgtttgacgaaacctatattcactatgcggaaaataccagcggtgagaatcggctgattcttttttgcgatatcgaacggcccatgcgttaccgctgggcgcagaaggtgaaccactggctggggcgaaatttaatgagcgccgccgccgcgccgaacgacgtcggcgaccgcaccggcggaattaatcgcagcttccgttacatttatcaaatccgcattattggcaagcgattgaaaaaatggaataaaacggtttattacatcgtcaaatggctgctcttcggcggcatcgccctactcatctggcaggcgttttaa

SEQ ID NO: 90587 - DNA, 522 bp, Enterobacter aerogenes
atgactatcgctaccgtttcagccaacgaagcccaggcgcttatcgcccagggggcgcggttaattgatatccgcgctgccgacgaatacgcccgcgagcatattccggcggcgacactgctgccattagagcaattaactcacggcgcggcgctcaatgcgcagccgggcgacaccatcatttttcactgccaggccggctcgcgcacgcaaaataacgccagccttctggccgccgccgccgcgcccgcgcaggttaagctgctggctggcggtattcaggcgtggcgggcggcggggttgccgatagtcgaagataaatcccagccgctgccgctaatgcgccaggtgcaaatcgccgcaggcgcgctgattttgctgggcgtagtgctgggctacgccgtcaacagcggctttttcttgctgagtggtttcgttggcgcggggctcactttcgctggtctcaccggtttctgcggcatggcgcgcctgctggcggtcatgccgtggaaccggcgttaa

SEQ ID NO: 90588 - DNA, 300 bp, Enterobacter aerogenes
atgaccacagcacaacaactgcaggccagcgccggggaagccgctgtcctgctgaaggcgatgagcaatccccaccgattactgattctgtgcatgctctgcgaagccccgcgtacaaccgcaggcgagctggcgcaaatcaccggcctgagcccttccgccacctctcagcacctcgcacgaatgcgtgatgaagggctaatcgactgcgagcgcgatgcgcagcgcctgcgctatttcattacccatcccgccgttcagcaggtcatcgctacgctgaagaccatttactgcccgtaa

SEQ ID NO: 90589 - DNA, 606 bp, Enterobacter aerogenes
atgagtaacgttttgattttaaaatccagcatcaacggcccggcgtcgctaaccaaccagctaatagatgaatatatgcagactcgccgcgaggccggtcatcaggattcggtcgtcgaacacgatctgaccaccctcgccttgccgaaactcgacggcgcgctgtttgccgcgctgcgcggcgcgcaagactcgcgcccggcgattcagcaaggggttgccctctctgactcactcatcggcgagttaaaggccagcgatctgctggtgatcggcgcgccgatgtataacctcaacgtgccaaccgatctcaaaaactggttcgatctggtggcacgggcgcgggaaaccttccgctacaccgagacctggcctcagggactagtggaaagcgtgcgtgcggtggtcattagttcgcgcggcggcgtccatgacgggcaacccagcgatgcggtcaccccttacctgcgcgcggtgctgggattgatggggattagcgacgtcgaatttatctacgccgaagggatggatattcgcccgcacggccgcgacgcgggcattgcccacgcccgccagcatatcgccagggccgctcagcaggcgtga

SEQ ID NO: 90590 - DNA, 939 bp, Enterobacter aerogenes
atgcgcagtgatttaaatgcgatcccggtatttgtcgccgtcgtcgaatgcggcaactttgcgcaagccgcggagaagctgaacgtgacgcgctccgccgtcggcaagaccatttcccggctggagcagcggcttggcgtcgcgctgtttcagcgcaccacgcgtcggcaggcgttgaccgaagaaggcgaggtcttttatctgcaatcccgccgggcgctggataacctgcgggatgcggaaaatgaaattcagcgtggaaaaaccctggtgcaagggcggctgcgaatcagcctgccggtgctgtttggccagcgctgcgtggcgccgatcttgtttcctcttagccaacgttatccggagcttaagctcgagctgtcgtttagcgaccgtcaggtcaatctgtttgaagaagggttcgatatggcgatacgtatcggcgcgttgagcgattccagctttcttaaggcccggcgtttaggccagcacggcatgattctctgcgcatcgccgttatatctgcataatcaaccagcgccgcagacggtggaagaactgcacgagcatcttaccatcggctatctctacgccgggcagatgcagaaatggcatttgcgcgatacgcagggagcggcgctcgcgtttcgccctcagcccggactggcgatggatgatttcgccgccatcgccgcggcggcaaaaagcgggctgggaatcgcctggctgccggattggctggtggcggacgagatagcgcggggagaactccagcaaatattgccgtcgtccgttagcggcagttttgcgatcagcgccgtctggccggaagcggtatgggtgccgcagaaaattcgcgtagtggtagatgaactgctggcgcggctgccgcagcagttagccggtggagaaaaccaggaggattcttcagcgtcaggttaa

SEQ ID NO: 90591 - DNA, 597 bp, Enterobacter aerogenes
atgaacctgttagaaacgtttaaccagaacgccttccttacgctgaatgccgggccaggtacgccggacagcctattgctactggctcaattctccgccagctggcttattctcattgtgccggcgatattgctgggattatggttccttggcggtcgtcaggggcatcgacaggcgctgttttgcgccatgacgattttgatagcgttagggctgggggttgcctgtggaaccctgtggttccatccgcggccgtttatgatgccgctgggccatacctggataagccacccggcggataactcttttccaagcgatcacggcaccgtaatgttcagcgccgccttcgcgctgctgtcattacgcctgcgcggcattgggctgctggtgctggcggcggcgctgccggttgcgtgggcgcgtatttttctcggcgtccatttcccgctggatatgctgggcgcggcgctgatttcagcactgagcctctgcgtagcaaaagtggtctggcaacggctggggcagacgctggtggcgctgtgcgaagcgctgagccgccgtctcttctcctggctgccggcgcgctttacgccgtag

SEQ ID NO: 90592 - DNA, 1782 bp, Enterobacter aerogenes
gtgcaaggaaatccgttcactatcacccccgaggcgcagtccagcacgctgctgagcgactcctggcaacgcagccagcgttatggcctgcagccaacgagcgacgaatttccgcgcctgcgcggcggcgaactggccgacgtgctggaaagcaaccgcagcctacaacggctggcgcaaccggtggcgacgccgctggcgcaacgtgccgcctggctgcaatcggtagtgattctttccgatgccagcgggctggtactccgaaccttcggcaatagcgcagcgatggaaaaagcgcaaagcttcgcgctggagcctggcaatatctggagcgaaagcggtcgcggcaccaacgctatcggtaccgcgctggcgattgacgacagctgcgaagtcgaaggccgccaacactatttaacccgtaatcaggatttgtactgcgcggcggttcccctacaaagccccgatggccagattgccggggcgctggatatttccggcccggcgcatatcccgcatccccactctctggcgtggattaaagaggccgccaaacagattgaatatctgtgggtaaaacagagtctgcatccgcaacagtggttaatgagcctgcactcgcgggtacagaagctcgatagcgccgaagagctgctgctggttttctccgataacctgctgaccgcggccaatcgcctggccatccgcgaactgggcctgcaggccggacagatagggcaaatgaccttccagcagttgttcccccgcctgacgcaaacggcggtcagcgtgccgctaccgatgaccttccagcaacgtggctactactaccgtctgcgcgcgccaacccgcgccagcgtcgccgtccccgcacaaccagcacttaacctgccgttttgcgcgtccggcgaaggcgagaaaatggtccgcctgctcaacgccggtatcgcgttgtgtatcgaaggcgaaaccggctgcggcaaagagttcctcagccgtgaactgcatgcgcatagccgctggcgcagcggtaaatttgtcgccatcaactgcgcggccattccagaatcgctgattgaatcggagcttttcggctatcaggcgggggcctttaccggcgcgaataaaaacggctatatcggcaaaattcgcgaagccgatggtggggtgctgttcctcgatgaaatcggcgatatgccgctggctctgcaaacccgtctgctgcgggtattgcaggaaaaagaggtcatgccgctgggtgggaatcgcagcgcgccggtgaacttcgccttgatttgcgctacccaccgtcatctcgcgcagcgtgtcgccgaaggcgcatttcgcgaggacctgctctaccgcctgcgcgagtatgcttttaccatcccgccgctacgccaatggcctgaactcaagcagtttattccagcgttgtggcgctcgcttggcgcggcagaacgccatataaccctctctgacgcgctgattcatcaactgacattatgtcgttggccgggtaacgtgcgtcagttgcaaagcctgctcaaagtcctgttggcgctggcggacgatggcgaatgcctgggcgtcgcggcgctgccggaggagtatcaaagcgcgcagcaaaccagcgctccgggcgggcttcaacaacatgatgcaaagctgattgccgatacgctggcccgctttaacggcaatgtgagtaaagcggcgcaggcgttaggcgtcgcgcgcagcacgctgtatcgacgggccgcgcgcgtacaaaggaagtga

SEQ ID NO: 90593 - DNA, 1521 bp, Enterobacter aerogenes
atgcgttatgttcatccttgcaaaccgggcgctttggtttcattcaaatcggcctacggcaacttcatagacggtaaattcgtcgagccgttaagcggcgaatatttcatgaatacttctcccgtcgatgggagcaacattgcgcagtttccccgttccgacgccaaagatatcgatttggctcttgatgcggcacaccgggcggcagacgcctgggggcgaacctcggtacagcagcgttctcatcttctgctgcaggtcgccgaccgcattcaggagaatctggagtatctggcggtagcggagagctgggataacggcaaaccaatccgcgaaaccctgaacgccgacctgccgctggcggtcgatcatttccgctatttcgccggttgtctgcgcgcgcaggaaggcagtaccgccgaaattgacgacaccaccgtggcttatcatttccacgaaccgttaggcgtggttgggcaaattattccgtggaacttcccgctgctgatggcggcatggaaactggcgcccgcgctggcggcaggcaactgcgtggtcttaaaaccggcggagcagacgccgctgagtattactttgctgatggaaattatcggcgatctcttcccggcaggggtgttgaacgtggtgcagggctttggcaaagaggccggcgaagcgctggccaccagcaagcggatcgctaaaatcgcctttaccggctcgacgccggtaggccgtcatattatggcctgcgcggcggagaatattattccctgcaccgttgagctgggcggcaaatcgccgaatatctattttgccgacgtaatggatggcgaggaggagtttatcgagaaggcggtggaagggctggtactgggcttcttcaatcagggagaagtctgtacttgtccgtcgcgcgcgttgatccacgaatcgatctacgagccgtttatggagcgggtaatggcgaaagtgatgcagatccgtcgcggcgatccgtttgataccgaaacgatgatcggcgctcaggcatcacgccagcagttcgataagatcctgtcatatatcaagatcgctcgtgatgaaggcgggcagatcctcaccggcggcgatcgggcgagcattaccgccgagctggatagcggcttctatattcagccgacgctgattaaagggcacaacgagatgcgcagcttccaggaggagatctttggcccggtcatcggcgtgaccacctttaaggacgaggcggaggcgctggcgatcgcgaaccagacgcagtttggtttaggggccggggtgtggacgcgggatactaacctggcgtaccgcatggggcgtggcatcaaggccggacgagtgtggaccaactgctatcacgtttacccggcgcatgctgcgtttggcggctataagcagtccggcgtcgggcgggaaacccacaagatggcgctggaagcctatcaacagactaaaaacctgctggtgagctacggcactgcgccgttggggctattctga

SEQ ID NO: 90594 - DNA, 945 bp, Enterobacter aerogenes
atgtctgaaacgctattaaccctcaatgatgtgcacctgacctttaccgcgcagaaaaactggcgcgggaaagtcatcgaacgcgtctatgcgctaaacgggctggatatgacggccaggcgcggcgaaaccttagggatcgttggcgaatccggctgtgggaaaagcaccctggcgaagctgctgatgggcatgttaaagccctcttccggccacttcacccgcgcgccggcgcgcggcgaaaaccagagcggacgcatgcagatggtgtttcaggatccgctctcatcgctggatccgcggctaccagtctggcgcaccatcaccgaaccagtgtggatccagtcgcgcatgcctgaaaaagcgcgtcgcgatctcgccgagcagctggcgctacaggtggggatccgtagcgaatatctcgatcggctgccgcacgctttttccggcggccagcgccagcgtatcgccatcgcccgtgcgctctcgtcgcagccggagattatcgtgcttgatgagccgacttcggcgctggacatctcggtgcaggcgcagatcctcaatctgctggtcgaactgcagcagcggcaaaatctcacctacgtgctgatttcgcataacgtctcggtgatacgtcatatgagcgatcgggtggcggtgatgtatctcgggcaaatcgttgaaatgggcgaggcacggcaggtgctggataatcctgcgcatccttatacccggctattgatggagtcggtaccgcgcatcggttcaccattaggcgaaggcgtgcgcaataccgaactaccgggtaaccgccggctgccgacgggctgctactttcgggaacgctgtccttacgccagccagggctgcgaatggccgcagccgctggaggcgcaagcgaatggcgcgcaggtccgctgctggaaagcgcaaacaataagatga

SEQ ID NO: 90595 - DNA, 990 bp, Enterobacter aerogenes
atggaaaatcgggtcttaactatcgataacgttcgcctgagtttcccggtctatcagggccaggtcaacgtgctgaataatatctcgctgcacatcgatcgcggtgaaatcgtcggcgtggtgggcgaatccggctccggcaaatcggtgaccgcgatgctggcgatgcggctgcttcccgccggtagctatcatattcatagcggcgctatcaccctgatgggtcacgatatgctcaacctgacggaaaaaacgctacgcgatattcgcggcagcaaggtcgcgatgatttttcaggagccgatgaccgcgcttaaccccacccgacgcatcggtaagcagatggcagacgtcatccgccagcaccgtcccatgtcgttgcgtgaagcgcgcgtccgcgccgtcgagctgctggcggatatgcaaattgccgatccgcaaagcgtgctcaagcgctatcccttcgaactctccggcggcatgcgccagcgggtgatgatcgctatcgccttctcctgcgagcccgacctgctgattgccgacgaaccgaccaccgcgctggacgtcaccgtgcagcgtcaggtactgcgcctgttaaagcaaaaggcccaggcgaccggcacggcggtgctgtttatcagccatgatatggcagtggtctctcaggtgtgcgatcggctgtacgtcatgtacgccggcgcggtcattgaaagcggcaacaccggagaagtactgcagcagccgcagcatccctactctattggcctgttaaacagcgctcctgataagggagaaccgcgcacgccgctacgttccattcccggcaccgtgccgaatctggcgcgtcttcccgccggctgcgccttccgcgaacgctgcttcgccgcgggtgaagcctgcggtatcacccccacgctgcaggctcatgatagcgccgccgatagacaggctgcctgctggtacccgcaacgggagaacgcccatgtctga

SEQ ID NO: 90596 - DNA, 891 bp, Enterobacter aerogenes
atgatgactcaggaacaaccgcttccacggccaaaggctgaaaaaagcggccactggaagcgtcgttggtggttgatccgccagagcccgctaacgctgattggcgcagcgatcatgctgatcatgctgtttttaatgatcttctcgccgtggctgacgccgcacgaccctaacgctatcaaccttgccgcgcgtctgcaggcgccgtcgttcgatcactggtttggtaccgacgaggtcggccgcgatctgttcagccgcgtactgatcggcagccagcagtcggtggccgccgggctggcggtggtattgatcgccgggatcagcggctcgctgctgggctgtctctccggggtgcttggcgggcgcagcgacgcgctgattatgcgtctgatggacattatgctgtcgattccgtcgctggtgttgaccatggcgctggcggcggcgttaggcccgagcctgttcaacgcgatgctggcgatcgccatcgtgcgtattccattttacgtgcgcctggcgcgcggccagacgctggtggttcgtcagcatactttcgtcgaggcctcggtgacgtttggcgcctcgcgctggcatctgatcagctggcatattctgcgtaacgccctgccgccgctggtggtgcaggcctcgctggatatcggcagcgcgattctgatggccgccacgctcggttttattggcctcggcgcccagcagcccaccgcggaatggggcgcgatggtcgctaacggccgcaactacgtgctcgatcagtggtggtactgcgccttccccggcgcggcgatcctgatcaccgccgtcggctttaacctgtttggcgatggcatccaggatctactggatcccaaagccggagggcgcaactaa

SEQ ID NO: 90597 - DNA, 1020 bp, Enterobacter aerogenes
atgagtttctggggtttaatacggcagcgctgttgggggctgattttagtcgtcgccggcgtctgcgtgattacctttattatttcgcacctgattcccggcgacccggcgcggctgctggcgggcgatcgcgccagcgatgaaatcgtccgccatattcgccagcaactggggctggatttaccgctctggcagcagtttgcccgctacgttgacgccctgctccacggcgatctcggcacctcgattcgcaccggccgcccggtactggaagatttaaaaaccttcttcccggcgacgctggaactggccttttgcgcgctgctgattgccctagtggtcggcatcccgctcggcgtgctgtcggcggtttaccgcaatcgctggaccgatcacctggtgcgcctgatggcgctgaccggcatctcgactccggcattctggctcggtctcggggtaatcgtcttgttttacggcaagctcgactggctgcccggcagcggcaggctcgatgactggttcgatccgcccacccgcgtcagcggtttttatctgctggattcactgctggaaggcaatattgaagtcttcttcaatgccctgcagcacctcattttgccggcggccacccttgccttcgttcatcttggcatcgtcgcccggcagatccgctcggcaatgctcgagcagctcaatgaggattacattcggaccgcgttagccagcggcctgccgaaattcaccattgtggtgcgctatgcgctacccaacgcgctgattccctccatcaccgtactcgggctggcgctgggcgatctgctgtacggcgcggtgctcactgaaacggttttcgcctggcctggaatgggcgcttacgtggtgtcttcgattcaggcgctcgatttccccgccgtgatgggcttcgccatcgtggtctcctttgcttacgtactggtcaacctggtagtcgacgtgctctatttatggatcgacccgcgcatgggtcggggagaaagctaa

SEQ ID NO: 90598 - DNA, 1563 bp, Enterobacter aerogenes
atgaacatgactcgcccagcatccgtaggttttcgcccgttactattagccgccgcgctctgcgccgccatcccttccgcctttgccgcggtgccgaaagatatgctggtgatcggcaaagccgccgacccgcaaacgctcgacccggccgtcaccatcgataacaacgactggacggtgacctatccggcctaccagcggctggtcaaatacaaaaccgataatggcaaaggttcaaccgatgtcgaaggcgatctcgccgaaaactggcaggcctccgacgacggcaaaacctggaccttcactctgcgcaaaggcgcgcagtttgccgacggctcgccggtgacggcagaggcggtcaaactctctttcgaacggctaatgcgcattaaacaggggccatcggaggcgtttcccagcgggctgaaggtggatgtcgtcgatccggccaccgtacgtttcacgctgccggaatctttcgcgccgttcctgcataccctcgccaatgacggcgcctccatcattaacccggcggtgctgaaagccaacgccgccgatgacgcccgcgcctatctggccgagcacaccgcaggctccggcgcgtatagcctgcagcgctggcagaaaggccaacagttggtgctggtacccaacccgcacttcagcggcaacaagccggcctttaagcgcgtcacggtgaaaatcatcggcgaaagcgccgctcgccgtctgcagttgaccaagggcgacctggatatcgccgacgccctgccggtcgatcagtttgcggcattgaagaaagaggacaaggtgacggtctacgactatccggcgctgcgcgtcacctacctgtatctcaacaacagcaaagcgccgatgaaccaggcggatctgcgccgcgcggtgtcgtgggcaacggactataaaggcatggtcgacggcattctcggcggtaacggtaagcagatgcgcgggccgatccccgatggcatgtggggttacgacgccagcgccatgcagtattcattagatctcgacaaagccaaagcggcgctggacaaggtggcggataagccgaaaacgctgacgttcctctactctgataacgatccgaactgggagccgattgcgctctccactcaggccaacctgcaggcgctgggtatccaggtcaagctggagaaactggccaacgccaccatgcgcgagcgtgtgggtaaaggtgattacgacatcgctatcggtaactggagcccggatttcgccgacccctatatgtttatgaactactggttcgagtcggacaaaaaagggctgccgggaaaccgcgcgttctacgataacccacaggttgatgcgttgttgaaacaggcggttgccaccaccgatcaggcggcgcggaccaaagattatcagcaggcgcaaaaaaccgtcattgatgacgccgcctacgtctacctgttccagaagaactatcaggtcgccatgaacaaggaggtgaaaggcttcgttttcaacccgatgcttgagcagatttacaatatcgccgacatgcacaagtag

SEQ ID NO: 90599 - DNA, 582 bp, Enterobacter aerogenes
atgagccatctttccctggtggatatcgccgcgcgttttcccacgctgcctgtcgacctgaaatacgctaccgccgataacattaccggccaaccgatttaccgcgaagcccgctgcctgctgcaccccgacgcggccgtcgcgctggagaaatctatcgccatcgccgcgctggcgggctatcgcctgctggtacttgacgcctatcgtccacagcgcgcccagcaactgctgtggaatgcctgcccgaaccaggattatgtcgtaccggccaatatcggctccaaccacagccgcggcaccgccatcgacgtaacgctactcgatgaacataacaacctactcgacatgggcaccgcctttgacgaaatggacgatcgctcgcatccctaccacccggcggtggcgcaggaggcccagcgcaatcgcctgttgctgaacgccattatgttcggcggcggctttaaaggtattaccacggaatggtggcacttcgaactaccggacgcggccggttatccgctactcgatgatgttttcgcctgtttctcccccgctcagattgacggagtttcaccatga

SEQ ID NO: 90600 - DNA, 867 bp, Enterobacter aerogenes
atgaacgatagcaacggcttgtttcacattattgaatccactttcagccagctcacgccgagcgaaaagcgtattggcagctggctgttaagccatcgggagcatatcccgtttgagaccgccgacagcattgcgcaggccaccggcaccagcgggataaccgtaggccgctatctgcgcaagctgggctatcgcaatctcgatgacgtgaagcacagcctgaaggagcccgcttcaacgccctaccgccagtggggagtgattgaccggcttgactcctggtcacagcagcaggcgcagccggatcgcgccagcctgtcgttgcagatggagctggatgccattcgctatgtctatcaactggcgcaggaaccgaccttcgcccgcgtcagtcaacgcatcgccgaggccgacgcggttatcatcattggcattcagtcgacccgcggcatcgccaacacgttcttcagccatctggaatacctgcgcccgcgcgtgacctacgccgacggcagttccggtagctggctggaatcattgaattctgaataccagcgcccctatgtggtgctgaccgatacccgcgcttactccgtcgccgcgcgccagttttgccgggtcgcctgcgaacgcggggttgccaccgcgctggtcaccgatatctggtgcccgtgggcgcgcgactatccggttgatttactacaggtaaaaaccgataccggccacttctgggattcgctggcgccgatcggttgcctttttaatctgctgctctccgcggtggtggaacggctggggccgagcctctccagccgccttgccgcgaaccgcgcgctgcagcaggaatttggtcagtttgaacgttaa

SEQ ID NO: 90601 - DNA, 786 bp, Enterobacter aerogenes
atgaaaatcgcatttggcgaaataagatcgttattacaaagtcagcgtattttcctcggcgggcagaggctggtttgcgaccatccgttttatcgtgatgagcaaccaattgaagtaccagaaaatttatgcactgaaccgtataccacctattgggggcgctgtggcgagcggttggcttcgctgggggctttcagttacacccgtacgttgttgccggcgtttattcaggttgggcgctacacctcaatcgctgatagattacaggtattaggcgatcgtcatcccttagagtgggcaagctccagcccggttttttacgcccgtcattcagcgctaatggcaaccctggcagcggataacggacgggaaaaccatttttacgcttttgaaaaacagacgcgccccatcgtgattggcaatgatgtctggattggacaaaacgtgacgttggcgcaggggataaccattggcgatggcgcggttatcgccgccaacgcgctggtggtgaaagatgttgccccgtataccatggttggcgggaacccggcgaagctcatcaaataccgttttgccgaaccgattgttgagcagctgttagcgctgcgctggtggcaatattctgcacaggatattgctatgtttccggtgaacgaggtggcgcgcttttgtgaattactgcgccatgcgcaggagcaaggtgaactcacgccgcttgcgctaccaaagctgacggcaacggtggtgaaaaccgtggtcgctggcggcatgaagatgaaatcataa

SEQ ID NO: 90602 - DNA, 762 bp, Enterobacter aerogenes
atgaagttaaagttgggtgtggccctgatggcggcggtgatagcctgcggcgtccaggcgcgcgatatgcagtcgattcaacaaagcggcgagttaaaagtcggcgtgccgggggactacgcgccgttggcctttcataacggcgccggcgaacttatcggctacgacgtcgatatggcgcacgatctgggtaaaacgctgggagtgaaggtgacgtttattatcaccagttggccaacgttatcgactgatttaaaagccgataagtttgatatcgctatgggaggcgtaacggagacggcggcacgggcaaaagatttctccctgagccatccggtggtggccaatggtaaaatcgccctggcgaactgcagcgccgcgccagcgctcggcagccttgaaaaaatcgaccagccgaatgtgaaggtgattgtgaaccccggcggtaccaaccaaagtttcgttgatgagcatatcaagcatgcgcagatcatccgcgtgcagaacaatgtcgataatctgcaggcgctgcggcaaaaaacggccgatatgatggtgaccgacctgatagaaggggattactaccagagcaaggagcctggcgtgttctgcgtggcgaatgagacgccgttccccggcaccgccagctataaggtctatatgatgaataaggataatccggcgctgcttgagaaagtgaaccactggctggatagccaggacaaaaatgtgctcaagcggaagtggaaaattcaggggtaa

SEQ ID NO: 90603 - DNA, 609 bp, Enterobacter aerogenes
atgtctgtcatcagaagcttacttttctttctcggcgcagcggcggcttccgccatcgcggtactttgtctatggatggatatccgggtgtttggcaacgatatcccggagatttcgcttaccgaggtagtgcaggagggcgtgctggcgataatcgtgctgatgcacttcctgctggcgaaaaaatatgagctcctgcgctactgtaatatcctcgttggcggcttcttcctggcgatgctgatccgcgaactggatgcgctgtttgatcttattactcacggcagctgggtgtggttcgcgctggcaacgacgatagccgcgctaatcgctccgctgcgccacgctcgtcaaacgctgtcgcaactggcgcaatacacccgcacgccttactacggcatgatgataagcggcctgctggcgattctggtcttctcacggctgttcggcatgcatggcttatggtatgccgtactcgatgagaactacgcgcgggtggtgaaaaacaccgttgaagagggtagcgagtcgttcggctacatgctttgcctgaccgcctcgattggctactactgctacttccgctatcaggcgcggcagaaaagctaa

SEQ ID NO: 90604 - DNA, 795 bp, Enterobacter aerogenes
atgaatattgatttatcggggaaagtcgcgctggtgacggcatccacggccggcatcggttatgccattgccaaagggctggcggccagcggcgcggaagtgattatcaacggccgcagcgaacatagcgttaatgcggcgatggcgcggctgcaacaggaggtgccgggattccggccctatcccgcggtggccgatctcagtgacgccgcgggcgtcagccaactgctgcaggcggtgaatgaagtcgatatcctggtgaataacgccggtatttacggcccgcaggatttttacgccaccgatgacgccacctgggaaaactactggcaaaccaacgtaatgtccggcgttcgcctgtcacgcgcgctgttgcccgccatggtgcgtaaaggctggggtcgggtggtctttatctcctccgaatcggcacgcaatattcccgccgacatgatccactacggcgtaaccaaaaccgcgcaactgtcgctggcgcgcggactggcgaaatacgtcgccggcagcggcgtcaccgtaaacagcgtgctgcccggcccaaccctttctgacggttttgccgaaatgatgaaagatgaggtcacgcgaaccggtaagccgctggaacaactggcgaaagagtttgttatggcgcagcgccccgcttcggttattcagcgcgcggcctcggtggatgaggtggccaatatggtggtctacgtctgttcgccgcaggcatccgccacctccggcgccgcgctacgggtcgatggcggcgtagtcgatgatattgtctga

SEQ ID NO: 90605 - DNA, 891 bp, Enterobacter aerogenes
atgaatactacttttcccagtaaagtcctcggcgatatgcgcgttactgccgtaagcgatggctatttgcaggtaggttttggcctgttaaccaaaattgatgaagacgagtgcagaaacattcaggcaaacgcccgtatagcacaaccgaatacggtcaacataaacacctttctggtacaacaagccgggatgaatatcctgatcgatagcggcgctggcggcgttaaagggtggggaggccaactgatcaataatctggctaaacttggcgtcaaaccagaggatattgacgccgtactgttgacccatgcgcatcccgatcacatcggtggcttaattaattcgcagcaagacgcggtatttcctcgtgctgaattgataatacctcaagatgaattcagttatctcgaagatgaccgtaatttggttacggccagtgaacgcgttaaaggtaatgttatgttcgcgcgcagcgtgtttaaacaatatcagcatcgtttacggctgattgatgaaggcgaggtgtttgctggtatcagtgccctggcattgaaaggacatacgccaggtcatacggggtatctcctctctggaagcatagaacgcgtattagtgtggggggatattgtgcattttccccatattcagttattagaccccgaggtcacgatagccttcgacttcgaccctcttttggcgcaggagacgcgcattcgccttcttgaaaaggtctgcgctgaacagatactggttgccgggatgcattttgatacagcaggtttcgccaggattaaaaaatgctcgtccggctatcaaattatcccggcggacggaattaatagccagtctcacgcagccgtggatcctgaaatacggatgccaccatga

SEQ ID NO: 90606 - DNA, 888 bp, Enterobacter aerogenes
atgaagcttaatgaacttctggcgttcgttactgttgtggaaacggggaatatcaccctggcggcagaacgtctgaatcgagtgcaatccagtatttcccatcggatacgcagcctggaaagtagcctggatgccacgctattagacaggaagaacgaggggtgcatcccaaccgagcagggaaagatattgtatgaatatgccctcaaaatgcttaacctggcggatgattgcaaacacaacattaccctttcaaaaagacgccgattaacgattaaaatcggcatcattgaatgtttgccgccctatgttatcagcgcattgattgattcaggccatgacttaggctgggatattgatgtttcaatcggcaataccagcagtttacttaatgctttcgatagacacgaatatgatgcggtcattattggcgcgggcttctcctccccacagcatacgcgcgctatgttgctcactagtgagttagtgcttatcaccgcgaaagatcatccagccatcaccgcgacctccgctctggatgacaatgtctttttattgagtagtaaaaaatgcgcaacttcaacgcgcaatctggatatgttattccgtgaaggcaacattactcccaggcgcgtcgtggagtgcggctcttacccggtgctgttctcaaatatcgccgatggcaaaggggtctcgctggtgctgcgttgctcaatcagcgatgagatccagcaaaaaataaaaatccatccattaacaggtgagtttaatgatttcggaattgagctgctatgccgccctgagggcacccatttcgatttgcagcagttgaacctcatggtggcatccgtatttcaggatccacggctgcgtgagactggctattaa

SEQ ID NO: 90607 - DNA, 1383 bp, Enterobacter aerogenes
atgtcgctggtaagtagttgttcacttgatcaaggttttgaggcgccgaggcgctatttagccgccgcggccatactaatcggcgtgctaatggcggcgctggatagttccattgtcaatgtcgccttgccttcgattgccagtgcgttacgggtcgattcggcgtccggtatctggatcatcaacggctatcaggtagccagcgcggcgacgatgctgatttgcgcgtcgctgggcagcagaatcggtgagaagcgtttttatacggcgggaatggcgttatttacgctctcttcgctgggctgtagccttgcgccgacctttggcgtactggttaccatgcgcatactgcaaggggtaagctatgcggtcatgataagcgtggggctgggcttgtaccgggttattttcccaccccgcgcgctaggaacgattttcgggctgaatgcgctggccttcgcggttggcacggctatcggtccggcgctgggcggatttatcatctcgtcgctctcctggccgtggcttttctatatcaatatcctgcctggcggcgctgcgattgttttctccttgatttcattaggggaggataacgaaaaggagcagggctttgattgggccggggccgtgagttcagcggcggcattaggcttgatggtggtggcggtcgatcaaattggccgctgggagggccgaacgcttatctactgcgcggtggcatcagtggcgttatttgctttctttattatcgcccagacgcgagcgaagcatccactattgccgcttgatatatttcgctcacgccaatataccctggcggtgatctcgtccagctctttgttcatcgcccagggaatggcattggtcggtttaccgtttgtattgcaacatacctaccattactcagtactggaatcggcttttatctttacgccgtggccggtggcggtcgcaatctgcgccccgctggcgggaagcttatcaaaccgttttaatccgacgcagatttcaactgtcggggtggttatcttttgtcttggcttaggctcgctggcactgttgccgggcgctgcgacggtgaatgattttctgtggcggaccgccgtttgcggggtggggtatggcttattcctgccgccaaataataaggagatgtttgctaatgtctcagcaaatcgcacggcaacggcctccggggtattatccaccgccaggacgactgggctgtccatcggtgcggcgctggtggcgatggttattgcgctgttgaacggcttaaccggcccaggcggcgcacagtttgccgtttatgtgtttggcctcgcctgcgctattgctgcgatatcctctattgccagtaccttacgcttgcatcgctaa

SEQ ID NO: 90608 - DNA, 624 bp, Enterobacter aerogenes
atgctggaaataaaaaatatcgcctgcctgcgggatgaacgaaccctttttacccacctatcatttgcggtacaacccggcgagattattcaaatttcaggccccaacggtgcgggaaaaacctcgttattacacctcctgaccgggttatcgacgccagaagaaggggaaattctctggcagggcaaaccgctgcggcgtactcgcgatagctggcacgcgcagctcttgtggctcggtcatcaggtgggggttaaaggggcgctaacggcggacgaaaatctgcgcttttaccatcctgaggcgaccattgaggcgcgctggcaggcgctggcgcaggttgagctggtgggctttgaggatgttccggtagcgcaactctctgccgggcaacagcggcgcgtcgcgctggcgaggctttggctcagccgcgcgacgttctggattttagatgaacccttcaccgcgctcgatgcggctggcgtgcaaacgctgaccacccggctggagcagcacatcggccagggcggtgcggtcatcctgaccacccatcaacctctgcgccctctgtgcgttcccttacgcacgattatgctgagtgacgatgaggcggtcgcggcatga

SEQ ID NO: 90609 - DNA, 660 bp, Enterobacter aerogenes
atgatcaagcagatattctggcgcgacctgcgccttgcctttcgcaattacgccgaaattatcaacccgctgtggtttttcctgattattatcaccctgttccccctcagtatcggtcctgaaccgcagctgctccggcagattgcgccgggcattgtgtgggtggccgcgttactctcttcgctgctggcaatggaccggctgtttcgcgatgactggctggatggctcgctgcagcaactgatgctgatgccggtgccgctgtcgctggtggtgctggcaaaaatcgcggcgcattgggtggtctccgggctgccgctactgataatctctccgctgatcgctatgttattcggactttcgaccgcggagtggcaggtgctggccctgacgctattgatgggcacgccaacgctgagctttattggcgccatcggcgtggggctgaccgtcggcctgcggcgcggcggcgtattgctgagcctgctggtactgccgctgatgattccgttactgattttcgccaccgccgccgtgggcgcggcgcagatgcagttgccggttgacggctatatggccatccttggcgcctttctggcgggaagcgccaccttaagtccgtttgctaccgcggcggcactcagaattagcgtgcaataa

SEQ ID NO: 90610 - DNA, 747 bp, Enterobacter aerogenes
atgtggaaagtgttacatcaactcgccattccagagcgcctgtatagcgtatgcggacgattcattccgctgatggctatcctcagcgcgctgtttctggtggtgggctgcgtctggggatttgtctacgccccggcagattatcaacagggtgaaagctatcgcatcatgtatctgcacgtcccggcggcgatgtggtcgatggggatttacggctccatggccgtgaccgcttttgtcggcctggtctggcagatgaaaatggcggataaagcggtgattgcgatggcgctgccaggcgcggtttacacctttattgcgctggtgaccggttccgcgtggggaaaaccgatgtggggaacctggtgggtctgggatgcgcgtctgacttccgaactggtcctgctgtttttatacgtcggggtgattggcctgtatcacgcttttgacgatcgccgactggccgggcgcgccgccgggatactggtgctggttggggtggttaacctgccgattattcattattccgtggagtggtggaacaccctgcatcagggctcgaccaatatgcagaaaaccatcgatccgtcgatgcgcatgccgttgcgtttaaccattttcggtttcttattcctctttattactctgacattaatgcgtatgcgtaatttaattctgttgcaggagcgccgccgtccgtgggtcgtggcgctggctggcgctagtaagcgcgaggagaacttatga

SEQ ID NO: 90611 - DNA, 225 bp, Enterobacter aerogenes
atgaccagcgcttttcactcctggagcgatttctggcagatgggcggctacgccttttatgtctggctggcggttgcagtgacggtcatcgcgctgctgattttgttcatccacacccgctggcagcgccgggcgttgctggcggatgtacgccggcagatggcgcgcgagcggcgggtatcggcggcgcgtaagcaaagcacaatgaagggagatgcgttgtga

SEQ ID NO: 90612 - DNA, 477 bp, Enterobacter aerogenes
gtgaatcctcggcgtaaagtacgtctctggctcgcctgcggagtgattggggggctggcgctgaccgttggtctggtgatgtatgcattaagctccaatatcgatctcttctataccccaggcgaagtgatatacggcaaacgggaaaatggccagaagccagagccgggacagcgtctacgtatcggcggcatggtgatgcccggcagcgtgaagcgtgacgataaaaccctcgatgtgaccttcaaactctatgatgcccgcggcgtcgtcgaggtgagctataccgggatcctgccggcgttgttccgcgaagggcagggggtcgtagcccaggggacgctgcaggacgggacgcatatccgcgcgaaagaagtgctggcgaaacacgatgaaaattacacccctccggaagtgaaagaagcgatggaagagaatcatcatccggctgagaagccacagggagccgcgcaatga

SEQ ID NO: 90613 - DNA, 1953 bp, Enterobacter aerogenes
atgatccctgaaatcggcctcttcctgctgtgcctggcgttgggcatttcctgcctgctggcgctatttccctcctggggcgcgatgcggcaggatgcgcggatgatggcgctggcgaagccgctgtcggtagcgatgtttgccgccatcctcggggcgtttctcattctggtgtacgcctttgtggtgaatgacttcaccgttctgtatgtcgtcagtaactcgaatacgctgctgccggtgtggtatcgcgtagcggcgacctggggggcccacgagggatcgttgctgctatgggtattgctgatgagcggctggacctgcgcggtcgcggccctgagccgtaatattccgctggaagcctcttcgcgggtgctggcggtaatggggatgatctccttctgcttcctggcgttcatcctgctgacctcaaatccgttcgtgcgaacgctacctgatttccccatcgaggggcgcgatctgaacccgatgctgcaggatatcgggctgatcttccacccgccgatgctgtatatgggctatgtgggcttctccgtggccttcgctttcgccattgcgtcgctgatgaccgggcgtcttgatagcgcgtgggcgcgctggtcacgcccgtggacgctggcggcgtggagctttctgacggtcggtatcgtgctggggtcggcgtgggcctattatgagctcggctggggcggctggtggttctgggatccggtagaaaacgcctccctgatgccgtggctggcgggaacggcgctgattcactcgctatcggtcaccgaaaagcgcggcagctttaaatcctggaccgtactgctggcgattctggcgttctcgctgtgcctgctgggcactttcctggtgcgttccggtgtactgatttccgtacactccttcgcttccgatcctacgcgcggcatgtttattctggcgctgttggtgatcactatcggcggttcgctgctgttattcgccatcaaaggcggcaaggtacgttcccgggtgcgtcacgaactgtggtcgcgcgagtcgctgctgctgggcaacaatgtgctgctgattgccgccatgctggtggtgctgctggggacgctgctgccgctgatacacaagctactggggttaggcagcatttctattggcgagccgttctttaattccctctttattgcgctgatgattccgttctcgctgctccttggtatcgggccgctggtgcgctggcgtcgcgatgaattccacaagctgcgtaagcggctgctgattgccgcggtggttgccatcgtactggccatcgcactgccgtggctgatgcaggatcgtattaaagccatgaccgtggttggcctgctgatgtcgctatgggcattcgtgcttaccgtgatggaagtggtggagcgcgccaccgaccgccaccccttctggcgcgggctgacccgcctcggacgcagtcactggggaatggtcgccggccatgtggggctggtggtcaccgtcattggcatcgccttcagtcagaattacagcatcgaacgcgatgtgcgaatgaagccgggcgatagcgtcgatatccaccagtatcactttgtgttccgggacgtacgggatatcaccgggccgaactactttggcggtgaaggggtgatcgaagtttcgcagaatggccgtcacgtgagtacgctgcgggcggagaaacgcatttacagcagcagccggatggagatgaccgaagccgccatcgacggcggtctggcgcgcgacctgtacgctgcgctgggtgaagagctggccgacggtagctgggcggtgcgcttgtactataaaccttttgttcgctggatctggttcggcgggatgttaatggcgtttggcggcgtgctgtgcattctggacccacgttatcgcttacgtaaatcactgccggagaacgcgtga

SEQ ID NO: 90614 - DNA, 558 bp, Enterobacter aerogenes
atgaaccgcaaagtcttgtatttaccgctggctatcttcctgattctggcggcggcgctaatgtggcaactgatgcgcaatagcgacggggacgatcctaccgtgcttgaatcagcgctggtgggtaagcctctgccggatttccgcctggcgtcactggaaaaaccggatgtcatgctggatccctctaatattatcaatggtaaaccggtgctgattaacgtctgggccacctggtgccccacctgtcgggcggagcatcagtatttacgctccctggcggcgcagggcattcgcatcgttggcatcaactataaagacgatcgccagaaagcggtgaactggctgcacgaattgggcaacccgtatgcgctgggggtgtttgacggcgacggtatgctggggctggatcttggcgtgtatggcgcgccggaaactttcctcatcgacggcaaaggcattatccgctaccgccatgccggcgatgtgaacgagcgggtctggcagcaggagattctgccgctgtggaataaatacagccagcaggggggcgcgtga

SEQ ID NO: 90615 - DNA, 468 bp, Enterobacter aerogenes
gtgaaatatctgctcatcactttactgacggcgctgttctcgtttcaggcgctggcggcgattgatacctatccatttaaagatgaagctcaggagcagcagttccgccagttgaccgaacagctgcgctgcccgaaatgccagaacaacagtattgccgattcgaactcgatgattgccgccgatatgcgtaaaaaggtttggcaattgatggagcaggggcaaagcaatcagcaaatcaccgattacatggtggcgcgctacggcaacttcgtgacctacgaaccgccggtgacccccgcgacgattatcctctggctgctgccggcttgtttcgttgtgggcggcgcgctggtgattttccgtttaagccgtcgctcacgggctgaacgcgtcagcgagctgagcgcgcaggaacaggaacgcttaaaggcgctgcttgatgacaataaaaggaccctgaaatga

SEQ ID NO: 90616 - DNA, 867 bp, Enterobacter aerogenes
atgattgtcgctttgctcatcatgttggtgttactgctgggagccgcggcgctgctgtttattccgtggagcggcaggcagcgcgttgaccgcaataccatgaaccatatgatttatcgggcgcgcctgcaggagcttgatgaggatctttcagcggtgaacgcggcgcagcaacagcagctggttgacgatttacgcttgaatttattggaagatttgcccgaatctgccgaaacgaatcacaaaaatagtagttattgggtgtatattcttggggttattatactaacctctttatgcgtaggggtttttatccgaacgagttacatgacccgcgtggttgagtggcagcaagttgtccagcaaacgcctcagttgatgcagcgggtgatggatccacagggtaaaccgttatcggaagaagagctgtttcgactggcgctggggctacgcacccgcctgcagcaatacccggccgaccagctgagctggacgatgctcggcaggctgcaactggtgctcaataatccaggcgccgcgttacaggcgtttgataaggcgcgacagctggcgccaggcaacgccgatgcgcagctgggatataccgaagcgttacttcactctacggatcccaacgatagccgtgaagcccagcaactgctcgatacgttgctgaagaataaccataacgatgtacgggtgcttagcctggcggcgtttaacgcctttgagcaccagcagtatgacaaagcgatcgcggcgtggcagctaatgctgcaactgttaccggcggatgatgctcagcgagaaattatcattcgtagtattgaccgggctaaaaaagaacaagccgctattctgcaataa

SEQ ID NO: 90617 - DNA, 1164 bp, Enterobacter aerogenes
atgagtaaactttcactggaacgctctggtaggcgaaaaattatatttatcgccttgctggttgggatcattattggcgtggtattgctggctggtaccgcgactattatgcataaaaccagcgataccgaattttgtgtgtcatgtcataccatgcagcagccactggcggaatatcagggcagcgtgcatttccagaacgataaaggtattcgcgccgagtgcgccgattgccacgttcctcatcagccgatcgattatatgctgaccaaaattggcgccctgaaagatgtctggggtgaaatgaccggcaaaatcgacactccggaaaaatacgaggcgcataaactggcgatggcccagagcgtctgggatgggttgaagaagagcgattcggcgacctgccgttcctgccacgactataaagcgatggatattctggcgcaaacccctgaagcccgtaagcagcacccggtcgcaatcaaagagggcgaaacctgtatcgactgccataaaggcgtggcgcatattctgccgaacatgagcggcctggcggcggcaggggccagcgagctcgctaacgcggcggcgaaaaccccggcgaccgcgactaccctttacaccattcagacccagccgttctggctgagcgagaaagcaggcgaccataacgacggtaacctgatggcctccactgaagtgaaagtggtgaagcgtgaaggcgacatggtgctggcggatgttcatggctggcaacaggatggcgtcaccgaagctttctacgccgcgcgcggcaaacgcatcatgagcgcgctgctgggcgaagaagctcgcaaagcgttaaaagtctctggctccgttaccgatgaagagaccaaacaggtctggcatgaagtcgatctgcaggtctggctgccggcgaaaaatctgattggcgatcaacaaaaaatctggagttacgcttctgaattaatggctaacaactgtaccggctgtcatggcctgaccgagttgaatcgctttaacgccaaccagtggattggggtggttaaaggtatgtccggccgtacttcactgactcaggaacaggttcgtctcctgacccagtatgtacaaaaacatgcgagcgacatgccagcagcggccaatcaggacaaacaataa

SEQ ID NO: 90618 - DNA, 2520 bp, Enterobacter aerogenes
atgaaaaagaataacgattatgacatggcggatcagagccaggaacccggtatgaatctgacgcgtcgccgttttctggctggcgccagcgccctgatggcggcgccgctgctggcggggttatggccgcgttcggcgctggcggaggccatcagccaggcgatgccgcagtttatcgcattgcgccaggcggaaaacggtatcctcaccggcgcccactggggtgcgtttgaagccatcgtccgcgacggcaaaatggttgacgttcgcccgatcaaagacgatccgtatcccaacgaactgattaccatggcgccgtatcaggttcacgccgaaaaccggattaaatatccgatggtgcgtaaaagctggttagaaggcggggcgaaaaacggtaagccggagctgcgcggccgcgatgagtgggtccgcgtcagctgggataaagccctgcatctggtggcgggtgaaatcagccgtctgcaaaaagagcatggcccatcatctatttatgccggttcttacggctggaaaagcgtcgggatgttccacaacccgagaacgctgctgcagcgcatgatgaacctggcgggcggctttgtcggctattccggtgactactccaccggcgcggcgcaggtgattatgccgcacgtggtcggttccgttgaggtttacgaacagcagaccgcgtggccaaacgtgattgataacagcgagctggtggtgatgatcggttgtaaccccatgatcacgctgaaaaacagctggaacctgccggatcacgtcggccagacgggctttgaagcgctgaagaaaaagggcacccggatgatctgtatcgacccggtgcgcagcgacagcgcgcgtgagttaggcgccgagtggatcgccccgcgcagctacaccgactgcgcgctgatggcgggggtagcccatacgctgctggctgaaaatctgcataacccagatttcctgaaaacctacaccgtagggttcgataaatttgaagcctacctgaacggtaaagaagatggcgtcgttaaggatgccgactgggctgcggatatcagcggcgttgatgctgagactatcaagcagctggcgcgagatatggcgaagcatcgcaccatgatcatgggcggctggggcattcagcgtcagcatcatggcgaacaggcccactggatgatggtgacgctggcggcgatgctggggcagattggcctgcccggcggcggtttcggctttagttatcactactcttccggcggtagcccaaccgcgcgcggcggcattctggcggggatctccgccggtagcccaacgtcgccggcggcgaaagatattacgccgttcccggtggcgcgcatcgccgatgcgctggcgaacccaggcaagaccatcgactataacggcacgaaagtcacctatccggatattaaaatggtgtacgtggcgggcggtaacaccttccaccagcatcaggataccaacaacctggtgaaagcctggcagcatccggaaaccgtggtggtgaacgaaccgtactggacggcgacggcgaaacacgcggacatcgtactgccggtgaccaccacctacgagcgcaacgacatggacatgggcggtgattattcgcagctttatgtcttcccgctgcgccagtgcgtaccgccgcagaacgaagcgaaaaacgactttgatgtctttgcggggatttccgagatccttggggtgcacgaggcctttaccgaaggcaaagatgagatgctgtggttgaagggcatgtatgacgagatgaaagcccaggcgcgcaacgctcgcgtggcgctgccgccgtttgatatgttctgggcttccaacaactacattcgcttcccgatcccgcaagagaacacccaatgggtgcgtttcgccgatttccgcgagaacccgctgctcaacccgctggggacgccgtcagggaaaatcgagatctactctgacgccatcgccaaaatgggctacgaggactgtaaagcgattccaacctggatgccgccgcacgagtggtatcgcgggccggaagccgagaaatatccgctgtcgctcaataccggtcacccgattaaccgtctgcactctcagctcgataatacgccgctgcgcaagaaatacgcggtagccgatcgcgaagccatctggatccatccgaaagatgcgagcgcgcgcggcatcagcgaaggcgatctggttcgcgcctttaacgatcgcgggcagatcctggtcggagcggtgattaccgataacgttcgcgaaggcgtggtgcgcatcagcgaaggggcatggtttgatccggccgatccgtcacagccgggatcgctgtgtaaaaacggtaacgtcaactgtctgacctttgacgtgggctcctcgagcctggcgcaggggaactgtggccagatgtcgcagctgcagatcgagaagtacaccggaccggcgctgaaaaacaccgcgcacgatgtgccggtaggcgcgtaa

SEQ ID NO: 90619 - DNA, 819 bp, Enterobacter aerogenes
atgccgaatgcacaaaagaataaagactgggtcaagcttgcacacacgccagggaaaatagagcgcctggaggcgtatttcagcgggcatggttatgaacctcatcggcacgatacatatgcgatcggcaggacattgtctggtgtgcaacgtttccgttatcgtggcagtaaacaacatagtttacctggtgggacgatggtcttacacccggatgaaattcatgatggagaggcaggaacgctcgagggatttcagtatcggatgttttatatcgagcccgctttaattcagaaaattttaggcggcaaaccgttaccatttattcacaacgggatctcatctgatccccggttgtttgccgctaccgggccgcttttaaaagcgccagaagattctattgatacgcttgaagaggaggatgccctttacgatcttgcccagactctggcagtcgtgtcagggcagcgatttcgtcgatgccttgtggattatcagtctgtcgagcgcgctcgcgaatatatacaatctgaattcagccagaacatcacgctggatacgttgtcctccgtctgtggtaaagatcgctggagcctgagccgggattttcgaactcttttcggaacgagtccttatcgctacgtaacaatgcgccgtctcgcatactgtcgacatctgattcagttaggcctgtcacttgcggagtctgcgttggcggcggggttttcagatcaaagtcatatgacacgccagtttataaaagcatatggcatttcaccgggtcgttggcaaacatttattcaaaaacgccgtccctga

SEQ ID NO: 90620 - DNA, 363 bp, Enterobacter aerogenes
atgtactcacctgtaaatctggaacagaagttctctctcttcgatactcactggcagccaaaagtcatcgcgcagatgaacgactaccaattcaaaatcgtgaaaatagcgggcgactttatctggcactcacatccggaaaccgacgaatcctttatcgtagttgagggggttttgcgtattgattttcgtgacgggtatgtccttgtcaagccaggagaaatgtttgttgtacctaaaggtgttgagcataaaacgtcagctgagacgacggtaaaaatgatgatgatagaaccctgtggtgtcaggaataccgggcatgaaggtggggaacgcaccgcagaaaacgatatttggatttaa

SEQ ID NO: 90621 - DNA, 537 bp, Enterobacter aerogenes
atggtcactacacatgttttcatcgcggtcagccttgatggttatatcgcccgacaggatggcgatatcgactggctgttgaagcgcgatgacccgacagaagatcatggctatgccgcatttatcgcagataaagattggatcattatggggcgaggcagctatgagaaggtgctgacttttgacgaatggccttatgaccgacccgtgctggtgctttcccggcagctaactgatactcccgtgcccgaagcgctgaagggtaaggtgcagttttcatgcttcacgccaggggaggctcttgctcacctgaaggagaaaaacgtgcacagagtatatatcgatggcgggcagttaatacagtcattcctgcgcgaaggcctggttgccgatatcgttatcactaccgttcctgtcctgctcggttcgggaaaaccgctgttcggagtcctgccccatgatatcgatttgacgctattatccagccgcagcttcccttcgggtctggtgcagtcgcactatcggctgatgtcataa

SEQ ID NO: 90622 - DNA, 801 bp, Enterobacter aerogenes
atgctgagtacattacccgatttacacagaagttttgcagagcaactcaaacttaaatttcagtctgattcgcgaattcactcccttctcgctggcggctcgattgttcatggcgggtttgataaatactccgatctcgattttgtcgttgtcgtagacactctccactatgacgaaatcatgacgcagcgtagggaacttgccggaacattaggccatctgctccatgcttttaccggggaacatgtcggagagcctcgcctgctaatatgcctgtatggcccagaactacttcatgtcgatctgaaattcgtcactctggaaatgctcactcaacgcgttgaggagccagcagtgttatttacccgtgataacactgctctgcagcgacagctggcaaaatttagtgctcactggcctgatatgacgccggagtggtttgagtcccgagcctggatctggctgcattatgcagtggttaagttgggaaggggcgaactctttgaagcgattggtatgctgtcattcttccgtgagcaggtgctggggccaatgctgtaccgccgtgccaatattccgcaacgtggggttcgccgcattgaattccacggcattgaccctgattgcctgctgacttccacgctggcaacgcacgatcatgactccgtcagcatggccatcagaatggctgttgacgcttatatcaatctgcgagctgatgctctgcctgagaatatcgcagatgatgcggctcgtcgggcggttcttgcgatgcttaaagcgtattctgacaggatttaa

SEQ ID NO: 90623 - DNA, 153 bp, Enterobacter aerogenes
atggaggtgcccgaggttaagcgcctgaagtcgcttgaggaagagaacgccagactcaaggagctgcttgccgaagccatgctggataaggaggcgattcaggtggctctgggcgaaagtactgacgacaggccagaagcgggaagccgttga

SEQ ID NO: 90624 - DNA, 2313 bp, Enterobacter aerogenes
atgtcagcagcagacgccactacatcattatctgggcagatatcccttcggtttgttgagctttgccagttccgccgacttggtaaggtccagcttgagattgaccctaagactactattctagtcggtgctaataatagcggcaaaacatcaattctggcagcgctgcgccacttcctcgcagatggctcgtcatttggtgctttcgacatcagtgtttctcaatggccaaaattgcgggaacttggaagagcttgggacgcattagaagaagacccatctacgtctggcgcatccgaaggtgaatgggaagagcaactcggaaccttactttcggcgatgccaacgctagatctatggttcgatgctaaggccggtatgttccactatgtctccccgttcttgtcaaaattcagttggaaggggggtggggtaggtgtccgattgcgtctggaacctgctacgaacattgaggagctgaagcagttggcttggaagtatcacctgacgagaataccggtgaaggatatgggaaaggattcgcttgcgtggccgattgatcttcttgatttttggctgcgagaaccttctcaactcggccaggttcgggcctataagttagatgccgataacaaccctttggacggaattaagacctacgttagccaggtactggatgctgactctagccaaattgatcgtaagcacctgcagaaacttataaaagtagactttgtggctgcacagcgtggccttggtagtgaggaagctgattcccgctctgcttctggccctcatcgcataggtttattctccaatcagcttctcaaatttgctcgacagcatctaaacgtggctgcaacaggtcatgggcaccgagctgacctcataaaagctgttgctaatgcccagcaggaactagacaaaaagattcatgaggctattggaccatcggtagaagaggttaaagagcttgggtaccccggcttgcatgacccccaagagattcgtttccgcacgcgcatacagacagccgaattactcgaccatgggacagctgttcaatacagcatgcagaaggattcactagaagagcttcttccagaatattccattggtctcggttatcagaatttacagtcccttagttaccaactagtttctttcaaagcttctcgcctaaatcctgaaaagggcgctccagcacctgttcatctggttatgattgaagagcccgaggctcatttgcacgtacaggtacaacgtattttcccgggtaaggcacataagctaatcagtcctaacggtagcgatgagtcaggtcttaaaagccaattgattatcagtactcattctagtcatctagcacatgctgagaattttgaccggctacgatatgttcgccgtattgctaaaagtgaagaacaaaacatgcctaccactgaggtggttaatcttgggcaagtttttggtgatgataaaacgacccgtcaattcgctgaacgttattttcgtgttcaacacacagatcttttatttgccaatgctgcaatctttgtcgagggggttgctgaacgaatgctgttacctcttttcattgaaagagattttgcaaccctcaacagtcgctatctgtccttccttgatattggtggcagccatgctcatcggctaagatccctcgttgaaagactccgtattccgacagtaattattactgatatcgatcctgttgaagaaaaagttggtaaccctaaaaaaaatgatgagcctactacaaccttggttgctgtagctaatacaggacagcctgggctgcaatgcggaaacccgactcttcgtggatggcatcctaaattacaacagcttgaagatttcaaggacccgaaagacgagcaccttgtctggaacgaaattgccgaatgtttcgtgcgtttcgcatggcaattgcccgtagccgaagctgatggtcagtggccgagtacctttgaagactctcttattcttagaaatatcccttggtttaagcaactgattgatgaaaaagttgatggtgatggaaagaaaatcaaaccgccgaagggggcgctgggctcagtcgctagaaaggttgccgagaatgataatattccagatctgctctcagctttgcataagctaatgcatgggtcttttaataaaggagattttgccgcaagcatctttgaaatggttgctgcggatgaaccgatagtctgtcctaaatatatcgaggatgcattggaatggctccagacacagctggagccaagcagggaggtgatgcatgactaa

SEQ ID NO: 90625 - DNA, 1950 bp, Enterobacter aerogenes
atgactaactcaccaatccttgacggcaatgatcgcgatgcaggggtagtagaagagatttgcggctaccttacagacacaccacctcgtaactacttcctttttgcaggggctggttctggtaaaacacgaacattggtggaagttttacgtcgccttactggtgtgaccgagcatgagaaggggggacaattagcacggtccctgaagatgtatgggcgttcgattagagtggtaacgtacacaaagaatgctgtctctgtaatcaacggacgtcttggggacaatagcttagtcagtgtgtctaccatccattcattttgttgggagttaattaatgggttcaacgatgatattcgcgaatccctaatagcagtaaaagaagctcaactcgctaaagagactgcagaggcacaagcgaaacctaagggtattactgcagcaaaacagcgtgatcttgacgaaatcacgaatgaaatcgaggatcttcggacaactgaagtattcaaataccatcctgatcgtaatacatatgggcctggggcattaccgcacaattccgtactcgatgcgacagcttggttgcttcaaaataagccaacactccaatccattctcaaagatcgacatccaatcatactgattgatgagtcgcaggacacaatgaaaggtgtactggactccttgatgttcctagtcaaaaagcgggagggcgatttgactcttggtctgctgggagatcatcgacaacgaatttatatggatggtcatgccgatcttccaagcattgttcctgaaaattgggcaacgcctgagttacaaatgaatcatcgtagccaacgacgtattgtcactctgatcaataaaatctgggaaactgaactggaagggaggacgcaaccagcaaagggttcagcacaacatccccgaacagaaaaggctggcggaacggttcggctcttcttgggggatacattgcaaagtccagacgataaggtgctcagcgaacgctggtgtgctgaacagatgttcgaagttagtggctcagtagcctggaatcaagaacaatataagctgcttgcgttggagcataagctcgttgccactcgtggttcgtttcttgatgtgtatgaggcaatgtttctgttagatccccacaccgcagcgccatctggcagtggggacaacaaggggccttcaacagtacaaattttgcttaatgagcttgcgcatttagaagcctgcgtcagtaatgaaggaattgtgaatgagttcaaggcaaccgaggttttacgacgttatggtgctttagacaatatacctgaggattcagaagcaagagctgaacgtactgatgaaatgctcgaggcgatagctatatttgcaatggcttgcgccaaccctgagtcaacggtcgcggaagtattagcaccagttttaagtgcagaactctttgaagtagatcatcgccttcaggaggcttatgccgacaagtcaccagccccgcaagttcctggacgaggtgaggatgagtcgaagcaaacaagaatgcgccgtggatggtgtgcactgtttgctgctccatggaaacagcttaagtgctatcgaaattaccttgctgggatttcagagctcgcaacacatcaagtagttaaaggctctgagttcaagcacgtcatggttgtaatggatgatgctcttgctggtgggactcgctttaagtacgacacgatttttggtggtacgcagttaagtccaaatgacaaaaagaatgcaaagtctggtaaggagacaaccatcgaccggactttacgtttgctgtacgtgacttgtagcagggcacaagaatcgctcgctttagtgctttggtcgtccgatcctgctgcagcaatggctcgaatcaaggagagtcaatggtttgctgaagatgaaatacaaataatcacataa

SEQ ID NO: 90626 - DNA, 807 bp, Enterobacter aerogenes
atggtaggaattgaagatgtgcctcagctcgaaggaatgtgggcaccactcgatgtccgtcgtgggctcaggcaaatatttagacgttggctacccactactagtcatctgcgctctggtttcgggcaagtagaaatgttcgatgaaatagagctcctcgatttttgccagcactaccgactagagtattttggtgcagcaaaggatattgccaaaatctgggacgagtcaaaggaacgtattgccgatggaggtcctactttcagtgagctaactcgtctaggttggatagttttcgacggtggtcgctggattatgcagtgctcacctccgggcacgctttcgcacatcacttacccaagtccaagcacgcaaaaatttctacatgaactttctaaaatcaaacttattgagaaaacctctaattttacacaaagtgtccaaaagcaagcagccatgatattggatgaacagttattggagcgatacatcccggctagcagacctgactggcttgcaggacggacagacgcgtgtccactatggacgggtaagatcagatatactctcctggctttgaagcagataaatatatgtaacggaccatgccggggattagggatggaggcggaaaaatgtgcgtctgctaatgataaatatgaatcctcacgacgtggagactggaaaaataaagcggctgccattaatatcctagagaaggaaataattgattttattgatacagggccgcctaagaacgcctactactcatcatgggaatcactgcatcgaacaataagtgattag

SEQ ID NO: 90627 - DNA, 4971 bp, Enterobacter aerogenes
atgtcagatttaaattattcatcaggtaataatgggggggaaggggcgtccgtatctccagaatattctcttgtaaatattcctgcgtggcttgactctcctccagatgaagaatttcccgctttacctattaatactcgtctgcagaccctgccttttggtgagcttacttgggaaaattttgaacgtttaatcaaacgtattgtctctcgagaggaaacaatagctgattgttggatatatggagttccgggtcagaagcaattcggtttagacattcttgctacagcgaatgatgattctgattattttgtttgttatcaatgcaagcgtgttaggaattatacatcggatgatataaagaaagctgttgataaatttctggaaggtaagtggtttaataaaacaaaaaaactcgtattgtgtgtttcttcaattttgagtagaactgaatgtatcgatgaagtcaataatcaaattaaacgactttctttatttaacattatttttgaggtctgggatggtgctgaaggaggcgttctcgctgaaaaactaaaagtatatccggatttagtggacgattttttttctagagaatgggttagacattttaacggagaggatgctgcaagtttactaggggaaaggctgcaaggattggagctaaatcaactgcgtcttcaacttaatgatatctacaagaccttattcctcaggcatgacccaggacttcgtttgggttcgcaaagaccctcttctcttatatcccgttatataccaccgactgtaattgaatctagaaacgttatgtcttcagacatggtttcggaagaaaaagcatatcggcaatatgatgatggtactgtaaatagtgattctaaaccaaagcaatattctaggaataaaccagcaggaacacaagaaattaatgtttcattagatgagtggtttacaagacagcatcggagtgtgattctcggtgagcctggctttggtaaaagtactttactgcgtgttatggcattgcaactactttcaacatttgatgaaccaataaaaacctcgtggaacaacttattgcctgtatggatttcatttgggggttttagttctgctttgcaggcaaacccgctcctgagttttgaagactattttgataattggttacatcaaaatgcggcagatgatgttcgtcctctatttcgtcgagctataaaacaaggtggtatgcttcttcttgttgatggattggatgagggacaagatattgatgttgcaaagcaagctatggataggattagttctttcttagcaattaggtctatacccgcagtgttcactagtaggccacggggctatgaaagagtacgcccggatgggaattggccagttgctaaattaagtgcctttgataaaagtcaaatagagcaatttgcaaatatgtggtttgagtatcttgagttaccggatgcagggccagttgaacggatttcagaacgcgtacagcagcgcacgaatgatttccttaaagctacccaagtgaactcgagaataattgaattagctcagactccgcttttttgtcaacttcttatagacatatttagattttctcatcatttacctgagcaacgcgtaaaagtttatgaaaaaataatagagttattgatttctgaccatccctcagcccgttctcaggctgcaggtatttctgggaatatgctcccccgttctgaagatatgcgtgaaatgctaatgaggttagctcttgatattcaagagcgcggtggtgcaggtgttgtttcagtagaagcctgtcaggattcattctgcaattttttaactgatgatattaatgggcctggtcttaagaagtatgatgcaaagtatcaggctcagattataacagattatgctttatctggtttaggattaatgattgaacggtctccaaatgaattgggattttttcatctcacaattcaggaatatctcgctgcccaagctatgctccgtaaagaagaagaagaacaactcaattggcttattagggtttggaatcttcctcaatggcatgaggttatccttgcatggtttagcatacgtggaatggatcaaggaaagggagcaaatcaacgcgcgattgattttttaaaagaatcggtaattactccatgggaaaatattcaattgctggttcttagaacagaactggctgcaaatgattttggactatctccaagggaagctcgtgctactattgagcaagcagcaaaagaaatagaaataaccccttttagaaaaattaggttagtactttcaggatatatcgcgcaagggcttcgctcgtcttctgtgaatagtatctgtgaggcttatataacaaaatggacacagaccagagacgaatggtgtaaagccaggctttttcgtacattatgtggttggaagccctcaggcgatttattacaagccttaaaattgggtttgcatgatgaagatctcaaatgccgctgggcttctgcagaaagccttgcaaaactgtactctggtaacgatgaggtaaagaatgatctatcacaaaaagttaggatgtggcctgacttagaggtacgagcagcagcgttatactgcttgtggaagggatggccaaactatgaagctcttaatgaatatgctgaagttgcaagtaagtcaatttgccaaagttttgctatagctggtgtattaattaaaatttcaaagaatcaacatagtgatattgatcttgaaaagatctgtcaaatgtattttacaagaactgttgactatgacttagaagggatatgctgcgagttattagttaaaggttggggaggtgacgagaaactaaaagagaaagtattaattgaattggatttaaaatttaaccaaggtgtatttgaagttgaacgctatatttcttttttggtacgcgcgtggcctggagataatgatgttgccaatcatgtagttcgctatgtcaaaaaatatagtatcgccatgatgcatggaagtggattgtggcaggctattttatccgggtttggtggaaataaagaattaattaatgctataagagatgtattaatagagcgaaaagagaaatataaagctatttattgggggccggatacgaaaaatgcttatcttgcaatcggtgatgatgtagcgaaaaaagagatgcttgaagcatattctcaagttgatagtatcatggataaacattggatatgttcgacacttatgactgggtggaaaaatgatccggaggttcaacgatttttttctctagaatttttaaaaccaccggttgagaatgccattcttgccaattgggtgcatgtttttataaatgacaaagatgctagacgttcgtggttgcttggcgcaattactacaggtaatgataggggcgccttatcagctgttggtcggttacttgatgagtttaatgatgaagagtgcatagataccgttaaggatattttaaccaataaaaaatacaactattattcagaaattgatataaagaatagacttgttgaaattgtacctgaagatccagttgtcaaacaatgggtgatgaattcttttgaagaaattgatagtttgtctttatcttcaatagcgataggttatgaagataataccactgtaagagaaaaaatattaaatgcgttatgtccaattcattcttatgctagagcggaaatatttcgaattattcgagaacacttgatgccttcagaatctatcatgcgagtgacctcaagtatttttgtagaaactaagcccttgattcgtacttcaggtctcattgcgaggtgtattgcaattcagcattatccagatgattttttattgtttaaacagatgttgtgcaaggaattagcctcagtaggcatggtttatgaaatgcggaggcgtagcgcatttgctgctttattatttctaaaagagtacgattactgtgcggagtatctaagccgagaacaggggtcttccatgcattggttatttgatcataagcatgaagatattttatcagctcggatcttatttgaatcttgggatgccttaaaaaacaacaaatatctttctaataaagatgttaaaatatcatggtctaattttattcatgatggaactgctagaggaagtttaaatgatagttcttctagaggtcaacttgttgcctgtttgaaaaacatgtcaattaaagaacataattctcaaagcctttttttaatggccgatcttcttcctgcatcaaacgaattacgagattgtttggtcgagataatgagtcagcaaggaaatatttcttattatgttgaagaagaaaaaatagctattgctcaaagtatttatgcagaacaatttcatggtgatgctgaagcatataatgctttggaagagatctggaaatctctgaaattagatgaggatattcattcggaatatttatttaatgtgctttatgccttggctgttggatggccaaattcaaaattagttcaagcttacgttcaaataactgagcagccgaaagtatttttacatattgctttaatactttgtggtgtgacgggagatttagaaagagcacaggaatgtatagatgcgataataaaggaggctttacatgtaaatcatcctttcctctctttatacatagaggcacttaacaaatggtcatatacagagtcagctgatattcttttgcaaaaattccttaaaggggagatgtcttcacatttcattactgccttgaaattacttacatctactgggcgcgcaagcgaagaatttcgcctaaatatggttggttattttaacaatcaatttaattccgatgcgataattaatgaaggtgtcgatatttttaatggggaagttgtttcagttatccagataattgtggatgaatgtatgctaatgaccctttaa

SEQ ID NO: 90628 - DNA, 1239 bp, Enterobacter aerogenes
atggcaagaaaaaccaagccgttaactgatacggaaatcaaagccgccaaacctaaagatgccgattaccagctttatgatggtgacgggcttactctgttaatcaagtccagcggtagtaagctctggcaattccgttactatcggcctctgaccaagcagcgaaccaaacagagctttggggcctaccctgccgtctcgctttctgatgcacgtaaactcagagccgaatctaaatttttattggcgaaagacattgatcctcaggaacatcagaaggaacaggtgaggaattctcaagaggccaaaaccaacactttcctgttagtcgctgagcgttggtggaatgtgaagaaagctagcgtaacagaggactatgccgacgatatatggcgctcgcttgagagagatgttttcccggcaatcggtgatatcagtgtcactgagattaaggctcatactctggttaaagcagtacagccggttcaggccagaggtgcattagagactgttcgccgcctttgtcagcgtattaacgaagtcatgatttacgcgcagaacacgggcctgattgatgcggttcccagcgtaaacattgggaaagcattcgagaaaccgcaaaagaaaaacatgccaagtattcgaccggatcaacttccacagctaatgcaaactatgcgtacggcaagtatcagtatgtccacacgatgtctgttcatgtggcaacttctcaccattacccgccctgccgaagctgctgaggctcgatgggatgagatcgattttgatgctaacgaatggaaaattcctgcagctcgaatgaagatgaaccgggaccatacggttccactatcggatgaggcaatctcaattctggaaatgatgaaatccctcagtggtagccgggagtttatctttcccagtcgcatcaagccaacccagccaatgaacagccaaacagttaatgccgcactgaagcgtgctggtttaggtggcgtactcgtttcacacgggctgcgttctattgccagcacagcccttaatgagcaaggctttccgcctgatgtcattgaagccgcacttgctcatgtggacaaaaatgaggtacgtcgcgcttataaccgcagtgactatctcgaacaacgtcgcccgatgatgcaatggtggacggattttgtaaaatcagcggaaaagaagattaatgataattcagtgattaaactgaaatttacctcgtag

SEQ ID NO: 90629 - DNA, 483 bp, Enterobacter aerogenes
atgactaagaaaaaagcccacaaacctggatcagccaccattgcgctgaataaacgcgcccgtcacgaatactttatcgaagatgaatacgaggcaggcctcgcgctgcagggttgggaagtgaaatctctgcgtgccggcaaagccaacatcggcgatagctatgtcattctgaaagatggcgaagcctatctattcggcgccaactttacgccaatggcggtcgcctccacgcattacgtttgcgatccgacccgtacccgcaagctgctgctcaatcagcgcgagctcgatgcgctatacggccgcatcaaccgcgaaggttataccgtcgtcgccctgtcgttgtactggaagaacgcctggtgcaaagtgaaaatcggcgtggcgaaaggtaagaaacagcacgataagcgcaccgacgtgaaagatcgtgaatgggcggtcgataaggcacgcatcatgaagaatgccgggcggtaa

SEQ ID NO: 90630 - DNA, 438 bp, Enterobacter aerogenes
atgcctcagattagccgtactgcgctggtgcctttcagcgtggaacagatgtatcaactcgtaaatgatgtgaagtcctatcccgatttcctgcctggctgcaccggtagccgagtgctggaggccgggccgacgcaaatgacggcggcggttgatgtgtccaaggccggcatcagcaagactttcacgacgcgtaatacgctgaccgataaccagagtatcctgatgagcctggtcgatgggccgttcaaaaagctgattggcggctggaagtttattccgctcagcccggatgcgtgcaaaattgagtttcatctcgattttgagttcaccaacaagctgattgaaatggcttttggtcgcatctttaaagagctggctgccaatatggtgcaggcgttcaccacccgcgccaaagaggtgtatcgtgtcggctaa

SEQ ID NO: 90631 - DNA, 291 bp, Enterobacter aerogenes
gtgtcggctaatattgtggttgaagtcgcctatgcgttgccggaaaaacagtacctgcaacgcgtgaagctgcaggctggggcaacggtcgagcaggcgattatctccagcggtattctggcgctgcgcgaagatatcgatctggcgaaaaataaagtcggcatctacagccgtccggtcaagctgcatgacgaagtccatgatggcgaccgcgtagagatttatcgcccgctgattgctgacccgaaagagctgcgccggcagcgggctgaaaagcacgctgagaaataa

SEQ ID NO: 90632 - DNA, 339 bp, Enterobacter aerogenes
atgcgctgtaaaacgctgactgctgccgcagcggttctccttatgttgaccgcaggctgttccactctggaacgagtggtttaccgtcctgatatcaaccagggtaactatctggcacctaatgatgtcgcaaaaatccgtgtcggcatgacgcaacagcaggttgcttatgcgctgggtacgccgatgatgtcagatccatttggtagcaacacctggttctatgttttccgccagcagccgggccatgagaaagtgacccagcagacactgacgctgaccttcgacagcagcggtgtgttaaccaacattgataacaaaccggcgctgaccaagtaa

SEQ ID NO: 90633 - DNA, 1662 bp, Enterobacter aerogenes
atgttggcgcaactcaccatcagcaatttcgctatcgttcgtgaactggaaattgattttcacagcggcatgaccgccatcaccggggaaaccggcgccgggaaatccattgccatcgacgcgctggggctgtgcctcggcggccgagccgaagctgacatggtgcgccgcggcgccagccgtgccgacctgtgcgcgcgcttcgcgctgaaagatacccctgccgcccagcgctggctggaagagaaccaactggagagcgggcgtgagtgtttacttcgccgcgtgatcagcgctgacggacgctcccgcggtttcatcaacggcaccgccgtgcctctttctcagcttcgcgagctaggccagttgcttatccagatccacggacagcatgcccatcagttactcaccaaagccgaacatcagaaaacgctgcttgatggttataccggtgagtatgcgcttactcaacgcatggcggagcgctaccgccagtggcaccagagctgccgggagctggcgcagcatcagcagcagagccaggagcgcgccgcccgcgcagacctgctgcaataccagctcaaagaactgaacgaatttaatcctctgccgggcgagttcgaacagattgacgaagagtacaaacgtttggccaacagcggccaactgctcagtacctgtcagcatgcgttaacggtactggccgacggcgaagaggccaatttgcaaagtcagctttataccgctaaacagctggttagcgagctggtcggtatggatagcaaactctccggcgtgctcgatatgctggaagaagcctctattcagctcagcgaggcgaccgatgaactgcgccactacaatgaccgtctcgatctcgaccctaaccgtctgttcgaactggagcagcgcatttcccggcagattgcgctggcgcgtaagcatcagattgcgccggaagagctgccggcgttctatcaggccatgctggatgagcagcgtctgctggacgacagcgccggttcgctggagtcgctgagccagttggtcgttgagcatcaccgcctggcgctggaaacggcgcaagaactgcacgccctgcgtcagcgcagcgccgacgaactcacccagttgattactgaaagtatgcactcactttctatgcctcacggcgtgtttgccattgatgtcgcctttgatgaacgccatctgaccgccgaaggcgccgaccatattgagttccgcgttaccaccaacccggggcaaccgctacagccgattgctaaagtggcctccggcggcgagctgtcgcgtatcgcactggctattcaggttattaccgctcgtaaaatggagaccccggcgctgattttcgatgaggtcgatgtcggcatcagcggcccgacggcggcggtggtcggcaaactgctccgccagttgggagagtccacgcaggtcatgtgcgtgactcacctgccgcaggttgctggctgtggtcaccatcatttcttcgtctgcaaagagaccgatggcgagatgaccgagacccacatgcatgcgctggacaaacgcgccagactgcaggaactggcccgtctgctgggcggtagcgaggtgacccgcaacaccctggcgaacgcgaaagagttgcttgcggcgtaa

SEQ ID NO: 90634 - DNA, 879 bp, Enterobacter aerogenes
atgaagaaccatttcaagtgtatcggcattgtgggacaccctcgtcacccaaccgccctgaccacacatgaaatgctctggcgctggctatgcggcaaaggctatgaggtgctggtcgagcagcaaatcgcccatgaactccagcttagcaatgttaaaaccggcacgctggcggaaatcggccagcaggcggatctggcggtggtggtcggcggtgacggcaatatgctcggcgcggcgcgtaccctggcgcgctatgacatcaacgtcatcggcattaaccgcggcaatcttggttttcttaccgaccttgacccggataacgcgctccagcagttggccgatgtacttgaaggccactatatcgccgaaaaacgttttctgctggaagcccaggtgtgccagcatgactgccagaagcgcatcagcacggctatcaatgaagtagtgctgcatccgggtaaagtcgcgcacatgattgagttcgaggtctatatcgatgaagtgttcgccttctcccagcgctctgacggcctgatcatctccacgcctaccggttcgacggcctattcgctctctgccggcggccctattctcaccccatctctggacgccatcaccctggtgccgatgttcccgcatacgctatcagcgcgaccactggtgattaacggcgatagcaccattcgcctgcgcttctcgcagcgctgcaacgatctggaaatcagctgcgacagccagattgcgctgcccatccaggacggcgaagatgtgctcatccgccgctgtgattatcacctcaatctgattcacccaaaagactacagctatttcaatacattaagcactaagttgggctggtcgaaaaaattgttctga

SEQ ID NO: 90635 - DNA, 591 bp, Enterobacter aerogenes
atgagtagtaaagaacagaaaacgcctgaggggcaagccccggaagaaattatcacggagcagcacgacaacgtagaggcggtagagcctgaggtttctgctgagcaggtggatccgcgcgatgaaaaaattgcgaatctggaagcacagctggccgaagcgcaaaagcgtgaacgtgatgtgatgctgcgcgcaaaagcggaagaagataacctgcgtcgtcgcaccgaacaggatatcgagaaagcgcataaattcgccctggagaagttcgtcaacgaactgctgccggttatcgatagcctggatcgcgcgctggaagtggctgataaagctaacccggatatggcgccgatggttgaagggatcgaactgaccctgaaatcgatgctggacgtcgtgcgtaagtttggcgtggaagtggtagccgataccaacgtaccgctggatcctaacgtgcatcaggccatcgccatggtcgagtctgacgatgtggctgccggtaacgtactgggtgttatgcagaagggatataccctgaacggtcgtactattcgcgccgcaatggtaaccgtcgcgaaagcgaagtaa

SEQ ID NO: 90636 - DNA, 1242 bp, Enterobacter aerogenes
atggtgattatctccgcctatttctccggttccgaaaccggcatgatgacgctgaaccgctatcggctgcgccatatggcgaaacaaggcaaccgcccggctaagcgggtggaaaagctgctgcgtaagccggatcgcctcattagcctggtgctcatcggcaacaacctcgtcaatatcctggcctcggcgctgggaaccatcgtcggcatgcgtctgtacggcgacgccggcgtggctatcgccaccggcgtgctcacctttgtcgtgctggtgtttgccgaagtcttacctaaaaccattgccgccctgtacccggaaaaggtcgcctaccccagcagtttcctgttggcgccgctacaggtattgatgatgccgctggtgtggctgttgaacaccattacccgcgtactgatgcgcatgatgggcattaagaccgatcacgttattagcggcgcattgagtaaagatgaactgcgaacgattgtgaatgaatcccgttcacaaatctcacggcggaatcaggacatgctgctgtcggtcctggatctggaaaaggtcagcgttaatgacatcatggtgccgcgcaatgagatcgtcggtattgatatcaatgatgactggaaatctatcgtccgccagttaacccactcgccgcatggccgtatcgtgctgtatcgtgattcgctggacgatgccatcagcatgctgcgcgtccgtgaagcctatcggctgatgacggaaaagaaagagttcacaaaagagatcatgttacgagcggcagatgagatttactttgtgccggaaggtacgccgctcagcacgcaattggtgaaattccagcgtaataaaaagaaagtcggcctggtggttgatgaatatggtgatattcaggggctggtcaccgttgaggatattcttgaagaaatcgtgggagacttcactacctcaatgtcgccgacccttgccgaagaagtgacgccgcttaatgacggctcggtgattatcgacggcggcgccaacgtgcgggaaatcaacaaagcgttcaactggcacctgccggaagacgacgcgcgtaccgttaacggcattattctggaagcgctggaggagatcccagtccctggaacccgcgtacgtatcgaacagtatgatatcgatattctcgacgtacaggacaatatgattaagcaggtgaaggtgatgccggtgaaatcattacgcgaaagcgtggccgaatag

SEQ ID NO: 90637 - DNA, 792 bp, Enterobacter aerogenes
atgcctgtgtttgctctacttgcccttgtcgcctactccatcagccttgcgctgatcatccctggcctgctgcaaaaaaacagcagctggcggcggatggcgattctctccgcgacgatagcgctgatttgccacgccttcgcgctggagtcacgtattttccccggcggcgaaggtgggcaaaatctcagcttacttaacgtcggctcgctggtcagcctgatgatctgtacggtgatgaccatcgtcgcctcgcgtaatcgcggctggttattgctaccgatcgtatacgccttcgcgctaatcaacctcgccttcgccaccttcgtgcctaacgagtacatcacccacctcgaaaccaccccggggatgttggtgcatatcggcctgtcgctctttgcctacgccacgcttatcatcgccgcgctgtacgcgctgcagctggcgtggattgactatcagcttaaaaataaaaagctggctttcagcagcgaaatgccgccgctgatgagtattgagcgtaaaatgtttcatatcacccaggttggcgtcgtgctgctgaccctgacgctgtgcaccgggttgttctatatgcacaacctgtttaataccgaaaatattgataaggcagtgctgtctatcgtggcctggtttgtctatatcgtactgctgtgggggcactaccacgaaggctggcgcggccgccgggtggtctggtttaacgtcgccggagccgggctgctgaccctggcttattttggcagccgcgtccttcagcagtttgttagttaa

SEQ ID NO: 90638 - DNA, 1365 bp, Enterobacter aerogenes
atgtttgataatttaaccgatcgtttgtcgcgtacgctgcgcaacattagcggccgcggacgccttaccgaagacaacattaaagacaccctgcgcgaagtgcgcatggcgctgctggaggccgacgtcgcgcttccggtggtgcgtgatttcatcagccgcgtcaaagagagcgcggtaggccatgaagtcaataaaagcctgacgccaggtcaggagttcgtcaagattgttcgcaacgagctggttgcggcgatgggcgaagaaaaccagacgctggatttagccgcgcagccgccggccgtcgtcctgatggcgggcctgcagggtgcgggtaaaacgaccagcgtcggtaagctgggtaaattcctgcgcgagaagcacaagaaaaaagtgctggtcgtttccgcggacgtataccgcccggcggcgattaaacagctggaaacgctggcagagcaggtcggcgtggatttcttcccgtccgacgttggccagaagccggttgatatcgtcaacgcggcgctgaaagaagcgaagcttaaattctacgacgtgctgctggtggataccgccggccgtctgcacgtcgatgaagcgatgatggacgaaatcaaacaggtccacgccgcgattaatccggttgagacgctgtttgtcgtcgatgcgatgaccggtcaggatgcggcgaataccgcgaaggcctttaacgaagcgctgcctttgaccggcgtggtgctgaccaaagtagacggcgacgcccgcggcggcgcggcgctgtcgattcgtcatatcaccggcaagccgattaaattcctcggcgtcggcgagaaaaccgaagcgctggagccgttccacccggaccgtatcgcttcccgtattcttggcatgggcgacgtgctgtcgcttatcgaagatatcgagagcaaagttgaccgcgcgcaggccgagaagctggcatccaagctgaagaaaggcgacggtttcgatctgaccgacttccttgagcaactgcgccagatgaaaaacatgggcggcatggccagcctgatgggcaaactgccgggcatggggcaaattcccgataacgtgaaagcgcagatggacgacaaagtgctggtgcgtatggaagcgatcatcaactcgatgacgatgaaagagcgcgccaagccggaaatcatcaaaggttcgcgtaaacgccgtatcgccgccggttgcgggatgcaggtgcaggacgtgaaccgcttgctgaagcagttcgacgacatgcagcgcatgatgaagaagatgaagtcgaaaggcggcatgatgaagatgatgcgcgggatgaaagggatgatgccgccaggattcccaggccgctaa

SEQ ID NO: 90639 - DNA, 249 bp, Enterobacter aerogenes
atggtaactattcgtttagcacgtcacggcgctaaaaagcgtccgttctaccaggttgttgtcaccgacagccgtaatgcacgcaacggtcgcttcatcgagcgcgttggcttcttcaacccgatcgctaccgagaaagaagaaggcacccgcctggatctggatcgtatcgctcactgggttggccagggcgctactgtttccgatcgcgttgccgcgctgatcaaagccgctaacaaagcagcttaa

SEQ ID NO: 90640 - DNA, 549 bp, Enterobacter aerogenes
atgagcaagcaacacaccgcacaagcacctgttgatccgattgtattgggcaaaatgggttcttcctacggtatccgtggttggctcagagtgttttcctccaccgaagacgctgaaagcatttttgactatcagccctggttaatccagaaggcgggtcagtggcaggttgttgagctggaaagctggcgccaccacaatcaggacatcatcatcaagctgaaaggcattgacgatcgtgatgcggcgaatctcctgactaattgcgaaattatcgtggattcatcgcaactgccggcgctggaagagggcgactattactggaaagacctgatgggttgccaggtagttaccaccgaaggctatagcctgggtaaagtcattgatatgatggaaaccgggtcgaatgacgttctcgtcatcaaggcaaacctgaaagatgcatttggcatcaaggagcggttggttccgttcctcgatgggcaggttatcaagaaagtcgatctcgctactcgtactatcgaagtagattgggatcctggtttttaa

SEQ ID NO: 90641 - DNA, 768 bp, Enterobacter aerogenes
atgtggattggcataattagcctgtttcctgaaatgttccgcgcaattaccgattacggggtaactggccgggcagtaaaaaatggcctgctgagcatcgaaagctggagtcctcgcgacttcgctcatgaccggcaccgtaccgtggacgatcgtccttacggcggcggaccggggatgctaatgatggttcaacccttacgggatgccattcatgcagcaaaagccgcggcaggtgaaggcgcaaaggtgatttatctgtcacctcagggacgcaagcttgatcaagcgggcgtcagcgaactggcaacgaatcagaaactgattctggtgtgcggtcgctacgaagggatagacgagcgcgtaatccaaaccgaaattgacgaagaatggtcaatcggcgattacgttctcagcggtggtgagttaccggcaatgacgctgattgactccgtttcccggttcattccgggagtactgggacatgaagcatcagcaacggaagattcctttgctgatgggttgctggattgcccgcactatacccgtcctgaagtgttagaagagatggaagtaccgccagtattgctgtcggggaaccatgctgagatacgtcgctggcgtctgaagcagtcgctgggccgcacctggcttagaagacctgaacttctggaaaacctggctctgactgaagagcaagcaaagttgctggcgcagttcaaaagcgaacacgcgcaacagcagcataaacatgatgggcaggcgtga

SEQ ID NO: 90642 - DNA, 348 bp, Enterobacter aerogenes
atgagcaacattattaagcaacttgaacaagaacagatgaagcaggacgtaccttccttccgtccgggtgataccgtggaagtgaaagtatgggttgttgaaggttccaaaaaacgtctgcaggcattcgagggcgtggttatcgctattcgtaaccgcggtctgcactctgcattcactgttcgtaaaatttccaacggcgaaggcgttgagcgtgtcttccagactcactctccggtagttgacagcattgctgttaaacgtcgtggtgctgtacgtaaagctaaactgtactacctgcgtgagcgtaccggtaagtctgctcgtatcaaagagcgtcttaactaa

SEQ ID NO: 90643 - DNA, 450 bp, Enterobacter aerogenes
gtgaacggcactattttttcacaatcagcattgcaacggcgggccgcctggctggcgctgtttgcgatcctgctgatcgtggtggcgccgctgatctccgtttcgctgcagaaagatcccatgagcgcaatgccgggcatgcatcatgctatgccgatgggcgagtctcatgatgggatgtccggacatgagatggtaatgatgcacggcgctgacagcgcgtcgcagccggcgcatagcatgccggtcgatcacgccgaagcttgcggctattgcgtgctattagcgcacgtaccggggctgctgttcgcgctggcgctgttctttgccatgatcctgcggcgcattcgcctgccggcttctcgcccggtattaaaacactggcactacttcccctggctctatcctgaaacccgtgcgccgccgcggctgtctgctttttccctttaa

SEQ ID NO: 90644 - DNA, 1371 bp, Enterobacter aerogenes
atgacaacctgcacctcgcgcgcggcatggttaaacctgctgcggcgcctccatttctatattggtttgtttattggaccatttatctttgtcgcggccttgaccggcacgctgtatgtcgccacgccgcagctggaaaactggctgtaccatgaggccttacagggttcgctcaacggcgaaagacagccgcttagcacgcaaattgccgtcgccaaagaggctacgcaaaacaacctccgcctgcaggccgtgcgcccaggtattaccgccggcgaaacgacgcgggtgatgtttgccgacccgcggctgggggaatcagaaaaccgggctatttttgttgacccggtgacgctacgggtcaaaggcgatctgacggtttacggtaccagcggtattttaccgctgcgccagtggattgattacgcgcataaatccttgctgttgggcgacggtggcagactgtacagcgaactggcggcctcctggatgtgggttgcagcgttgggcggtattgcgctatgggcgatgacccgtccgaagcggcggatacacaatcggctgcaaaatactcgacgtctgcacgtgacgctgggctggatgttactggtcggcatgttactgttttccgccaccggcttaacctggtcgcagtgggcgggcggtaacgtcgataagatgcgcgccgcgtttggctggctaacgccgcaggtcaatacgcaacttcatggcggggaggcgatgccgcccgatccgcacgccgggcaccacatggcgcatatggcaatggatgagccacagatgaaagtgactgcggatcggttcgatagcgtattacaggtggcgcaggccgcagggctgacggccagcaagctggagatccggccgccaaaaagcgcggggatggcgtggacggtgaatgaaattgaccgtagttggccgacgcgggtcgatgctgtggccatcgatggcgagacgttacaagtcgtggatcgtacccgctttagcgatttcccgctgatggcaaagctgacccgttggggcgtcgattttcatatgggaatactgttcgggttggcgaaccagttgctgttggtggcattcgggttggccctgtgcgtcatgatcatcgtcggctatcgcctgtggtggatccgccgtccggcgcagagtgcgtttaatcctgcacaaacgttggtgcaagcgtggctgggactaagtgtcgctgcccgggcgcttgcgctgttaatagcgctcctgctcgggctggcggtgccgctgatgggcgtcagcctcgcggcgtgcctcgtggttgattacctgcgctggcgcgcggcttcagcgatgaggctggttaagtcggtagactaa

SEQ ID NO: 90645 - DNA, 480 bp, Enterobacter aerogenes
atgctcaggcaatttattgcgcccactcttctggctgcttttctcctcactgggtgccaggcgccaggtaagttctcgaaagaacaggtcgcagcaatgaagtcttacggctttaccgaagccgccggtgattggtccttaggtttgtctgacagcattctgtttgacaaaaacgactatcgcctgcgtcccgacagccagcagcaaatccacagtatggccgcacggttagctgaaaccggtattacccatagccgtcttgaaggtcataccgataactacggcgaagacagctacaacgaagcgctgtcattaaagcgcgccaacagcgtggcggatgcctgggctgaaggcgcgaaaattccgcgcagtaatttaaccacccgcggattaggtaaaaagtaccccatcgccagcaacaataccgcggcaggccgtgctgaaaaccgccgtgttaccgtggtgatcagcacgccttaa

SEQ ID NO: 90646 - DNA, 1224 bp, Enterobacter aerogenes
atgaataaggatttttctcaggccccgcgccccactttcaaaaacgcgttacgccgaatcagcatgataagcgtagtgatttcgatgacgctggtctggcttttgctcagcgccgcctccgtcatcacgttaaaacagtacgcgcaaaaaaatcttgagctcaccgcggcaaccatgggccgcagcctcgaagcggcactggtttttggcgatgccaccgccgcagaagatacgctggcgacgcttggcagacaggggcaattttccgaagccacgcttctggacagccatcagcgtcatttcgccgactggcgtaatgacgccttagctaaaaacgaaaaattcagtggttatattagtaaatggctgtttccggaaccgactgtccagccaatctggcatcaggggaaaataatcggtgagcttcgtctgaaggcgctcgatcggttaatcagtcattttctcggtacttcgctgatcgttttgaccggcagtattctgctggcgtccgttatcgccctgatgcttacccattctctgcatcgcggtattgtcgccgccctgcaaagtattaccgaagtggtacatgatatccgcgaaaaccgccatttctcgcgccgtgtaccggaagaacgtattgaggaattccatctctttgcccaggacttcaatagcctgctgggagaaatggaggattggcagcgtcaactgcaggcgaaaaatgcgcaactgctgcgcagctcgttgcatgatccactaacgggattggcgaatcgcgcggcgtttcgcaacgtcatcggtaagctaatggacgatgacgcggcacgtcatagttcggcgctgctgtttcttgacggcgataatttcaaactcattaacgataactggggacacgctgccggcgataaagtccttattgaggtcgccagccgcctgatggcattcgttggcgatcaacatcaggcatggcgtctgggcggcgatgaattcgccattttactgcacgatgtgcataccgaaaccgaagtccaggcgctttgcgcaacgctgtccgaacagtttcttcagccattcaacctccacaatggccacacggcaacgctctctttgagtattggctatgctttgacctgggaacacacctcggtggaggagctgcaggaactggccgatcagaatatgtatcggatgaaaaaccagcgttttcatcacacacaaaaataa

SEQ ID NO: 90647 - DNA, 597 bp, Enterobacter aerogenes
atgacgctttttgccaataatgctattctccgctcaggcaactgcgaactgcgtttcccgtgcaataacgatttgacggacccgttaatgaaagagttttaccgtctatttttgcttttctttttgctcatcgcgggagttcccgcttttgccgctgagacatctgagaacgttcgcgccatagtttcggggattgtgacttatacgcgctggccaaatttatccggcccgccgaagttatgcgttttttccacctcccgatatatccgcagtttggctcaggaagcgccggaaaatttaccttatcaaccggtgatagttcgaaattcacaggaagccctaaaggccagctgcgacggtttgtatttcggcagtgaaaccccggatcagcagtctgcattaacaaaaaaatatggctcccgtcctctattactcatagcggaacaaaataccgattgctcttttggcagcgctttttgcttgctcataaatgacgatagggtgaggttttccgttaatctggatgtcctgacgcatagcggtgtacgggtcaatccggacgtactgatgcttgcccggaagaaatcacatgaataa

SEQ ID NO: 90648 - DNA, 1071 bp, Enterobacter aerogenes
atgcaaaaagacgcgctgaataacgtacatattaccgatgaacaagttctgattaccccggatcaactgaaagccgaattcccgttaaccgtggagcaggaagcgcagatcgcgcactcccgtcagactatttccaacattattgccggccgcgatccgcgtctgttggtggtctgtggtccttgctcaatccacgatccggaagctgctatcgaatatgctcgtcgatttaaagcccttgccgcagaggtcagcgatagcctctacctggtgatgcgcgtctattttgaaaagccacgtaccactgttggctggaaagggctgattaacgatccgcacatggatggctcgtttgatgtggaaggcggtctcaagatagcgcgtcgcctgctggttgatttagtcaatatgggcctgccgctggcgacagaagcgctcgatccaaatagcccacagtaccttggcgatctgttcagctggtccgccatcggcgcgcgtaccactgaatcgcagactcaccgtgaaatggcatctggtctgtcgatgccggttggttttaaaaacggtaccgatggcagcctggcgacggcgatcaacgccatgcgcgccgccgcgatgccgcaccgcttcgtcggcatcaaccaggccggccaggtttgcctgctgcagacccaggggaatccggatggtcacgtcattctgcgcggcggtaaagcgccaaactacggcccggaagacgttgagaagtgcgaaaaagagatggcgcaggcgggactgaaaccgtcgctgatgatagattgcagtcatggtaattccaataaagactaccgtcgtcagccggcggttgcggaatccgtcgtcgcgcagatcaaagatggcaaccgttccatcattggcctgatggttgagagcaatatccacgaaggcaatcagtcttctgagcagccccgttgcgatatgaagtacggcgtatccgtcaccgatgcctgcatcagctgggaaactaccgatgcactgctgcgcgagctcgatagcgatttgcgcggacatctggcggcacgtctgggttaa

SEQ ID NO: 90649 - DNA, 1122 bp, Enterobacter aerogenes
atggttgctgaactgaccgcattgcgcgatcaaattgatgaagtggataaggcgctgcttgatttgctggcaaagcgcctggagctggtggcggaagttggcgaggttaagagtaaatatggcctgccgatttacgtaccggaacgcgaagccgcgatgctggcttcccgccgggaagaggcggcggcgctcggtgtgccgccggatcttatcgaggatgtcctgcgtcgggtgatgcgcgaatcgtattcaagtgaaaacgacaaaggcttcaaaacgctgcacccgaacctgcgcccggtggttattgttggcggcggcgggcagatggggcgtctgtttgagaagatgctgacgctgtcaggctatcaggtgcgggtgctggaaaaagaagactggccgcgggcgacagagattgtcgccgatgccgggatggttatcgtcagcgttccgatccataccactgcagagacgatttcgcgtctgccgccgctgccggcggattgcattctggtcgatctggcttccatcaaagccgagccgctgcaggcgatgctggcggcgcataacggcccggtattgggattgcacccgatgtttggcccggatagcggcagcctggcgaaacaggtggtggtttactgcgacgggcgtcagccggaagcgtaccagtggttccttgaacagattcaggtctggggcgcgcggctgcaccgcatcagcgccgttgagcacgatcagaacatggcgtttattcaggcgttgcgtcactttgccactttcgcctatggcctgcatctggctgaagaaaacgtccgccttgagcagctgttggcgctttcttcgccgatttatcgactggagctggcgatggtggggcgtctgtttgcccaggatccgcagctgtatgccgacatcattatgtcgtcagaaaataatctggcgttgattaagcgctactaccagcgtttcggcgaagcgattggcctgctggagcagggcgataaacaggcgtttatcgacagcttccgtaaagtcgaacactggtttggcgattacgcccagcgcttccagagcgaaagccgcacgctgctgcgtcaggcgaatgataatcgacagtaa

SEQ ID NO: 90650 - DNA, 873 bp, Enterobacter aerogenes
atggctcaaccgcaaccgctgtttgattacgtcgggcacctgccggaatgcccaacctggagcgatgccgagcaggcactgtactgggcggatattctggagtgcgaaattcaccgctacgatacacgcagtaaagaacaccaggttctgcaatttcccgaagaagtgggatgctttgctctgcgcgagaagggcggttttatcgtcgccttacgtagcggtatctggctttgtgatgcccgcggtctgctgcaacgcaaaatctgtgataacccaagtaacccggatctggcgcgttttaacgacggcggcaccgaccgggatggccgtttttacgcagggaccttctgggggccgggggattacaatggcgcgctgctggtacggattgataatgacctgacgccaaaggtggtgcagtgcgatattcatggtgctaatggtctggcgtttagcgacgataagcgctggatgtatacctccgatacgccgaacgcggtgatttaccgcacgccgctggatgagcagggcgagccgggcaaacgggaagtacttcgtcgtttccatcctggagaggggatccctgacggtgcggcggttgatgaagaaggctgttactggagcgcgatgtttgacggctggcggattgcccgcttttcgccgaacggagaacaactggaagagtatcgcgtgccggtgcgttgccccacgatggtgtgtttcggcggcgcggatatgaaaacgctctacatcactaccacccgggaaaatatggacgccgacgaagtggcgcaatatccgctttccggcgccatcttcaccctgccggttgcggtggcagggatgaagaaacggcaatttattgaacgttaa

SEQ ID NO: 90651 - DNA, 1161 bp, Enterobacter aerogenes
atgaccgaggaaaacccattactggccctgcgcgacaaaataagcgccctggatgaaaaactgctcgcgctgctggccgaacgccgcggcctggcggtagaagtcgggaaagcgaagctggaatcgcaccgtccagtacgcgatatcgaccgcgaacgcgacctgctggagcgtttaatgacgcttggcaaaaagcatcatctggacgcccactacattacccgcctgttccagctgattattgaagactccgttcttacccagcaggcgctactgcaacagcatcttaataagattaacccccgctccgcgcgtatcgccttccttgggcctaaaggctcgtattcacatcttgccgcgcgccagtacgccgcgcgtcattttgagcaatttatcgaaagcggctgcgcgaaattcgccgatatctttgagcaggtcgaaaccggtcaggccgattacgccgtcgtgccgattgaaaacaccagctccggcgggatcaacgatgtgtacgatctgctgcagcataccagtctgtcgatcgtcggcgaactgacgctaccaatcgatcactgtgtgctcgtttcatcctcaacggacgctgataagatcgagaccgtttatagccatccgcagccgttccagcaatgcagccaatatttaagccgctatccgcactggaaaatcgagtacaccgagagcacctcagcggcaatggaaaaagtcgcgcaggcaaaatcccccaccgttgccgcgctgggtagcgaggccggcggcgcgctgtacgggctgcaggtgctggagcactgccaggctaaccagacgcaaaacatcactcgtttcctggtactggcgcgtaaagcggtgaacgtatccgatcaggtgccggcgaaaacgacgttgttaatcgccaccggccaacaggcgggcgcgctggttgaagcgctactggtgctacgtaaccacaacctgatcatgagcaagctggaatcgcgccccatccacggtaacccgtgggaagagatgttttatctggatattcaggccaacctggaatcccttcccttacgtaaggctttaaaagagctggccgaaattacccgttcgatgaaagtactgggctgttacccgagcgaaaacgtcgtgccggtcgacccggcttaa

SEQ ID NO: 90652 - DNA, 336 bp, Enterobacter aerogenes
atgacaatgaacattaccagtaaacaaatggaaattactccggcaatccgccagcatgtcgcagaccgtctcgccaaactggataagtggcaaactcatttaatcaacccgcacatcattctctctaaggagccgcagggttttattgctgacgcaaccatcaatacgccgaacggccatctggttgccagcgcgcgtcatgaagacatgtacgccgccattaacgaattgatcaacaagctggaacggcagctgaataaagtgcaacacaaaggggaagcccgccgcgccgccacatcggtgaaagaggcaggctttgtggaagaagaagagtaa

SEQ ID NO: 90653 - DNA, 738 bp, Enterobacter aerogenes
atgacgcgcatgaaatacctggtggcagcagccacactgagcctggctttggtgggttgctctggctcaaaggaggaggtgcctgataatccgccgaatgaaatttacgcgaccgcccagcaaaagttgcaggacggtaactggaaacaggcaataacgcaactggaagcgttggataatcgctatccatttggtccttactcccaacaggtacagttggacctgatttatgcgtattacaaaaatgccgatttgccgctggcccaggccgcaatcgatcgtttcgctcgtctgaatcctacgcatccaaacattgactatgtcatctatatgcgcggcctgactaacatggcccttgatgacagcgctctacagggcttcttcggcgtcgatcgttccgaccgcgacccgcagcacgctcgcgacgcattcaatgatttctcgaagctggttcgcggttatccgaacagccagtacgccacagacgcctacaaacgtctggtgttcctgaaagaccgtctggcgaagtatgagctgtcggtggtggattattacaccgaccgcggcgcctgggttgccgtcgtgaaccgcgttgacggtatgctgcgtaactacccggatacgcaggccactcgcgatgcgctgccgaagatggaaaacgcctatcgtcagatgcaaatgaacgcgcaggctgacaaagtcgccaaaatcatcgccgccaacggcaaaaacacctga

SEQ ID NO: 90654 - DNA, 981 bp, Enterobacter aerogenes
atggcacaacgagtacaactcaccgcaacggtgtccgaaaaccaactcggtcaacgcttagatcaggctttggccgaattgttcccggattattcacgttcgcggataaaagaatggatccttgaccagcgcgtgctggtaaacggcaacgtcatcgacaagccgaaagaaaaagtttttggcggcgaagccgtctctatcgatgttgagatcgaggaagacgtgcgttttgaaccgcaggatattccgctcaatatcgtctatgaagatgacgacatcctggtcatcaacaaaccacgtgatttggttgtgcaccctggtgcgggcaaccctgacggtactgtgctgaatgcgctgctgcattactatccgcccattgccgatgtccctcgcgcgggtattgttcaccgtctggataaagataccaccggcctgatggtcgtggcgaagaccattccggcgcaaacgcgtctggtcgagtcactgcagctgcgcgaaattacccgcgagtatgaggcggtggctatcggtcacatgaccgctggcggtacggttgaagaacccatcagccgtcacccgaccaagcgcacgcatatggcggttcacccgatggggaaaccggcggtgacccattaccgcattatggaacatttccgtatccacacccgtttgcgcctgcgcctggaaaccggccgtacccaccaaatccgcgtccatatggcgcatattacccatccgctggtgggcgatcaggtttacggcggccgcccgcgtccgccgaaaggggcatcggacgagttcatcagcgcgctgcgcaaattcgatcgccaggcattgcacgcgaccatgttgcgtctgtatcacccaattaccggtattgagatggaatggcatgcgccgatcccgcaggatatggtggaactgatcgacgccatgcgcgccgattttgaagcccataaggacgatattgactggttatga

SEQ ID NO: 90655 - DNA, 732 bp, Enterobacter aerogenes
atgacaaagctgattgttccgcagtggcctatgccgaaaggcgtggcggcctgtagttctacccgtgtgggcggcgtgagcctgcctccgtatgattcgttgaaccttggcgcccattgcggcgacgatctcctgcatgtcgaagaaaaccgccggcggatgtttgccgctggcggattaccctcttatccggtgtggctggagcaggtgcatggcaccacggtactaaaattggatggcgggccgtacgtgtcaaaacgcgccgatgcgtcatactgtaatacgccgggtaccgtttgtgcggtgatgaccgcggactgcctgccggtgctgttctgtaaccgcgccggaaccgaggtggcggcggcgcatgccggatggcgcggcttatgtgaaggcgtactggaagaaacggtcgcctgctttaatgataaaccggaaaatattctggcctggcttggtccggcaattggccctgaggcgtttgaagtcggtgcggaagtacgcgaggctttcatcgccaaagatgcccaggcggagagcgccttccgtcctgccggtgaaaaatattttgctaatatctatcaattggctcgtcagcgcctggctaacgtcggcgtagagcagattttcggcggcgatcgttgcactctaagtgaaaaggatgattttttctcttatcgtcgcgacaagaccacaggtcgtatggcaagtttcatttggctgatataa

SEQ ID NO: 90656 - DNA, 2574 bp, Enterobacter aerogenes
atgcgtctggatcgtcttactaataaattccagcttgctcttgccgatgcccagtcgctagcactcgggcacgacaaccaattcatcgaaccacttcatctaatgagcgccttgctgaatcaggaagggggatcggtgcatcctttactaacctcggcgggtgttaacgccgtggcgttacgcagccaaatcgaacaggcgctgagccgtttaccgcaggtagaaggtaccggcggcgacgtccagccgtctcaggatctggtgcgtattctcaatctttgcgacaagctggcgcaaaagagaaaggataactttatttcgtcagaactgttcgttctggcggcgcttgaatcacgcggtacgctgaccgacctgctgaaatctgccggagcaacaaccgccaatgtgactcaggcgattgaacaaatgcgcggaggtgaaagcgtgaacgatcagggtgccgaagaccaacgtcaggcattgaaaaaatttaccgtcgatctgaccgagcgtgccgaacaaggcaaactggacccggtgatcggccgtgatgaagagatccgtcgtaccatccaggtacttcagcgccgtactaaaaacaacccggtgctgattggtgaacccggggtgggtaaaacggcaatcgtcgaaggactggcgcagcgtatcgtcaacggcgaagtacctgaagggctgaaaggccgtcgggtattggcgctggatatgggcgcgctggtggccggggcgaaatatcgcggtgaattcgaagagcgtctgaaaggtgtgctgaacgatctggcgaaacaggaaggcaacgttatcctgtttatcgatgagctgcacaccatggtcggcgcgggtaaagccgacggcgcgatggatgccggcaacatgctgaaaccggccctggcgcgcggtgaactgcactgcgtcggcgccaccacccttgacgaataccgccagtacattgaaaaagacgccgcgctggaacgtcgtttccagaaagtgttcgttgccgagccgacggtagaagataccatcgccatactgcgcggtctgaaagaacgttatgaactgcaccaccacgtgcagatcactgacccggccatcgtggcggcggcgaccctgtcgcatcgctatattgccgaccgtcagttgccggataaagccatcgaccttatcgatgaagcagcatccagcatccgtatgcagatcgactcgaagccggaagagctggaccgtctcgatcgccgtatcatccagttgaagctggaacagcaggcgctgaagaaagaggcggatgaagcgagcctgaaacgtcttgatatgcttaatgaagagctggcggacaaagaaagccagtattcggtgctggaagaagagtggaaagcggaaaaagcatcgctctccggtacgcagactattaaagctgagctggaacaagccaaaattgccatcgaacaagcacgacgtcttggcgacctcgcgcggatgtccgaactgcaatacggtaaaattccggagctggaaaaacagctggcggcagccacccagtctgaaggcaaaacgatgcgcctgttacgtaacaaagtaaccgatgccgagattgccgaagtgctggcgcgctggaccggtattccggtggcgcgcatgatggaaagcgagcgcgaaaaactgctgcgtatggaacaggatctgcatcaccgcgtcattggccaggatgaagcggttgaagcggtatccaacgccattcgccgtagccgcgccgggctgtctgacccgaaccggcctattggttcgttcctgttcctcggcccgaccggggtgggtaaaaccgagctttgcaaaacgctggctaacttcatgttcgatagcgacgacgcgatggtgcgtatcgatatgtccgaatttatggagaaacactccgtctcgcgtctggtcggtgcgcctccgggatacgtgggctatgaagagggcgggtatctgaccgaagcggtccgtcgtcgtccttattccgtcatcctgttggatgaagtggaaaaagcgcatccggatgtatttaacattctgctgcaggtgcttgacgatggtcgcctgaccgacgggcaggggagaacggtcgacttccgtaatacggttgtcatcatgacctctaacctcggttccgatctgattcaggaacgtttcggcgagctggactacggtcatatgaaggatctggtgcttggcgtggttagccagcgcttccgtccggagtttatcaaccgtatcgatgaagtggtggtcttccatccgttgggtgaaaaacatattgcttctattgcgcagatccaactgcagcgtttgtataaacgtctggaagagcgcggctatgaagtgcatatgtccgatgaggcgttgaagctgctgagcgaaaatggctacgacccggtatacggcgcgcgtccattgaaacgtgccatccagcaacagatagagaacccgttagctcagcaaatcctgtctggcgagctggttccggggaaaaccgtcgagctggtggtaaaagacgaccgcatcgtagcagtgcagtaa

SEQ ID NO: 90657 - DNA, 1458 bp, Enterobacter aerogenes
atgacaataactccacaacaactgatcgcactgctaccgctgctgatcgtcggcttgacggtggtggttgtgatgctctccattgcgtggcgacgcaatcattttctcaatgccacgttgtcggttctcggactaaacgccgcgctggtctcgctctggtttgttggtcagaacggggcgatggacgtcaccccgctgatccgcgttgacggttactcgatgctctataccgggctggtgctgttggcgagcctcgcgacctgtactttcgcctacccatggcttgagggttacaaggacaataaagaagagttctacctgctggtgctgatcgccgcgctgggtggcattctgctggccggcgccaatcacctggcctcgctgttcctcggtatcgaattgatttcgctgccgttgttcggcctggtcggttacgctttccgccagaaacgttcgctggaagcgagcatcaaatacaccatcctctccgcggcagcctcgtctttcctgctgttcggtatggcgctggtgtatgcgaattccggtaacctgtccttcctcgcgctgggcaagagcctggctgacaacgcgctgcacgagccgcttctgctggcgggcctcggtctgatgatcgtcggtcttggctttaaattgtcgctggtgccgttccacctgtggacgccggatgtataccagggcgcgcctgcgccggtatccaccttcctggcgaccgccagcaagattgccatcttcggcgtggtgatgcgtctgttcctgtacatgccggtgggaaacagtgaagcagtacgtgtggtgctgggcctgatcgccttcgcctctatcatcttcggtaacctgatggcgctgagccagaccaacattaagcgtctgctcggttactcttccatctcacacctcggctatctgctggtggcgttaatcgccctgcagagcggcgaaatgtcgatggaagccgttggcgtctacctggccggttatctgttcagcagtctcggcgcgttcggcgtggtcagcctgatgtccagcccgtaccgcggtccggatgctgactcgctgttctcctaccgcggtctgttctggcaccgtccgatcctgtcggcggtaatgacggtgatgatgctgtcgctggccggtattccgatgaccctcggctttatcggtaagttctacgtgctggccgtcggtgtgcatgcgcacctgtggtggctggttgccgcggtggtgattggttcggcgattggtctctactattatctgcgcgttgccgtcagcttgtacctgagcgccccggagcaactgaaccgcgatgcgccgtcaaactggcagtacagcgccggcggtatcgtagtgctgatctccgcgctgctggtgctggtgctcggcgtgtggccgcagccgctgattagcatcgtgcagctggcgacgccgctgatgtaa

SEQ ID NO: 90658 - DNA, 1530 bp, Enterobacter aerogenes
atgttattaccctggctaatattaatcccctttattggcggcttcctgtgctggcagactgaacgctttggcgtgaaactgccgcgctggatcgcgctgattaccatgggactgacgctggtgcttggcctgcagctgtggatgcagggcggctattctctgacgcaatccgcggggattccgcagtggcagtcggaattcgtgctgccgtggatcccacgtttcggcattagcatccatctggcgattgacggtctgtcgctgctgatggtggtgctgaccggcctgctcggcgtgttggcggtgctctgttcctggcgcgaaatcgaaaagtaccagggcttcttccacctcaacctgatgtggatcctgggcggcgtcatcggggtattcctcgccatcgacatgttcctgttcttcttcttctgggaaatgatgttggtgccgatgtacttcctgatcgcgctgtgggggcacaaagcctctgacggtaaaacgcgtatcacggcggccaccaagttcttcatctatacccaggcgagcggtctggtgatgctgatcgccattctggcgctggcattcgtccacttcaacgccaccggcgtgtggaccttcaactatgaagagctgctgaaaactccgatgtctcacggcgtggaatacatgctaatgctcggcttcttcatcgccttcgcggtgaaaatgccggtagtaccgctgcacggctggctaccggacgcccactcccaggcgccgactgccggttccgtcgacctcgcgggcatcttgctgaaaaccgcggcctacggtctgctgcgctttgcgctgccgctgttcccgaacgcttccgccgagtttgcgccaatcgccatgtggctgggcgtgatcggtatcttctacggcgcgtggatggccttcgcccagaccgatatcaaacgtctgattgcttacacctccgtttcccacatgggcttcgtgctgattgctatctacaccggtagccagctggcttatcaaggggcggtgattcagatgattgcccacggtctgtccgcggcgggtctgttcattctgtgcggccagctgtacgaacgtctgcacacccgcgatatgcgccagatgggcggcttgtggagcaaaattaaatggctgccggcgatgtcgatgttcttcgctgtcgccaccctggggatgccgggcaccggtaactttgtcggcgaatttatgattctgttcggcagctataaagtggtgccggtgattaccgttatctcgacctttggtctggtattcgcttccgtttactcgctgtcgatgctgcatcgcgcctacttcggtaaggcgaaaagcgaaatcgcgacgaaagagctgccggggatgtccctgcgtgaactgtctatcatcctgctgctggtggtgctgctggtgctgttgggcttcttcccgcagccgattctcgacacctcgcatgctgcgatgagcaacattcagcagtggtttgttaattctgtttctactacaaggccgtaa

SEQ ID NO: 90659 - DNA, 1842 bp, Enterobacter aerogenes
atgaacatgcttgccttaaccattcttctgccattgattggctttgtgctactggccttctcccgcggacgctggtcggaaaatctttccgccaccgttgggatggggtcggtaggcctggcggcgctggtgacggcgtacgtcggcgtcgattttttcgctaacggtaaacaggcggtcagcgtaccgctgtggaactggatgtcggtcggtgatttcaacatcggcttcaacctggtgctggatggcctgtctctgaccatgctctccgtggttaccggcgtcggcttcctgatccacatgttcgcttcctggtacatgcgcggcgaagagggctactctcgcttcttcgcttacaccaacctgtttatcgccagcatggtcgttctggtgctggccgataacctgctgttaatgtaccttggttgggaaggcgtgggtctctgttcttacctgctgatcggtttctactacaccgatccgaagaataacgccgcggcgatgaaagcgttcgtggtcacccgcgtcggcgacgtgttcctcgccttcgcgctgttcattctttataacgaactgggcaccctgaacttccgcgaaatggttgagctggcgccgcagcacttcgctaacggcagcaccacgctgcagtgggcgacgctgatgctgctcggcggcgcggtcggcaaatccgctcagctgccgttgcaaacgtggcttgccgatgcgatggcgggcccgacgccggtctctgcgctgatccacgcggctaccatggtgaccgcgggcgtgtacctgattgcccgtacccacggcctgttcctgatgacgccggaagtgctgcatctggtcggtatcgttggcgcaatcacgctggtgctggcgggcttcgccgcgctggtgcagaccgacatcaaacgtgtactggcttactcgaccatgagccagattggctacatgttcctcgcgctgggcgtgcaggcatgggacgcagcgatcttccacctgatgacgcacgcgttctttaaagcgctgctgttcctgtcgtccggttcggtgatcctcgcctgccatcacgaacagaacatcttcaagatgggcggcctgcgcaaatccattccgctggtttatgtctgcttcctggtggggggcgcggcgctgtccgctctgccgcttatcaccgcaggcttcttcagtaaggatgagattctggctggcgcgatggccaacggtcatatcaacctgatggtagcgggcctggtcggcgcctttatgacctcgctgtataccttccgtatgattttcatcgtgttccacggtaaagagcaaattcacgcgcatgcagggaaggggattacccaccatctgccgctgattgtgctgctgattctgtccaccttcgttggcgcgctgattgtgccgccgctggaaggcgtactgccgcagaccactgagctcgctcacggtagcgtgatgacgctggaaatgacctccgggattatcgctatcgccggcatcctgatcgccgcatggctgtggctgggcaaacgtacgctggtgacttccatcgccaacagcgcgcctggccgcttcttcggcacctggtggttccatgcctggggcttcgactggttatacgacaaagtgttcgtcaaaccattcctcggcattgcctggctgctgaagagcgatccgctgaactcgttgatgaatatcccggcgattctgtcccgcttcgcaggcaaaggtctgctggtgagcgagaacggctatctgcgctggtatgtggcttcaatgagcattggcgcggtggtggtgctggctctgctgatggtactgcgttga

SEQ ID NO: 90660 - DNA, 303 bp, Enterobacter aerogenes
atgatccccttaacacatggactgatcctcgccgccatcctgtttgtgctcggcctgactggtcttgtgatccgccgcaatctgctatttatgctgattagcctggaaatcatgattaacgccgccgcgctggcattcgtggtcgcgggaagctactggggccagactgatggtcagattatgtatatcctcgccatcagcctcgcggctgcggaagcgagtatcggtctggcgctgctgctgcagctccatcgtcgccgccagaacctgaacatcgattcagtaagtgagttgcgtggatga

SEQ ID NO: 90661 - DNA, 555 bp, Enterobacter aerogenes
atggaattcgctttttatatctgtggcctgatagccatcctcgcaaccttgcgggtcgtcacccacaccaatccggtgcacgcgctgctgtacctgatcatttcgctgttagcgattgccggggtgtttttctcgctgggcgcttacttcgccggtgcgctggaaatcatcgtttacgccggggccattatggtgctgttcgtgttcgtggtgatgatgctcaacctgggcggcaccgagatcgaacaggaacgcaaatggctgcagccggggatctggattggcccggccatcctttccgcggtgctgctggtagttatcgtttacgccatcctgggcattaatgaccagggtatcgacggcgcggcgatcaacgccaaagaagtgggtattgcgctgtttgggccgtacgtcctggcggtggagctggcctctatgctgctgctggcgggcctggttgtcgccttccacattggccgcgaagagcgcgccggtgaggtgctgagcaaccgcgtgaatgacagcgacaaaagaaaaacggaggaacacgcatga

SEQ ID NO: 90662 - DNA, 543 bp, Enterobacter aerogenes
atgaccttaaaagaattattggtagggttcggcacccaggtccgcagtatttgcatgatcgggatgcacgccttcgccaaacgtgaaactcagatgtacccggaagagccggtatatctgccgccgcgctatcgtggccgtatcgtgctgacgcgcgatccggacggtgaagagcgctgcgttgcctgtaacctgtgtgcggtagcctgcccggttggctgtatttctctgcagaaagcagagaccaaagatggccgctggtacccggagttcttccgcatcaacttctcacgctgcattttctgcggcctgtgcgaagaagcgtgcccgaccacggcgattcagttgaccccggacttcgaactgggcgaatacaaacgtcaggatctggtgtacgaaaaagaggatctgctgatttccggtccgggcaaatacccggaatataacttctaccggatggcgggtatggcaatcgacggcaaagataagggcgaagcggaaaacgaagctaagccaatcgacgtcaagagcctgttaccgtaa

SEQ ID NO: 90663 - DNA, 978 bp, Enterobacter aerogenes
atgagttggttaacgccggatcttatcgacattctgttaagcatcctgaaggccgtggtcattctgctggtggtcgtcacctgcggcgcgttcatgagcttcggcgagcgtcgtctgctcggcctgttccaaaaccgctacggacctaaccgcgtgggctggggcggttcgctgcagctggtcgccgacatgatcaagatgttcttcaaagaggactggatcccgcgcttctccgatcgcgtgatctttactctggcgccggttatcgcctttacttcgctgctgctggcttttgctatcgtgccggttagcccgtcgtgggtggtcgccgacctgaacatcggtattctgttcttcctgatgatggcaggcctggcggtttacgcggtcctgttcgccggttggtcgagcaacaacaaatactcgctgctgggggcgatgcgtgcttctgcgcaaacgctgagctacgaagtgttcctcggcctctccctgatgggcgtggtggcgcaggcggggtcattcaacatgaccgatatcgtcaacaaccaggcgcatctgtggaacgtcatcccgcagttctttggcttcgtcactttcgccatcgccggcgtggcggtgtgtcaccgtcacccgttcgaccagccggaagcggagcaggaactggccgatggttaccacattgaatattccggtatgaaattcggtctgttcttcgtcggtgaatacatcgggattgtcaccgtttcagcgctgatcgttacgctgttcttcggcggctggaatggcccgtggttaccgcctttcatctggttcgcgctgaaaaccgcgttcttcatgatgatgttcattttgatccgcgcatcattaccgcgtccgcgttatgaccaggtaatgtcctttggctggaaggtatgcctgccgttaacgctggtcaacttgttggtaacggcggctgtcattctctggcaggcgcaataa

SEQ ID NO: 90664 - DNA, 2727 bp, Enterobacter aerogenes
atggctacgattcatgtagacggcaaagaatacgaggtcaacggagcggacaacctgctagaggcttgtctctctcttggtcttgatattccatacttttgctggcacccggcgctagggagcgtcggtgcttgccgccagtgtgcggtgaagcaatatcagaacgcggaagacacgcgtggtcgcctggtgatgtcctgtatgactccggcatctgacggcacctttatttctattgacgacggcgaagcgaagcagttccgcgaaagcgtggtggagtggctgatgaccaaccacccgcacgactgcccggtctgcgaagaggggggcaactgccacctgcaggatatgacggtcatgaccggccatagcttccgccgctatcgtttcaccaagcgtacccaccgcaaccaggatttggggccatttatttctcacgaaatgaaccgctgcatcgcctgctaccgctgcgttcgctactataaagattatgccgacggcaccgatctgggcgtttatggcgctcatgacaacgtctacttcggccgcccggaagatggcacgctggaaagcgaattctccggtaacctggttgaagtctgcccgaccggcgtcttcaccgataaaacgcactccgagcgttacaaccgtaagtgggacatgcagtttgcgccgagcatctgccagcagtgttccattggctgtaacatcagccctggcgaacgctatggcgagctgcgtcgtatcgaaaaccgttataacggcaccgtgaaccgctacttcctctgcgaccgcggtcgtttcggctatggctacgtaaacctcaaagatcgtccgcgtcagccggttcagcgccgcggcgacgatctgatcgcgctcaacgccgaacaggcgatgcagggggcggcggatatcctgcgtcagtcgaagaaagtcattggtatcggttctccgcgcgccagcattgaaagcaacttcgcgctgcgtgagctggtcggtagcgaaaacttctataccggcatcgctaaaggcgaacaagcgcgcctgcagatgatgctcaaagtgctgcgcgaaggtgggatccataccccgacgctgcgcgatatcgaatcctacgatgcggtactggtgctgggcgaagacattacccagaccggcgcgcgcgttgccctggcggtacgccaggcggtgaaagggaaagcacgcgaaatggcggcggcgcagaaagtggccgactggcagattgcggcaattctcaacatcggacagcgcgccaagcatccgttattcgtcactaatatcgacgacacccgcctcgatgacatcgcggcgtggacctatcgcgcgccggtggaggatcaggcgcgtctgggctttgctatcgcccatgcgctggatgacagcgcgccggcggttgatggcctgagccatgacctgcagggtaaaattgatgtgatcgttcaggcgctggccggggcgaaaaaaccgctgattatctccggcactaacgccggcagcatggaaatcattcaggctgccgccaacgtggcgaaagcgttgaaaggccgcggcgccgatgttggcgtgactatggtcgcccgcgcggtgaacagcgttggcctgggcatgatcggcggcggctcacttgaagaggcgctggacgaactggaaagcggtgccgcagatgcggttatcgtgctggaaaacgacctgcaccgtcatgcttccgccgcgcgcgtcgacgctgcgctggcgaaagcgccgctggtgatggtggttgatcatcagcgcaccgcgattatggacaaagctcacctggtgctctccgcggcaagctttgcggaaagcgacggtaccgtggtgaacaacgaaggccgcgcccagcgtttcttccaggtttacgatccggcttactacgacgcgaaaaccgtgatgctggaaagctggcgctggctgcattcgctgcacagcaccgtcaacaaccgtcaggttgactggacgcagctggaccacgtcatcgatgcggcgattgcggcgctgccgcagctggcgggcattaaagatgccgcgccggatgcgaccttccgcattcgcggtcagaagctggcgcgtgaaccgcaccgctacagcggccgcacggcgatgcgcgccaacatcagcgtgcacgaaccgcgccaaccgcaggataaagacaccatgttcgccttctcgatggaagggaacaaccagccgtccgcgccgcgttcgcaaattccgtttgcgtgggcgccgggctggaactccccgcaggcatggaacaaattccaggatgaagtgggcggtaaactgcgccacggcgatccgggcgtgcgtctgattgaagcttccgccagcgggctggagtacttcacggcggttccggccagcttccacgcggaagagggcaaatggcgtatcgcgccttactaccacctgtttggcagcgatgagctgtcgcagcgttctccggtgttccagagccggatgcctgagccgtacatcaagctgaacccggcggatgccgcaaagcttggcgtcaacgccggagcgatggtttccttcagcgtagaaggccagacgctgagtctgccgctggttatttctgaaggactggccgcgggacaggttggcttaccgatgggcatgccgggcatcgcgccggtactggccggggcgcgtattgattcactgcaggaggcgcaagcatga

SEQ ID NO: 90665 - DNA, 1338 bp, Enterobacter aerogenes
atgaaaaccattattcgtactgccgaaacgcatccattaacctggcgtctgcgcgatgacaagcagccggtgtggctggacgagtatcgcagcaaaaacggttatgaaggggcgcgcaaggccttaagcggcatggcgccggatgaaatcgtcaatgcggtaaaagacgccggcctgaaagggcgcggcggcgcgggcttttccaccggtctgaagtggagcctgatgccgaaagacgagtccatgaacatccgttacctgctgtgtaatgccgatgaaatggaaccgggtacctataaagaccgtctgctgatggaacagctgccgcacctgctggtggaaggcatgctgatctccgcctttgcgctgaaggcctaccgtggttacatcttcctgcgcggtgaatatatcgaagcggcgcagcatctgcgtcgtgcgattgccgaagctaccgaagcgggcctgttggggaaaaatatcctcggtaccggttttgacttcgagctgttcgtgcacaccggggcagggcgctatatctgcggtgaagagacggcgcttatcaactcgctggaaggccgtcgcgctaacccgcgctccaagccgccgttcccggcgagctccggcgtatggggtaaaccgacctgcgtcaacaacgttgaaaccctgtgcaacgtccctgccatcctcgccaacggcgtggagtggtaccagaatatttcaaccagcaaagatgccggcaccaagctgatgggcttctccgggcgcgtgaagaatccgggcgtctgggaactgccgttcggcaccaccgcgcgcgagatcctcgaagattacgccggcggcatgcgcgatggcctgaagtttaaagcctggcagccgggcggcgccggtaccgacttccttaccgaagcgcacctcgatttgccgatggagtttgaaagcattggtaaagcaggtagccgtctgggcaccgcgctggcgatggccgtcgaccacgagatcggcatggttccgctggtgcgcaacctcgaagaattttttgcccgtgaatcctgcggctggtgtacgccttgccgagacggcctgccgtggagcgtgaagatcctgcgcgccctggagcgcggcgaaggccagcctggcgatatcgaaactcttgagcaactgtgtcgattcctcgggccgggtaaaaccttctgcgcgcacgcgccgggcgcggttgaaccgctgcagagcgctatcaaatatttccgcgaagaattcgaggctggcattaagcagcagttcagcaatacccatgcaattaacggtattcagccgaacctgcttaagacgcgctggtaa

SEQ ID NO: 90666 - DNA, 501 bp, Enterobacter aerogenes
atgcacgagaatcaacaaccacaaaccgaggcttttgagctgagtgcggcagagcgtgaggctattgagcacgaaaagcaccactacgaagacccgcgtgcggcgtccatcgaagcgctgaaaattgttcaaaaacagcgcggctgggtgccggatggcgcgatctacgcgatcgccgatgtgctggggatcccggcaagcgacgtcgaaggcgtggcgacattctacagccagatcttccgccagccggttggccgtcacgtgatccgctactgcgacagcgtggtgtgccatatcaccggtttccaggggatccagtcggctatcgagaaaaagctggacatcaaaccgggtcaaaccacctttgatggccgcttcacgctgctgccgacctgttgccttggcaactgcgacaaggggccgaccatgatgattgatgacgacacgcacagttatctgacgccggaagcgattcctgacctcctggagcggtataaatga

SEQ ID NO: 90667 - DNA, 1809 bp, Enterobacter aerogenes
atggtgaacaatatgactgatttaaccgcgcatgacgccgcaccagcctggcaaacccgcgatcaccttgatgacccggtgatcggcgaactgcgcaaccgttttgggccggatgcctttaccgttcagcctacccgtaccggcgttccggtggtgtgggtgaagcgcgaacagctgcttgaggtgggtgatttcctgaagagattgccgaaaccttacgtgatgctgtttgacctgcacggcatggacgaacgtttacgtacgcaccgcgatggcttgccagccgcggatttttccgttttctaccacctgatctcagtagaccgcaaccgcgatatcatgctcaaggtggcgttgtctgaaaacgatctgcatctgccgaccttcaccaaactgttccctaacgccaactggtatgagcgtgaaacctgggaaatgtttggcgtgaccttcgacggtcacccgaatctgcgccgcatcatgatgccgccgacctgggaaggccacccgctgcgtaaagactatccggcgcgcgccaccgaattcgatccgtttgagctgaccaaagccaagcaggatctggaaatggaagcgttaaccttcaagccggaagagtggggtatgaagcgcggcaccgaaaacgaggactttatgttcctcaacctcggcccgaaccacccgtccgctcacggcgcattccgtattattctgcagttggatggcgaagagatcgtcgactgcgtgccggacatcggctaccaccaccgcggcgcggagaaaatgggcgaacgccagtcctggcacagctacatcccgtacaccgaccgtatcgaatacctcggcggctgcgtcaacgagatgccatacgtgctggcggtggaaaaactggccgggatcaccgtgccggatcgcgtgaacgtgatccgcgtgatgctgtccgaactgttccgcatcaatagccacctgctgtatatctcgacctttattcaggacgtcggcgcgatgaccccggtcttcttcgcctttaccgaccgtcagaaaatctacgatctggtcgaagcgatcaccggtttccgtatgcacccggcgtggttccgcatcggcggcgtcgcccacgacctgccgcgcggctgggatcgcctgctgcgtgaattccttgagtggatgccgaagcgcctggattcctatgagaaagccgcgctgcgcaacaccattctgattggccgttccaaaggcgttgccgcctacaccgcaaaagaagcgctggagtggggcaccactggcgcaggtctgcgcgcgaccggtatcggcttcgacgtgcgtaaatggcgtccttattctggctacgaaaacttcgactttgaaatcccgaccggcggcggcgtttccgactgctacacccgcgtgatgctgaaagtggaagagctgcgccagagcctgcgcattctccagcagtgcctcgataatatgccggaaggcccgttcaaagcggatcacccgctgactacgccgccgccgaaagagcgcacgctgcagcacattgagaccctgattacgcacttcctgcaggtttcctggggcccggtgatgccggccaacgaatccttccagatggttgaagcgacgaaggggattaacagttactacctgaccagcgacggcagcaccatgagctaccgtacccgtattcgtaccccgagctatgcgcacctgcagcagatcccggcggcgatccgcggcagcctggtatccgaccttatcgtctatctgggtagtatcgattttgttatgtcagacgtggaccgctaa

SEQ ID NO: 90668 - DNA, 675 bp, Enterobacter aerogenes
atggattatacgctcacccgcatagatcctaacggtgagaacgaccgttaccccctgcaaaaacaggagatcgtaactgaccccctggagcaagaagtcaataaaagcgtgtatatggggaaactcgaacacgcgctgcatgacatggtgaactggggccgtaagaactcgatttggccgtacaacttcggcctgtcttgctgctatgtagaaatggtgacgtcattcactgcggtgcatgacgttgcgcgttttggcgcggaagtactgcgtgcctctccgcgtcaggccgacctgatggtggtcgccggtacctgcttcaccaaaatggccccggttattcagcgcctgtacgatcagatgctggagccgaagtgggttatctctatgggcgcatgcgctaactccggcgggatgtacgatatctactccgtcgttcagggcgtggacaagtttattccggtggatgtttacatcccgggctgtccgccgcgtccggaagcttatatgcaggcgctgatgctgctgcaggaatccattggtaaagagcgccgtcctctctcatgggtggttggcgatcagggcgtctatcgcgccaacatgcaatccgagcgcgagcgtaaacgcggcgaacgaattgcggtgaccaatctgcggactccggacgagatttaa

SEQ ID NO: 90669 - DNA, 447 bp, Enterobacter aerogenes
atgcgtatgtcaacatccactgaagtcatcgctcatcattgggcattcgctatatttctcatcatcgctatcggtctgtgctgcctgatgctcgtcggcggctggtacctcggcggtcgcgcgcgcgcgcgtagcaaaaacacgccgtttgaatcggggatcgactccgttggttcggcccgcttacgtctttctgcgaagttttatctggtcgccatgttcttcgttatcttcgacgtggaagccctgtatctctacgcatggtcaacatccattcgcgaaagcggctgggttggctttgtggaagccgcaattttcattttagtgctactggctggtctggtttacctcgttcgcatcggcgcactggactggacgcctgcgcgttcccgtcgcacgctggttaacccggaaacagacagtcccactaaccgtcatatgcagtaa

SEQ ID NO: 90670 - DNA, 927 bp, Enterobacter aerogenes
atgataaatgcaaatcgtccgatactgaatctcgatctcgatctgctgcggaccttcgtcgccgtcgccgatctgagcaccttcgcggcggccgctgccgcggtatgtcgtacccagtccgccgtcagtcagcagatgcagcgcctggagcaactggtaggcaaagagcttttcgcccgtcatgggcgcaataaattactgaccgagcaggggatccaactgctcagctacgcgcgcaaaatactgcgctttaatgatgaggcctgcatgtcgctgatgtttggcagcctgcaggggacgctaactatcggcgcttccgatgaaacggcggataccatcctgccttacctgctcaaccgaatcggcagcttctatcccaaactgacgctggaaataaaggtcctgaattacgccgatatcgtcgcgaagttgggcagcggcgagatcgacctggcattaactacgcatcaaaccggcgaatttgacgtcctgacgctgcgtacctcgccgacgctgtggtactgcgccgcggattacgtactggcgcagggtgaatccgttccgctggtgctgctcgaagagtccgggccgtttcgcgaagatatcatctccgcgctgaacgctgcgcaggttccctggcatttggcgcatgccgccagttctttagccggggtgaaggcggcggtgaaagcgggccttggcgtcaccgcgcgtccggtagaaatgatgagtccggagctacgcgttccgggtaaaagcgatggcctaccgggcttgcctgatacccactatgtgctgagctgcaatccgcagcgggaaaacgaactggcgcaggcgatttttcagtcgctgagccaggaccataatccgtggaacacggaaaccctatataccccggaagggggagacagttctctggtttcataa

SEQ ID NO: 90671 - DNA, 1218 bp, Enterobacter aerogenes
atgtcccctatcgaaaaatccagcaagttagagaatgtctgttacgacatccgcggtccggttctcaaagaagcaaaacgccttgaagaagaaggcaacaaagtactcaagctgaatatcggcaacccggcgccgttcggcttcgatgcgcctgacgaaattctcgtcgacgttatccgcaatctgccgaccgcccagggctacagcgactcaaaaggtctctattccgcccgtaaagcgattatgcagcactaccaggcgcgcgggatgcgcgatgttaccgtggaagatatctatatcggtaacggcgtttccgagctcatcgtccaggccatgcaggcgctgctcaacagcggcgacgaaatgctggttccggctccggactacccgctgtggaccgctgcggtctccctttccagcggcaaagcggtgcactatttgtgcgacgaatcctcagactggttcccggacctcgacgatatccgcgccaaaattacgccacgcacccgtggaatcgtcatcattaacccgaataacccgacgggcgccgtttattccaaagaactgttgcaggagatcgtcgagatcgcccgtcagcacaacctgattattttcgccgacgaaatctacgacaagatcctgtacgacgatgccgaacaccattcgatcgccgcgctggcgccggatatgctgaccgtcacctttaacggactgtcgaagacctatcgtgtcgccggtttccgccagggctggatggtgcttaacgggccgaaaaagcacgccaaaggctatatcgaagggctggaaatgctggcctcgatgcgcctgtgcgccaacgtcccggcgcaacacgcaatccaaaccgcgctgggcggctatcagagcattagcgaatttatcattccgggcgggcgtttgtatgagcaacgcaaccgcgcctgggagttaatcaacgagatcccgggcgtttcctgcgtcaagccgaaaggcgcgctgtacatgttcccgaaaatcgacgccaaacgctttaatatccacgatgaccagaaaatggtgctcgacttccttctacaggagaaagtgctgctggttcagggcaccgcctttaactggccgtggccggatcacgtgcgtatcgtcaccctgccgcgtgaagatgacctggaaatggcgatttcccgctttggccgtttcctctccggctatcatcagctttaa

SEQ ID NO: 90672 - DNA, 600 bp, Enterobacter aerogenes
atgagtcagagtcatttctttgcccacctctcccgcctgaaactaattaaccgctggcctttgatgcgcaacgtgcgtaccgaaaacgtctccgagcacagtttgcaggtggcgatggtcgcccatgcgctggcggcaattaagaaccgcaagtttggcggccaggtcaacgccgaacgtattgccctgctggcgatgtatcacgatgcctccgaggtcctcaccggcgatctgcccacgccggtgaaatacttcaattcgcagattgcccaggaatataaggcgattgagaaaatcgctcagcaaaaactggtcgatatggttcccgatgagctgcgcgatatctttgagcccctgattgatgagcaccattacagtgaagaagagcagtcgattgtgaagcaggccgacgccctgtgcgcctatctgaaatgtcttgaagagctttccgccggcaataacgaatttctgctggctaaaggtcggctggaaaaaacgctggagtctcgccgtagcccggagatggattactttatgcaggtgtttgtcccgagcttccacttgtcgctcgatgaaatcagccaggattcaccgctttaa

SEQ ID NO: 90673 - DNA, 1833 bp, Enterobacter aerogenes
gtgaacggtgaattgatttgggtgttatcgctactggccatcgcggttgtcttgtttgcaaccggcaaggtgcgcatggatgccatcgcgctgatgatcattgtggcgtttgtgcttagcggtacgttaaccctcagcgaggccttctccggctttagcgatccgaacgtcattctcattgctgcgttatttatcattggcgatggcctggtgcgcaccggcgtggcgactaaaatgggctcctggctggtcaaggttgccggtaatagcgaaaccaaaatgctggtctacctgatgctcaccgttgccgggctgggcgcgtttatgagctccaccggcgtcgtggcgatatttattccggtggtgctcagcgtttcgctgcgtatgaatacctcgccatcgcggctgatgatgccgctgagcttcgccgggctgattagcggcatgatgaccctggtggcgacgccgccgaacctggtggtcaacagtgaactgctgcgcgaagggttgcatggattcagcttcttcagcgtgaccccgattggcctggtggtgctggtgttgggtatcgtctatatgctggtgatgcgctttatgctgaagagcgaagatgacagcgccgctcgcgatgtgcgcaagaaaagcacctttcgtgatttaatcaaagagtaccgccttaccggcagggcgcgccggctggcgattcgtccgggctcgccgatgatcggccagcggcttgatgatttaaagctgcgtgaacgctactgcgccaacgttatcggcgtcgaacgctggcggcgttttcgccgggtgattgtcaacgttaacggggtatcggagtttcgcgcccgtgacgtgttgctgatcgatatgtcagcctccgacgtcgatctgcggcagttttgcggcgaacagatgcttgagccgatggtgctgcgtggcgaatactttgccgatcaggcgctggacgtcggcatggctgaagtctcgttaatccctgattcagagcttatcggtaaaacggtgcgcgagatggcctttcgtacccgttttggtctgaatatcgttggtctgaagcgcgatggcaaagcgctcgacggcgcggtagtcgatgaacctctccagttaggcgatattatgctggtggtcggcaactggcggcagatagccatgctggcgaaacgtggccgcgattttgtggtgctgaatatgccggtagaggtcaacgatgcttcgccagcgcacagtcaggcgccgcacgccatattctgcctggtgttgatggtagcactgatgcttaccgatgaaatccctaaccctatcgctgccatcatcgcctgcctgttgatgggcaagtttcgctgcatcaacgccgagagcgcctataaggcgattcactggccgagcatcattttgattgtggggatgatgccgtttgccctggcattgcagaaaaccggcggcgtggatttggtggtgcaggggttaatggacgtcgccgggagtaaaggcccctatttgatgctgggttgcctgtttgtgatgtgcgcggcgattggtctgtttatctctaacaccgcgacggcggtgctgatggcgccgattgcgctggcggcggcgaaatcgatgggagtctcgccatatccttttgccatggtggtggcgatggcggcttcggcggctttcatgaccccggtctcttcaccggttaacacgctggtgctcggacccggtaaatattcgtttagtgattttgtcaaaatcggtgtgcccttcaccgtactggtgatggtggtctgcgtgctgcttatcccggtactctttccgttttaa

SEQ ID NO: 90674 - DNA, 660 bp, Enterobacter aerogenes
gtgcagtgtaaaggtttcctgttcgatctcgacgggacgctggtggattctttaccggttgttgagcgttcatggtgtaaatggggcgatcgtttcggcattccgcatgatgaaattctcggtttcattcacggtaaacaggccatcacttcgattcgccattttatgccggggcgcagcgaagaggatattcaggccgagttccgcttccttgagcagattgaagccaccgatatcgacggcattgtcgcactgccgggcgcgttaaacttgctgaatacgctcaatgaagccggtatcccctgggctattgtgacctcgggttcgattccggttgctcacgcccgccaccgcgcggcaggtctgccaatgccgaaagtgtttgtcaccgccgaacaggtgaagaaggggaaaccggcgccggatgcctatctgctcggcgctgaactgctggggataccggcgcaacagtgtgcggtggttgaagatgcgccggcggggctgctttccgggctggctgccggatgccgcaccatcgccgtcaacgttccggcggatgcgccgcgtcttgatgaagccgatctggtgctgacgactctcgaaagtttgcgcattgaacggcaggcggacggcaatgttcaggtgaatcttaaagcataa

SEQ ID NO: 90675 - DNA, 495 bp, Enterobacter aerogenes
atggaaatgaccaatgcgcagcgtctgattttgtccaatcagtacaagatgatgactatgctcgacccggacaacgctgaacgttaccgccgtctacagaccatcatcgagcgtggatatgggctgcaaatgcgcgagctggaccgcgaatttggccaactgacggaagaaacctgccggacgattatcgatatcatggagatgtaccacgcgctgcacgtctcgtggaccaacctcaaagatgcgtccggtattgatgaacgccgggtcaccttccttggctttgatgtcgccactgaggcccgttatctcggctatgtgcgctttatggtcaatgtagaagggcgctatagccacttcgacgcaggaactcacggctttaactcgcagacgccgatgtgggaaaaataccagcgtatgctggccgcctggcactcctgtccgcgccagtatcatttgagtagtaacgaaattaaccaaattattaatgcctga

SEQ ID NO: 90676 - DNA, 456 bp, Enterobacter aerogenes
atgtcgacccctgagaatcgccccgttagcttttttagcttgtttcgtcgcgggcagcactatgcgaagacctggcccctcgataagcggctggcgccggtgtttatcgaaaaccgcattattcgcgccacccgctacgcgattcgcatcatgccgccggttgcggtcttcaccctgtgctggcagatagcgctcggcggccagctcggcccggccgtcgccaccgcgctatttgccttaagcctgccgatgcaggggctgtggtggttgggcaagcgttccgtcacgccattaccgccatcaatactgaactggttttatgaagtgcgcggcaaattacaagaggccgggcaggcgttagcgccggttgacggcaagccggattaccaggcgctggctgacacgcttaagcgcgccttcaaacaactggataaaactttccttgatgatttgtaa

SEQ ID NO: 90677 - DNA, 1203 bp, Enterobacter aerogenes
atgtcgagtaagttagtactggttctgaactgcggtagctcttccctgaaatttgctatcctggatgccgttaacggtgacgaatatctctccggtttagccgaatgtttccatcttcctgaagcccgtatcaaatggaaaatggacggcggcaaacacgaagctgagttaggcgcaggcgccgctcacagtgaagcgctgaactttatcgttaacactattctggcacaaaaaccagaactgtcagcacagctgaccgcaattggccatcgtatcgttcacggcggtgaaaaatacaccagttccgttgtcatcgacgattccgttattcagggcatcaaagactccgcttccttcgcaccgctgcacaacccggcgcacctgatcggtatcgctgaagcgctgaaatccttcccgcacctgaaagacaagaacgttgccgtgttcgacaccgcgttccatcagaccatgccggaagagtcctacctgtatgccctgccgtacagcctgtacaaagagcacggcgtacgtcgttacggcgcgcacggcaccagccactactatgtgactcaggaagccgctaaggttctgaacaagccggttgaagaactgaacatcatcacctgccacctcggcaacggcggttccgtttccgctatccgtaacggtaaatgcgttgatacctccatgggtctgaccccgctggaaggtctggtgatgggtactcgctctggcgatatcgacccggcaatcattttccacctgcacgacgcgctgggtatgagcgtagatgctatcaacaaaatgctgaccaaagagtccggcctgctgggtctgaccgaagtcaccagcgactgccgctatgttgaagacaactacgcggataaagctgacgctaaacgcgcaatggacgtttactgccaccgtctggcgaaatacatcggttcttacaccgcgctgatggatggccgtctggacgccgttgtcttcaccggtggtatcggtgaaaacgccgcgatggttcgtgaactgtccctgggtaaactgggcgttctgggcttcgaagttgatcacgagcgtaacctggctgcccgtttcggcaagtctggcttcatcaacaaagaaggcacccgccctgccgtggttatcccgaccaacgaagagctggtgatcgctcaagacgcacaccgtctaaccgcttaa

SEQ ID NO: 90678 - DNA, 2217 bp, Enterobacter aerogenes
atgaacggtaagctggcggtgctgttttgtatcccgcctaaaactggcggtaacgaaagaggatatatcgtgtcccgtactatcatgctgatccctaccggaaccagcgtaggcctgaccagcgtcagcctcggtgttatccgcgctatggaacgcaaaggcgttcgcctgagcgtctttaaacctatcgcccagccgcgttccggtggcgatactccagaccagactaccaccatcgttcgcgccagctcttcaacgacgactgccgctgaaccgatgaacatgagccacgttgagtcgctgctgtccagcaaccagaaagacgtgctgatggaagagatcatcgccaactaccatgccaacactcaggatgctgaagtggtgctggttgaaggcctggtcccgactcgtaaacaccagttcgctcagtctctgaactacgaaatcgcaaaaacgcttaacgcggaaatcgtcttcgtgatgtctcagggcaccgataccccggaacagctgaacgagcgtatcgaactgactcgcaacagcttcggcggcgcgaaaaataccagcatcactggcgttatcgttaacaaactgaatgctccggttgatgaacaaggccgtacacgccctgacctgtccgaaatctttgacgactcgtctaaagcgaaagtcgtgaagatcgacccggcccaactgcagaatggcagcccgctgccggtactgggcgcggtgccatggagcttcgatctgatcgccacgcgcgctatcgacatggcgcatcacctgaatgcgaccgtgatcaacgaaggcgacatcaatactcgccgcgtgaagtctgtaaccttctgcgcgcgcagcattccgcacatgctggaacacttccgtccgggttctctgctggtgacttccgcagaccgtccagacgtactggtcgctgcctgcctggcggcgatgaacggcgtagaaatcggcgctatcctgctgaccggcggctatgaaatggacgcgcgcatcagcaagctgtgcgaacgtgctttcgccaccggcctgccggtattcatggttaacaccaacacctggcagacctctctgagcctgcagagcttcaacctggaagtaccggttgacgatcacgagcgcatcgagaaagtacaggaatacgttgccaactatatcaacgccgactggatcgaatcgctgaccgcgacctccgagcgcagccgtcgtctgtctccgccagccttccgctaccagctgaccgagctggcgcgtaaagcgggcaaacgcgtcgttctgccggaaggcgacgaaccgcgtaccgttaaagcggcggccatctgtgccgagcgcggtattgcaacctgcgtgctgctgggcaacccggatgagatcaaccgcgttgcggcctctcagggcgtagagctgggcgctggtattgaaatcgtcgatccggaagtggttcgcgaaagctacgtggcgcgtctggtcgaactgcgtaagaacaaaggcatgaccgaagcggttgcgcgcgaacagctggaagataacgtggttctcggcaccctgatgctggaacaagacgaagtcgacggcctggtatccggcgcggttcacaccaccgccaataccatccgtccgccgctgcagcttatcaaaacggcgccgggcagctcgctggtctcttccgtattcttcatgctgctgccggaacaggtttacgtttacggcgactgcgcgatcaacccggatccgacggcagaacagctggcggaaatcgcgattcagtccgctgattccgcgattgccttcggtatcgaaccgcgcgtagcgatgctctcctactccaccggcacctccggcgcaggtagcgatgtagaaaaagtacgcgaagcgactcgtctggcgcaggaaaaacgtcctgacctgatgatcgacggtccgctgcagtatgatgccgcagtaatggccgacgtagcgaagtccaaagcgccgaactctccggtagctggccgcgcaaccgtgttcatcttcccggatctgaacaccggtaacaccacttacaaagccgtacagcgttccgctgacctgatctccatcgggccgatgctgcagggtatgcgtaagccggtaaacgacctgtcccgcggcgcgctggtagacgatatcgtctacactatcgcactgacggcgattcagtcttctcagcagcagaactaa

SEQ ID NO: 90679 - DNA, 558 bp, Enterobacter aerogenes
atggcggaacagaagcatttggcaagcacagaatgggtcgatattgttaatgaaaacaatgaagtgatagcacagtccagccgcgagcaaatgcgcgcgcagtgtctgcgccaccgcgcgacctatattgtggttcatgatgggatgggcaagattctggtacagcgccgtaccgagagcaaagatttcatgccgggcatgctggatgcgaccgccggcggcgtggtgcaggcggatgaacagctgctggactccgcgcgccgcgaagcggaagaagagctggggattgcgggcgtgccttttgccgatcacggccaattctactacgaagataaacactgccgcgtctggggaagcctgtttagctgtgtttctcatggcccgttcgccctgcaggaagaagaggtcagcgaggtatgctggttgacgccggaagagatcaccgcgcgctgcgatgagttcaccgccgattcactgaaagcgctggcgctgtggatgactcgtaatgcgggcaataccggccacgatcgcgacgagccggaagaagacgaagcgtaa

SEQ ID NO: 90680 - DNA, 552 bp, Enterobacter aerogenes
atgaaactgatgttcgcatccgatattcacggctcgctgcctgcgaccgaacgcgttctggaacgcttcgcgcagagcggggcgcagtggctggttatcctcggcgatgtgctcaatcacgggccgcgcaacgcgctgccggaagggtatgcgccggcgcaggtcgccgagcggctgaacagcgtcgcgcagcggattatcgccgtccgcggtaactgtgatagcgaagtcgatcaaatgctgctgcatttccccattactgccccctggcagcaggtgcttagcgaaggctaccgcctgtttttgacccacggtcatctctatagtccggataatttgccgccgctcgccgctggcgatgtactggcttatggtcatactcatattccggttgccgagaaacgcggcgatatattcctcttcaatcctggctctgtgagcatcccgaaaggcggctttgccgccagctacggcatgctggaagatgatcggctgcaggttttcgcactcaatgataatcaggttattgcagaggccgcgatttacccgtaa

SEQ ID NO: 90681 - DNA, 645 bp, Enterobacter aerogenes
atgaatcagcctgttattaccctgtggtccgatgccgattttttctccccctatgtgatgtccgtgtacgtggcgctgcaggaaaaaagcctgccgttcacccttaaaaccgtcaatctcgacagcggcgagcatctgcagccgggctggaagggctactccgcgacacggcgcgtgccgctgctggaagtggataatttttcgctgagcgaatcctcggccatcaccgaataccttgacgagcgctttgcgccgccggaatgggagcgcttgtatccgcatgacctgcaaaaacgcgcgcgggcgcggcaggtgcaggcctggctgcgaagcgatctgatgcccatacgcgaagaacgttctaccgacgtggtgtttggcggcgcgaagaagcctgcgcttagcgctgcggggcaaaccagcgcggctaaactcttcgctaccgccggcgcgcttttggcgcatggcggacagaatctgtttggcgaatggtgtatcgccgatgccgatcttgcgctgatgctaaaccgtctggtgctgaacggcgatgaggtgccggaagcgctggcggactatgcgaccttccagtggcaacgggcatctgttcagcgttatgccgcactgtcggctaaacgtagcggctga

SEQ ID NO: 90682 - DNA, 630 bp, Enterobacter aerogenes
atgatcgatctttactacgcacctacccccaacggccacaaaatcactctttttctcgaagaggcgcagctggcctatcgcctgatacgcgtcgatatcggcaaaggtgaacagtttcgcccgcagtttctggctatctcgccaaataataagatcccggcgatcgttgaccacgttccggtcgacggcggcgcgccgttaagcctgtttgagtcaggagagatcctgctctatctggcggagaaatcgggaaaattactaagcggcgagctgcgcgagcggcatactaccctgcaatggctattctggcaggtcggcggtctggggccaatgcttgggcaaaaccaccactttaaccatcacgcgcctcaggctgtcccttacgccattgaacgctatcaggtcgaaagccagcgcctgtatggcgtaatgaaccggcgtcttgaaaccagtccatggttgggcggcgagcactacagtatcgccgatatcgcctgttggccatgggttaatgcctacccgcgccaacgcatcgatcttagccagttcccggcggtgcataactggtttgaacgcatccgccagcgcccggcaacgcaacaagcgctactcaaaacgcaacattattaa

SEQ ID NO: 90683 - DNA, 363 bp, Enterobacter aerogenes
atgtctcagccagacgccattattcgtattaagaacctgcgcctgcgtacttttattggaatcaaagaggaagagatcgccaaccgtcaggacgtattggtgaatgtggtgattcactatccggccgataaggctcgcgacagcgaagacatcaatgatgccttgaactatcgcaccattactaagcgtatcatcagccatatcgagaataaccgcttctcgctgctggaaaaattaacccaggatgtgctcaatatcgcatgcgaacatcactgggtcacttatgctgaagtagagatcgataaacttcacgcgctgcgctatgccgactcagtatcgatgaccatgagctggcggcgctaa

SEQ ID NO: 90684 - DNA, 894 bp, Enterobacter aerogenes
atgaaaatcctgctcactggcggtaccgggctcattggtcggcatcttattaccaggctgctggaacttgggcaccagctcacggtttccacccgcaaccctgaacgcgcgaaagcccgtctcgatccccgcgtcacgctgtggcgcggtttcgaagggcaaaacaacctcgatggctttgacgccgtcattaaccttgccggcgaaccgatcgccgataagcgctggacggcagagcaaaaagagcgcctgtgccacagccgctgggacatcacccggcaactggtcgcgttatttaaagccagcgaaacaccaccctccgtgctgattagcggttccgctaccggctattacggcgatctcggtgaagtcgtggtaaccgaggaagagccgccacacaacgaatttacccataaactttgcgcccgctgggagcaaatcgcctgtgaggcgcaaagcgatcgcacgcgcgtgtgcctgttgcgcaccggcgtcgtattagcgccgcggggcgggatcctggccaaaatgacgccagcgtttaagctcggcctgggcggccctatcggcgacggtcgtcagtatctggcgtggatccatatcgatgatatggtgaacgggatcttgtggctgctggataacgatctgcgcggcccgttcaatatggtctcaccctatcccgtacgtaacgaacagtttgcccacgcgctcggccacgcgctcaatcgcccggcgattttccgcgttcccgccgccgccattcgcctgctgatgggagaatcttcagtactggtgctcggcggccagcgcgcgctgcctaaacgcctggaagccgccggctttagctttcgctggtacgatctggaagaggctctgaaggatgtgttgagctaa

SEQ ID NO: 90685 - DNA, 813 bp, Enterobacter aerogenes
atgaaggaacatccggacaaacatatcaggaaggcgattgccacggcgctggcgcgggggtggatattgctgcctgcaggtaaaagcgctcattgctttggccgcctcgtctgcggcgtgactgaacaccgggaacatatgatgagcatttggtcgacgcccgccgtccctgaaaaccacgcccggcaaataatcagaatggtcgaacggtgtcccatcccggctaccgcgcgcatcatgcataaggaacgcaaaacgatgccgatatttaattttacgctgacgctgtccggcgtcaccagtcaaacgccaggactggaagatgcgctctttgccgcaggctgtagcgacgcgctggtctgcttttacggtactgcggtctacctcgagttcgatcgcgagggccaatcgctggagcaggcggctctgtccgccatccgcgatgtagaaaccgccgccctgccagatatccgcgtagagtccatcgattcgacactggtcgggctgagcgatatcgccgaacttatcggcgtctcccgccaggcgatcgcgctattaaaagagggcgctcgcggcagcgggcggtttcccggccccgtacagcgcgtgaagggcaattcccctctctggcgctggaaatccgtcgttgaatggttagtcgcggaaaagcgcatcgccgccgattcgccgatggtggctaacgccctactgctggatagcctcaacctggcgctacagcttcgccgttcaccggaaaatcaccgcgtgcagcgctacctgcaaagtctgagcgccacgtcacccacgggctga

SEQ ID NO: 90686 - DNA, 405 bp, Enterobacter aerogenes
atgcgttacatgggcgaggtgttaagcgaaacggcgctacacagcgtgtttgaatcccgctgcgaagatcccggcgtctttgtattgcgcgattctgccggcacgccgctgggggatattggtctgcgcatcagcgcgaaaaacccgcacgaggccgacgtcggctacgcgctactgccgcaagcgcagggtcagggctacgccagcgaagcgctgcgcgcgatttgtgattacggctttaccacccttggcatccacgccattaatgcctgggtgctgggcaataatttgggatcgtcccggctgctggaaaagcacggttttgtacgcattcaggtgctggaaaatgcttaccacctcaacggcgtggattacgatgattggatctaccggctggagcgttaa

SEQ ID NO: 90687 - DNA, 774 bp, Enterobacter aerogenes
atgaccgacaataaattaagcgttatcgatctgcataaacgttacggcgagcacgaggtgctgaaaggcgtctcgctgaaagcgaaggccggagacgtgattagtattatcggctcatcgggttccggtaaaagtacctttctgcgctgcatcaactttctggagaagccaagcgaaggaacgattatcgtcaacgggcagaatattggcctggtgcgcgataaagacggccagttgaaggtagcggataaaaaccagctgcgtctgctgcgcacgcgcctgacgatggtgttccagcacttcaacctgtggagccacatgacggtactggaaaacgttatggaggcgccgattcaggtgctcggcctcaacaaacaggaagcgcgcgatcgggcggtgaagtatctggcgaaagtcggtatcgatgaacgccagcagatcaaatatccggtacatctttccggcggtcagcagcagcgcgtgtccatcgcgcgggcgctggcgatggagccggacgtactgttgtttgatgagccgacatcggcactggatccggagctggtgggcgaagtgttgcgtattatgcaaaaactggcggaagaggggaaaaccatggtggtcgtcacccacgaaatgggctttgcccgccacgtctcttcacacgtgattttcctccatcagggaagaatcgaagaagagggacatcccgacgagctattcggcaacccgaaaagccagcgcctgcagcagttccttaaaggttcactgaagtaa

SEQ ID NO: 90688 - DNA, 717 bp, Enterobacter aerogenes
gtgattgaaattattcaggagtactggaaatccctgctgtggaccgacggttaccgttttaccggcgtggcgatcaccctgtggctgttgattgcttcagtggtgatgggcggtatccttgcggtgtttctcgccatcgggcgggtatcgagcaataaatacattcagtttccgatctggctgtttacctatattttccgcggtacgccgctgtacgtgcagctgctggtgttttactccgggatgtatacgctggaaatcgtcaaaggcagcgatctgttgaatgcgtttttccgcagcggcctgaactgtacggtgttggcattgaccttaaatacctgcgcctacaccaccgagatttttgcgggggcgattcgttcggtggcgccgggcgagattgaggctgcgcgggcttacggcttttcgtcagttaagctataccgctgcattattttgccgtcggcactgcgtattgcgctaccggcgtacagcaacgaagtcattctgatgctgcactcgacggcgctggcgtttaccgccacggtgccggatttgctgaaaattgcgcgtgatattaactcggcgacctatcagccgtttaccgctttcggcatcgccgcggtactgtacttaattatttcgtatgtgctgattagcttgttccgcaaggcggaaaagcgctggttgcagcatatcaaaccctcttcgacgcactga

SEQ ID NO: 90689 - DNA, 687 bp, Enterobacter aerogenes
atgctgtacgggttctcacaggttatttttcagggcgcgctggtcacccttgagctggcgcttagctcggtagtgctcgcggtccttattgggctggtgggcgcgggggcgaaattatccgctaaccggcctatggcgctggtgtttgaaggctataccacgctgatccgcggggtgccggatctggtgctgatgctgctgattttctatgggctacagatcgcccttaacagcatcaccgatgcattaggcatggcgcaatttgatattgatccgatgatcgccggtattatcaccctcggctttatctatggcgcgtacttcactgaaaccttccgcggcgcgtttctggcggtgccgaaaggccatattgaagcggcgacggcatttggcttcagcggttggcagacgttccgccgtatcctgtttccggcgatgatgcgctatgcgctgcccggtatcggcaacaactggcaggtgattctcaaagccaccgcgctggtgtcgctgctcggtctggaagacgtggtgaaggcaacgcagctggcgggcaaaagcacctggcagccgttctatttcgctatcgtctgcggggcgatctatctggtgtttaccacgatttccaatggtgtgctgctgctgcttgaacgccgctactccgtgggtgtgaagagggctgacctgtga

SEQ ID NO: 90690 - DNA, 783 bp, Enterobacter aerogenes
atgaaaaaactggcgttgtctctttctttggcgctggccctttccagcgtttccacggtattcgcagctattccacagaaaatccgtatcggtaccgatcctacttatgcgccgttcgaatcgaagaatgcgcagggccaattgatcggttttgacatcgatctggcgaaagagctgtgtaagcgtattaatacccaatgtaccttcgttgaaaacccgctggatgcgctgatcccctcgttaaaagcgaagaaaatcgatgcgattatgtcctcgctgtcgattaccgaaaagcgccagcaggagattgccttcaccgacaaactttatgccgctgactcccgtctggtggtgaaaaagggcagcgatattacgccagacctgagcaagctgaaaggcaagcgcattggtgttctgcagggcaccactcaggaaacctacggcaacgagcactgggcgccgaaaggcattgaaattgtctcctatcagggccaggacaatatctattccgacctgaccgcgggccgtattgacgccgcgttccaggatgaggtcgccgccagcgaaggtttcctcaaacagccgattggcaaagattatcagtttggtggcccgtccattaaggatgagaagttgtttggcgtcggtaccggcatgggcctgcgtaaagacgacaccgagctgcgtgaagcgctaaataaagctttcgccgagatgcgtaaagacggcacttacgacaagctggcgaagaaatatttcgactttaacgtgtacggcgactaa

SEQ ID NO: 90691 - DNA, 783 bp, Enterobacter aerogenes
atgaagaagacgatcctggctctctcgttaatcatgggaatcagcagcgccgccagcgtatctgcggcgctgccgcaaagtatccgcatcggcaccgataccacctatgcgcctttctcgtcgaaggattcgaagggcaactttattggctttgacatcgatctgggcaatgaactgtgctcgcgtatcaaggtgaagtgcacctgggtgggcagcgattttgacgcgctgatcccctcgctgaaagcgaagaaaatcgacgcaattatctcgtcattatcgattaccgaaaaacgacagcaggagattgcgttctctgacaagctgtatgcggcagactctcgactgattgccgcaaaaggctcgccgattcagccgacgctggagtcgctgaaaggcaagcatgttggcgtactgcagggctccacccaggaggcctatgccaacgaacgctggcgcagccagggcgtggatgttgtcgcctatgctaaccaggatctcatctattccgacctcgccgcagggcgccttgatgcggcgctgcaggatgaagtcgcggccagtgaaggtttcctcaaacaacctgccggtaaagactacgcgtttgccggtccttccgttaaagacaaaaaatacttcggcgatggtaccggcatcggcctgcgcaaagaagatggcgagctgaaagccgctttcgacaaagcgctgggtgaaatgcgtaaagacggcacctacgacaaaatggcgaagaaatacttcaactttaacgtctacggcgattaa

SEQ ID NO: 90692 - DNA, 594 bp, Enterobacter aerogenes
atgcgcaaggggtataacatcgtgaaacgactcattatcggcatttccggcgccagcggcgcgatttacggcgtacgcctgctacaggtattgcgtgacgtcgcggaggtcgagacccatctgataatgagccaggcggcgcgtcagacgctgtcgctggaaaccgactactcgctgcgggaagtgcaggcactggccgatgtggtacatgacgcgcgcgatatcgccgccagcatctcctccggctcgtttaaaaccagcgggatggtcattctaccgtgctcgatgaaaacgctctctggcatcgtcaatagctataccgatggtctactgacccgcgcggcggacgtggtgttaaaagagcgtcgcccgctggtgctttgcgtacgcgagacgccgttccatctggggcatctgcgtttaatggtgcaggcggcggaaatgggcgcggtgatcatgccgccggtgccggcattctatcatcgtccccagtcgctggatgatgtgattaatcagacggttaatcgggtgatcgatcagtttgatattgagctgccgcatgacctgtttacccgctggcaaggcggagcatga

SEQ ID NO: 90693 - DNA, 1518 bp, Enterobacter aerogenes
atgtgcggtattgtcggtatcgccggtgttatgccggtaaaccagtcgatttatgacgcgttaacggtgcttcagcatcgtgggcaggatgccgcgggcatcatcaccattgatgcaaataactgcttccgtttgcgtaaagctaacgggctggtgagcgatgtgttcgaagcgcgccacatgcagcgtatgcagggaaatatggggattggccacgtccgttacccaacggcaggcagttccagcgcttctgaagcgcagcctttttacgttaactcgccctacggcattacgttggcccataatggcaacctgaccaatgcccacgagctgcgtcaaaagctgtttgaagaaaaacgccgccacatcaacaccacctccgattccgaaattctgctcaatatcttcgccagcgagctggataatttccgtcattacccgctggaagccgataacattttcgccgcgattgccgcgacgaaccgccagatccgcggcgcatacgcctgcgtggcgatgattatcggccacggcatggtcgccttccgcgacccgaacggtattcgtccgctggtgctcggcaagcgcgatatcggcgatggccgcaccgagtatatggtcgcctccgaaagcgtggcgctggatacattgggctttgaatttctgcgcgacgtcgcgccgggcgaagcggtctacatcaccgagaaaggccagctgtttacccgtcaatgtgcggaaaacccggtcagtaacccgtgcctgttcgaatacgtctatttcgcgcgtccggactcctttatcgacaagatttccgtctatagcgcccgtgtgaacatgggcacgaagcttggcgagaaaattgcccgcgagtgggaagatctggatatcgatgtcgttattccgatcccggaaacctcctgcgatatcgccctggagattgcccgtatcctcgataaaccctatcgtcagggtttcgtcaaaaaccgctatgttggacgtacctttatcatgccgggccagcaactgcgccgtaagtccgtgcgccgtaagctgaacgccaaccgtgccgaattccgtgataagaacgtgctgctggtggacgactctatcgttcgcggcaccacctctgaacagattatcgaaatggcgcgcgaagccggtgcgaagaaagtgtatctggcctccgcggcgccggaaattcgcttccctaacgtttacggtatcgatatgccgaccgccaacgagcttatcgcccacggtcgcgaagttgacgagatccgtcagatcatcggcgctgacggcctgattttccaggatctgaacgatctgatcgaagcggtgcgcgccgaaaacccggacattcagcagttcgagtgttcggtctttaacggcgtatacgtcaccaaagacgtagaccaacagtatctcgattaccttgattccctgcgcaacgacgatgcgaaagcggtccaactgcaaaccgaagttgaaaacttagagatgcataacgaaggctaa

SEQ ID NO: 90694 - DNA, 489 bp, Enterobacter aerogenes
atggtctggattgattacgccattattgcggtaattggtttttcctgtttggttagccttatccgcggctttgttcgtgaagcgttatcgctggtgacatggggatgtgccttctttgtcgccagtcattactacacttacctggctgtctggttcacgggctttgaagacgaactggtccgaaatgggattgctatcgcgatattgtttatcgcaacgcttatcgtcggcgctatcgttaactatgtgataggcgctctggtagagaaaaccggtctgtcaggaacagacagggtgttggggatctgttttggcgccctgcgcggcgtgctgatcgtctccgctattctgttctttctcgatagcttcaccggtatggcaaaaagtgaagactggcaaaagtctgagcttatcccgcagttcagtttcgttatcagatggttctttgactatctgcagagctcgtcaagtttcttgcccaaagcataa

SEQ ID NO: 90695 - DNA, 693 bp, Enterobacter aerogenes
gtggcgagtaagtttcagaaccgtttagtcgggacgattgtactggtagcgctgggggttattattctcccgggtctgctcgatggccagaaaaaacattatcaggatgagtttgcggcgatcccgttggtgccgaagccgggcgatcgcgatgagccggatatgctgccggcggctactcaggcgctgccttcgcagccgccggaaggcgccgcggaagaggtgagagcgggagacgccgcggcgccatcgctggatccttctcgcgtcccggtaaacaacaatagcttcgatgaagtccaggagccggtggtggccgccaagccgcagccgaaaccacagccgaagccggttgagaaaccgcagcctcagcaggtcgcgcagacgccgcctccggccaaaacgcaaccgcagccgcaacagcagcaggccgcgattccggcgccgaccgggaaagcctatgtagtgcagttgggggcgttgaagaatgccgataaggttaacgaaatcgtcggtaagctgcgttcctcgggctttaaagcctggacatcgccatccacgccggttcagggtaaaattacccgtattctggtggggccggatgcgtcgaaagacaagctgaaggggcaactcggcgagctgcagcagatttctggtctgagcggcgtggttatgggatatagcccgaattaa

SEQ ID NO: 90696 - DNA, 1269 bp, Enterobacter aerogenes
atggaaaaagatcctattcctcaggccacgtcgcccctggctacgtggctttcttatctggagcatctgcacagtaaagccatcgatctgggactggcgcgggtgagcgaagtcgccggacggatggcgatattaaaaccggcgccgtttgtctttacagtagcgggtaccaacggcaaaggcaccacctgccgaacgctggaatcggtgctgatggcggcgggctataaagttggcgtgtatagttcgccgcatctggtgcgctataccgaacgcgtgcgtatccagggcgccgagctgccggaagcggcgcataccgcctcatttgccgaaatcgaagcggcgcgcggcgatatctcgctgagctattttgaatttggcacgctgtccgcgctatggctgtttaagcaggcacagctggatgtggttatcctggaggtggggctgggtggacgcctggacgccacgaatatcgtcgatgccgacgtcgcggtggtcaccagcatcgcgctggatcataccgactggctggggccggatcgtgaaagcattggccgtgaaaaagcgggtatcttccgcgctggtaaaccggcggtggtgggcgagcccgatatgccgcagacgattgccgacgtggcgaatgaaaagggtgcgacgctgctgcgccgcgaccatgactggcgttatagcatgacagaccagtcatggaactttaccgatcgtcagggcgagttggcagggctgccgctgccgcaggttccattgcccaatgccgcgacggcgttggcggcgctgcgcgccagcgggcttaacgtcgctgaacaggcgctgcgcgacggcattcatcacgccatgctcccgggccgctttcagattatcagcgaggcgccgcgggtgatcctcgatgtcgcgcataacccgcacgcggcggcttatctcgccgggcgtctcaaaagcttagcgaaaacggggcgcgtactggcggttattggtatgctgcatgataaagatatcgccggaaccctggcgaatctggcgcctgaagtagacgcgtggtactgcgcgccgctgggagggccgcgcggcgccacggcggaccagctgattgcgcatctgcgcgcgggccaacgttatgacagcgtagcgcaggcgtggcatgccgctatggcggatgccaaagccgaagatacggtgctggtgtgtggttccttccacacggtggcgcatgtaatggaagagatagacgcggggagaatcggtggcgagtaa

SEQ ID NO: 90697 - DNA, 978 bp, Enterobacter aerogenes
gtggcattatgcgccccttgcgacaaaactggcatcgaccaggttcaggtagaaaggttatcaatgagctggattgaacgaattaaaagcaatataacccccacccgtaaggcaagtattcctgaaggtgtatggaccaagtgcgacagctgcggtcaggtactgtaccgcgcagagctggagcgcaacctggaggtttgccctaagtgcgatcaccacatgcgtatgtcggcgcgcaaccgcctgcatagcctgctggacgaaggttctctcgtggaactgggtagcgagctcgagccaaaggatgtgctgaagttccgcgattcgaaaaagtataaagaccgtctggcctctgcacagaaagagaccggcgagaaagacgcgctggtggtgatgaaaggcaccctgcacggcatgcctgtcgtggcggcggcatttgaattcgcctttatgggtggttcgatgggttccgttgtcggcgcgcgtttcgtccgtgcggttgagcaggcgctggaagacaactgcccgctaatctgcttctccgcttccggcggcgcccgtatgcaggaagcgctgatgtcgctgatgcagatggcgaagacctctgcggcgctggcgaaaatgcaggaacgcggtttaccgtatatctccgtgctgaccgacccgaccatgggcggcgtctccgcgagcttcgcgatgctgggcgatctgaatatcgccgagccgaaagcgctgatcggcttcgccggtcctcgcgttatcgagcagaccgtgcgtgagaagctgccgccggggttccagcgcagtgagttcctgattgaaaaaggggcgatcgacatgattatccgtcgtcctgaaatgcgtctgaaattagccagcatcctggcgaaactgatgaaccttccttcgccgcaggccgatgcgcctcacgagggcgaggtggtaccaccggtaccggatcaggaaccagaggcctga

SEQ ID NO: 90698 - DNA, 660 bp, Enterobacter aerogenes
atggacctgattcattttttgattgatttcatcctgcatattgatgtgcaccttgcggagctggtcgcacagtatggcgtctgggtttacgccatcctgttcttgattctgttctgcgaaaccggcctggtggtgacgccgttcctgcccggagattctctgttgttcgtcgccggcgcgctctccgcgctgccaactaacgatctcaacgtacacctgatggttgcgctgatggtcattgccgccgttgttggcgatgccctgaactacaccatcggtagattgttcggcgaaaagctgttcagcaatccgaactcgaagattttccgtcgtagctatctcgacaaaacccataccttctatgaacgccacggcggcaaaaccatcatcctcgcgcgttttgtgccgatcgtcagaacctttgcgccgtttgtggcgggaatgggtcacatgtcctatcgtcattttgcggcgtacaacgtggttggcgcgctgctgtgggtactgctgttcacctacgccgggtacctgttcggtgatttgccgatcgtacaggaaaacctgaagctgctgatcgtggcgattatcgtcctgtcggtactgcctggcgttatcgaagtgattcgccatcgccgggcggcggcaaagcaggctaaataa

SEQ ID NO: 90699 - DNA, 813 bp, Enterobacter aerogenes
atgtctgaagcacagcagcagccggtgtataaaatcgcgctgggcatcgagtacgacggcagcaaatactacggctggcagcggcaaaacgaagttcgcagcgtgcaggaaaagctggaaaaggcgctgtcgcaggtggcggccgaaccggtacacgtattctgcgccgggcgtaccgacgccggcgtacacggtaccggccaggtggtgcactttgaaacccgcgctcagcgtaaagacgccgcgtggacgctgggcgtaaatgcgaatttacctggtgacatcgccgtgcgttgggtgaagcatgttgcggacgattttcacgcccgcttcagcgcgacggcccgtcgttaccgctacgtcatctataatcaccgcctgcgcccggcggtgttaagtcagggggtgacgcattattaccaccctctggatgccgggcggatgcatcgcgccgcgcagtgtttaattggcgagaatgacttcacctcgtttcgcgcggtgcaatgtcagtcgcgtacgccgtggcgtaacgtgatgcatatcaacgtgacccgtcacggagcttatgtggtggtggatattaaagcgaacgcttttgttcatcatatggttaggaatatcgtcggcagcctgatggaagtaggcgccggaaaccagccagagagctggattgcagaactgctggcggcgaaggaccggactctggctgccgcgacggcgaaagcggaaggattgtatctggtgtcggtggattatccggcccatttcgacctgccggtgatgccgatgggcccgctgtttttggcggactaa

SEQ ID NO: 90700 - DNA, 1014 bp, Enterobacter aerogenes
atgtctgaaggctggaatattgccgtactgggcgcaaccggcgccgtaggcgaagccctgcttgaaacccttgctgaacgccagtttccggtaggcgaaatttatgcgctggcgcgcaatgaaagcgcgggcgaacatctgcgttatggtggcaaatcggtcatcgtgcaggacgccgccgactttgactggacccaggcccagttggctttcttcgccgcgggcgtcgaagccagcgcggcgtatgtcgaagaagccaccaacgccggttgtctggttatcgatcttagcggcctgtttgcgctggagccggacgtgccgctggtggtgccggacgtcaacccgttcgtgctcggcgactaccgcaaccgtaacgtgattgcggtaccaaacagcctgaccagccagctgctgacggcgctgaagccgctgatcgatgatggcggcctgtcgcgtattaccgttaccaacctgctgtctgcctcggcgcaggggaaaaaggcggtcgatgcgctggcggggcagagcgcgaaactgctgaacggtattccgattgatgaggacgatttctttgggcgccagctggctttcaacatgctgccgattctgccggatcgcgaaggtagcgtgcgcgaagaacgacgtatcgtcgatgaagcgcgcaaaattctgcaggatgacggcctgatgatttccgcaagcgttgtgcaatcgccggtcttctatggccatgcgcagatggtgaattttgaagcgttgcgtccgctggcggcggaggaggcgcgcgacgcctttacccgcggcgaggatatcgagctttctgaagagggcgagttcccgacgcaggtcggcgatgcttccggtaacgcacgtctgtccatcggttgcgtgcataacgattatggcatgcccgagcagattcagttctggtcggtggccgataacgtccgctttggcggcgcgctgatggcggtgaaaatcgccgagaagctggttcaggagtatttgtactga

SEQ ID NO: 90701 - DNA, 1137 bp, Enterobacter aerogenes
gtgaaaatcctcgttgatgaaaatatgccctatgcgcgtgagctttttagccgtttgggagacgtgcaggccgttcccggtcgtcccattccgcaggaagcgttaaccgacgccgacgcgctgatggtgcgttccgtcactaaggtgaatgaagcgctgctctccggtaaggcaattaagtttgtcggcaccgccaccgcaggcaccgatcatgtcgatcaagcgtggttacagcaagcggggattggcttttccgccgcgccgggctgtaatgcgatcgcggtggtggagtatgttttctcggcgctgctgatgctcgccgagcgcgacggattcgcgctggctgatcgtaccgtcggtatcgtcggcgtcggcaacgttggcgggcgtttgcaaaaacgtctggaagcgctgggaattaaaacattactctgcgatccgccgcgcgccgatcgtggcgatgaaggcgacttccgcagcctggacgagctggtgcagcaggcggatgtcctgactttccacacgccgttgtttaaagacgggccgtataaaacgctgcatctggccgatgaagcgctgattagccgcctgcagccgggggcgatcctgattaacgcctgccgtggcccggtggtggataacgcggcgctgctcaagcgcttgcaggccgggcagcagctgagcgtggtgcttgacgtctgggaacccgaaccggatctgaataccgagttgctggcgcgtgtcgatatcggtacatcgcatatcgccggttatacccttgaaggcaaagcgcgcggcaccacccaggtttttgaagcctatagcgcgtttattggccatccgcagcaggtggcgctggatacgctactgccggcgccggaatttggccgcatcactctgcacggcccactcgatcaggcgacgctgaaaaggctggtccatttggtgtatgatgtgcgccgcgatgatgcgccgctgcgtaaagtggcaggcattgccggtgaattcgacaagctgcgcaaaaattatcaggaacgccgcgaatggtcttccctgtacgtacagtgcagcgatgaaaaagcagcgacgctgctgcgtcagctcggttttaatgccgtacatcatcctgttcgttaa

SEQ ID NO: 90702 - DNA, 984 bp, Enterobacter aerogenes
atgacaccacccgtttcaggtatgtccgatcgccctccggggactggcccatccggcgcatccgccgtgggcccaaacgcgctcaccatgcagcaacgcaccgttctggagcggctgataacgcgtctggtgacgctgacatcgcagcaaaacgccgaagtgtgggcctgcgtgaagcacgatctgggtctgaaaggcgacacgccgctgctggcgagccatttcagcgcggctgagagcaacctgaatcagcgcttaagtatcgctcagcaaaaccaccaccatcggcaaattctcgcccagctcagcgaactgctgactcagggaaataaccgtcaggcggtgagcgattatatccgccagaattacggtcaaaccgtgctgcatgcattgacccagccgcagctggagaatgttttgcaattactgcaaagcggtcaactctcgattcctcaaccccagctgcgcccgccaacgcatcgcccactgctgcctgcggagcacaacacgctgaatcagcaggtgaccaaactggccgccgccactggcgaatccagcaagcttatctggcaatcgatgctggagctaagcggcgtaaaaagtggggaactgatcccggccacccactttactcccctgtcttactggctacacgcgcggcaaacgctcagctctcagacagcgccgacgctaacctcactaaaagccgcgttaaaacagcccctggaaaccggtgagtggcagagagtcatggattttgcgcaaagtagctggcatgcatcggcgcaaacgccgctcagcccggcccagttgctgatgttgcttaacaaaattttcgtgctcagggtcgccagagcgcaggaaacgctggcgatcccagcagtacaggctccaccatcgtcaccatggttagtgtttaaaaaaccgtgggttatcgtgctgacgttaatcgtagtgcttggcctgttgtggctggcgacctga

SEQ ID NO: 90703 - DNA, 837 bp, Enterobacter aerogenes
atgattaaactaattatcaccgatcttgatggaacatttctgaatagtcatggtgattataatcgtcagctgttcacgcaggttaaacagatcatgcaggagcaaggagtaaattttgccctctgtactggcaaacaatgtgaacgtgtcgaagaattgtttggtaaagaggccagcgatttctggatccttggcgatagcgccacgcgaattaagcacagcggagagtatatttatcaatcccttattgataatgccctgggacgcgagatgattggcgtactggaagaggtgaataaggaacctgtcattattgcctgtaccgccgaaggcgcatttattcgagattctgtctctccgcaaatgttgcaaaaagtcaaaatgtcgtatgctaaagtgattcaggttgctgatttttctgaagtgaaatatgactttgtgaaaatatccgtatttgatattaaagggcgctgcccgcaaattaaaccattcctcgccccttactttgataaggcctatatagtggtatcagaagatgcgtggattgatattgctgacgttggagttcacaaaggccatacggtagagattttacaaaaccaactgaatgctaccgcagaggagacgatggtctttggcgacggtttgaacgacatcgaactgatgactcgggcgacctggagctttgcgatgcgtaatgcgtttgaagaaacgaaacgggcggcgaactttattaccggaacaaatgatgatgatgccgtaatgaccaccatcatacgtttgttatcgctacaggattcaggtcgccagccacaacaggccaagcactacgattaa

SEQ ID NO: 90704 - DNA, 1674 bp, Enterobacter aerogenes
atgtattcaagtcaattgaaggtgagcttattgtctttatcggtactgctggctatttcgacaaatgatgtgatggcggctaaattaaccattgaacagcgtctggaattactggagtcagaactttcggcgaataaaaaagaactgcaaaaaacacaatctcaattatcgacctataaaggcaaggtagccgaattacaaaaaagcattaaggagaatgaaaaacgtcagctcactgcgggttattcaacggcaacgtcgccggtggcggaaaatattgctaacgagaataatgaactgagtaaaaaagccgccccggtgcaggtgaaagccagtcagcaggtggcggttatcgataccgacggtcagaagccgaaactggaaaacgtcaccctgaaggatatcagtaaatttgtcaaagacgatattggctttagctaccaggggtacttccgttccggctgggggacgtcaaaccacggatcgtcacagacctatgcccccggctcgctgggccgttttggtaatgaaatgagtggctggttcgacttaacgctgaatcagcgggtctataaccaggatggcaaaacggcgaatgccgtcgtgacatacgacggcaacgtcggcgagcagtataacgacgcctggtttgccggccaggataccgacagcattttgcagtttagtgatattttcctgaccaccaaaggtttcctgccgttcgcgcccgaggcggatttctgggtcggtaaacataaactgcctgagtatgaaattcagatgctggactggaagtcactgaccactgacgttgctgccggggtcgggattcagaactgggcgctgggggtgggtcagctggatgcttctgtcagccggaacgacgtcgacgtgtactcccgtgatttcacgcaaaccacccagatgaacaccaactccgtcgacctgcgctatcgcaatattccgctgtggcagtcggggtcgctgtcgttaatgggcaaatacgcgtttgctaataaaaatgacgagcaggagagaaacgaagataacaacagctacttccggttcaaagatacctggatggccaccgctattattcgtcaggagctggagcgtaaaggcttcaacgaatttacgctgcaggtggcgaataactcatacgccagcagtttcgccaacttctccggcgccagtaactccatggccagcggacgctattactatggcgatcatactaacggcgtggcctggcgtttgatctcgcagggagaaatgtatcttgccgatcgtattatcatggcgaattcgctggtatgggcccacggtaacgatgtctatagctatgaaagcggggcgcacagcgattttgacagcctgcgcgcggtgatccgcccggcctggatttgggatacctggaaccaaagcggcgttgaattaggctggtttgcgcagaaaaacaaaactgagcaggggcgttctctgaaagagtctgcgtataaaacgacgctttatcacgccctcaaggttggaccaagcctgttaggctctcgtcctgaaattcgcttctacggtacgtatattaatattctcgacaacgagctgtcgcagtttaaatttaatgataatagtaaggatgagtttatgtttggcgttcaggctgaagtctggtggtaa

SEQ ID NO: 90705 - DNA, 312 bp, Enterobacter aerogenes
atgtttgcagatgaaagtacggtcatggaactgctgatctatgccggtcaggcgcgctcagacgccatggaggcgatagccgcgtcccgacagcgcgagtggaggcgggctacggagttgatggccagctccgacgcggcctgccgcgccgcacataagatccaaacgatgttgatcggtgaggacgaaggctgtggaaaaataaccgttaaccttattctggtacacgcgcaggaccatttaatgactgccatgctatgtcaggatctcgctaaagaaattattgctttacgcaacgaactctctgcctga

SEQ ID NO: 90706 - DNA, 1323 bp, Enterobacter aerogenes
atgagtttcatggatacctttgagcgtggcatggaaaaaattctcgtgcctgtcgcgattaaattaaattctcagatccacgtttcagcgattcgcgatgcgtttattctttcgtttcccatcgtaatggccagttcgctgattattcttatcaactttgctattttatcgcctgacggatttatcgccagtattctgcatttaggctcgatattccccaatctggcggaagcgcagcagattttcaccccggtaatgaacgggtcggtcaatatcatggcgatattgatcacctttctggtggcgcgcaatatggcgatcagctatcagcaggacgatctcttgtgcggcctgacggcgatcggcgccttttttgtcgtctacaccccttacaccatcattgatggccaggcctatctggcgactaaatatcttggcccgcaggggttgtttgtggcgattatcgtcgcgctgatttccagcgaggtcttttgtcgcctggcgcgtaaccctaaagtgaccatcactatgcctgccgcggtgccgccggcggtggcgcgttcatttaaggtgttgttgccgattttcttcgtgatgatcttcttttcgatcctcaattatctgttgacgcgtatttctccaaatggccttaacgacctgatttatacccttattcaggccccgctgaaggatatggggaccaacattgttaccgttctggtgttggggctggtggcgaatttcctctgggtactggggattcatgggccgaataccgtggccgctatccgggagactattttctcggaagccaatctcgaaaacctctcctatgccgcctcacatggcagcacctggggagcgccgtatcccatcacctggaccggtatcaacgatgcgtttgctaactgcggtgggtcgggtatgacgctggggttgctgctggccatttttatcgcctcccggcgcaaagattaccgtgacctggcaaaaatggccttcgtgccgggcctgtttaacatcaatgagccggtgatgtttggtctgccgattgtgcttaaccccatcctagtgatcccgttcattctggtgccgtttgtgaattcattgattggctatttctttatcagcatggagtttattccgccgattgcttatgccgtcccgtggaccacacccgggccgcttatcgccttctttggcacgggaggcaactggctggcgctgtttgtcggcatcctgtgcctcgcggtttcaacactgatttacttaccgtttgtgattgccgctaacaaggtcaataccgcagcggcggcggaatag

SEQ ID NO: 90707 - DNA, 315 bp, Enterobacter aerogenes
atgaaaaatatattgttagtgtgtgcagcaggaatgtcgaccagtatgttagtgaagcgaatgcaggagcaggcggctaatattaaggtttcggtgaatatcaatgctctggctatttctgaagctaaagaaaagattaagaacaacgaagtggatgttgtgcttttaggcccgcaggtgcgttttcaaaaaaatgaaatagaagaggtggctcagggtaaaatgccggtagcggtgattgatatgaaatattatgggcagatggacggtaaagctgttctggataatgcactggcattactggcaaaacgttag

SEQ ID NO: 90708 - DNA, 738 bp, Enterobacter aerogenes
gtggtttacaaaaatatcgtcaatttgcttaaaaacaaaattaatagcccgttctacaacattggcgatcttctgccagccgaaaaagagttagcagaactttatgatgtttcacgcaatacgttacgtaaggcgctgaaaaccctggaagaggatggtttaatcgaacgccgacatggctcaggcacatggattagaaataagcatttccaggcgtcggtgacgcatttagacagttttaccgaaattgcccgtaatcaggggaaaacaccctccagccagatcctaaaatttgagttacagccagcctcggaggaaattgcccggggactgcaattgcagcacggtgaagcggtatattatgctaaaagattgcgttttatcgataatattgcgatgcaattagaggaaacctggctgtcagcgacccgttttcccgacctgaccatcgcgcatatgaagaaatcgaagttttcatatatagaaaacgaatgcggagtaagaataaatggatgttacgaatcaatagtgccgatactgccaacgcctgagctggcaaccctcctgcatatcagcgctaaagacccgattattcgcatgcagacccaggcgattgatgaacaccaccagcctatcgattactccattttgtataccaatatgttcgagttccaggtgaagtattatctgccgcggcagacggcgtccggcctgcccgcgggcaagaccggaccataa

SEQ ID NO: 90709 - DNA, 1182 bp, Enterobacter aerogenes
atgtccgcagcgacaaaaacgataaacaacgcttcagagaatttctcgctatttcgcattacctttgcggtttttctgacctatatgaccgtggggttgccgctaccggttatcccgctatttgtgcaccacgatctcggctttggcaacacactcgtcggcgtggccgtcggcatccagtttctcgccacggtattaacccgcggctatgccgggagactggccgatcagtacggcgcgaaacgctcggtgctgcaaggaatgttggcctgtgctctggccggctgcgcctggctggcggcggcgctgttgccggtgccggtaatggccaaatttggcctgctggtgctgggacgcttgattctcggctttggtgaaagccaactgctgaccggcaatttaagctggggattagggctggttggcccgcggcgttccggtaaagtgatgtcgtggaacggcatggcgatgtacggggcgctggcggtgggcgcgccgctggggctgctgatttacagccgcttcggcgtggcgacgctggcctgcgtcacgatggcgctgccgctgctggcgtgggcgattaacggcacggtccgtaaagttcccgcccacggcggcgaacgtccttcactatggagcgtcatcggcatgatctggcggccggggattggtctcggcctgcagggcgtcggctttgcggtgatcggcacttttgtttcactctatttcgccagccacggctgggcgatggccggcttcacgttgaccgcgtttggcggcgcttttgtcctgatgcgtattttgttcggctggatgccggatcgctttggcggcattaaggtggcgatggtatcactgctgattgaagcgattggtctgacgctgctgtggcaagcgccgggcgcctgggtggcgctggcgggcgccgctttgaccggctgcggttgctcgctcatcttcccggcgctgggtgttgaggtagtcaaacgggttccggcccaggttcgcggcaccgcgcttggcggctatgccgcgtttcaggatatctcttacggcgtcaccggcccgctggctggcctgcttgccacctcgcttggctatgcttccgtattccttgccggggcgatttgcgcggcgctggggatcctcgtcaccctcgtctcttttcgccgtcagggttag

SEQ ID NO: 90710 - DNA, 1221 bp, Enterobacter aerogenes
atgaaacgtgcagtgattactggcttgggcatcgtttccagcatcggtaataaccagcaggaagtcctggcatctctgcgtgaaggacgttcagggatcactttctctcaggagctgaaggattcaggaatgcgtagccacgtgtggggcaacgtcaaactggataccacgggcctcattgaccgcaaagtagttcgctttatgagcgatgcatctatctatgcttatctgtccatggagcaggcggtagccgacgccggtctggcgccggaagcataccagaacaacccgcgtgtcggcctgattgcaggttccggcggcggctccccgaaattccaggtcttcggcgccgatgccatgcgtagcccgcgtggtctgaaagccgtgggcccatacgttgtgactaaagcgatggcttccggcgtatctgcctgcctcgccacgccgtttaaaatccacggcgtcaactactctattagctccgcttgcgccacttccgcacactgcatcggtaacgcggtagaacagattcagctgggcaaacaggacatcgtctttgccggcggcggcgaagagctgtgctgggaaatggcttgtgaattcgacgccatgggcgcgctgtccactaaatacaacgattctccggacaaagcgtcccgtacctatgacgcgaaccgcgacggtttcgttatcgcgggcggcggcggcatggtcgtggtggaagagctggaacacgcgctggcgcgcggcgcgcatatctatgcggaaatcgtcggttacggcgcgacttccgatggcgcggacatggttgctccatctggcgaaggcgcagtgcgctgcatgcagatggcgatgcacggcgttgatactccgatcgactacctgaactcccacggcacttcgactccggtaggcgacgttaaagagctgggcgctatccgcgaagtcttcggcgacaacagcccggctatctccgccaccaaagcgatgaccggccactctctgggcgccgcaggcgtacaggaagccatctactctctgctgatgctggagcacggttttatcgcgccaagcatcaacatcgaagagatggacgagcaggctgccggccttaacatcgtcaccaaaccgaccgatgctcagttgaccaccgtgatgtccaacagcttcggcttcggcggcaccaacgcgaccctggttatgcgtaaatacaacgcctaa

SEQ ID NO: 90711 - DNA, 1989 bp, Enterobacter aerogenes
gtgaaacaaaacgccatacaacccgccaacctggaattcaaccctgagggtacacctgtttcccgagattttgacgacgtttatttttctaatgacaacggtctggaagagacgcgctacgtttttctcaacggcaaccggcttgatagccgttttccaacccacccgcgcccgctgtttatcgtcgcggagagcggcttcggcaccgggctcaatttcctgacgctgtggcaggcgtttgctgtttttcgtcgcgataatccgcaggctacgctgcaaagattacatttcatcagttttgaaaaatttcccctgaaggccgacgacctgcgcctggcgcaccagcactggccggaactggcgccatgggctgaacagctacaggcgcagtggccgctgccagtcgcgggctgccaccgcctgctgctcgacgatggccgcgttacgctggacttatggtttggcgatatcaacacgctcaccgaccagcttgatgattcgctcaaccaccaggtcgacgcctggttcctcgacggcttcgcgccggcgaaaaacccggatatgtggacgccggggctgttttccgccatggcgcgtctggcccgccctggcggtacgctggcgactttcacctccgctggcttcgtgcgccgcgggctgcaggaggccggctttagcatgcaaaaacgcaaaggctttggtcgcaagcgcgaaatgctaatcggtgaattgaccgccgacgttccgacattcgcgcggacgccatggtttgcccgcagcggtagtcaatcgcgcgaagcggcggtgatcggcggcggtatcgccagcgccctgctctcgctggcgctgctgcgtcgcggctggcaggtgacgttgtactgcgctgacgatgcgcccgccagcggcgcatccggcaatcgtcagggcgcgctgtatccgctattaagccagcacgacccttcgctggcgcgctttttcccggcggcgtttactttcgcgcgccgcctctacgacgccctgccagtggaatttgatcatcaatggtgcggcgtaacccaactcgcctgggatgaaaaaagcacgcagaaaatcgcccaaatgctggcttcagatttaccggcggagatcgcctgcgcggtgacggcggagcaggttgctgaactgaccggcgttgatactggctgcggcggtatctcctatccggccggcggctggctgtgcccgcagcagttgacggcagaattactggcgctggcggcgacgcagggactacgcagccactacggttatcccgtcgaaacgctcagcgcggagggcgacggctggttgctcaatcagcagcatcgtcatcaggcggtagtactggcgaacggacatcgcctgactgattttgcccagaccaggcagttaccggcttatccggtcggcggccaggtcagccatatacccaccacgccggggctttccgccctgcgccaggtgttatgctatgacggctatctgacgccgcaaaaccccgagaatcagcaacactgtatcggcgccagctatcatcgcggcaagacggataccgatttcagcgccgaagatcagtggcagaatcgccagcgcctgattgattgtttcccgcaggcggcatgggcaaaagaggtggatgttagcggcaacgaagcccgctgcggcgtacgctgcgccacccgcgaccacctgccgatggtgggcaacgttccggattatgagaaaacgttgacgcagtacgccacgcttcaccaacagcaggaaaatgtcggcagcgcgccggtctatcacaatctgtttatgctcgcggcattgggatctcgtgggttgtgcaccgcgccattgagcgccgaactgctggcctcgcagatgagtgaagaaccgctaccgctggatagcgaaaccctcgcggcgctgaatccgaatcgactgtgggtaagaaaactgctgaagggaaaagcggtaaaataa

SEQ ID NO: 90712 - DNA, 282 bp, Enterobacter aerogenes
atgatcgcggagtttgaatcacgcattctggcgttaattgacgatatggtagaccacgccagtgatgacgaactgtttgctggcggttatctgcgcggccacctgacgctggcggtggctgagctggaaggggaaggggaacatacggcgcaggcgattaatgataaagtcgccagcagcctggaaaaggccatcagcgcgggcgaactatcgccgccggatcagattctggtgcaagggatgtggaataacctgtaccagcaggcgaaaaatcaggcctga

SEQ ID NO: 90713 - DNA, 549 bp, Enterobacter aerogenes
atgcaacagcaacaccattatcagcagttggtcgagatcttcgacggctgctttgccgatgattttaatacccgtctgattaaaggcgacgacgaaccgatctatcttcctgcagatagcgaagtgccatacaaccggatcgtgtttgctcacggcttttacgccagcgcgctgcacgaaatttcccactggtgtatcgccggcaaggcgcggcgcgagcaggtagattttggttactggtactgcccggacggccgcgatgcgatgacgcaaagcaagttcgaagacgtcgaggtcaagccacaggcttttgactggttgttctgcacggcggcgggatttccgtttaacgtcagctgtgacaacctcgaaggcgactttgagcccgaccgcatcgcctttcaacggcgcgtacatgcccaggtgatgacctatctggagcaagggatccctgagcgaccggcacgctttattcgcgcgctgcaacagtattatcaaacgccgccgctgacggcagaacaatttccgtggccggaagacctgcactaa

SEQ ID NO: 90714 - DNA, 810 bp, Enterobacter aerogenes
atggatagttttgtcgaactgtttatggtgtcgccaatggttttggtggcgctctttttcgtcgcgattctggccggatttattgattccttagctggcggcggcgggttgttaaccgtcccggcgttgatggcggcaggtatgccgcccgctcaggcattggcgaccaataagctacaggcgtgcggcggttccatttccgcgacgctctactttatccgtcgcaaggtagtgaatctcgccgatcagaaactcaatattctgatgacgtttatcggctcgacggcgggggcgctgctggtgcagcacgtgcagtccgatattttgaagcaaatcctgccgctgctggtgatcggcattgggctgtactttttgctgatgcctaagcttggcgaatccgatcgtcagcgtcgcctgtatggtttgccgttcgcgctggtcgctggcggcagcgtgggtttctacgacggtttttttggccccggcgccggttctttttatgcgctggcctttgtgacgctcgccgggtttaatctcgcgaaatccaccgctcacgccaaactgctaaacgctacctccaatattggcggcctgctgctgtttatcattggcggcaaagtgatttgggctaccggttttgtgatgatggccggacagtttatcggcgctcgcgccggttcgcggctggtgctgagtaaagggcagtcgctgattcggccgatgatcgtcatcgtctccgcggtgatgagcgctaaacttctttacgacagccacggggctgagattttgcagtggttgggaattcactaa

SEQ ID NO: 90715 - DNA, 825 bp, Enterobacter aerogenes
atgaaaaataccgttatcgcactgctggcgcttttggccagcaccgccagcctggcggcgacgccgtggcagaaaatatcccagccgattagcggcagcgcccagtctattggcgcgtttgccaatggctgcatcgtcggcgcccagccgctaccgttgaactcccctgattaccaggtgatgcgtaccgatcagcgtcgctacttcggccatccggatctcgtgcagtttattcagcggctgagtttgcaggcgcacaataaaggtatggggacggtgctgattggcgatatgggcatgcctgccggcgggcgctttaacggcggccacgctagccatcagtcgggtctggatgttgatattttcctgcaattgccgcagacccgctggacctccgcgcaactgctgaaaccacaggcgctggatttagtcgcccgtgatggcaagcgggtggtgccgtcactgtggagcccgcaaatcagtaacctgattaaaatggcggcggaagataatgatgtgacgcgtattttcgtcaacccggctatcaaacagcaattgtgtctcgatgctggtaacgatcgccaatggctacgcaaagttcgcccgtggttccagcatcgcgcccacatgcacgtgcgcctgcgctgcccggcgggcagcctcgagtgcgaagatcaagcgccgccgccggctggcgatggctgcggagccgagctgcaaagctggtttgaaccgcctaaacctgggtcaaccccacctgtgaagaagacgccgcctccgctgccgccttcctgccaggcgctactggatgagcatcttctctaa

SEQ ID NO: 90716 - DNA, 1086 bp, Enterobacter aerogenes
atggcaggaaatacaattggacaactctttcgcgtcaccaccttcggcgaatcgcacggcctggcgctgggttgcatcgtcgacggggtgccgccaggcattccgctgaccgaagctgacctgcagcacgatctggatcgccgtcgccctgggacatcgcgttacaccacccagcgccgcgaaccggaccaggtgaaaatcctttccggcgtcttcgaaggcgtgaccaccggcaccagtattggcctgttgattgaaaacaccgatcagcgttcccaggactacggcgcgattaaagatctgttccgcccgggtcatgcggattacacctacgagcagaaatacggcctgcgcgactatcgcggcggcggccgttcgtctgcgcgtgaaaccgcgatgcgcgtggcggccggggcgattgccaaaaaattcctcgcggctaaatttggtattgtgatccgcggctgcctgacgcagatgggcgatattccgttggccatcaaagactgggatcaggttgagcagaacccattcttctgcccggatccggataaaatcgacgcgctggatgaactgatgcgcggcctgaaaaaagagggcgactctattggcgcgaaagtgaccgtcgtggctgacggcgttcctccgggcctcggcgagccggtgttcgaccgcctggatgccgatatcgcccacgcgctgatgagcatcaacgcggtgaaaggggtagaaatcggtgatggttttgaggtggtcaaacttcgcggcagcgaaaaccgcgacgaaatcaccaaagccggtttccagagtaaccacgccggcggcattcttggcggtatcagcagcggccagcaaattgttgctaacatcgcgctgaagccaacttccagtattaccgttcccggtcatacgattaaccgcttcggcgaagaagtcgaaatgatcaccaaagggcgtcacgatccgtgcgtcggcattcgcgcggttccgatcgccgaggccatgctggctatcgtgttaatggatcactttatgcgtcaacgcgcgcagaatggcgacgtgacaacatcaattccacgctggtaa

SEQ ID NO: 90717 - DNA, 1005 bp, Enterobacter aerogenes
atgctgatttatcgccgccgtcgtggcaaactagccgccgaatttatagcagagcgtgccctggaggattgcgtggataaaatttttgttgatgaagcggtcaatgagctgcagaccattcaggacatgctgcgttgggcggtaagtcgttttagcgccgccaacatctggtacggtcatggcaccgataacccgtgggatgaggccgtacagctggtattaccctcgctgtacctgccgttagatataccggaagatatgcgcaccgcgcgcctgacctccagcgaaaaacatcgtatcgtcgagcgcgtgattcgccgcgtcaacgaacgcatacccgtcgcttacctgaccaacaaagcatggttctgcggccatgaattctatgtcgatgagcgcgtgctggtaccgcgctcgccgattggcgaactgatcaataaccagttctccgggctgataaatcacaaaccgcagcatattctcgatatgtgtaccggtagcgcctgtattgccatcgcctgcgcctatgccttcccggaagcggaagtcgacgctgtcgatatctccccggacgcgctggccgttgccgaacataacgttgaagaacatggcctgattaaccaggttacaccgatccgttccgatctgttccgcgatctgccgaagctgcagtacgatctgatcgtgaccaatccgccgtacgttgatgaagaagatatggccgatctgcccgatgaatatgagcatgagccggttctgggtctggcttccggtagcgatggcctgaagctgacgcgccgcattcttggctgcgcgccggattacctcaacgacgacggtattctgatttgtgaagtcggtaacagcatggtacatctgatggagcagtacccggacgtgccgttcacctggcttgagtttgataacggcggtgatggcgtctttatgctgactaaacagcagctcattgacgcgcgtgcgcatttcggcatttataaagactaa

SEQ ID NO: 90718 - DNA, 552 bp, Enterobacter aerogenes
atgaaaaagaaaacaccgctaagcgcggaggatcaggcgctgttccgccagctaatgaccggcacccggcaaattaaacaggacactatcgtacaccgcccgcagcgcaagaagctcagcgaggttccgcctaagcgattgctgcaggaacaggtggataacagccactatttttccgacgaatttcagccgttgctcaatacggaaggcgcgatgaagtacgtgcgcgcggatgtcagccattttgagctgaaaaaactgcgccgcggcgactattcgccggagctgtttctcgatctgcatggcctgacccagatgcaggcaaaacaagaattgggcgcgctgattgccgcctgccgccgcgaacatatcttctgcgcctgcgttatgcacggacacggcaaacatatcctcaagcagcaaacgccgctgtggctggcgcaacatccgcatattatggcgttccatcaggcaccaaaagagtacggcggcgatgccgcgctattggtactgattgaagttgaagagtggttgccgccggagcttccgtaa

SEQ ID NO: 90719 - DNA, 486 bp, Enterobacter aerogenes
atgcaagtttttatcatgcgtcacggcgacgctgccctcgatgcagccagtgactccgttcgtccattaaccgtttgcggttgtgacgaatctcgtcagatggcaacctggctgaaaggtcaaaaagtggatattgagcgggtgcttgtcagcccttacctgcgtgcagagcaaactctcgacgtggtaggggagtgcatgaacctgccgaaagatgtcgacgtgatgccggaactcacgccgtgcggcgatgtagggatggttagcgcttatcttcaggcgctggcgaatgagggcgtgaaaacggcgctggtcgtttcacacctgccgttggtggggtacctcgtctcagagctgtgcccgggggaaacgcccccgatgtttactacctcagcgattgcctgcgtcaccctcgacgccgacggcaagggcgaattcaactggcagatgagcccctgcaatttgagaatggcgaaagccatctaa

SEQ ID NO: 90720 - DNA, 2145 bp, Enterobacter aerogenes
atggaagcggcaacagcttttacgcttgaaattcgcccggataacatcgccgttattaccatcgacgcgcccggcgaaaagatgaataccctgaaagccgagttcggcggcgaggtgcggacgattatccgccagctccgcgaaaataaggcgctgcgcggcgccgtatttatctccgctaaacccgacaactttatcgccggcgcggatatcaacatgattgctcgttgtaccagcgccgcagaagccgaagcgctggcgcgccagggccagcagatcatgtccgagatccacgcgctttctatcccggtgattgccgccattcacggcgcctgccttggcggcggcctggagctggcgctggcctgtcatgggcgagtctgtagcgatgatgataaaacgcggttgggattgccggaagtgcaactggggttgctaccgggctccggcggcactcaacgcctgccgcggctgattggcgtcagtacggcgcttgaaatgatcctcaccggtaaacaattgcgtccgcgtcaggcgttgaaagccgggctggtggacgatgttgtcccgcaatcgatattgctgcggaccgcggttgagctggcgctacagggccggccggcgagccgaactgtgccggtgcgcgaacgggtacttgccgggcctctggggcgtcagctgctgttccgcatggtggcgaaaaagacccggcaaaaaacgcagggtaattacccggcggcagaacgtattttacaggtgatagaaaatggactggcgcacggctgcagcagcggttacgccgaagaggcgcgagcgtttggcgaactggcgatgacgccgcaatcgcaagcgttacgttctattttctttgccagcaccgatctgaaaaaagatcgtggcgccgaagctgaccccgctccgctgaatagcattgctgtactcggcggcggcttaatgggaggcggaattgcttacgtcaccgcttgtaaaggcggcctgccggtacgcataaaagacattcaggcgaaaggcatcaatcatgcgctcaagtacagttgggatctgctggataagcaggtgcgtcgccgctatctgcgcgccagtgaacgcgatcgtcagctggcgctgatttccggcgctacggattatcatggctttgcccaccgcgatgtggtcatcgaagcggtgtttgaggatctggcgctgaagcagcggatggttggcgagatcgaacaatgttgcgggccgcagacgatctttgcttctaatacctcatcgctaccgatcggcgagatcgccgctcaggccgcgcggccagagaaggtaattggtctgcactttttcagcccggtcgaaaaaatgccgctggttgaggttatcccgcatgcaacgaccgatgagcaaaccatcgccacggtggtgaagctggcgaagctgcagggcaaaacgccgatcgtggtcgcggatcgcgccggtttttatgttaaccgtattctggcgccctatatcaatgaagccatgcgcctgctgctggagggcgagccggttgaacatattgataatgcgttggttaaatttggtttcccggttggacctattcagttgctggatgaagtcggcattgataccggcactaagattatcccggtactggagaccgcttttggtgaacgttttagcccgcctgcaaacatcattgacgcgattttgaaggacgatcgcaaaggcagaaaaaataatcgcggtttctatctttatgagacaaaaaggcgtaaaagcaaaaaacgggctgacccggccatttacccattattggcagtggctagcccgcaggcgcgtttgtctgctcagcaggtcgctgaacgctgcgtgatgatgatgctcaacgaggcggcgcgctgttttgatgaacagatcgtacgtagcgcgcgtgatggcgatattggcgccgtctttggtataggttttccgccgtttctcggcggcccgttccgctatatggatagcctcggcgcgggtgaagtcgccgcaatcttgcagcgtctggccgcacagtacggccctcgtttttctccgtgcgacaccttattgcgcatggccgagcagggggcgaccttttggcccactggtgaacggacgacctaa

SEQ ID NO: 90721 - DNA, 1311 bp, Enterobacter aerogenes
atgagtcaggcattaccgcttatcacccgtcagggcgatcgcattgccattgtcagcggtttacgtaccccatttgcccgtcaggcgacggcgtatcacggcgttccggccgtagatctgggtaaaatggtcgtcggcgaaatgctggcgcgcagtgaagttcccccggaagtgattgaacaactggtcttcggccaggttgtacagatgccggaagcgccgaatattgctcgtgaaatcgtgctcggtaccggcatgaatgtgcataccgacgcctatagcgtcagccgcgcctgcgccacaagtttccaggcggtagccaatattgccgaaagcctgatggccggcacgatccgcgcgggcatcgccggcggcgctgattcctcctccgttctccccatcggcgtgagtaaaaaactggcccgcaccctggtggatgccaataaagcgcgcacccttggccaacggctaaaactcttttcccgcctgcgcctgcgcgatcttttaccggtgccgcctgctgtcgcggaatactcaaccggcctgcggatgggcgacaccgctgagcagatggcgaaaacctggggcattagccgtgaagatcaggacgcgctggcgctgcgttcacaccagcttgccgcccgcgcctgggaagagggcaaactggccagtgaagtgatgacggcctatgtaccgccttatcgcgagccgctggagcaggacaacaatattcgtaaaaattcaaccctggcggattaccaaaagttacgtccggcgttcgatcgtaaacacggtagcgtcacggcggcaaacagtacgccgctcaccgacggcgccgccgcggtgatcatgatgaccgaatcccgggccaaagagttggggttaacgccgctgggctacctgcgtagctatgctttcaccgctattgatgtctggcaggatatgttgctggggccggcgtgggcgacgccgctggcgttggatagggcgggaattacccttgcagacctcacgttgattgatatgcatgaagctttcgccgcgcagacgctggcgaatctacaatgtttagccagtaatcgtttcgcccgggaagtgctgggccgttcacaggcaaccggggaagtcgatgccagcaagttcaacgtgctgggcggctctatcgcctacggacacccttttgcggcgaccggcgcgcgcatgattacccagacgttgcatgaactccggcgccgcggcggcggatttggtctggttaccgcctgcgcggcggggggtttaggttccgctatggttctggaggtcgaataa

SEQ ID NO: 90722 - DNA, 285 bp, Enterobacter aerogenes
atgagtaaatgtagcgctgatgaaaccccggtttgctgctgtatggatgttggcaccattgtggacaacaccgactgcaccgcctcctacagccgtgtgtttgcaaaccgcgctgaagcggaagcaaccctcgccgcgctgagcgaaaaagcccgcaatgtggaatctgaaccgtgcaaaattaactcgacgttcaccgacgttgatggcggcgtgcagttgaatatcgattttgtttttagctgtgaagcggaatcgctgatcttccagctggggttacgttaa

SEQ ID NO: 90723 - DNA, 1323 bp, Enterobacter aerogenes
atgagccagaaaacccgctttacccaatctgcccttgcagtggctgtagcacttgtttcaacccaagcctggtccgcaggattccagttaaatgaattctccgcttccggccttggtcgtgcctattccggtgaaggggcaatcgctgacgatgcgggcaacgccagccgtaaccccgcgttaatcatgatgtttgaccggccgacaatgtcggcaggcgccgtcttcgtcgatccggacgttaatgtttccggtacttcgcctaccggtaaaagtctgaatgcggacaatattgccccaacggcatgggtaccaaacctccactttgtttcgccaattaacgatcagtttggttggggcgcatctatcacctctaactacggtctcgcgactgaatttgctgataactatgctgccggcagtatgggcggcacaaccgatctcaccaccgttaacttcaatttaagcggcgcctatcgcctgaacagcaactggagctttggtttaggttttgacgcggtgtacgcgaaagcgaaaatcgaacgctacgcaggtgatttaggacaaatcgttgccggttccggtaaactgccgccagcgctggcgggcagggtcggccagatccctgccgacactcagattgcgcatttgaacggcaacgaatggggtttcggctggaacgccggtatcctgtatgagctggataagaacaaccgctatggtttcacctaccgctcggaagttaaaatcgactttgatggcaattataagagcgatctgccgtccgcgtataaccagatcctcggcaacttcggtttaccggccggtaccgatggccgtaccactaacggctcgctgaccctcaacttgccagagatgtgggaactgtcgggttataaccgcgtcgcgccgcagtgggcagttcactatagcctgacctacaccagttggagccagttccaggagctgaaggccaccggtagcaatggccagacgctgttctataaagatgaaggctttaaagatgcttaccgcatcgcgctgggtaccacctattactatgacgataactggaccttccgtaccggtatcgccttcgatgatagcccgattccggctggcacccgctccatctctatcccggatcaggatcgcctgtggctgagcgccggtaccacctacgcgttcaataaagatgcttcagtggatgttggtgtctcttacatgcacggtcagcacgtggaaattaaagaaggtccttacaccttccgttctgaaggtaccgcctggctgtacggcgcgaacttcaactaccgcttctga

SEQ ID NO: 90724 - DNA, 762 bp, Enterobacter aerogenes
atgaattatcgcctgtcggcgcttgcgcttggcgccacattgctggtgggatgtgccagttccagcactgacgatcggccgcaggggcgttcagatccgcttgaagggtttaaccgtaccatgttcaacttcaactttaatgtggttgatccttatgtactgcgtcccgtcgccgtcgcctggcgtgattatgtgccgcaaccggcgcgtaatggtttaagcaacttcaccagcaaccttgaagaaccggcggtaatggtcaactccttcctgcagggcgatccctataaaggcatggtgcatttcacacgcttcttccttaacactattctcgggatgggcggcttaatcgacgtcgcaggtatggcgaacccgcagctgcagcgcgttgaaccgcatcgctttggtagcacgctgggccactacggcgtgggctacggcccgtacgtacagctgccgttctatggtagtttcaccctgcgtgatgagggcggcgacatggccgatggcttgtatccggtactctcctggctgacctggccgatgtccatcggtaaatgggcggtcgaagggattgaaacgcgcgctcagctgctggattccgacggcctgctgcgccagtcttccgatccatacatcctgatgcgtgaagcctacttccagcggcacgactttatcgccaacggcggtaagctgacgccggccgataatccgaacgcgcaggcgattcaggatgagctgaaagatatcgattcgcagtaa

SEQ ID NO: 90725 - DNA, 912 bp, Enterobacter aerogenes
atgacccgacaaaatacccccaccagtatgcatgatagcgatgaacgagaagttgaaagcgaagagaaacagcatggcgagaaaatagaagtggatgaagagcgtctaccttcgcaggcaatggctacccatgaggtgattcgccaggagggtgaaaaggagctcgagcgcgacgccatggcgctactatggtcagcaattgccgccggtttgtcgatcagcgcctcgctggtagccaaggggatttttcatgttcaccttggcgccctgcccggcggttatctgctggagaatttgggatacaccttcggctttattattgtcattctcgcccgccagcagctgtttacggaaaataccgtcaccgccgtgctgccgattatgcataaacccagcgccggtaatattgctttattgctgcgcctgtggggcgtggtgttattaggtaatttattgggtggggctatcgccgcctgggcgtttaatatcatgccgattttcgatgacgccactcgtgaggcgtttcaaagcatcagccagaaagtcatggaaaacacgccgaccgaaatgtttgccaacgcgattatttccggctggctggtggcgacaatggtctggatgttcccggccgccggctcggcgaaagtcatcgtcatcatcctgatgacctggctgattgcgctggcggacaccacgcatatcgtcgtcggcagtgtggaaattttctatctgattttcagcggcgccctgccctggcaggagttcatctggcccttcgcgctgccgacgctcgccggcaacatctgcggcggcacctttatcttcgccctgctaagccacgcccagattcgcaacgacatgacccaggaacagaaagccaaagcgaaggccgaagcagataaaaagggctaa

SEQ ID NO: 90726 - DNA, 492 bp, Enterobacter aerogenes
atgaaacaaatcaccatcagtgatatgcagcagcaaagcgcagccgcggcggccgctccccgcctacgggcgcatcgtaacttccatccggaactcagcgatccggtacagcgtctggccattgccatggagccgggaacttacattcgtcctcaccgtcatcctcatacttttgagctgctgctgccgttaagcggccgttttgtagtactgaacttcgatgaacaaggcaccgtgacccaccgcgtggtattaggagaagaatgcaaggcgctggaaatggcggccggcacctggcatgcggtactgtcgctggatcacggcggtatcatttttgaagtcaagcacggaggctatcagccggtagccgaacaggattccgcgccatgggcgccagccgaaggcgcgccaggcaccgaggaattaatggcgtggtatgccacggcccaggtgggggatggcgattttactcttcagaagagtgctcgctaa

SEQ ID NO: 90727 - DNA, 864 bp, Enterobacter aerogenes
atgaataagatagaaagaaacatttggaagttgaacaatctcccacctctggagtattgctctatcgctcgtgcgcaaaaactcctgcagtgcgaactggaagatttacttcactggcacgatatcggcgctatcagtctgtgcctgaaactgaaaaagaatcgcggcacgctcaatagcgccctgacccggaatcagggggttggcgactcatcatacggctacggcggttttgatgacattaccaaagccaacaagccctggtctcagcactctaaaataaacaacatcatcaccctgaatgaaaatgtgtcggtcattgatgccgatcacgacagcgccatcgccaaaattaaactcaacgtttctgtttcgggtttatggcacactcattcaagaaatttaatggatgtgctggagaatccggataacattcagcaagaagatacgctgagcattatctccccggctaaaaacgtcatctactgcaatttcattcctgataatgatgataagccgacgattgagctcagcaagctgtatattaccagcaaagaaattgagaaaatttacgagcacaccatcagcagtcgtccgctagagtattctgaagccgcgatgaattcatataatgaaaaaaccattaatgagccatcaacaccgccacaaaataagctattactcgaattcattaattatattattcaatccaaccccgcctttaaccgcgatttactgaatgcgacagaaagcagtaaacagctcgcctttaaatccattatggaaaagttaaaaaaagaaggcatcgtcaccaacgaaaatcattcgatggcttcactctctgaactgatcctcaattcataa

SEQ ID NO: 90728 - DNA, 804 bp, Enterobacter aerogenes
atgctgaaactatcccgatgccctgtagtcgttctcggtacccttgctttgtattgtggttccacttgcgctgaggtcgacctcggctcgatcgacattttttctgctgataacccgaatagcccggtgccgaaaggttgggttctcggcggcgccgcgattagcggtaccgcgcgctaccaaaagcaggacaacgaaacccactttattcccggcggattatattttggcgaccagttaatgtatctgggggatcgcgcccgctactattttcatcttgatgacaatatcgcgctatacggctacggacgctggcgtttcggtaatttagatcccgacgacgatacggcttttagggggatgaacgaacgtaaaggcgaactggaaggcggaattggcgccacatggatcacaccatacgcgctgataagcgcgcgcatcagttcagatatcagcggccgcagcaacggccaggagctgctgctatgggctgattttccaatcatcaaagataatctgctggtgatgccggggatgggcctgatggtacgtagtcataatatggcgaactactattttggcggcatatcagcaagcgaggcgacgcccgagcgtccccaatgggataccggcacgacggtatcaccaatggtcgccatcattaccagctaccgcttcagcccccactgggtcggaatgatagcggcaaactacgaacgctatgatgatgatattgccaatagtcccattgtccagcacagcggcgaactgtatggcatcctcggcgtcggatatacctggtag

SEQ ID NO: 90729 - DNA, 456 bp, Enterobacter aerogenes
atgcctactcatgataaccatcttcagcgcgccattacgcttgccgccgctaatgttgaaaacggcggccgcccgttcggcgccgtcatcgtacgccacggcgaagttattgccgaagcggtgaataccttgcaccagagcggcgatcctaccgcgcacgctgaactcaacgccatccgcgacgtttctctacgtctgggcaatcaggtattgcgcgaatgcgtggtttacgccagcggacaaccctgcccgatgtgtctgagcgcgatgtatttaaccggcgtgcgcgaagtctattttgccaacagcaatcaggatggcgagcgcttcaatctctcaaccgccgctatctaccaacaattgcagcagccgttggacaaccaatcactccccattcaccactgcccacaccccgaagggctggccttgtatcagcgctgggcggataaagcgtaa

SEQ ID NO: 90730 - DNA, 1197 bp, Enterobacter aerogenes
atgagccagacacaacgcaaaacgctgacgctatttgtgctggtactgatcggcattaatatgcgcccgctactgacctcgataggtccattactgccgcaactgcggcacgcaactggcatgagctttaccctggtttcactactgaccgcccttccggtcatcgcgatgggggtgctagcgctagccggaggctgggttaaccgccacgttagtgaaaaccgcagtatcgcattaagtctgctggcgataggcattggcgctatcctacgtaaactggctccgcaaagcggcctgctgcttagcagcgcgctgctcggcgggattggcatcggcgtgattcaggcgcttatacccagcgtcattaagcgtctctttcatcaccgcacgccgcaggtgatgggattgtggtcggcggcactgatgggcgggggcggccttggcgctgcgatcaccccctggcttgcgcagcatagcgcgctctggcatcacgcgctggcgtggtgggcgctaccggctctggctgcgatcattggctggttgccgctctgcaaaatgctgcccgccgcgccggttgccgcatcggcgcaagtcgcgccggcggtctttcgccaccaccgcgcctggacgcttggcctttatttcggtctgatcaacggcggctacgccagcctgattgcctggttaccaccctattatatgcagcttggccacagcgcccagtttagcggtacgcttctggcattgatgaccgtcggccaaaccgctggcgcgctggtgctgccgatgctcgctcgccacgaagatcgtcgtaagctgctgatgctggcattggcgctgcagttgttcgggttctgcggtttcatctggtggccacaacagtggcctctgctgtgggcagtgagttgcggcgtaggactaggcggcgcatttccgctttgtctggtgctggcgctggaccattctccgctgccagccgtcgccgctcggctggtggcgtttatgcagggcgtcggttttattatcgccgggttatcgccatggctttcggggctgctgcgcagcctgagcggaaactaccagctggactgggaattccacgccatctgcgtgttcatcttaatggcgcttaccttacgctttgtgcccgcacgttatccgcatcagtggcgcgcgccgacgacaaccgcccgctaa

SEQ ID NO: 90731 - DNA, 1239 bp, Enterobacter aerogenes
atggctgaattcagtcctgaacgccgttttacgcgtatcgatcgtctccctccgtatgtttttaacatcactgccgaactgaaaatggctgcgcgtcggcgcggcgaagatattatcgatttcagtatgggcaacccggatggcgccacgccgccgcatattgttgaaaaactgtgtaccgtcgcccagcgtccggatacccacggttactctacttcccgcggtattcctcgtctgcgccgcgcgatttcacgttggtatcaggaacgttatgacgtcgatatcgacccggaatcagaagccatcgtgacgattggttcgaaagaggggctggcgcatctgatgctggcgacgctcgatcatggcgatacggtgctggtgccaaaccccagctatccgattcatatttacggcgcggttatcgccggggcgcaggtccgttcagtcccgctggtggaaggtgtagatttcttcaatgaactggaacgcgcgatccgcgagagttatccgaagccgaaaatgatgattctgggcttcccctcgaaccctaccgcgcagtgcgtcgagctcgatttctttgagaaggtggtggcgctggcgaaacgctatgacgtgctggtggtacacgatctggcctacgctgatatcgtctatgatggctggaaagcgccgtcgattatgcaggtgcccggcgcgcgcgatgtggcggtcgaattcttcaccctgtcaaaaagctacaacatggccggctggcgtatcggctttatggtggggaataaaacgctggttaacgcgttggcccgcatcaaaagttatcatgactacgggacctttacaccgctgcaggtggcggcgattgccgcgctggaaggcgatcagcaatgcgtgcgtgatattgcggaacaatataaacgtcgtcgtgatgtgctggtgaaagggctgcatgaggtaggctggatggttgagtgcccgaaagcgtcgatgtacgtgtgggccaaaattccgcagccatatgcggcaatgggatcgctggaattcgccaaaaagctgttgcaggaggctaaagtgtgcgtctcgccgggaatcggctttggcgactacggcgatactcacgtgcgtttcgcgttgattgaaaaccgcgatcgtatccgtcaggctattcgcggcatcaaatccatgttccgcgccgatgggctgctaccggcagccagtaaaacggtgactgaacaccacgaataa

SEQ ID NO: 90732 - DNA, 1698 bp, Enterobacter aerogenes
atgcacgatatatttaatatgctgctggcggtttttgaccgcgcggcattaatgctcatttgcctcttttttcttatccgcttacgcctgttccgcgaactgctgcataaatcggcgcatacgcctcgcgagctgctggcggtcaccgccattttctccatgtttgcgctgttcagcacctggtccggcgttccggtagagggttcgctggtcaacgtacggattatcgcggtgatgtccggcgggatcctgtttgggccgtgggtcggcgcgattgtcggcgtgattgccggggtacaccgctatctcattgatattgatggtgtaacagccatcccctgctttatcaccagcattgtcgccgggctactttccgggcttattaatcgcaaaattccgaaagcccagcgctggaaggtggggattctggccgggatgctgtgcgaaacgctaaccatgatcctcgtggtgctgtgggcgccgacgctggcgctggggatcgatattgtctccaaaatcggtattccgatgatccttggcagcatctgcatcggttttattgtgctgctggtccagagcgtggaaggcgagaaagaagccagcgcggcgcgccaggcaaaactggcgttggatatcgccaacaaaacgctgccgctgttccgccacgttaacagcgaatcgctgcgtcaggtttgcgatattattcgccgggacatcaatgccgatgcggtcgcgattaccaccactgaccgggtgctggcctatgttggttacggggaaaataactataacgatcgcaacaacgatatcagcccaaccactcgtcaagccattgaaagcgacaccatcatcattaaaaacaacgacgaagcctacagaacgccggagatccactccatgctggtcattccgctacgtgagaaaggcgtggtgaccggcacgttgaaaatttactactgccatgcgcatcgtattacctcctcgctgcaggagatggcgatcggcctgtcgcaaattatctccactcagcttgaagtctcgcgggccgaacaactacgagaaatggccaataaagcggaactgcgcgccctgcaaagtaaaattaatccccattttctgtttaatgcgcttaacgccatctcctcttccatccgcatgaatccggataccgcgcgacagttgattttcaatttgtcgcgttatttacgctataacattgagttaaaagatgacgagcagatcgacatcaagcgcgagctataccaaattaaggattatattgcgatcgagcaggcgcgattcggcgacaagctgacggtgatttatgatattgacgaggacgtcagctgcgtcatccccagcctgctcattcagccgctggttgaaaacgccatcgtccacggtattcaaccctgtcggggtaagggcgtggtgactatcgccatcaacgaatgcggaaaccgggtgcgcattagcgtacgggataccggtaacggtattgacccagcggtggtagcccgcgtcgaagccgacgagatgccgggcaataaaattggtctgttgaatgttcatcatcgggtgaaactgctctacggcgaagggctgcatatccgccgcttgacgccgggaacggagattgcgttctacgtccccaaccagcacgccccggcgagtgaaccggtgtcgctgttgccatga

SEQ ID NO: 90733 - DNA, 744 bp, Enterobacter aerogenes
atgaaagttattattgtggaagatgagttcccggcgcagcaggaactcacctggttgattaatactcacagccagatggagatcgtcggcacctttgacgacggtctcgatgtgctgaaattcctgcagcacaataaagtcgatgccatctttctcgacatcaatattccctctctggacggcgtactgctggcgcaaaatattagccagttcgcgcataagccgtttatcgtttttatcaccgcgtggaaagaacatgcggtggaagcctttgaactggaagcgtttgactacatccttaagccttatcaggaatcgcggattattaacatgctgcagaagctgtccagcgcctggcagcaacagcagcaggtggcggtgagcggcgcgcccgcgcacaacccaacccgcgaaaacgacaccattaatctgattaaagacgagcggatcatcgtcaccagcattcatgatatttattacgcggaagcgcatgaaaaaatgaccttcgtttatacgcgccgtgaatcattcgtcatgccgatgaacatcactgaattctgcagcaaactgccggctgcgcacttctttcgctgccaccgctcgtactgcgtcaatctgaataaaattcgcgaaatagagccatggttcaacaacacctacgtcctacggctacgcgaccttgagtttcaggtgccggtcagccgcagtaaggtgaaagagtttcgccagttgatgaatctgtaa

SEQ ID NO: 90734 - DNA, 966 bp, Enterobacter aerogenes
atgacaaaatttgctttagtaggagacgtcggcggaactaacgcccgtctggcgttatgtgatatcgcaagcggggagatttcccgcgctaaaacttattccgggctcgattatccaagccttgaggccgttgtacgcgtctatctcaacgaacaagccgtgaaggtcgatgatggctgcatcgccattgcttgccccatcaccggcgactgggtagcgatgaccaaccatacctgggctttttctattgccgagatgaaaaagaacctcggattcgcgcatctggaaatcattaatgattttaccgcggtgtcgatggcgatcccaatgctcaaagacgagcatctgatccagttcggcggcgcgcaaccggcggaaggtaaaccgatcgcagtctacggcgcaggtaccggtcttggcgtagcgcacctggtacacgttgataaacgctgggtgagcctgcctggcgagggcggccacgttgatttcgcgccgaacagcgaagaagagggcattattctcgaggagctacgcaacgagttaggccacgtgtccgccgaacgcgttctgtccggcccgggattagttaatctgtatcgggcgattgttaaatccgatggccgtttgccggagaacctgcaaccgaaggacgttaccgagcgcgcgctggcggatacctgcattgattgtcgccgcgcgctgtcgttgttctgcgtcattatggggcgctttggcggtaacctggcgctgaccctcggcactttcggcggcgtgtacatcgcaggcggtattgtcccgcgtttccttgagttctttaaggcatcgggtttccgcggcgggtttgaagataaagggcgctttaaagcctacgtgcaggatattccggtttatctcatcgtccatgataacccaggcctactgggctccggcgcgcatctgcgccagacgctggggcatatcctctaa

SEQ ID NO: 90735 - DNA, 1236 bp, Enterobacter aerogenes
atgttgcacccgcgcgccagaacgatgctgttgttatcgatacccgccattcttattggtatcgcttccagcctggtattgattgtggcgatgaagatcgccgcgattctgcagagcatcttgtggagcgacctgccggcacatgtcggcattgccgccgatagcccgctgtggataattgccatcctcactctcaccgggattgccgtggggctggtagtccgtttcagccccggtcatggggggccggatccggcaaccgaatccttgatcggcgcgcccatcgccaccaacgcgctaccggggttactggcggcattgattctcggcctcgcgggcggtgtcagtctcgggccggaacatccgatcatggtcgtcaatatagcgcttgccgtcgccctcggttcgcgtctgtttccacgggtaagttcgctggactggacaattctcgccgcgtcgggaaccatcggcgcgctgtttggcacgccggttgccgcggcgcttattttttcgcaaacgctcaataacagcagcgacgttccgttatgggaccggctgttcgccccgctgctggcggcggcggcaggcgcattgacgaccggtatttttttccatcccaatttcactctgccaatcccgcactatccgcacctgcgcatcgtcgatatcatcagcggcgcgattgtcacgcttatcgccatcgccgtgggcatggtcgccgtgtggtgtctgccgcgtctgcacgcgctcatccaccggctgaaaaatccggtgttaatgctgggaatcggtggttttttactggggatcctgggcgttatcggcggacatattacgctatttaaaggtctggacgaaatgcagcaactggcctccagccagacgcttggcgccggcgattttctgctcattgccgtggtgaaattggcggcgctggtgctggcgtccgcatgcggtttccgcggcgggcgtattttcccggcggtgtttgtcggcgtctcgttggggctaatgctgcatgctcacgttgaagcggtaccggccgccattaccatctcctgcgcgatcctcggcctggtgctggtcgttacccgcgacggctggctgagtctgtttatggcgtcagtagtggtgcctgacaccaccctgttgccgctgctttgtatcgtgatgctcccggcctggctactgctggccgggaagccgttgatgattgccaaacgccgcggcgattag

SEQ ID NO: 90736 - DNA, 1662 bp, Enterobacter aerogenes
atgcaaccgacttacaccattggcgattatctgctggatcgtctcgtagattgtggtatcgatcgcctgttcggcgtacctggtgattacaacttacagtttctcgatcacgtgatagcccatcaagatttgggatgggtcggctgtgctaacgaactgaacgcggcctacgccgcagacggctatgcgcgtataaaaggcgctggcgcgctgctaaccacctatggcgtaggagagttaagcgcgttgaatggggtggccggtagttatgcggaacatattccggtgctgcatattgtgggcgcgccttctaccggcgcgcagcagcgcggcgaactgctgcaccatacgctcggcgacggcgatttcacccatttctcgcggatgagcgaacaaatcacctgtactcaggcgacgctaacggcgggcaacgcctgtcatgaaattgaccgggtattaagcgacatgctgacccaccaccgcccagggtatctgatgctgcctgccgacgtggcgaaagcccgtgcggtgccgccggcccgcgcgctggtgattaagggcccggcggccgatgaaaaccagcttgccggctttcgcgagcacgcggccaaattgttgcgcagcagtcgccgcgtatcgctgctggcggattttctcgctcagcgttacggtctgcaaaacacactacagcagtgggttaagtccgcgccgataacccacgccaccatgctgatggggaaagggctatttgacgaacaaggctcaggttttgccgggacctatagcgggatcgccagcgcgccgcagactcgcgaggcgatggaaaacgccgatgccatcatctgcgtgggtacgcgctttaccgatacgattaccgccggctttacccatcatttgccaacggagaaaaccatcgaaatccagccgttcgccgcgcgggtaggcgatcactggttcagccggatcccgatggatcaggcgctggcggcactcattgacgtttctggcaagctgtccgccgaatggagcgcgccagatatcatcgcccccgacgcttccggcgcgccgcagggtaatctgacgcagaaaaacttctggagtacggtcgagaaacagctgcggccgggcgatattattcttgccgatcaggggacctcggcattcggcatcgcctcattaaaacttccctcacaggcgacgctgctggtgcagccgctatggggctcaatcggctttacgctgcctgccgcctacggcgcacagacagccgccgcggacagaagggtggtattaatcattggcgatggcgccgcccagctcactatccaggagatgagctcaatgctgcgcgataagcaaaagctgttaattttgctgttgaataacgagggttacaccgtcgagcgcgcgattcacgggccggaacagcgctacaacgatatcgcgttgtgggactggagccgcttccccgatgcttttgcgccggatacgccttcccgctgttggcgggtaacgcaaaccggcgaattggcggaggcgatggccgatagcgttaactccgataagttaacgatggtcgaagtcatgctgccgaaaatggatattcctgatttcttacgcgcggtcacccaggcgctggaaaatcgcaacaaccgcggctaa

SEQ ID NO: 90737 - DNA, 993 bp, Enterobacter aerogenes
atggtttaccaggcaagtaacacgcgttatcaggccatggagtaccgccgatgcgggcgcagcggcctgaagctaccggcgatatctctcggcctgtggcataactttggcgatgaaacacaggtagagaacagccgccagttgctgcgtcatgccttcgaccttggtattacccacttcgacctggccaacaattacggcccaccgccgggatcggcggagagcaacttcgggcggatcctcaaagaagattttctgccctaccgcgacgaactcatcatctccagtaaagcgggctataccatgtgggacggcccttatggcgactggggatcgcgcaagtatctggtcgccagcctcaaccagagcctgaagcggatgggccttgagtacgtcgatatcttttatcaccaccgcccggatccggagacaccgctggaggagaccatgcgggcgctggatcatctggttcgccaggggaaagcactttacgttggtttatcaaactacccgcttgagcaggcgcgtcaggctatcgctatcctcaacgatctcggcacgccttgcctgattcaccaacccaaatattcgatgtttgaacgttgggtggaagaaggattattagcgatgctgcaggccgaaggcgtgggaagtatagcgttttcaccgctggccggcgggcaattgaccaaccgctatctaaacggtattccgccagactcgcgcgcagccagcaatagccgttttttacagccggaacagctcaccgccgagcggctggaaaaagtccgccaacttgacgccattgccgggcgccgtggacagaagctctcacagatggcgttagcctgggtgctgcgagaagataaggtgacgtcagtgctgatcggcgccagtaaaacggcgcaactggatgatgccgtaggcatgttaagcaatcgccagttcagcgctgaagagtgcgccgctattgacgcgatccttgcggtgtaa

SEQ ID NO: 90738 - DNA, 357 bp, Enterobacter aerogenes
atgttcaggtcactgattctggctgcggtactactggcatgcgcgccggttatcgctaatgctggtgaaatcaccctgctgccatcggtaaaattacaaattggcgatcgtgacggttacggtaactactgggacggtggcggctggcgcgaccgtgattactggcgtcgtcattatgaatggcgcgatcaccgctggcatcgccatgataacggctggcatcgcggttgggataaacgcggctgggatcgcggtcgcgcttacgagcgcggctatcgcgaaggctggaacgatcgtcgtggcggctggggccgaggcccgggcggcggacgtggtcacggccacgggcaccactaa

SEQ ID NO: 90739 - DNA, 1173 bp, Enterobacter aerogenes
atggggcccgcgttcattgctgccatcggctacatcgatccgggtaacttcgccacgaatatccaggcaggcgccagctttggctatcaattattatgggtagtggtctgggcgaacctgatggcgatgctgattcaggtgttatcggccaagctcggtatcgccaccggtaaaaacctcgcggaacagatccgcgatcactacccgcgcccggtggtatggttttactgggtacaggcggaaattatcgccatggcgaccgatctggctgaatttatcggtgcggccatcggctttaagctgctgctcggcatttccttattgcagggggcggtgctgaccggtgtcgcgactttcctgatcctgatgttgcagcgtcgcgggcagaaaccgttggaaaaagtcattggcgggctactgctgtttgtggcagcggcctatgtggttgagcttatcttctcgcagccggcgttagcgccgctgaccaaaggcatgatcattccgagtctgcctaatggtgaggcggtattccttgccgccggggtactcggcgcgacgattatgccgcatgttatttatctgcactcgtcgctgacgcagaacctgcacgatgggtcgcgcaaagaacgctataacgccacgcgttgggatgtggcgattgcgatgaccatcgctggtttcgttaacctggcgatgatggcgaccgccgccgctgcgtttcacttcaacggccacaccggcgtggccgatctcgaccaggcttatttaactctcgaaccgctgctcagccatgccgccgcgacggtttttggtctcagtctggttgccgccggtctctcgtcgacggtagtcggaacgcttgccgggcaggtcgtgatgcaggggtttatccgcttccatattccgctgtggtttcgccggacaatcaccatgctgccgtcatttatcgtgattatgatggggctggacccgacgcgtatcctggtgatgagtcaggtgttgctgagcttcgggattgcgctggcgctggtgccgctgctaatttttaccagcgatgcgcggttaatgggcgatctggttaatagtcggtgggtaaaacgcatcggttggctgattgtggcgattgtggtggcgctgaacggctggctgattattggttcagcattagattaa

SEQ ID NO: 90740 - DNA, 1203 bp, Enterobacter aerogenes
atggaccgcgtcttgcattttgtcctcgcgatcgttgtggtggctatactggccttgttggtcagtcacaaccgtaagcagatccgcattcgttatgttattcaattacttgttattgaagttttgctggcctggttcttcctgaactccgatgtcggtctgggtttcgtgaaaggcttttccgagatgttcgagaaacttctcggtttcgccaacgaaggcaccaacttcgtattcggtaacatgaacgataaaggtctggccttcttcttcctgaaggttttgtgcccaatcgtctttatttccgcgctgattggtattttacagcatattcgcattctgccgattgtcatccgcgcgatcggtaccgtgctgtcgaaagttaacggcatgggtaaactggaatctttcaacgccgtcagctcgctgatcctcggtcagtcggaaaacttcatcgcctataaagatattctcggcaaaatgtcgcgcaaccgtatgtacaccatggcggcaaccgcgatgtctaccgtttcgatgtccatcgtcggcgcctatatgactatgctgcagccgaagtatgtggttgccgcgctggtgctcaacatgttcagcacctttattgttctgtcgctgattaacccgtatcgcgttgagcagagcgaagaaaacctgcagatgtccaatctgcacgaaggtcagagcttcttcgaaatgctgggtgaatacattctggcaggctttaaagtagcgattatcgttgcggcgatgctgatcggctttatcgcgctgatttccgcgctcaacgccctgttcgccaccgtcaccggctggtttggctacagcatctccttccaggggatcctcggctacatcttctacccggttgcgtgggtgatgggtgtgccggcgagcgaagcgctgcaggtaggcagtatcatggcgaccaaactggtgtctaacgaattcgtggcgatgatggatctgcagaaagtggcagcgacgctctccccgcgtgcggaaggtatcatctctatcttcctggtctccttcgccaacttctcttctatcggtatcatcgccggggcaattaaaggcctgaatgaagagcagggtaacgtggtttcccgctttggcctgaaactggtttacggttccacgctggtcagcgtgttgtcagcttccatcgctgctctggtgctgtaa

SEQ ID NO: 90741 - DNA, 2184 bp, Enterobacter aerogenes
atgactgacatatttaacatcaaagttaaaaaaactctgctggcgttaattgtttgtttgatttttattccgctatctcgattaatttctccgcaaacccttatcgacggaaaacaaatttatctggcatggctgccattaagcgtaatgtacgcaaccatttgtatttttggccgttacgccgttgcccccttgattgttgcgtttgcaattactaatacatttgtaatagatctaacttatacacaggccgctatcctgttattttgtcagttattttccgtctttttcaccttcgctatcatgcgctcgttgtcggggaaaaaatggcgtagcggaaggcctgccaagcgccatatcggtcgccgtatcttctggggcggcttctttgcccccattctgcttaagctgacgatgtatctggcggggcgcttcttcgccttcccacttgccgtctccagctacttcagtaccgcgtcgatcatctattccgttattgatatccaggcgttgatatgcgccgccttaatctttactaccgctttctattacccgatgagaatgatggtttgcccacgttaccggcgggtgttttggttgcgtcattgtcaaccgtggctggtgaaaaaaagaagagcctttaccatatattggtttatggcattaatcacaatcatgctggtgctttgcgcgccttttgattcagatttaattgctggatatctggtgccgattatttttattctctacttcatcggtatcggccggctggggcatgaattaattcgcattacctgggctatttcggcattctttttagtggcctataacaaaaattttctccagggcgttcaatcggggtactccttgtcatttgtcctgtcggtgttaatttcattcacgatttgtttgttttacatgacggatatttattcgcgtagcgagagaattaaacagcgctggcgcgatcgggctgaagaagatccgttaaccgggttacccaatctgcgggcgctggaagggcatttgcgccaatcgcctcgggttgttattagcagcctgcgtatcgaaaacctggacttccttagccgtcactacggcatgatgatgcgtgtagagtgcaaacggcaaatagcccgccgtctgcagccgctcctggatcaccacgataaaatttatcagctcccgggtagcgagttattgctggtgatagaagggccggaaccggcggcacggttaaaccacatcgtctcgatgcttaaccacgctaaatttaactggcataaccaggatctggatttagagtttggcgcggcgtggggtagttacagcggcattgagaccgaattacaccccatgcttggccagcttagctggttatcggagcaggctggcgccgtgcagcgggtgctggcgttagatatcgcgcaggaagaggtttccgatcaaacgaccgaacaggtacggatgctgacgaaaataaaacaagcgctgaacgagcgtagcctcctgctgtatgcgcagccgattcagaacgcagaaggggagggctattacgaaatcctcacccgtatgcgttgcggcgagacgattatcacgccggatcgttttattccgcttattgcgcagttcaacctcagccagcgtttcgatatgctggttctggaaacgctgttcagccagatcgatcaccatcctggccgacgcttctccgtcaatttgctgccgtatacgctgatgcaaaaggatagcgccgctcagattatcgcactgtttaagcgttatcgcgtatcgcctgcgtatattacgattgagataaccgaggagcaggcgttctcgaatgcggataccagcatgcataatattcagctgctgagtgagttcggttgcgctatcgccattgatgacttcggtaccggttacgcgaactatgagcgtctgaagagcctgcaggcggatatcgtaaaaattgacggctgcttcgtgcacgaaatcgagagcgaccagcttgatgcgattatcgtcaaatccataatcgaaatcgcgcgggcgaaacagcttacggtagtcgcagagtacgtcgagacagaggcgcaaaaggcgatgctgttggcgctgggcgtcgattatttacagggttacctgattggcaaaccgcagccgttaagcgaattaaaggcgtaa

SEQ ID NO: 90742 - DNA, 354 bp, Enterobacter aerogenes
atgctcaaggaacgaatgactccggaagaaattgcgcatctaactggcttcagccgacagacgataaataaatgggtccgtaaagaggggtggcaaacttctccgcggcctggcgtgcagggaggcaaagcgcgtctcgtacacgttaacgagcaggtacgagagtttatccgcaatgcccagcgcgtagcggaaacgccctcgccctattcggtcgccgagaccgatctcgagccattattgctgacgctctgtaaagagatgactcatcgcgaacagaagcagctaatgtcgctgctgctgcgtgaaggcataaccgggttgttaaaccgtcttggaatacgcggccagtaa

SEQ ID NO: 90743 - DNA, 396 bp, Enterobacter aerogenes
atgatgaaactgaaagaaaaaatgacgcctgcagagcttgccgaagttctgggtctggccagacaaacggtcaaccgctgggcgcgggaacaaaagtggcgaaccgaggcgattcccggcgtcaaaggcgggcgtgcgcgtttaattgtcatcgaccggccagtgatcgattttctgaccaatattccggcatttcgtcatctgaatgaagagtatcagctcgccgaacagcccagcggctactttattaatgaagcggatgcggtatggcggcaaatcgccgatacgctgcagctgatgaccgccgcagaacaaactcacctgcgcgatcttcttgctcgcgatggtattagtggcttcctggcgcggttaggtattaacactgcgacaaaatag

SEQ ID NO: 90744 - DNA, 1419 bp, Enterobacter aerogenes
atgaaaatcaaaactcgcttcgcgccaagcccaacaggctatctgcacgttggcggtgcgcgtactgctctctattcctggctttttgcacgtaaccacggcggtgagtttgtgctgcgtattgaagacaccgatctcgaacgctccaccccggaagcaattgaagccatcatggatgggatgaactggctgaatctggagtgggatgaaggtccgtacttccagactaaacgtttcgatcgctataacgcggttattgatgaaatgctggaagcaggtacagcttataaatgctactgctcgaaagaacgtctggacgcgctgcgcgaagaacagatggcgaacggtgaaaagccgcgctacgacggccgctgccgccatgatcatcagcatcacgccgccgatgagccttgcgtcgtgcgttttgccaacccgcaggaaggttcggttatctttgacgaccagatccgcgggccgatcgaattcagcaaccaggagctggacgatctgatcattcgccgcaccgacggctccccgacctataacttctgcgtcgtagttgatgactgggatatggcgatcacccacgtgatccgcggtgaagaccacatcaacaataccccgcgccagatcaacatcctgaaagcgctgaatgcgccggtgccggtttatgcgcacgtatcgatgatcaacggcgatgacggtaaaaaactttccaagcgccacggtgcggtgagtgtgatgcagtaccgtgacgacggctacctgccggaagcgttgctgaactatctggtgcgtctgggctggtcccatggcgatcaggagatcttcacccgcgaagagatgatcgagttcttctcgctgggcgcggtcagcaagtccgccagtgcgttcaacaccgataaactgctgtggttaaaccatcactacatcaacacgctgccggcagaatatgtcgcgacgcatctgcagtggcacattgagcaggaaaatatcgatacccgtaacggcccgcagttgtccgaactggttaaactgctgggcgagcgttgcaaaacgctgaaagagattgctcagagctgccgttacttctatgaagagttcgccgagttcgacgccgatgcagcgaagaaacaccttcgtccggtggcgcgtcagccgctggaagtggttcgcgataagctggcggccattagcgactggacggcggaaaatgtccaccatgcgattcaggcgactgccgatgagctggaagtgggcatgggtaaagtgggcatgccgctgcgcgtggccgtaaccggcgcgggtcagtccccggcattggatgtcaccgttcatgccatcggtaaatcccgtagcgttgaacgtatcaataaagcgctggcgtttatcgccgaacgcgaaagccagcagtcctga

SEQ ID NO: 90745 - DNA, 534 bp, Enterobacter aerogenes
gtgaaaactttaattcttttctccacccgggatgggcagacccgtgaaattgcctcctacctggcttctgaactcaaagagctgggggttgatgcggatactgtgaacctgaaccgtaccgagacggttgagtggcatcattacgatcgggtggtgattggcgcttctattcgctacgggcactttcatccagcgctggatcgctttgtgaaaaagcatctggcatctctgcaggcgttgccgggggcgttcttctcggtaaacctggtggcgcgcaaaccggaaaagcgcaccccgcaaaccaacagctatacgcgcaagtttctccttaactcgccgtggcagccgcagagctgcgcggtatttgccggtgcgctgcgttatccgcgatatcgctggtacgatcgaatgatgattcgcttaattatgaagatgaccggcggggaaacggataccagtaaagaagtggtttataccgattggccgcaggttgccagatttgcccgagaaatcgcgcaaatgacgagcaaatag

SEQ ID NO: 90746 - DNA, 1452 bp, Enterobacter aerogenes
atgcattttcgcgcgataacccgaatcgttggactgttggtcatcttattttcggggacaatgattgtcccgggattagtggccttgatatatcgcgatggcgcggggcgagctttcacccaaaccttctttgttgccctggcgattggctccatgctgtggtggccgaaccgcaagcaaaaaggcgaactgaaatcccgcgaggggtttctgattgtcgtgctgttctggaccgtgttgggcagcgtcggtgcgttaccgtttatctttgctgaacagcctaatctcacggtgacggatgccttttttgaatccttctccggcttaaccactaccggcgcgacgacactggtgggactggactcactgcctcatgccatcctgttctatcgccagatgctgcagtggttcggcggtatggggatcatcgtgctggcggtggcgattttgcctatcctcggcgtcggtgggatgcagctctaccgggcggaaatgccgggcccgttgaaagacaataaaatgcgcccgcgtattgccgagacggcaaaaacgctgtggcttatttatgtcttattaaccgtcgcctgcgcattggcgctgtggtttgccggaatgccggcattcgacgcgatcggccatagctttgcgaccatcgctatcggcggcttctcaactcacgatgccagcgtcggctactttaatagcccgatgattaattccatcatcgccatcttcctgctgatctccggctgtaactatggcctgcacttttcgctattaagtggacgcagtttgcgggtttactggcgtgacccggaattcagaatgtttatcggtgttcagctaaccctggttatcgtctgtacactggtattgtggctacataatgtctacggctcggtgttaacaacgctgaaccaggcgttcttccaggtggtgtcgatggcgacgaccgctgggtttactaccgatagtattgcgcgctggccactgttcttgccggtattgctgctatgctctgcgtttatcggcggctgcgccgggtcaacgggcggtggcttaaaggtcattcgtatcctgttgctgtttaagcaggggaatcgtgagcttaagcgcctggtgcacccgaatgcggtctatagcattaagctaggcaaccgtgcgctaccggaacgtattctggaagccgtgtggggattcttctccgcctatgcgttggtctttatcattagtatgctggctattattgcgactggggttgatgacttctctgcctttgcttcagttgtggcgacattgaacaacctggggcctggtcttggggtcgttgctgataactttgcgacaatgaacccggtcgcgaaatggatcctgattgctaacatgctgtttggtcgtctggaagtgttcaccttattggtgctctttactcccactttctggcgcgaataa

SEQ ID NO: 90747 - DNA, 615 bp, Enterobacter aerogenes
atggaaagttggttggtgccggccgcgccggtgagcgttgttgaagagatcaaaaagagccgtttcatcacgctgttggcgcataccgacggcgtggcggcggcgaaagcgtttgtcgaatcggtcagggctgagcacccggacgctcgtcaccactgcgtggcatgggttgccgggcctcctgatgattcacagcagctgggtttctctgacgatggcgaaccggcgggaacggcaggtaaacccatgctggcgcagctgatgggcagcggcgtcggcgagataaccgcggttgtggtgcgctactacggtggtattctgctgggtaccggcggcctggtgaaggcctatggcggcggtgtccatcaggcgcttgcgcagttgaaaacgcagcgcaagacgccgttaaccgcatatactttgcaatgtgaatacggacagctggccggggtagaagcgttgctggtgcagttctcgggcattattgtggaaagtgaatatcaggcgtctgtgcaactgcgcgtcgcgcttccgcaagctgaagtggcctctttttcgacaaaactggctgattttagtcgtggttcattgcaattactgaagattgacgaataa

SEQ ID NO: 90748 - DNA, 1332 bp, Enterobacter aerogenes
atggaatcactggccgcgctttataaaaatcatatcgttaccctacaagaacgtacccgcaaagttttagatcgcttcaagctggatgctctgcttatccactccggcgagctgatcaatgtcttcctcgacgatcatccgtatccgtttaaggttaacccgcagtttaaggcgtgggtgccggtgacccaggtgccaaactgctggctgctggtggatggcgtgaataaaccgaaactgtggttctatctgccggtcgattactggcacaacgttgagccgctgccgacctctttctggactgaggaagtggatgttattgcgttgccgaaagccgatggcattggcggtcaactgcccgcggcgcgtggcaacatagcgtatatcggcccggtgccggaacgtgctttaggtctggagatcgcggcagacaaaatcaacccgaaaggtgttatcgactatctgcactattatcgcgcttacaaaaccgactatgagctggcctgtatgcgtgaagcgcagaaatcggcggtcaacggccatcgcgcggcccacgaagctttccagtcggggatgagcgagttcgatattaatcaggcttacctgacggcgacaggtcatcgcgataccgatgttccttacagcaacatcgtggcgctgaatgagcatgcggccgtattgcactacaccaagctggatcaccgtgcgccaaccgagatgcgtagcttcctgttggatgctggcgcagagtacaacggctatgccgcggacctgacgcgtacctgggcaggccacagcgacaacgatttcgcgcagctgattaaagacgttaacgacgagcaactggcgctgattagcaccatgaaggctggcgccagttacgttgattaccatattcagttccatcagcgcatcgcaaagctgctgcgtaaacaccagctagtgaccggcatgagcgaagaggcgatggtggaaaacgatctgaccgggccgtttatgccacacgggattggtcatccgctgggcctgcaggttcatgatgtcgccggtttcatgcaagacgataccggtacgcatctggcggcgccgtcgaagtatccttacctgcgctgcacccgtattctcgaaccgcgtatggtgttgactatcgaaccaggcatctactttattgagtcgctgttggcgccatggcgtgaagggcagttcagcaagcacttcaactggcagaaaattgaagccatgaagccgtttggcgggattcgtatcgaagataacgtggtggttcacgaaaacagcatcgaaaatatgacgcgcgacctgaaactggcgtaa

SEQ ID NO: 90749 - DNA, 2190 bp, Enterobacter aerogenes
atgctctacaaaggcgacaccctgtacctcgactggctggaagatggcattgccgaactggttttcgacgcccccggctcggttaacaagcttgatactgcaaccgttgccagcctcggtcacgcgctggacgtactcgaaaaacaacaagatctcaaagggctgctgctgcgctctgaaaaagcggcctttatcgtcggcgccgatatcaccgaattcctttcgctattcctggtgccggaagaacagttgagccagtggctgcacttcgccaacagcgtcttcaatcgtctggaagatttaccggtccctactctgtcagcggttaacggctacgcgctgggcggcggctgcgaatgcgtactggcgaccgactatcgcctcgccacgccggatctgcgcatcggcctgccggaaaccaagttgggcattatgcctggcttcggcggttccgtacgtctgccgcgcctgctcggcgccgatagcgcgctggaaattattgccgccggtaaagacgtcggtgccgatcaagcgctgaaaattggcctcattgacggcattgttgccgcggaaaaactgcatgacggcgcgctggcgattctgcgccaggcgattaatggcgacctggactggaaagccaaacgtcagccgaaactggagccgctgaagctcagcaaaattgaagccgccatgagcttcactattgccaaaggtatggtcgcgcaaaccgccggaaaacattacccggcgccgatcaccgcggtaaaaaccatcgaagccgccgcgcgtcttggccgtgatgacgcgctgaagctggaaaaccaaagttttgttccgctggcgcacaccaacgaagcgcgcgcgctggtcggtatcttccttaacgaccagtacgtcaaagcgaaagcgaaaaaactcactaaagatgtcgagacgccgaagcacgctgccgtattaggcgccggcattatgggtggcggcattgcttaccagtcagcctggaaaggcgtgccggtggtgatgaaagacattagcgacaaatcgctgacccttggcatgaccgaagcggcgaagctgctgaataaacagctggaacgcggaaaaatcgacggcctgaagctggccggagtgattagcaccattcagccaacgctggaatacagcggttttgaccgcgtggacgtcgtcgttgaagcggtggtggaaaacccgaaagtgaagaaagcggtactggcggaaaccgaagagaaagtgcgtccggacaccgtgctggcttccaacacctcaacgattcctatcagcgagctggccagcgttctgcagcgcccggagaatttctgcggtatgcacttctttaacccggtacatcgcatgccgctggttgaagtgatccgcggcgagaaaacttcggacaagaccattgccaaagtcgtggcctgggccagcaaaatgggcaaaacaccgatcgtggtgaatgattgccccggcttcttcgttaaccgcgtcctgttcccctatttcgcaggcttcagccagctgctgcgcgacggcgcggatttccgcaaagtcgacaaagtgatggaaaaacagtttggctggccgatgggcccggcctatctgctggatgttgtcggcatcgataccgcgcaccatgctcaggcggtaatggcggcggggttcccacagcggatgcagaaagattatcgcgatgctatcgacgcgctgtttgacgccagccgtttcggccagaagaacggcctcggtttctggcgttataaagaagacagtaaaggtaagccgaagaaagaagaagatgccgcagtcgatagtctgctggccgaagtcagccagccgaagcgcgatttcagcgatgaagagattatcgcccgcatgatgatcccaatggttaacgaagttgttcgctgcctggaagaaggcattatcgccagcccggcggaagcggatatggcgctggtatacggcctgggcttccctccattccacggcggcgcattccgctggctggataccatcggcagcgcaaaatatctcgatatggcgcagcaataccagcacctcggcccgctttatgccgtgccggagggtctgcgtaataaggcccgtcataacgaagcgtattatcctccagtagaaccagcccgtccggttggcgaactgaaaacggcttaa

SEQ ID NO: 90750 - DNA, 1164 bp, Enterobacter aerogenes
atggaacaggttgtcattgtcgatgcaattcgcaccccgatgggccgttcaaagggcggcgcctttcgcaacgtgcgtgcggaagacctctccgcacacctgatgcgaagcctgctctcgcgtaacccgtcccttgaggcgagcgcgattgacgatatttactggggctgcgtgcaacaaacgctggagcagggtttcaacattgcgcgtaacgccgcgctgttggcggaaataccgcactcggtaccggcaacaacggttaaccgcctgtgcggttcctccatgcaggcgctgcacgatgccgcccgtatgatcatgaccggcgacgccagtgtctgcctgattggcggcgttgagcacatgggccatgtgccaatgagtcatggtgtcgatttccatccgggccttagccgtaacgtggcgaaagccgccggtatgatggggctgaccgcggaaatgctggcgcgtctacacggcattagccgtgaaatgcaggatcaattcgccgcacgttcccacgctcgcgcctgggcggcgacgcaatccggggcattcaaggcggagattatcccgaccggcggccacgatgccgatggcgtgctgaaatcctttaattatgacgaagtgatccgcccggaaaccaccgtagaagcgctggcggcgctgagaccggctttcgatccggtgaccggcacggtaacggcaggtacctcttccgcgctttccgacggcgcggcggccatgctgctgatgagcgaaagccgcgcccgcgagttggggctgaagccgcgcgctcgcgtccgttcaatggcggtggtcggctgcgatccgtccattatgggttatggcccggttccggcctcaaagctggcgctgaaaaaagcgggattatccaccagcgatatcgacgtctttgaaatgaatgaagcgtttgccgcgcagatcctgccgtgtattaaagatctgggcttaatggagcagatcgacgagaagatcaaccttaacggcggcgcgatcgcgctcggccatccgctgggctgctccggggcgcgtattagcaccaccttgatcaatcagatggaacgcaaagacgcgcagttcggtctggcgaccatgtgtatcggcttaggccaggggatcgccaccgtattcgagcggatgtag

SEQ ID NO: 90751 - DNA, 702 bp, Enterobacter aerogenes
atgacaaccttaagctgtaaagtgacctcggtggaggcgattaccgataccgtgtatcgcgttcgattagtaccggaagcggcattttctttccgcgccggccagtatctgatggtagtgatggatgagcgcgacaagcgtccgttctctatggcttccacgccgtcagagcatgagtttatcgagctgcatatcggtgcttctgaactcaatctgtatgcgatggcggtgatggatcgcattctgaaagagcgtgaaattgaggttgatattccgcatggcgaagcgtggctgcgcgatgacgaagatcgcccgctgattctgattgccggcggtaccggattctcttatgtgcgttctattctgttaaccgcgctggcgcgtaacccggatcgcgatatcgccatttattggggcggccgcgaggctaagcatctgtacgatctggccgagctggaagcgttaagcatcaagcatccgaatctgcgcatcgagccggtggtcgagcagccggaagaagggtggcgtggtcgctccggtacggtactcaccgccgtgctgcaggattacggtacgctggccgagcatgatatttacattgccggtcgttttgagatggccaaaattgcccgcgacctgttctgtaatgagcgcggcgcgcgtgaagatcgcctgtttggcgatgcgtttgcgtttatctga

SEQ ID NO: 90752 - DNA, 1470 bp, Enterobacter aerogenes
atgaaataccacgatctacgcgactttctgacattacttgagcagcagggcgagctaaaacggataaccctgccggtcgacccgcatctggaaattaccgaaattgccgaccgcaccctgcgtgccggcggcccggcgctgctgtttgaaaacccgaaaggctactcgatgccggtgctgtgcaacctgtttggcacgccgcgtcgtgtggcgctggggatgggccaggaagacgtcagttcgctacgggaagtcgggaagttattggcctttctgaaagagccggaaccgccaaaaggcttccgcgatctgtttgataagctgccgcagttcaagcaagtgttgaatatgccgaccaaacgcctgcgcggcgcgccttgtcagcaaaaaatcatccagggcgatgatgtcgatctcaacaaaataccgattatgacctgctggccggaagatgccgcgccgctgattacctgggggctgacggtgacccgcggcccgcacaaggagaggcaaaatctgggtatttatcgccagcagctgatcggtaaaaataaactcatcatgcgttggttgtcccaccgcggcggcgcgctcgatttccaggagtggtgcgcggcgcatcccggcgaacgttttccggtttccgtggcgcttggcgccgatccggcgaccattctgggcgcggtgacgccggttcctgataccctgtcggaatacgctttcgcaggcttgctgcgcggcaccaagaccgaagtggtgaagtgcgtttccaatgaccttgaagtgccggccagcgcggaaatcgtgcttgaaggctacatcgaggccggcgagatggcgccggaagggccatacggcgatcataccggctactacaatgaagtagacagcttcccggtatttacggtgacccatattacccagcgcgaagacgcgatttatcattcgacctataccggtcgtccgccggatgaacccgcggtgctgggcgtggcgctgaacgaagtctttgtgccgattctgcaaaagcagttcccggaaatcgtcgatttctatctgccgccggaagggtgttcctatcgcctggcggtggtgaccatgaaaaaacagtacgcaggccatgccaagcgcgtgatgatgggcgtctggtcgttcctgcgccagttcatgtataccaagttcgtgattgtctgcgacgatgacgtgaacgcgcgcgactggaatgacgtgatttgggcgattactacccgtatggacccggctcgtgatacggtactggtagaaaatacgccaatagattatctggattttgcctcgccggtttccggcctgggttcaaaaatggggctggatgccacaaataaatggcctggcgaaacccagcgtgaatggggtcgtccaatcaaaaaagatcctgaggtgacggcgcgtatcgacgccatctgggatgaactggccatctttaaataa

SEQ ID NO: 90753 - DNA, 522 bp, Enterobacter aerogenes
atgcttgcaggtagtaaagcggaaagagtcattatgcaagcctggtacttactttattgcaaacgtgggcagcttcagcgcgcccaggaacaccttgaacgtcaggcagtcaattgcctgatgccgacgatcgcgctggaaaaaatcatccgtggtaaacgtactacggtcagcgagcccctgttcccaaactatctgttcgtcgaattcgatcccgagatcattcataccaccaccatcagcgctacccgaggggtgaacagtttcgtccgttttggcgcccaaccggcagtggtcccttcagaggtgattcaccagctttccatctataaaccggaaggcattaccgacccggaaacgcctcatgaaggcgacagcgtgttaatcaccgacggcgcttttgaaggactgcaggctatcttcaccgagcccgacggcgaagcacgctccatgctgctcctcaatctgttgaataaacaggtcctgcaaagcgttaaaaataccgacttctataaaatctga

SEQ ID NO: 90754 - DNA, 783 bp, Enterobacter aerogenes
atgtttgatattggcgtaaatctgaccagctcgcagttttcccgcgatcacgacgaggtggttgcgcgcgcgcaggcggcgggtgtccaggggatgttgctgaccggcaccaatctgcatgaaagccagcaggcgcggcagatggctggccgttacgccaactgctggtctaccgcgggtgtacatccgcacgatagcagcacctggacggagtcggtggccgaagaaattcacgcgctggcccgccagccgcaggtggcggcgattggcgaatgcggtcttgatttcaaccgtaatttctcaacgccgcaggagcaagagaaggcgttcagcgcccaactggcgctggcggccgagctctcaatgccggtatttttacactgccgcgacgcccatcaacggttccttgcgctgctggagccgtggctcaataaactgcccggcgccgtgttgcactgctttaccggtagccgcgcggaagtgcttcagtgtcttgatagaggtttatttatcggtatcaccggttgggtgtgcgatgagcggcggggactggagcttcgcgaactgttgccggcgatcccggcggaacgtttgctgctggagaccgacgcgccatatctgttgccgcgcgacatgaagccgaagccctcctcgcggcgcaacgagcccgcttatctgccgcatattctggcaagcgtagcgggctggcgaggcgaggaagcgcaacggctggaggaggttacggatgcgaacgtcaggaagctgtttggcgtgcgcttttaa

SEQ ID NO: 90755 - DNA, 774 bp, Enterobacter aerogenes
atgggcgtagacgagactcaaccgttaatttcacatctgattgagctgcgtaagcgtctgctcaacagcatcattgccatcctggtgatcttcctggcgttggtttacttcgccaatgatatctatcaactggtatccgctccgcttatcagcaaaatgccggtaggcgcgacgatgatcgccaccgatgtcgcttctcctttcttcacgccgatcaaactgacttttatggtctcggtgatcctgtcggtgccggtcattctttatcaggtatgggcattcgtggcgccggcgttgtataagcatgaacgtcggctggtcatgccgctgctggtttccagtacgttgctgttttatatcggtatggctttcgcttatttcgtcgtgttcccgctggcattcggcttcctgactcacgccgcgccggaaggggtattagtttcgaccgatatccgtagctacctcgattttgtcatggcgctgtttatggctttcggcgtgtcgtttgaagtgccggtcgccatcgtcctgctctgctggatgggcgtcacgacgccggaagatttacgtaaaaaacggccctacgtgctggtgggcgccttcgtggtcggtatgctgctgacgccgccggatgtgttctcgcaaacgctgttggccatccccatgtattgcctgtttgaagtcggggtgttctttgcccgtttctacaccgggaaacgcctgacgcgtgacgaagatgccgccgccgaagaggcggagagcaaagaagagtaa

SEQ ID NO: 90756 - DNA, 537 bp, Enterobacter aerogenes
gtgttcgatatcggttttagtgaactattgctggtgttcgtgattggcctcatcgtattggggccacagcgactacctgtcgccgttaaaacggtggccagctggatccgtacgttgcgctcgctggcgaccaccgtacaaaatgagcttgcccaggagctaaaactgcaggagtttcaggagagcctgaagaaggtggagaaagccagcctggataatctgactccggagctcaaagcctcgatggacgagctgcgtgaagcagctgaatctatgaagcgttcctataccgcccacgatcctgaaaaggccagcgacgaagcgaacaccattcataatccggtcgtcaaaggtagcgaagcgcagcgtcaggatgttacaccggcaacggcggaacatcaggtcagcgccccggcacataccccggagcccgttgccgaggagccatccgtttcgccggctgaagtcccggcggctaaggaaaaagccgccgcggcagtgccagattcttcccccgcatcgagtgataaagcgtaa

SEQ ID NO: 90757 - DNA, 252 bp, Enterobacter aerogenes
atgggtggtatcagtatttggcagttgttaattgttgtcgtcatcgtagttctgcttttcgggacgaagaagctgagctcgctgggttcggatttaggcgcatcgatcaagggctttaaaaaagcgatgagcgatgacgaaaaatccgataaatcctcagccgatgcagattttgcagcgaaaactatcgctgataaacaagatgatgcgaaaaaagacgagacaaaacgccacgacaaagagcaggtgtaa

SEQ ID NO: 90758 - DNA, 1641 bp, Enterobacter aerogenes
atgacgccaggagaattacggcgcctgtattttatcatccgcacctttttgagttacgggcttgatgagctcattcccaaaatgcgtatcacgttgccgctgcgcatctggcggcgaatgttgttctggatgccgaatcgccacaaagataaaccgctgggtcaacgcttacgcctggcgctgcaggagctgggcccggtgtggattaagttcggccagatgctctccacccgccgcgatctgttcccgccgcaaatcgccgatcaactggcgctgctgcaggatcgcgtcgcacctttcgatggcaaattggctaaacaacagatcgaacaagcgatgggcgggctgcccattgaagcctggttcgatgatttcgctattgagccgctcgcttccgcctccatcgcccaggtccataccgcgcgcctgaaagacaacggcaaagaggtcgtcatcaaggtcatccgcccggatatcctgccggtgatcaaagcggacatgaaattaatctaccgcctggcgcgctgggtgcctcgtctgctgccggatggccgccgtctgcgtccgcaggaagtcgtccgcgaatatgaaaaaacgctgatggacgagctgaatctgttacgcgagtcggctaatgctattcagctgcggcgcaatttcgaagacagcccaatgctatacgtgccggaagtctattccgattactgtagcgaaggcatgatggtaatggagcggatctacggtattccggtgtccgatgtcgccgcgctggaagcccagggcaccaacatgcagttgttggcggagcgtggggtgcaggtcttctttacccaggtgttccgcgacagctttttccatgcggatatgcatccgggtaatattttcgttagctacgatcatccgcatgacccgcaatatatcggtatcgactgcggtatcgtcggctcgctgaacaaagacgataagcgctatctggcggaaaactttattgctttcttcaaccgtgattatcgtaaggttgccgagctgcacgtcgattccggctgggtgccgccggataccaacgttgaagagtttgagtttgcgattcgcaccgtgtgcgagcccatctttgaaaagccgctggcggaaatctccttcggccacgtattgctgaatctgtttaataccgcgcggcgtttcaacatggaagtccagccgcagctggttttgcttcagaagacattactttacgtagaaggggtaggtcgtcagctctatcctcagttagacttgtggaaaacggcgaagccttttctcgagtcgtggattaaggatcaggtcggtattcccgcgctggtgcgtgcgtttaaagaaaaagcgccgttctggattgaacgaatgccggaaattcctgagctggtgtaccaaagcctgcagcagagcaaacagctgcagaccagcgtcgataccatcgtgcgcgacttccaggtgcgccacgtgcgccaggggcagtcccgttatctgtttggtataggcgccgttttgcttttaagcggtacgctgttatttatccaccgcccggagtggggcatgatgccaggctggctgatggccggcggcgtcgtaacctggcttattggttggcgaaaaacgcgctga

SEQ ID NO: 90759 - DNA, 606 bp, Enterobacter aerogenes
atgcctttcgcaccactggttaccgctggcatcgaaacggttcttaatacttttctctggcgcgaccgcgcgcttaaaccggcgcgtcagcgcctgctggggaaagtgctgcgcgtagagctcaaagagctgtcggcgcctgtcgtgctggcctatagcgagcagcaaatcgacgtgctcggcgcgtgggaaggcgaagctgactgtaccgtgataacccgcttgagcgtgctgccgcagctgcgtaaccgccaacaactgaccgcgctgatccgcagcggcgatctggaagtacagggcgacctgcaggttgtgcagaacatggtcgcactttgcgatctggcggagttcgacccggcagagctattggcgccgtataccggcgatatcgtcgctgaaggggttggcaaggtgcttcgcggcggcgcgcgcttcctgctgcagggcgcgaaaagccagcagcgctacgtcgctgaagcgattaccgaagagtggcgactggcgccggggccgttggaaatggcctggtttgctgaagaatccgccgccgtggaacgcgcgctggccgcactggaaaaacggctggaaacgctggagggcaaatga

SEQ ID NO: 90760 - DNA, 756 bp, Enterobacter aerogenes
atggttgaggattcacaagaaacaacgcattttggctttcagacggtagccaaagagcagaaggcggacatggtggcgcatgtattccattctgtcgctgcaaaatatgatgtgatgaacgacttaatgtcgttcgggattcatcgcttgtggaagcgcttcaccatcgactgcagcggcgtgcgtcgcgggcaaaccgtgctggacttagcgggtggcaccggcgacctgacggcgaagttttcccgtctggtgggcgaaaccggccgtgtgatgctcgccgatatcaatgattcgatgctcaaaatgggccgcgaaaaactgcgcaacatcggtattgtcggtaacgtcgagtatgttcaggccaacgctgaagcgctgccgtttgcggataacacctttgactgcatcaccatctcctttggcctgcgtaacgttaccgataaagacaaagcgctgcgttcaatgtaccgcgtgctgaaaccgggcggacgtctgctggttctggagttttctaaaccgattctcgaaccgctgagcaaagcctacgacgcttactccttccacgtgttgccgaaagtcggcgagctggtggcaaacgatgcggaaagttatcgctatctggcggaatccatccgcatgcatcccgatcaggacaccctgaaaggcatgatgcaggaggcgggttttgaaagcgtcgactactacaacctgacggcaggtattgtcgcgctacaccgcggctataagttctga

SEQ ID NO: 90761 - DNA, 1449 bp, Enterobacter aerogenes
gtggatatctctattgtgataagcgccgtggtggcgctggcggcagggttaatcgttggctggctggcgacaaaagcccgcgccgatcaaatccgtgccgatctcattgaagagcgccgcgagctggatattgaacttagcgccgcacgtcagcagctggtgcaggaatcgcactggcgcgatgagtgcgaacttctcaacaacgagctgcgcagcctgcgtgatatcaacacctcgctggaggccgacctgcgtgaagtgaccacccgtctggaatccacgcagttgcacgccgaagataaaattcgccagatggtcaacagcgagcagcgcctgagcgagcagtttgaaaacctggcgaaccgcatatttgagcacagcaaccgacgggttgatgaacaaaatcgccagagcctgcatggcctgctgacgccgctgcgcgaacagctcgacggtttccgtcgccaggtgcaggacagcttcggccaggaggcgcgtgagcgccacacgctggcgcacgaaatccgcaatttgcaacagctgaacgcacagatggcgcaagaggcgctgaacctgacgaaagcgctaaagggtgataacaaaacccagggcaactggggagaagtggtgctaacccgcgtgctggaggcctccggcctgcgcgaaggctatgagtatcaaactcaggtgagcatcgaaaccgataaccgctcgcggatgcagccggatgttatcgtgcgtctgccgcagggcaaagacgtggttatcgacgccaaaatgaccctcgtcgcctatgagcgctacttcaacgctgacgacgactatacccgcgaagcggcgctgcaggagcatattgcctcggtgcgtaatcacattcgcctgctggggcgtaaagattaccaacaactgccggggcttcgttcgctcgactatgtgctgatgttcatccccgttgagccggcgttcctgctggctatcgaccgtcaacctgagcttatcagcgaggcgctgaagaacaatattatgctggttagcccgacaaccttgctggtggcgttgcgcaccatcgccaacttgtggcgctatgagcatcaaagccgtaacgcgcaaaaaatcgccgagcgcgccgggcgcctgtatgacaagatgcggctgtttgtcgacgatatgtcggctatcggtcaaagccttgataaagcgcaggataactatcgccaggcgatgaaaaagctcgcctccgggcgcggcaacctgctggtacaggccgagtcattccgtggcctgggggtcgaggttaagcgcgggattaatcctgatttagtcgagcaggccacggcgcaggatgacgaatatcgccttgaggaagatgaaaattcaccgcaggaagatgtgtttagcgccgattccgagcctgcagcgagcgcaaacgagcacgtcaggccaagctga

SEQ ID NO: 90762 - DNA, 762 bp, Enterobacter aerogenes
atgtccaagtctgatgtttttcatctcggcctcactaagaacgatttacaaggggctacgctggctatcgtccctggcgatccggagcgtgtggaaaagatcgccgcgctgatggataagccggttaagctggcatcacatcgtgaatttacctcctggcgcgctgagctggacggcaaaccggtgattgtttgctccaccggtatcggcggcccgtcgacctctatcgccgtggaagagctggcgcagctgggggttcgtaccttcctgcgtatcggtaccaccggcgcgattcagccacatatcaatgttggcgatgtgctggtgacgaccggttctgtccgtctggacggcgccagcctgcactttgcgccgatggagttcccggccgttgctgacttcgcctgtaccaccgcgctggtggaagcggcgaaatcaatcggcgcgactacgcatatcggcgtgactgcttcttctgataccttctatccaggccaggagcgttacgacaccttctccggccgcgtcgtgagccgtttcaaaggctcgatggaagagtggcaggcaatgggcgtcatgaactatgaaatggaatccgctacgctgctgaccatgtgcgccagccagggcctgcgcgccgggatggtggcaggggttatcgtcaaccgtacccagcaagagatccctaacgccgaaaccatgaagcaaaccgaaagccacgcggtgaaaatcgttgtggaagcggcgcgccgtctgctgtag

SEQ ID NO: 90763 - DNA, 813 bp, Enterobacter aerogenes
atgaccaccaccaagcaacccggattcgcacctgcagcctcgccgcacgcctctaccgccgtccatacgtcggatgagcacattaccgccggagaaacctcgatcccatcgcagggcgagaatatgccggcctatcacgcccgcccgaaaaacgccgacggcccgctgccgatcgttatcgtggtgcaggaaattttcggcgtacatgagcatattcgcgatctgtgccgccgcctggcgcaggaaggctatctggcgattgcgccagaactctacttccgccagggcgatccgaatgagtacaacgatatccctaccctgttcaaagaactggtcactaaggtgcctgacgcacaggtgctggcggatctcgaccacgtcgccagttgggcggcacgccacggcggcgatgcccatcgtctgctgatcaccggtttctgctggggcgggcgcatcacctggctgtatgccgcgcataacccgcagttgaaggcaggcgtcgcctggtatggcaaactggtgggagaaaaatcgctgaattcgccaaaacacccggtggatatcgccgtcgatctcaacgcgccggtacttggcctgtacggcgctaaagacgccagcattccgcaggataccgtcgagaccatgcgccaggcgctgcgggcggcaaatgcgaacgccgagatcgtggtctatcccgaggccgatcacgcctttaacgccgactatcgcgccagctatcacgaagagtcagccaaagacggctggcagcggatgctggactggtttgctcaatatggcggtaaaaaagggtaa

SEQ ID NO: 90764 - DNA, 2265 bp, Enterobacter aerogenes
atgaccattattaatcacaccctcggttttcctcgcgttggccttcgccgcgagctgaaaaaagcgcaagagagctactgggcgggcaaggccacgcgtgaagagctgttggcggtaggtcgcgagctgcgcgctcgtcactgggagcagcagaaacaggcgggcattgatctgttgccggtgggcgattttgcctggtacgaccatgttctgaccaccagcctgctgttgggcaacgtgccggctcgtcatcagaacaaagacggcaccgtcgatatcgatactctgttccgtattggtcgcggtcgcgcgccgaccggcgaacccgctgccgccgcggaaatgaccaagtggttcaataccaactatcactacatggtgccggaatttgtccagggccagcagttcaagctgagctggacccaactgctggatgaagtggacgaagcgctggcgctgggccacaagattaagcctgtactgctggggccggtaacgtatctgtggctgggcaaagtaaaaggcgaacagtttgaccgtttaagcctgctgaacgatattcttccggtttaccagcaggtactgggcgagctggcgaaacgcggcattgagtgggtgcagattgatgaaccggcgctggtactggagctgccgcaagcatggttggatgcctttaaaccggcttatgaggccctgcaggggcaggtaaaactactgctgactacctattttgaagggatcgccgacaaccttgatgttatcaccgcgctgccggtacaggggcttcacgtcgatctggtgcatggcaaagatgatgttgctgaactacataaacgtctgccggccgactggctgttatccgccgggctgatcaacggtcgtaacgtctggcgcgccgatctcacggaaaaatatgcgcaaattaaggtgattgtcggtcaacgcgaactatgggtcgcctcttcctgctccttgctgcatagcccgatcgatctgagcgtagagacccgtcttgatgccgaagtaaaaagctggtttgctttcgccctgcagaagtgcggcgaactggcgctgctgcgcgatgcgctgaacagcggtgatacgacggcgatcgaggcgtggagcgcgccaatccaggctcgtcgccattcgactcgcgtacacaacgcggcagtggaaaaacggctggcggcaatcacctctcaggacagccagcgcgccagtccttatgccgagcgcgcacaggcgcagcgcaggcgctttaacctgccagcatggccgacgacgacgatcggttcattcccgcagacaaccgaaattcgtaccctacgtctggacttcaaaaagggcaatcttgatgccagtcattatcggacgggtattgccgaacatattaagcaggcgatcgtcgaacaagaacgtctgggtttagacgtgctggtgcacggagaagccgagcgtaacgacatggtggagtatttcggtgagcatctggacggtttcatcttcacgcaaaacggttgggtgcaaagctatggctctcgctgcgtgaagccgccggtggttatcggcgacgtcagccgtccgcaagcgatcaccgtcgagtgggcgaagtacgcgcagtctcttaccgacaagccggtcaaaggcatgttgaccggtccggtgaccattctgtgctggtccttcccgcgcgaagatgtcagccgtgaaaccatcgcgaagcagattgcgctggcgctgcgcgatgaagtggcggatctggaggcggctggtatcggtattatccagattgatgaaccggcactgcgcgaaggtctgccgctgaagcgcagtgattgggatgcttatctacagtggggcgtcgaagctttccgcatcaacgccgcggttgctaaggatgacacccagattcatacccacatgtgttattgcgagtttaatgacatcatggattctatcgccgcgctggatgccgacgtcatcaccattgaaacctcgcgctctgacatggaactgctggagtcgttcgaagagttcgaatatccgaacgaaatcggcccgggcgtttatgatattcactcgccaaacgtaccgagcgtggagtggattgaagggttgctggagaaggccgcgcagcgtattccggcggagcgcttgtgggttaacccggactgcggcctgaaaacccgtggctggccggaaacccgcgccgcgctggctaacatggtgcaagcggcgcagaatctgcgcgaatcagcctga

SEQ ID NO: 90765 - DNA, 954 bp, Enterobacter aerogenes
atgatcgagattaagcacctgaaaacgctacaggcgttgcggaacagcggttcgctggcgggcgcggcggcagccctgcaccaaacccagtcggccctgtcccaccagtttagcgatctggaacagcgccttggtttccgtttgtttgtgcgtaaaagccagccgctacgcttcacgccgcaaggagaaattctgctgcagttggccaatcaggtactgccgcagatcgctcgcgcgctacaggattgcaatgaaccacagcaaacccgtctgcggctggcgattgagtgtcatagctgtattcaatggctcaccccggcgctggaaagcttccgcgcccgctggccgctggtggaagttgattttcagtccggcgtcacctttgacccgcagccagccctgcagcagggtgaactcgatctggtgatgacctcagatattttgccgcgtagcggcctgcactattcaccaatgtttgattatgaagttcgtctggtgttagctccggaacatccgctggcggcaaaaacgcgcatctccccggaagatctggctgcggaaacgttactgatttatccggtacagcgcgggcggctggatatctggcgccacttcctgcaaccggcggggatcagcccacagttgaaaagtgtcgataacacgctgctgttgattcagatggttgccgcacgaatgggtattgccgccctgccgcactgggtggtggaaagttttgaacgccagggtttgattgtcaccaaaaccctgggagaaggactgtggagccggctgtatgctgcagtgcgcgatggcgagcaacgccagccggtaacagaagcgtttattcgctcagcgcggaaccacgcttgcgatcatctgccgtttgtacggagtgcggagcgacccagcggcgatggacccatagcgaagccaggattaccagcgcgccaatga

SEQ ID NO: 90766 - DNA, 900 bp, Enterobacter aerogenes
gtggcgctattaattatcaccactatcctgtgggccttttcttttagcctgattggcgaataccttgccggtagcgtcgatagctatttttccgtgctgatgcgcgtgggcctggcagcgctggtgtttttgcctttcctgcgtacgcgcggccagtctccgcgcaccatcgtactctatatgctagtgggggcgatgcagcttggcatcatgtatttgctggctttccgcgcctatctttatctgacggtctcggaatttctgttgtttacggtctttaccccgctgtatatcaccctgatttacgatctgctcagcggtcgtaagctgcgctggggctatctgcttagcgcggcgctggcggtgttaggggcggcgatcatccgctatgacaaagtcagcgatcatttctggaccgggctattgctggtgcagttgtcgaatatctgcttcgccatcggcatggtgggctacaagcgtttgatggaagtccgcccgatgccgcaacacaatgcttttgcctggttctatgccggcgcctttattgtggcggtagcggcgtggtttatgctgggcaatccgcagaggctaccgactaccggcctgcagtggggaatcctggtctggcttggcgtggtcgcatccggattgggttatttcatgtggaactacggcgcgacgcaggtggatgccggtacgttggggatcatgaataacgttcacgtccccgccgggctgttggttaatctcgctatctggcaggagcagcctcactggccaagctttatcattggcgcgctggtaatcctggcttcgctatgggtccatcgccgctgggtcgctccgcactccgtacaaacggcagatgatcgcaagcgtggttccgcgctgagcgaataa

SEQ ID NO: 90767 - DNA, 801 bp, Enterobacter aerogenes
atgtaccaggttgttgcgtctgatttagatggcacactgctttcccccgaccatttcctcaccccctatgccaaagagacgctgaagctactcaccgcgcgcgggataaatttcgttttcgccactggccgccactacatcgatgtggggcagatccgcgataatctcggcattaagtcgtacatgatcacctctaacggcgcgcgcgtacacgatagcgaaggaaaacaaatcttcgcccataacctcgaccgcgatatcgccagcgatctgtttgagatggtgcgtaacgatgtgaagattgtgaccaacgtctatcgtgaagatgaatggtttatgaatcgccatcgcccagaagagatgcgcttcttcaaagaggcggtgttcaactacaagctttatgaaccgggcgagctggatgcggatggcatcagcaaagttttcttcacttgtgaagatcatgaacatctgctgccgcttgagcaggctatcaacgcgcgctggggcgaccgcgtgaatgtgagtttctccacattgacctgccttgaagtgatggccggcggtgtttcgaaagggcatgcgctggaggccgtcgcgaaaatgctcggctacagcctcaaagagtgtatcgcctttggcgacggcatgaacgatgccgagatgctgtcgatggccggtaaaggctgcatcatggcgaacgcccatcagcggttgaaggatttgcatcctgagctggaagtgatcggcagcaacgccgatgatgccgtaccgcattacctgcgcaaattgtacctcgattga

SEQ ID NO: 90768 - DNA, 993 bp, Enterobacter aerogenes
atgtttgggcagcaaaaggactgggacacacgagaaaacgcgtttgcggcctttaccatggggccgctgacggatttctggcatcagcgggaagaagctgaatttacgggcgtcgataaggttccggtacgctttgtgcgcttttgcgcggcaaataacgatcggctggtggtcatttgccccggccgcatcgaaagctacgtgaagtatgccgaactagcctacgatctcttccacagcggctttgacgtgatgattatcgatcatcgcggccaggggcgttccggtaggttgctgtctgatacccaccgcggtcatgttgtgcgctttagcgattatgttgacgatctggctgcgctctggcagcaggaagtggttcccggccactggcgtaaacgttttattctcgcccactcgatgggcggcgccattgccacgctgttcttgcagcgtcaccggcagcattgcgacgctattgccttatgcgcgccaatgtttggcatcatcatgcgcctgccggactggatggtgcgccatattctcgactgggctgagggccatcagcgtattcgtgaagagtatgccatcggtacgggccgctggcgggcgctgccgttttcgctcaatgtgttgactcatagccgtcagcgctatcgtcgcaacctgcgtttttatgccgacgatccacggttgcgcgtcggcgggccgacctatcactgggtgcgcgaaggtattctggccggcgaagagatattgtctggcgtcgagaaagatacgactccgacgttattgattcaggccgaggatgaaaaggtggtcgataacctgatgcacgaccgctattgtgaactccgttccgctgccgggcacccttgtgaaggcgatcagccgctcgttattgaaggggcatatcacgagatcctttttgaaaaggacgctatgcgctcagtcgcgctaaatgccatcgtcgattttttcaatcgacatacttaa

SEQ ID NO: 90769 - DNA, 621 bp, Enterobacter aerogenes
atgaccttcgagtggtggttcgcttatctgctgacatcaatcattctcagcctgtcgccgggttccggcgcgatcaataccatgaccacatccatcaaccacggctatcgcggcgcggcggcctctattgccggcctgcaaaccggattggccattcatatcgtgctggtcggcgtcggtctgggcacgctcttctcccgctcggtactggcattcgaagtgttgaaatgggcgggcgcggcatatcttatctggctggggatccagcagtggcgggcggcgggttcaattgacctgaatacgctggcgcgaactcaaagccgcggtaagctctataaacgcgcggtgttcgtcaatctgaccaacccaaaaagtatcgtcttcctcgccgcgctgtttccccagttcatcgtcccgcatcagccgcaggtgatgcagtacctggtactcggcgtcaccaccattgtggtcgatatcattgtgatgatcggttacgcgacgctggcgcagcgcattgcggcctggattaaaggtccgaagcaaatgaaggcgctgaataaagtgtttggctcgctgtttatgctggtgggggcgctgctcgcttccgcccgtcacgcctga

SEQ ID NO: 90770 - DNA, 186 bp, Enterobacter aerogenes
atgactctggcagaaacgtggctcgcagaaggcagagagaaaggtatcaaagaaggcatcaaagaaggaaaacgacaggcccttttacaggtcgccgcagcgatgctcaatcgcggcttggatgacgatgctatcctggaaatgaccggtttgaccagggatgaactacagcgccttcgtcactaa

SEQ ID NO: 90771 - DNA, 621 bp, Enterobacter aerogenes
atgttgatgctttttctcaccgtggcgctggtgcacatcattgcgctaatgagtccggggccggattttttctttgtttcgcaaaccgcggtgagccgctcgcgcaaagaggcgatgatgggcgtgctggggatcaccggcggcgtgatggtctgggcgggcgtagcgctgctcggcttgcacctgattatcgagaaaatggcctggctgcatacgttgattatggtcggcggcggtctctatctgtgctggatgggctatcaaatgctgcgcggcgcgctgaagaaaaacgacattgtcacggcggaaccgcaggttgagttggcgcgtagcggacgcagtttcctgaagggcctgctgaccaatctcgccaatccgaaagccattatctacttcggctcggtcttttcactgttcgttggcgataacatcggcgccggtgcgcgttgggggattttcctgctgatcgtccttgaaacgctggcgtggttcaccatcgtagccagcctcttcgcactgccgaaaatgcgccgcggctatcagcggatggcaaagtggatagacggcatcgcaggaaccctgtttgccggtttcggcattcatctgatcatttcgcgctaa

SEQ ID NO: 90772 - DNA, 1827 bp, Enterobacter aerogenes
gtggcacaggcggaagtattaaatcaggaatcgctggctaagcaggttttacaagagaccttcggctaccagcagttccgcccgggccaggaatcgattatcgccacggcgctggaaggccgcgattgccttgtagtgatgccgaccggcggcggtaagtcgctgtgctaccaggtacctgcattggtcctcggcggcctgacggttgtcgtgtcgccgctgatttcgctgatgaaagaccaggtcgatcagctgctggcgaacggcgtcgccgcggcctgtcttaattcaacgcaaagccgcgagcagcagcaagaagtgatggcgggctgccgcagcgggcagattcgtctgctgtatatcgcgccggaacgcctgatgctggacaactttctcgagcatctgagccactggaacttagcgatgctggcggtagatgaggcgcactgtatctcgcagtggggccatgatttccgcccggaatatgccgcgttgggccagctgcgccagcggatgccgcatattccgtttatggcgctcaccgccaccgcggatgacaccacccgccgcgatattgttcgcctgctggggctcaacgatccgctgattcaggtcagtagcttcgatcgccccaatatccgctatatgctgatggagaaatttaagcccctcgatcagctgatgcgttacgtccaggatcagcgcggtaaatcagggattatctactgtaacagccgttctaaagttgaagacaccgccgccaggctgcaaagccgcggcatcagcgcggcggcctaccatgctggtctggaaaatgatattcgtgccgacgtgcaggagaaattccagcgcgacgatctgcagatcgtggtggcgacggtggccttcggtatgggcattaacaagccgaacgtccgttttgtggtgcactttgatatcccgcgcaacattgaatcctattatcaggaaaccggccgcgccgggcgtgacgggctgccggcggaagcgatgctgttttacgatccggcggatatggcgtggctgcgccgctgcctggaggagaagcccgccgggccgctgcaggatattgaacgtcataagctgaatgcgatgggcgcctttgccgaagcgcagacctgtcgccgtctggtgctgctgaactattttggcgaagggcgtcaggagccgtgcggcaactgtgatatctgtcttgatccgccaaagcagtacgatggcttaatggacgcgcgtaaggcgctttcaactatttatcgggtgaatcagcgcttcgggatgggctatgtggttgaagtactccgcggcgccaacaatcagcgtatccgcgacctgaaccacgataaactgccggtgtacggtattggtcgcgagcagagccacgagcattgggtgagcgtgattcgtcagttaattcacctcggactggttacgcaaaatattgcccagcactccgcgctgcagctcaccgaggccgcgcgtccggtactgcgcggtgaagtcccgctgcagctcgccgtgccgcgtatcgtggcgctaaaaccgaaagcgatgcagaaatccttcggcggcaattatgaccgcaagctgttcgccaagctgcgtaaattacgtaaagcgatcgccgacgaggagaatatcccgccctatgtcgtctttaacgacgcgacgcttattgagatggccgaacagtcgccgctcaccgccggggaaatgctcagcgtcaacggcgtggggacccgcaagcttgagcgcttcggtaaagaattcatggcgctgatacgtgctcatgtcgatggcgatgatgagtag

SEQ ID NO: 90773 - DNA, 873 bp, Enterobacter aerogenes
atgcgtatctctttagcctggctgctggcgcttagcgcgttaccagcaggcgttctggcgcaggacgcgccgattgaacaaaccgttcatgacaaacccgcggtacggggcagtattatcgccaacctgctgcaggatcatgataatccgttcttgctttatccttatgagagcaactatctgctctatacatggaccagcgatctcaataaagaggcaattcgtagttacgactgggccgatgacgcgcgtaaggatgaggtgaagttccagctcagcctggcgttcccgttatggcgcggtattctcggcgataattcgctgcttggcgcctcctatacgcaaaaatcctggtggcagctctctaacagtaaaggctcggcgccgtttcgcgaaaccaactacgagcctcagctcttccttggcttcgcgacggattatgagtttgccggctggaccttgcgcgatatcgaagtcggctataaccacgactctaacggccgttccgatccaacgtcacgtagctggaaccgcctgtatactcgcctgatggcgcaaaacggtaactggctggttgaagtgaagccgtggtatgtggtcggcagtaccgatgataaccccgatatcaccaaatacatgggttactaccgcctgaagattggctaccagctgggggaggctatttttagcgctcaggggcaatataactggaataccggctacggcggcgcggaaatcggggtcagttaccctattaccaagcacgtgcgcgcctatactcaggtgtacagcggttatggcgagtcgctcatcgactataacttcaatcagacgcgcgtcggcgtcggcgtgatgctcaacgatctgttttaa

SEQ ID NO: 90774 - DNA, 465 bp, Enterobacter aerogenes
atgtctgaactgaccgccgccgccgcgctaaagctggtgggcgagatttttgtttatcatatgccttttaaccgtgcccttgggctggaactggaacggtatgaaaaagagtttgcccagctcagctttaataatcagccgatgatggttggcaactgggcgcagagtattctgcacggcggcgttattgcgtctgcgctggatgtcgccgcggggttggtctgcgtcggcagcaccctgactcgccatgacaccatcaacgaagaagagctgcgccagcgcctctcgcggatgggaactatcgatttgcgcgtcgattatttacgccctggccgcggcgaacgcttcaccgcgaccagcagcctgctgcgtgccggaaacaaagtcgccgtggctcgcgtcgagctgcataacgaagagcaggtttatatcgccagcgccacagccacctatatggtgggttga

SEQ ID NO: 90775 - DNA, 894 bp, Enterobacter aerogenes
atggacgcaaaacaaacgcggctgggcgttatgctggcgctggccgcctattttatctggggtatcgcgccggcgtacttcaaacttatttactacgttcccgccgatgaaatcctgacccatcgcgtgatctggtctttctttttcatggtggcgctcatcagcgtcagccgccagtggccgcaggtaaaaaaactgctaaaaaccccgcgcaagatcttcctgctcgcgctctctgcggtgcttgtcggcggcaactggctgctctttatctgggcggtcaataaccaccatatgctggaagctagcctcggctactttattaacccgctggttaatatcgtgctcgggatgattttcctcggcgaacgctttcgtcggctgcagtggttggcggtgatcctcgctttttgcggcgtgctggtgcaactttggaccttcggctcactgccggtaatcggccttgggctagccttcagctttgccttctacggactggtacgtaagaaaatcgccgtcgatgcgcagaccggcatgttggtggaaacgctatggctgctgccagtggcggcgatctggcttttcggcatcaccgatagcccaaccagccatatgggagacaacccctggtcgctcaatttactgctgatggccgcgggcgtggtaactaccatccccctgctgtgctttaccggtgcggcaacccgcctgcgcttgtcgacgttgggctttttccagtacattggcccgacgctgatgttcctgctggcggtaacgttctacggtgaagtgccgggcacggataagatggtaaccttcgcctttatctgggtggcgctggcgatattcgtgatggatgcggtatatacgcaaagacgggggcgccggggatag

SEQ ID NO: 90776 - DNA, 951 bp, Enterobacter aerogenes
atgctgagcgcatttcaactggaaaataatcgtttaacgcgccttgaggccgatgagatcaagcatctcgccagctcggtgtgggtcgatctggtcgagccagacgatgacgaacgtagccgtgtgcaaacggagttaggccagaacctggcgacgcgcccggaactggaagacatcgaagcgtcagcgcgtttctttgaagacgaagatggtttacacatccactcctttttctttttcgaagatgccgacgatcacgccggtaactcaaccgtggcgtttaccatccgcgaaggccgcctgtttacattgcgcgagcgtgaactgcccgcttttcgcctgtaccgcatgcgcgtgcgtaaccagacgctggtcgacggcaacgcctatgagctgctgttagatctgttcgagaccaaaatcgaacagctggcggatgagatagaaaacatctacagcgacctggaaaagctgagccgcgtgattatggaaggccaccagggcgacgagtacgacgaagcgctgtcgacgctggcggaactggaagatatcggctggaaggttcgcctctgtctgatggatacccagcgcgcgctaaacttcctcgtgcgcaaggcgcgcctgccggcaggccagcttgaacaggcgcgagagatcctgcgagatatcgaatccctgctgccgcacaacgaatcgctgttccagaaggtgaacttcctgatgcaggcggcgatgggctttatcaacatcgagcagaaccgcattatcaagatcttctcggtggtttcggtcgtgttcctgccgccgacgctggtggcgtccagctatgggatgaactttgagtttatgccagaactacactggagctttggttatccgggagccatcgtgtttatgatgttggcaggcctggcgccgtatctctacttcaagcgtaaaaactggctgtag

SEQ ID NO: 90777 - DNA, 2163 bp, Enterobacter aerogenes
atggacgtttcttacctgctcgacagccttaatgacaaacagcgtgaagccgtagcggcctcgcgcaccaatatgctggttctggcaggggcgggcagtggtaagacgcgcgtactggtgcaccgtatcgcctggctgctgagcgtggagaactgctcgccgtattccattatggcggtgacctttaccaacaaagcggcggcggagatgcgccaccgtatcggccaactgatgggcaccacccagggcggtatgtgggtcggcaccttccatggcctggcccatcgcctgctacgcgcccatcatctggatgccaacctgccgcaggatttccaaatcctcgatagcgaagaccagctgcgcctgctgaagcgcctgattaaggcgatgaacctggatgagaagcaatggccgccgcgtcaggcgatgtggtacatcaacagccaaaaagatgaagggctgcgcccgcaccatattcagagctacggcaacccggtcgaacagacatggcagaaggtgtatcaggcctatcaggaagcctgcgatcgcgccgggctggtggacttcgccgagctgctgctgcgcgcgcacgagctgtggctgaacaaaccgcacatcctgcagcactaccgcgagcgcttcaccaatattctcgtcgacgaattccaggacaccaataacattcaatatgcctggatccgcctgctggcgggcgataccggcaaagtgatgattgtcggcgatgatgaccagtcgatttacggctggcgcggcgcgcaggttgaaaacattcagcgcttcctgaatgacttcccgggggcggaaactattcgtctggagcagaactatcgttcgaccagcaatattctcagcgccgccaacgccctgattgaaaacaacaacgggcggttgggcaaaaaactgtggaccgacggcgccgacggcgaacccatttcgctgtactgcgccttcaacgatcttgatgaagcgcgtttcgtggttaaccgaattaaaacctggcaggagaacggcggagcgctggagcagtgcgccattctctatcgtagcaacgcccagtcgcgcgtgctggaagaggcgctgctacaggccagcatgccgtaccgtatctacggcggcatgcgcttcttcgaacgtcaggaaatcaaagatgcgctctcttatctgcgtctgattgccaaccgcaacgatgacgcggcgtttgagcgcgtggtcaatacgcctacccgcggcatcggcgatcgtaccctggatgtggtgcgccagacctcgcgcgatcgtcagctgacgctgtggcaggcctgccgcgagctgctcaaagagaaagtgctggcaggccgcgcggccagcgctctgcagcgctttatggagcttatcgacgcgctggcgcaggaaactgccgatatgccgctgcatgtccagactgaccgggtcattaaagattccggcctgcgtatgatgtacgagcaggaaaaaggcgagaagggccagacccgtatcgaaaacttagaggaactggtgacggcgacgcgccagttcagctacaacgaagaagatgaagatctgatgccgctacaggcgttcctctcccacgccgcgctggaagccggcgaagggcaggcggatacctggcaggatgcggtacagctgatgaccctgcactcggcgaaagggctggagttcccgcaggtgtttatcgtcggcgttgaagaggggatgttcccgagccagatggcgcttgatgagggcggtcgtctggaggaagagcgtcgtctggcttacgtcggcgtgacgcgcgcgatgcagaaactgacactgacctacgccgaaacccgtcgtttgtacggcaaagaggtttaccatcgcccatcgcgctttatcggcgagctgccggaagagtgcgtggaagaggtgcggctgcgggctacggtgagccgcccggttaaccatcagcgcctcggtactccggtggcggagaacgataccggctataagctgggccagcgggtccggcatccgaagttcggcgaaggcaccatcgtcaaccttgagggcagcggtgaacatagccggctgcaggtggcattccaggggcagggaattaaatggctggttgccgcctatgcccggctggaaacggtgtaa

SEQ ID NO: 90778 - DNA, 717 bp, Enterobacter aerogenes
atgcgtttttaccgacctctgggcccgatctccgcgctgacgttcgacctggatgacaccctttatgataaccgcccggtgattgaccggacgatgcaggaatcgctgacgtttgtgcgcaattaccatccggcgctgagccagtttgatgcccatgcgcttaatcaactgcgacaaacgctattgtcctcagaacctgagatttatcacgatgtcaccgtctggcgccaccgcgcgctggagttagggatgcgtaatgccgggctctccgccgccgaggcgaaagccggcgccgatgcggcgatggaaaacttcgcccactggcgcagtcgcgtcgacgtgccgcaggagacgcacgatacgctggcgaagctggcgcagaaatggccgctggtggctatcaccaacggtaacgcccagccagaactgttcgggctgaatgactatttccgtttcgtgctgcgcgcgggcccggatggtcgctccaagccgtttgccgatatgtaccatctggcggcggagcgcctggatttacccctcgggcagattctgcacgtcggcgatgatctgaccaccgacgtggctggcgctattcgctgtggaatgcaggcctgctggatcaagccgcaggacgcgtcgttgatgaaaaccgccgatagccgcctgctgccgcatattgaaatttcacggttggcatctctgacctcgctgatataa

SEQ ID NO: 90779 - DNA, 903 bp, Enterobacter aerogenes
atgaccgactccccgctattcgcctgcgtcgaccgcttcctgcgctatctcggcgtagagcgccagcttagcccgattacgctcacgaattaccagcgccagctggaagcgctgatcgcgctggcggaggatgctggcttaaaaagctggcagcagtgcgacgccgctcaggtacgtagctttgccgtgcgcagccgccgcgcgggcttaggcccggcgagcctggcgctgcggctttccgccttgcgcagtttcttcgactggatggtcagccagggcgagttagcggctaacccggcgaagggaattgcggcgccaaaaattccccgccatttaccgaaaaatatcgacgttgatgatgtgaatcggcttctggatatcgaccttaacgacccgctcgcggtgcgcgaccgggcgatgctggaagtgatgtacggcgcggggctgcgtctttctgagttagttaaccttgatattcagcaccttgatcttgagtcaggggaagtgtgggtgatgggtaaaggcagcaaagagcgccgcctgccaattggacgcaacgcggtggcgtggatcgaacattggctggatttgcgcggcctgttcggcggtgatgacgacgcgctgtttttgtcgaagctgggtaagcgaatttcagcgcgcaacgtgcagaagcggtttgccgaatgggggatcaagcaggggctcaatagccacgtgcatccgcataagctgcggcactccttcgcgacgcatatgctggagtcgagcggcgatctgcgcggcgtgcaggagctgctggggcatgccaatctctccaccacccaaatctatacccatctcgattttcaacaccttgcctcggtgtacgatgccgcgcatccgcgcgctaaacgggggaaataa

SEQ ID NO: 90780 - DNA, 708 bp, Enterobacter aerogenes
atgaaacagatcggggaagaacagcaggaactcgccacagcgctcgacgacagcgcggtagtagattatctgctgcaaaatcctgagttctttattcgtaatgcagcgcaggtagagcatatccgcgtcccgcatccggtgcgcggcaccatctcgctggtcgagtggcatatgctgcgggcgcgtaaccatatcaacgtgctggaagaaaatatgacgctgctgatggaacaggcgacggccaatcaaagcctgtttcagcgcctgttccatctgcagacgcgcctggcgtccgccgatagcctggatgaaatgctcaaccgctttcatcgttgggcgcgcgagctgggtctggcgggcgcgacggtgcgcctgtttccggacagctggcatctcggcgcgccgtctaaattcacccatctggcgttgagccggcaggcgttcgaacccattcgtatccaacggttgggccaggcacgtcactatcttggtccgctgaacgggccagagctgttggtggtgctgccggatgcgaaagctatcggctcggtggcgatgtcgctactgggcgatgacgacgcgccgggggtgatgttcttcagcagccgcgatccacaacattatcagcaaggtcaggggacgcagctactgcaggagattgcgcgcatgctgcccggcctgctggagcgctggattgaacgcgcatga

SEQ ID NO: 90781 - DNA, 825 bp, Enterobacter aerogenes
atgcagttctctaaaatgcatggcctcggcaacgacttcatggttgttgatgcggtaacgcagaatgttttcttctcaccggagctgattcgtcgccttgcggatcggcatcttggcgtcggcttcgaccagctgctggttgtcgagccgccgtacgatcccgatctggacttccactaccgtatcttcaatgctgacggtagcgaagtctcgcagtgcggcaacggcgcgcgctgcttcgcccgctttgtccgtttaaaaggcctgaccaataaacgtgatatccgtgtgagcaccgccaacggtcgtatggtattaagcgtaacggaagatgatctggtgcgcgttaacatgggcgagccgaatttcgagccgtctcaggtcccattccgcgccaacaaagcggaaaagacctatattatgcgtgcggctgaacagacagtattgtgcggcgtcgtttcaatgggcaacccgcactgcgtgattcaggtcgataacgtggacaccgccgcggttgaaaccctcggtccggtgatggaaagccacgaacgttttccggaacgcgccaatatcggctttatgcaggtagtggaacgctctcatattcgtctgcgcgtctatgaacgcggcgcaggtgaaacgcaggcctgcggcagcggcgcctgtgcggcggtggcggtcggtatccaacagggattactcgccgaagaggtacgcgtggaattgccaggcgggcgtctcgacatcgcctggaaaggtccgggtcaaccgttgtatatgactggcccggcggcacacgtctacgacggatttattcatctatga

SEQ ID NO: 90782 - DNA, 225 bp, Enterobacter aerogenes
atgaatcatgggcaactatcaatgaaaaacgttttacccacgcttgccgttctgtttgcaatcttcagcctgaccggctgcggtttgaaagggccgctgtatttcccgccggcagacaaaaccgcgccgccgccgaccaagccggttaacccaggcattcagagcgcgacgccggatcgtaacgatcgcggcgataatggcggtccgacccaggttaactattaa

SEQ ID NO: 90783 - DNA, 321 bp, Enterobacter aerogenes
atgaacgacagtgaattccatcgcctggccgatagcctgtggatgaccatcgaagaacgtctggacgattgggacggcgacagcgatatcgactgcgaaatcaacggcggcgtgctgaccatcagcttcgaaaatggcagtaagatcattattaaccgtcaggagccactgcatcaggtctggctggcgaccaagcaaggcggctatcacttcgatctgcaaggcgacgagtggatctgcgatcgcagcggcgaacgcttctgggatctgctggagcaggcggcaagcaatcaggccggcgagacggtgagcttccgttaa

SEQ ID NO: 90784 - DNA, 2631 bp, Enterobacter aerogenes
atggtgacggttcttgttgaaatactgaaatcctccgtactattgtacgtcggatttttgaacatcaggcgatatgtcttgtacctctatattgagacactgaaacagagactggatgccatcaaccaactgcgcgtggatcgcgcgcttgctgccatgggacccgctttccagcaggtttacagtcttctgccgacattactacattatcatcacccgctgatgccgggttaccttgacggtaacgttccccgcggcatttgcctctacacgcctgatgaaacccaacgccactatcttgacgaactcgaactgcatcgcggcctgctaacgcaggagccgccgaaaggcgaactgccgattaccggcgtctattcgatgggcagtacctcttccgtcgggcaaagctgctcttccgatctggatatctgggtatgccatcaggcctggctggataacgaagaacgccaactgctgcagcgtaaatgcagcctgcttgaaagctgggcggcgtcgctcggcgtcgaggtcagtttcttcctgatcgacgaaaaccgcttccgccataacgaaagcggcagcctcggcggcgaagactgtggttcgacccagcatattttgttgctcgatgaattttaccgcaccgccgtgcgtctcgccgggaaacgtattctgtggaatatggtgccgggcgatgaagaagaccattacgatgattacgtgatggggctgtatgcccagggcgtgctgacgccaaacgaatggctcgatctcggtggcctcagttctctgtcggcggaagagtacttcggcgccagcctgtggcagctgtataagagcatcgactccccgtataaagcggtgctgaaaacgctgctgctggaagcctactcgtgggaataccccaacaaccgcctgttggcgaaagatattaaacagcgcctgcacgatggcgagattgtctcattcggtctcgacccctactgcatgatgctggagcgcgtaaccgcctatctgcaggctatcgaagacgacacccgtctcgatctggtacgccgctgcttctatctgaaagtctgtgaaaaactcagccgcgagcgcgcctgtgtgggctggcgtcgtgaagtggtcagccagctggtgaaagagtggggctgggatgaaaagcgtctgatgatgctcgataaccgcgctaactggaaaatcgatgaagtgcgcaaagcgcacaacgaactgctcgacgcgatgatgcagagctatcgtaatctgatccgcttcgcgcgtcgcaataacctcagcgtctccgccagcccgcaggatatcggcgtgctgacgcgtaagttgtatgcggcctttgaagccttgccgggcaaggttaccctggtaaacccgcaaatttcaccggacctgtcggaaccgaatctgacctttatccacgtgccgccgggccgcgccaaccgtaccggttggtatctgtataatcgcgcgccggatatggaatcgatcatcagccatcagccgctggaatataaccgttatcttaataagctggtggcctgggcctggtttaacggcctgctgacctcacgcacccgtctgtttattaagggcaacggtatcgtcgatttgccgaagctgcaggagatggtggccgacgtgtcgcaccacttcccgctgcgtctgccggcgccgacgccaaaagcgctgtacagcccgtgcgaaattcgccacctggcgattatcgttaacctcgaatatgacccgacggcggctttccgcaatcaggtggtgcatttcgacttccgtaagctcgacgttttcagcttcggcgaagagcaaaaatgcctgattggcagcgtcgacctgctgtatcgcaactcgtggaacgaagtgcgtacgctgcactttaacggcgagcaggcgatgatcgaagcgctgaaaactattctcggcaaaatgcatcaggacgccgcgccgccggatagcgtggaggtgttctgctacagccagcatctgcgcggccttattcgcacccgcgtgcagcagatggtctccgagtgcatcgaactgcgtctctccagtacccgtcaggataccgggcgcttcaaagcgctgcgcgtctccggccagacctggggcctgttctttgaacgcctgaacgtttcggtgcagaagctggaaaacgccattgagttctacggcgctatctcacacaacaagctccacggcctgtcggtacaggtagaaaccaatcacgttaagctgccggcggtggtggatggcttcgccagcgaagggattattcaattcttctttgaagatgcggataacaatgatagcggctttaacatctacattctcgatgaaagcaaccgcgcagaggtctatcaccactgcgaaggcagcaaagaagagctggtgcgcgacgtcagccgcttctactcatcatcgcacgatcgcttcacctacggctccagcttcattaacttcaacctgccgcagttctatcagatagtcgaagttgacggacgcacgcaggtgatcccgttccgcagccaggcgattgccgccgcggtgccgccgggccaggaagctgtcgcctcaccggtgctgcagcagcgctactcgtag

SEQ ID NO: 90785 - DNA, 957 bp, Enterobacter aerogenes
atgacggtaacaagcatgttagacaaagttttgagaattgccacacggcaaagcccgcttgcgctatggcaggcacattatgtgaaagagcgcctggagtcctgtcatccggggctttccgttgagctggtgccaatggtcacccgcggcgacgtgctccttgataccccgctggcgaaagtgggcggcaagggcttatttgtgaaagagttagagctcgccatgattgaggggcgcgccgatatcgccgtccattcgatgaaagatgtcccggtcgaattccctgaaggcctgggattggtcaccatctgcgaacgtgaagatccgcgcgacgcatttgtttccaattactatgcctcaattgacgcgctgccggctggcagcatcgttggcacgtcaagtttacgtcgccagtgccagttggcggcagagcgccccgatctggtgatccgctcgctacgcggcaacgttggcacgcgattaggcaaactcgataacggcgagtatgacgctattatccttgctgccgccgggctgaagcgcctgaaactggaatcgcgtattcgccagccgctctcgcctgaacaatctctgccggccgtcggccagggcgcggtgggtatcgaatgccgccttgacgatgaatggaccaaagcgctgttagcgccgcttaaccatacagagaccgccgtgcgcgtacgtgccgagcgggcgatgaacacccgtctcgaaggcggttgtcaggtgccgattggcagctatgccgaactgcgcgatggtgagctgtggctacgagcgctggtgggtgcgccggatggttcgcgggtcgtgcgcggtgaacgccgcgggcggcctgaagaggcagaggcgctcggcgtctcgctggcggaagagctactggataacggcgcccgcgacatcctcgcggcggtctatgatggagaagccccacgatga

SEQ ID NO: 90786 - DNA, 741 bp, Enterobacter aerogenes
atgagcatcctggtcacccgtccgctaccgcaaggtgaagagttagtcagccgcctgcgcgcgctgggacgcgtggcctggagctttccgctgattgaattcacgccggggcgagaactggcaacgctcccgcgtcaactggcggcattaggcgcggacgatttgttgtttgcgctgtcgcagcatgcggtggaattcgcccatgcccgtctgctgcaggagagccaacgctggccctccgacccggcctatttctcgataggccgcaccaccgcgctggccctgcatacggtcagtggtaaaaatatccgttacccgttagatcgggaaatcagcgaagtcttgctacaattacctgaattacaaaacattgcgggcaagaaagccctgattctgcgcggcaacggcgggcgggaattactcggcgacacgctgcgagatcgcggcgccgaagtaacattttgtgaatgttatcaacgttgtgcgaagtactatgatggtgcggaagaggctatgcgctggcaatctcgtggagtcacaacgctggtggtcaccagcggcgagatgctgcagcagctgtggtcgttaataccccagtggtatcgcgaacagtggctgctgcactgtagccttatcgttgtcagcgaacgtctggcccttcaggcccgggaattgggctggcaggatattcaggttgccgataacgccgacaacgatgcgctgctacgcgcattacaataa

SEQ ID NO: 90787 - DNA, 1173 bp, Enterobacter aerogenes
atgacggaacaacaaaatcaatccgccgtggttgaagagaccagggaggccgtggaaaccacgccacagccagaaaacaacgagaagaaaaaggccggcaacaaaaccagcctggcgctcagcgcgattgctatcgctatcgccctcgccgccggtattggcctgtatggcttgaataagcagcaggttacgcggcaaaacgaaaccagctctgaattagcaagccagctcgcggcgctgcaaaaagcgcaggacagccagaagagcgagctggaaagcgtcatcaaacagcaggccgaccagttgagcgaagccaaacgtgaacaggaaaccctgacgaaacagcttgatgagctacagcaaaaagttgccgtgatttccggcagcgacgccaaaacctggctgctggcgcaggctgatttcctggttaagctggcgggacgtaaactgtggagcgatcaggatgtgacgaccgctgccgcgctgctgaaaagcgccgatgccagcctcgccgacatgaacgacccaagccttatcggcgcgcgccgcgccatcaccgacgacatcgcttcgctgtcggcggtaagccaggtcgattacgacggcattatcctcaaggttaaccagctggcgaatcaaatcgacaatctgcgtctggccgataataacgacgatgattccccgatggatgccgacagcgacgagctctccagctccatcggcgaatggcgggttaacctgcagaaaagctggcagaactttatggatagcttcattaccatacgccgccgcgacgaaacggcggtgccgctgttagcgccgaatcaggatgtctatctgcgcgaaaatatccgttctcgcctgctggtcgccgcgcaagcggtgccgcgtcatcaggaagaaacctataagcaggcgctggaaaacgtctccacctgggtacgcgcttattacgatactgaagacgccaccaccaaggctttccttgaagaagtggataagctcagtcagcagagtattaccatgagcgtaccggaaacgctgcagagccagagcctgctggaaaagctgatgcaaacccgggtgcgtaatttaatggcccagcctgcggcagccgctccgacgccagcgccagcagcgaccgcgccagcccctgcgccgcaaggagaataa

SEQ ID NO: 90788 - DNA, 1197 bp, Enterobacter aerogenes
atgctgaaaattctcctgcttttcgcactgctgatcgccgggatcgtcgttgggccgatgatcgcgggccatcagggctatgttctgatccagaccgataactacaatatcgaaaccagcgtgacaggtcttgtgatcatcctgatcctcgcaatggtcgtgctgtttgctatcgagtggcttctgcgccgcattttccgtaccggcgcgcacactcgcggctggttcgtcgggcgtaagcgccgccgcgcgcgtaagcaaaccgagcaagcgctgctgaaactggcggaaggcgattaccaacaggttgaaaagctgatggcgaaaaatgccgatcacgccgaacaaccggtcgtgaactatctgttagcggcggaagctgcccaacagcgcggcgatgaagctcgcgccaatcagcatcttgagcgtgccgccgaactggctggcgacgatctgatcccggtcgaaatcacccgcgtgcgcctacagttggcgcggaatgaaaaccacgccgcccgtcacggtatcgataagctgctggaagtgaccccgcgtcatccggaggtactacgtctcgccgagcaggcctatacccgcaccggcgcgtggaattcgctgctggacatcattccgtccatggcgaaagccaacgtggcggatgaagagcaccgcgccgcgttggaacagctggcgtggattggcctgatggataaagcgctggccgacggcggtagcgaagggctacgcgaatggtggcgcaaccagagccgtaaaacgcgcgcgctgataccgctgcaggtggcaatggccgaacgcctgatcgaaagcgacgaccacgataccgcacagcagattattatcgatggtctgaagaaacagtatgacgaccgcctggtcatgccgatcccacggctgaagaccaataatccggagcaactggagaaagtgctgcgccaacagatcaaagccgtcggcgaccgtccgctgctgtggagcaccctgggccagtcgctgatgcgtcacggtgaatggcaggaggccagtatcgccttccgcgccgcgcttaagcaacgcccggatgcctttgattacgcgtggcttgccgatgcgctggaccgcttgcaccagccggaagaagcggcgaccatgcgtcgtgacggcctgctgttgacgctacacaataaccctcagcagtaa

SEQ ID NO: 90789 - DNA, 573 bp, Enterobacter aerogenes
atgcgcgtaccctctcgttttctctttcctcttgctgccaaaccgcgtttatcgctaccccgactactgctggcgatcatcatcgttggcgcgcttatcggcggggttatcgccgcactgggctctggcgcatggtgggttctgctggtgctgctcattgttacgatcgtcagcaatcgccgctggcgaatgcggcgggcaaaactagccgaacagcgcgccggccagactatttgccaattcgcgcgtgccttagatatttctcttgtcgatagctgggtgatccgcgccgtgtggttaacgctggataaccagcttaaccagtcaatgccatcagcacctgcgctggcttttgccgccggggatcggctggatgaggatttggagttggttggcgatgatgatgacctgtatgaattattacaagaggccgcccagcgctgcggccgggatctcagcgggctcgaggataatccctggctgccggtgctgacggtgggcgatatggtgcgagccctcaacgcccaaccgatgacgcccgctcgccaacagcggatcgttatccatccctga

SEQ ID NO: 90790 - DNA, 1386 bp, Enterobacter aerogenes
atgactgagaaaaaagcggaactccagcgtggactggaggcccggcatattgagctaatcgcgctaggcgggacgattggcgtagggttattcatgggcgcggcaagtacgctgaagtgggccggtccatccgtcctgctggcgtatattatcgccggtttatttgtcttctttatcatgcgttcgatgggcgaaatgttgttcctcgaaccggtaaccggctcattcgccgtttacgcgcaccgttatatgagcccgttcttcggctatctcacggcctggtcatactggtttatgtggatggcggtgggaatatcagagatcaccgccatcggggtatacgtccagttctggttcccggagatggcgcagtggatcccggcgctaattgccgttgggttggtagcactagcgaatctggcggcagtgcgtctatacggcgagattgagttctggtttgcgatgattaaagtcaccaccattatcgtgatgattgtcattggcctgggcgtcatcttctttggcttcggcaacggcggacagtcgatcggttttggcaacctgaccgagcacggcggcttcttcgccggcggctggaaaggcttcctgacggcgctgtgtattgtcgtcgcctcttatcagggcgttgaacttatcggtatcaccgccggggaagcgaaaaacccgcaggtcacgttgcgtagcgcggtaggcaaggtactgtggcgtatcctgattttctacgtgggggcgattttcgttatcgtgactatcttcccgtggaaccagattggagcgaccggtagcccattcgttctcactttcgccaaaatcggcattaccgcggcggcggggattatcaacttcgtagtgctgaccgcagcgctgtcgggctgtaacagcgggatgtatagctgtgggcgtatgctgtacgcgctggcgcgcaaccgtcagctaccggcggcaatggccaaagtatcgcgtcagggcgtgccggtggcgggcgtcgcgctgtcgatcgtgattctgctaatcggttcgtgcctgaactacattattcctaacccgcagcgcgtgtttgtctatgtctatagcgccagcgtgttgccggggatggtgccgtggtttgtgatcctgattagccagctgcgttttcgccgcgagcatcagcaggcgatggccagccatccgttccgttcattgttgttcccgtgggcaaactatttgacgatggctttcctcgtttgtgtgctgatcggcatgggaattaacgatgaaacccggatgtcgctctttgtcggaatgattttcctcgccgcggtgacccttatttataaggttttcggcctcggcaagcggggaaatctcgataaaacggcggaataa

SEQ ID NO: 90791 - DNA, 741 bp, Enterobacter aerogenes
atgactgataacacttccgcgccgcagtatgcgctgcgagggctgcagctgattggctggcgcgacatgcagcatgcgctcaactatctcttcgccgacggcgagctgcgtcagggaacgctggtcgcgatcaacgccgaaaaaatgctggcggtagaagataacccggaagtgcgtgcgctgattgaggccgccgagtttaaatatgccgacggtattagcgtcgtgcgctcattacgtaaaaaatatccgcaggctgaggtgtcgcgcgttgccggtgccgatctgtgggaagcgctgatggagcgggctggcgctcagggaacgccggtgttcctgatcggcggcaagcccgaggtgctggcggagacgcaagcgaagctgcgtgagcgctggaaggtcaatatcgtcggcagtcaggacggctatttttccgccgatcagcgtcagcagctgtttgagcgggtgcgcgacagcggggcgaaaattgtcaccgtcgcgatgggatcgccgcgccaggaaattctaatgcgcgactgccggctggtatatcccgccgcgctgtatatgggcgttggcggcacttatgacgtctttaccggccacgttcaccgggcgccaaaattctggcagaacctggggctggagtggttctatcgcctgctcctgcaaccgagccgtatcaaaagacagttccgtttactgcgctatttacgttggcattattccggcaagctctga

SEQ ID NO: 90792 - DNA, 1347 bp, Enterobacter aerogenes
atgacgttaatgcaatttagcgggctgttggtggtctggctgctgtcgacgctgtttatcgccaccgccacctggtttgagttccgccgcgtgcgctttaacttcaacgtctttttctcgttgttgttcctgctcacctttttcttcggcttcccgttaaccagtatcctggtattccgctttgacgtcagcgtggcgccgccggagattttgctgcagacgctgctggttgcggtgtgcttctatgccatctactacgtgacctacaaaacgcgattgcgtccggcatcgcgcgatgttccacgtcgtccgctgtttaccatgaaccgggttgaaacccatctggcctgggggattttgatggggctggcgctgctgtgcgtcggtatcttcttcgcccacaacggtttcctgctatttaagctcaattcatacagccagatattctccgcggaagtgtccggcgtggcgttgaagcgcttcttctacttctttattccggcgatgctggtgatctatttcctgcgtcaggattacaaggcgtggattttcttcctggtgagcaccgtcgcctttggtctgctgacctacgcgatcgtcggcggtacccgcgccaacatcattatcgctttcgctatcttcctgtttatcggcattattcgcggctggatcagcctgtggatgctggcggcggcgggcgtgctgggtattgtcggcatgttctggctggcgttgaagcgctatgggatgaacgttagcggcgatgaagcgttttatacattcctctatctcacgcgcgataccttctcgccgtgggagaacctggcgctgttgctgcagaactacgacaagattgagttccaggggctggcgccgatgatccgcgacttctacgtctttatccccagttggatgtggcacggtcgcccgacaatggtgctgaataccgccaattacttcacctgggaagtgttaaataaccattcggggctggcgatatcgccgacgctgattggttcgctggtggtgatgggcggcgtatggttcgtaccgctgggcgccgtcgcggtagggctcatcattaaatggttcgactggctgtacgaactgggcaaccgggagagcaatcgctacaaagcggctatcctgcacagtttctgtttcggcgctatcttcaacatgatagtgctggcacgcgaagggttggattcgttcggctcccgcgtggtgtttttcctcgtgatctttggtatctgcttgttagcggcgaaactgctgtactggctcctggacagcgcaggattgattcataagcgggtgaagccgctttcgcaaccgcaggtctga

SEQ ID NO: 90793 - DNA, 1077 bp, Enterobacter aerogenes
atgacagcactgatacacgtactgggatcggatatcccgcaccacaaccagaccgtattgcggttctttaacgacgaactggccgccgacgcgcgggccaggacgtttatggtcgtgggtgatgcgacaggtatgcgcgaggcgtatccggcgctggaaattacctgctatccgggtaagaaatcgctggcgcaggcggtgattgccaaagcgaaagccgatcgccagcagcgtttttttttccacggccagtttaataccggtctgtggctggcgttgttgagcggcgggatccgcccgtcgcaatttaactggcatatctggggcgcggatctgtatgaaaactcagccagcctgaaattccgtctgttttatcctctgcgccgcatggcgcaagggcgggtaggacgcgttttcgccacccgcggcgatctcagctggtttgctaaccgccatccgcgagtgccgggcgaactgctgtacttcccgactcgtatggatccgtcgctaaattcccttgccgataccgccccgcgcggtgacaccctgaccattctggtggggaactccggcgatcgtagtaatgagcatattgcagcgctaaaggcgatttatcagcaatttggcgatacggtgaatgtcatcgtaccgatgggctatccggccaacaatgaagcgtacattgatgaagtgcgccaggcgggagcggcgctgtttagtcgcgagcatctgcagatcctcagcgagaagcttgagtttgatgattatctggcgctgctgcgccgctgcgacctgggctatttcctgtttgcgcgccagcagggtatcggcacgctgtgcctgctgattcaggcgggtattccctgcgtgctcaatcgcgaaaatccgttctggcaggatatgaccgaacaacagatcccggtgctgtttaccaccgataccctggatgtcgacgtggtgcgcgaagcacagcgccagttagcgaacgttgataaaacgcaaatcgccttcttccgcccgaactatctggcgggctggcagcgggcgctacagctggcagcggaggcgcgggtatga

SEQ ID NO: 90794 - DNA, 1251 bp, Enterobacter aerogenes
atgtcgttggcaaaagcatcactgtggaccgcggcgtccaccttagtcaaaataggcgccggtctgctggtgataaagctgctggcggtctcatttggcccggcgggcgtaggccaggccggtaacttccggcaactggtcaccgttctgggcgtcctggcgggcgccgggatttttaatggcgtcactaagctggttgcccaacatcacgacgatccgctacgcctgaagcaggtggttggaacctcgtcatcaatggtgctcggtttttccaccctgctggcgctggtctttttgctggcggcggcgcccataagccaggcgctgttcggccattcgcactaccagaatctggtacgtttggtggcgctggtgcagatgggaattgcgtgggccaactatctgctggcgctgatgaaaggttttcgcgatgcggcgggtaacgctttttcgctgattgccggtagcctgattggcgtggcggcctactacgcctgttactacttcggtggttatcagggggcgctgttagggctggccttagttcccgcgctggtggtggttccggccgccattatgctatggcggcgcggcgcgatcccgttgaacgcgctacgtccgcgttgggataacgggcttgcggggcagctatcgaaatttaccctgatggcgttgattacctcggtgacgctgccggtggcctatgtgatgatgcgtaatctgctggcggcgcattacggctgggaggcggtcggtatctggcagggggtgagcagtatctcggatgcctacctgcagtttattaccgcttcctttagcgtatatctgctgccgacgttgtcgcgactgagcgccaagacggacatcacgcgtgagatagtgaagtcgttgaaattcgtcctgccggcggtggctgcggcaagcctgatggtctggctgctgcgcgattttgccatctggttactgttttccgcgcgcttcaccgcgatgcgcgacctgttcgcctggcagttggtgggcgatgttttaaaagttggcgcttacgtctacggctatctggtgatcgccaaagcgtcattgcgtttttatattctgacggaaatcagccagttcacgctgctgaccgcattttcacactggcttattccggcgcacggcgcacttggcgcggcgcaggcgtatatggccacttatattgtttatttcgccctttgtagtggcgtgtttttactctggcgtaaacgggcatga

SEQ ID NO: 90795 - DNA, 1131 bp, Enterobacter aerogenes
atgattccatttaacgcaccgccggtggtggggactgagctcgattacatgcaatcggcgatgaacagcggcaagctttgcggcgacggcggttttacccgtcgctgccagcagtggtttgaacagcgcttcggcaccgccaaagcgctgctgacgccatcctgcaccgcgtcgctggagatggcggcgctgctgctggatattcagcctggcgatgaagtcatcatgcccagctatacctttgtttccaccgccaatgcctttgtgctgcgcggggcgaaaatcgtcttcgtcgatatccgtcgcgatacgatgaatattgatgaatcgctgatagaagccgcaatcactgacaaaacccgggcgatcgtgccggtgcattatgcgggcgtggcctgtgaaatggacaccatcatggcgctcgccgccaaatataacctgtacgtggtggaagacgccgcgcagggcgtgatgtccacctataagggccgcgcgctgggcaccatcggccatattggctgctttagcttccatgagacgaaaaactacaccgccggtggtgaaggcggcgcaacgcttatcaacgatcgtaaactggtggaacgcgcggaaatcattcgcgaaaagggcactaaccgtagccagttcttccgtggtctggtggataagtacacctggcgtgatatcggctccagctatttgatgtccgatctgcaggccgcctatctctgggcgcagctggaagccgctgagcggattaaccaacagcgcctgacgctgtggcaaacttattatgacgcgctgctgccgctggcgcgcgcgggccgtatcgatctgccggccgtgccggcggattgcgggcaaaacgcgcatatgttttacattaagctgcgggataacgatgaccgcgcggcgctgattaactggctgaaagaggcagaaattctggcggtgttccactatattccgctccatagctgcccggctggcgaacagttcggcgagttctgcggcgaagatcgttataccacccaggagagcgaacgcctgctgcgtttgccgctgttctacaacctgtctgcggtaaaccaacggacggtgattaattcactgctgagctacttctcctga

SEQ ID NO: 90796 - DNA, 675 bp, Enterobacter aerogenes
atgcctctgcgcgccagtattgaagcgctggagtgggaaaaccgcttcttcgccgttaatagcggtatcgttcgctttgacgagcgcgcgccgcagctcaccgctgaaaccctggcgggatggtcgcgagtgcaggcgaaagtcgctgccagcgacaccgcccggctggatgcgctacaggagatcggttttcaactggtggaaggcgaggtcgatctggcgttgccggtaggcgagccggctgatgccggcgccgaatgggccgttgaaggcgatattgcgcggctacgcgaactggcggcacaggcctttgctatgagtcgttttcgcgctccctggtatgccgctgacgccagcggccgattctacgcgcaatggattgaaaacgcggtgctggggacctttgaccaccagtgtctgctatttcgcgcgtccgatggcgacatccgcgcatttgtttctttgcgtcagctcaacgacaccgacgcgcgtatcggcctgctggccgggcgcggcgctggcgccgagcttatgcaggcggcgcgtcactgggcggcgcaacgcgggctttctacactgcgggtggcgacccagatgggtaacaccgccgcgcttaaacgttatattctcagcggtgcgaatgtggaaagcaccgcgtactggttatacaggtga

SEQ ID NO: 90797 - DNA, 1263 bp, Enterobacter aerogenes
atgagtttttctaccatttcagtgattggccttgggtatattggtctgccaaccgctgccgcatttgcttcccggcaacggcgggtggttggcgtggacatcaatcaacacgccgttgagaccattaaccgtggtgagattcatatcgtcgagccggatttagcgagcgtcgtaaaaacggcggttgaacagggatatttaagcgccaccaccgtgccggtggagtctgacgcctacctgattgccgtcccgacgccgtttaaaggcgggcatgagccagatatggcctttgttgaatccgccgctaaatctattgccccgaccctgaagaaaggggcgttagtgatcctggaatccacctcgccggtcggttcgactgaacagatggccgagtggctggcggcgatgcgccccgatctcagcttcccacagcaggtgggcgaggcggccgacgttaatgtcgcctactgtccggagcgcgtgctgccggggcaggtgatggttgagctcatcaaaaacgaccgcgttattggcggcatgtcgccggtctgctcggcgcgtgccagtgagctgtataaaattttccttgaaggcgaatgcgtagtgactaactcgcgcactgcggaaatgtgcaagctgacggaaaacagcttccgcgacgtcaacatcgcctttgctaacgaactatcgctgatttgcgccgaccaggggatcaacgtctgggaactgatccgcctggcgaaccgccatccgcgcgtcaatattctgcagccgggtccgggcgtcggcggccactgtatcgccgtcgacccgtggtttatcgtggcgcaaaacccgcagcaggcgcgtctgattcgcaccgcgcgcgaggttaacgaccacaagccggaatgggttatcgaacgggtgaaagcacaggttgccgagtgcctgaatgccagcaataaacgcgccagcgaactgactattgcctgcttcggcctggcctttaagcctaacattgatgatctacgtgaaagcccggcgatggaaattgccgcgcagatcgcccgctggcacagcggcgcgacgcaggtggttgagcccaacattcacacgctgccgaagaagcttgatggcctgtgtacgctggcgacccttgataatgcgctggcgagcgccgatgtgctggtgatgctggtcgatcacaacgagtttaaagccgttagcggcgatagcgttacccaggcctatatcatcgacaccaaaggagtgtggcggtga

SEQ ID NO: 90798 - DNA, 1131 bp, Enterobacter aerogenes
gtgaaagtactaactgtatttggcacgagaccagaagccatcaagatggcgccgctggtccatgcgctggcaaaggatcctcattttgaggcaaaggtttgcgtaaccgcgcagcatcgggagatgctcgatcaggtgttgaaactgttttcgattacgccggactacgatctgaacattatgcagccgggtcagggattaaccgagatcacctgccgcattctgcaaggtttaaagccggtactggagtcgtttaagccggacgtggtgctggtacatggcgataccacgacgacgatggcggccagcctggcggcgttttatcagcgcatcccggtgggccatgtggaagcgggcctgcgtaccggcgacctgaactcgccgtggccggaagagggtaaccgcacgctgaccgggcgtctggcgatgtaccatttcgccccgaccgccacctcgcgcgataacctgctgcgggaaaatattaacgaagaacgcattaccgtcaccggcaatacggtgatcgatgcgttgttctgggttcgcgatcgtgtccttggcgacgaggcgctgcgcaatgaactgatgcagcgctacccgttcctcgaagaggataagaaattaattctggtgaccggccaccgccgcgagagctttggtctcggcttcgagcacatttgccatgcgctggcggatatcgccagccatcaccctgatgtacagattgtttatccggttcacctgaacccgaacgtcagcgagccggttaaccgtattctcggccatgtcgctaacgtgaaattaattgatccgcaggattacctgccgttcgtctggctgatgaatcgcgcgtggctgattctgaccgattccggcgggattcaggaagaagcgccatcgcttgggaaaccggtactggtgatgcgcgaaatgacggagcgcccggaggcggtcgccgctggcaccgtacgtctggtcggcaccgacaggcagcgtatcgtcgatgaagtcacccgtctgctgcaggatgatgccgcctggcaggcaatgagtcgggcccataacccttacggcgatggtcaggcatgcgatcgtattttatccgctcttaaaaataatcaggtaacgctatga

SEQ ID NO: 90799 - DNA, 1017 bp, Enterobacter aerogenes
gtgaacgttgagaacgaactggatattcgcgggctgtttcgcgccttatgggcaggaaaaggctggatagtcggcatcgccgtgctgttcgcgctgatcgttcttatttattccttttttgctcgccaggagtggagcgcgacggcaattaccgaccggccgaccgtcaatatgctgggcggatactattcgcaacagcagttcttacgtaacctggatatcaaagccgatctggcttcggtagaccaaccttccgccatggatgaggcatacaaagagtttattatgcaacaggcgtcatgggatacccgccgtgacttctggctgcagaccgattactacaagcagcgccagtcaggcaactcacgcgcggatgccgcgatgcttgacgatctgattaacgatattcagtttatccccggcgacccgctgaaaagcgtcaatgacagcatcaagctgacggcggagaccgcgccagatgccaataatctgctgcgtcagtatgtcgcttttgccagccaacgtgccgctggtcatcttaatgatgagctgaagggcgcctgggcggcgcgtacggtacagatgaaagcgcaggtgaagcgtcaggaagaggtggcaagcgagatcttcaaccgccgcgtgcagagcgtcgagcaggcgttgaaaatcgcccagcaacataacatttcccgcagcgagaccgatgttccggcggaacagctgccggcctccgaactcttcttacttggccggccgatgctgcaggcgcgcctcgaaaatctgcaggccgtagggccggaatacgatctcgactatgaccagaaccgcgccatgctgaacacgctaaacgttggcccgacgctggatccacgttttcagacttacagatatttgcgtacgccggaagaacctgtaaaacgcgatagcccgcggcgtgtatttctgatgatcatgtgggggattgtgggcgcgctcatcggcgcaggcgtggcgttagcacgtcgtcgtgtccagtga

SEQ ID NO: 90800 - DNA, 1104 bp, Enterobacter aerogenes
gtgaatttactcactgctattactgaattaatcagtgttttcttattcacgaccctgtttatatttgttgcccgtaaagcagcgaaaaaaattgggttagtggataagccaaactatcggaaacggcatcaaggtttgattccgttagttggtggtatctcagtttatgccggtatttgttttacctttgcgatcgccgattattatatccctcatgccacgctgtatctggcctgcgcgggggtgctggtgttggtcggcgcgttggatgaccgatttgatatcagcgtaaaaattcgtgcggttattcaggccgcgatagccgttatcatgatgacggcgggtaatctgcatctcagcagcctcggctatattttcggttcgtgggagttagtcctcggcccctttggttttttcctcacgcttttcgccgtttgggcggcaatcaacgccttcaatatggtggatggcattgacgggttgctcggcgggctttcgtccgtctccttcgcggcaaccggcatcatcttatggtttgatggccagtacagcctggcgatgtggtgttttgcgatgatcgccgccattctgccctatattttacttaatcttggcgcgcttggacgtcgctataaagtgtttatgggtgatgccggcagtaccatgattggcttcaccattatctggatcctgctggagacgacgcagggcaaaacgcatcccatcagcccggtgacggcgctgtggattattgcgattccactgatggatatggtggcgattatgtatcgccgcctgcgaaaggggatgagcccgttctcgccagatcgtcagcatattcatcatttgatcatgcgtgccgggtttacttcccggcaggcctttgtcctgattacgctggctgccgctttactggcgctggtcggcgtagtggcggaatacacccgtattgttcctgaatgggtgatgttaatactctttttgtttgcttttttactttatggctactgcattaagcgcgcatggaaagtggcgcgtctggttaagcgcattagacgcagaattcggcgacacagcggcaataatccaaatttaaccaagtaa

SEQ ID NO: 90801 - DNA, 1260 bp, Enterobacter aerogenes
atgaatcttaccgaattaaagaatacgccggtttctgagctgattactctcggcgaaaatatggggctggaaaacctggctcgtatgcgtaagcaggatattatttttgccatcctcaagcagcattcaaagagtggcgaagatatctttggcgatggcgtactggagatactgcaggatggatttggattcctccgctcagcagacagctcctacctcgccggtccagacgacatctacgtatcccccagccaaatccgccgcttcaacctccgcactggtgacaccatttccggtaagattcgtcctcctaaagagggtgaacgttacttcgcgctgctgaaagttaacgaagttaactacgacaagccggaaaacgcgcgtaacaagattctgttcgagaacttaacgccgctgcacgcgaattcacgcctgcgtatggagcgtggtaatggttctaccgaagacttaaccgctcgcgtactggatctggcatcgccgattggccgcggccagcgtggtctgatcgtcgcgccgccgaaagccggtaaaaccatgctgctgcagaacatcgcgcagagcatcgcgtacaaccatcctgactgcgtgctgatggtgttgcttatcgacgaacgtccggaagaagtgaccgagatgcagcgtctggttaaaggtgaagttgtcgcttctaccttcgacgaaccggcatctcgtcacgtgcaggttgccgaaatggttatcgagaaagcgaaacgtctggttgagcacaaaaaagacgttattatcctgctcgactccatcacccgtctggctcgtgcctacaacaccgtggttccggcttccggtaaagtgctgaccggtggtgtggacgccaacgccctgcatcgtccgaagcgtttcttcggtgcggcgcgtaacgtggaagagggcggcagcctgaccatcatcgctaccgcgcttatcgataccggctctaaaatggatgaagttatctacgaagagtttaaaggcaccggtaacatggaactgcacctctcccgtaagattgcggaaaaacgcgtcttcccggctatcgactacaaccgttccggtacccgtaaagaagagctgctgaccacccaggaagagctgcagaaaatgtggatcctgcgcaaaatcatccatccaatgggtgaaatcgacgcaatggagttcctcattaacaagctggcgatgaccaaaactaacgacgacttcttcgatatgatgaagcgttcgtag

SEQ ID NO: 90802 - DNA, 330 bp, Enterobacter aerogenes
atgagcgataaaattattcacctgactgacgacagttttgacacggacgtactcaaggctgacgggctgaccctcgtcgatttctgggcagagtggtgtggtccgtgcaaaatgatcgccccgattctggatgagatcgctgaagagtatcaaggcaaactgaccgtggctaaactgaacatcgatcagaacccgggcacggcgccgaagtacggcatccgcggcatcccgacgctgctgctgttcaaaaacggcgaagtcgcggcgactaaagtcggcgcgctgtccaaaggccaactgaaagagttcctcgacgccaacctggcgtaa

SEQ ID NO: 90803 - DNA, 1266 bp, Enterobacter aerogenes
atgagcaaaacacatttgacagaacagaagttttccgacttcgccctgcacccggcagttgtcgaagcccttgaaaaaaaagggtttcataattgcacacccattcaggctctcgcccttccgctcacgctggaaggccgcgatgtcgccgggcaggcgcaaaccggtaccggtaaaacgatggcgtttctgacgtcaacgtttcattatcttctctctcacccggccatcgcagaccgccaggttaaccaaccgcgcgcgctgatcatggcgccaacgcgcgagctggcggtacagattcacgctgacgccgaaccgctggcgcaggccaccggtctgaagctcggtctggcttacggcggcgacggctacgataagcagctgaaagtactggaaagcggcgttgatattctgatcggcaccaccggtcgactgatcgattacgccaaacaaaaccacattaatctcggcgccattcaggttgtcgtgctcgacgaagccgatcgcatgtacgatctcggctttattaaagatatccgctggctattccgccgcatgccgccggccactcagcgcctgaacatgctgttctccgccacgctgtcttatcgcgtacgcgaactggcattcgaacagatgaacaacgccgagtacgttgaagtcgaaccggaacagaaaaccggccaccgcattaaagaagagttgttctatccttccaacgacgaaaaaatgcgcctgctgcagacgctgctggaagaagagtggcccgaccgcgctattgttttcgccaacaccaagcatcgttgtgaagatatctggggccatctggcggcagatggacatcgcgtcggcctgctgaccggcgacgtggcgcagaaaaaacgcctgcgtattctcgaagagttcacccgcggcgatctcgatattctggttgcgaccgacgtagccgctcgcggcctgcatatcccagccgtcacccatgtctttaactatgacctgccggatgactgcgaagactatgtccaccgtatcggccgtaccggccgcgcgggcgccagcgggcactccatcagcctggcctgtgaagaatacgcgctgaacctgccggcaatcgaaacctatatcggccattcgatcccggtcagcaagtacaatccggacgcgctgatgaccgatttaccgaagccgctgcgtttaacgcgcacccgccccggtaatggcccgcgccgtaatggcccgcctcgtaatcgtcgtcgctcaggttaa

SEQ ID NO: 90804 - DNA, 1506 bp, Enterobacter aerogenes
atgaagagtatgagttccacctcgctgtatgccgccatcgaccttggctccaatagttttcatatgttggtggtgcgcgaggtggcgggcagtattcagaccctgagccgcattaagcgcaaggtgcgtctggctgccggcctgaatagcgacaatgcgctctccgcagaagcgatggagcgcggctggcagtgcttacgcctgtttgccgaacgtttgcaggatattccttcggcgcaaattcgcgtcgtcgccaccgccaccctgcggctggcggtcaacgccggcgagtttctggcgaaagcgcaggaaatcctcggttgccccgtccaggtgattagcggtgaggaagaagcccgcctgatctaccagggcgtagcccataccaccggcggcgccgatcagcgtctggtggtggatatcggcggcgccagcactgaactggtgaccggcaccggcgcgcaaacgacctcgctgttcagcctgtcgatgggctgcgtcacctggcttgaacgctactttgccgaccgtagcctgacgaaagaaaacttcgatctcgctgaagcggcggcgcgcgatgtgctgcttccaatcgctgatgtcctgcgttaccacggctggaaagtgtgcgtcggcgcttcaggcaccgtgcaggcgctgcaggaaattatgatggcgcagggaatggatgagcgcatcaccctcagcaagctacagcagcttaagcagcgcgccatccagtgcggccgactcgaagagctggaaatcgaagggctgacactcgaacgcgcactggtttttccgagcggccttgccattctgattgctatctttagcgaactgaatattcagtgcatgacgctggctggcggcgcattacgcgaaggcctggtctacggcatgttgcacctttctgtcgatcaggatattcgtagccgcacgctgcgtaatattcagcggcgctttatgatcgatactgaacaggcgcaacgggtggctaatctggccacccatctggttgatcaactggacagcggctgggaactggatccgctaagccgtgatttgctcgtcagcgcctgcgcgcttcatgaaattggcctgagcgtcgatttcaaacgcgcgccgcagcacgccgcctatctggtcaataacctcgacctgcccggttttaccccggcgcagaagaagctcatcgccacgctgctgctcaaccagactaacgccatcgatctttcttcgctccatcagcaaaacgcggtaccgccgcgcgttgccgaacatttgtgtcgcctgctacggctggcgattctgtttgccagccgccggcgcgacgatctcctgccagccattcaacttgccgccgacgacgaaaaactgacgctgacgctgccggatgactggctgaaggaacatccgctgggccgggaaatggtcgagcaagagtgtcagtggcaaagctatgtccactgggcgctgttgatcaacgacgacacggcgaggtaa

SEQ ID NO: 90805 - DNA, 918 bp, Enterobacter aerogenes
atgcgggaagaactggatttcaaatcactacgctttttctccgcgctctaccgtttggggaatgtttctccggcggcggaagcactcgatatcagtcagccaaccggtagcctgctgctaaaaaagctacgcgagcactttgacgacccgctgtttgtgcgcgttggacaacgcatggcgccaacgccgcgcgcggacgctatcgcccccaccatttttactcttttgcaactggccgataccgatctggcggctaagccggaatttatcccgcaggagagcaaccgtaacttcaccatcggcatgaccgatatcagccagatgacgcttcttcctttgctgcaaagccagctccagcggctggacgccagcggcatcacctttacggtgctgaatattgacgatcagacgcttagcgcgctggaatcagggaaatgtgatttggcgatcggctatcttacccaactgccggagagcgtctatcagcagcatctgttcgatcagtcgtatgtttgtctggcagcggacaatcacccgcgcattcgtcatcggttcagcgccgaagactggcgtcaggaaaagcaccttgcggttcgcgtcaacggcaccgcccacggcgacattgataaactgctggcggaacacagtatgccgcggcgtatcgcattgacgctgcccagctttttaggcgcgggcgagctggttgccggcagcgagatgatcgcggtggtgccggagcagctggcgcgccacatcaccaggcgttacccctgccgcagctggccgctacctttctcactggctaacatcgcgattcgccaggtctggcaccagcgtctgcaccgcgatcctgggcatatctggctgcgcaagcagattgtagatcttgccgcctcaggcggttctattagcatttaa

SEQ ID NO: 90806 - DNA, 999 bp, Enterobacter aerogenes
atgcgcggaaaaatcgctttagaagaacatgtatctactcctgaaaataaccgtttatgggattcgaccggcgaagctaaccgtaacggtagcgaatatatgcaagacgtagagcgccgcctgcttgaccgcagcattcaactcgaagaaatggcgcaacgtaatattgaccacgttattctttctctgacttcacccggcgcgcaatctattttagataaagccaaagcggtctctttcgctcgcgacactaacgactttatcgttgataattatgtaaaaccgaatccggataaatttagcgcgttcgccacgctggcgttacaaaacccggaagctgcggcggaagagctggagcgcgcggtgaaaaaactgggcatgaaaggcgcgctgattaacggctacaccaacgtcaaagacagcgaacatggcctgtatcttgatgatgaatccatgctggtattctgggataaagtcaacgagctaaacgtgccggtgtacctgcatccgcgtgaaccgctggaaggcccggcgcgcgggatttataccggttacgaaagcctaatcggttccgcctggggctttgcgcaggaaaccgccgttcacgctattcgcctgatgatgagcggcctgttcgaccgttatccgaatcttaacctggtgctgggacacctcggtgaagggctggtacacatgctgccgcgcactcaacatcgcctctatcgtcagcgtttcggctgcggtttgggcaaggcggaaaaaccgttaatgcactatctgcaaaataactttattgtcaccaccagcggtcattttaatactcactcgctaaataatgcgattgaagtaatgggtgccgatcgcgtgatgttctccgttgattacccttatgaagatattcatcaggcctgcgactggtttgatccgttagaaatggatgaagggctgaaagaaaaaatagcctggggcaatgccagccgcgtatttaatatcaaataa

SEQ ID NO: 90807 - DNA, 723 bp, Enterobacter aerogenes
atgccggtaggtatttttgtttgcagcggttcattactcgtcggcgcgattgcaggcgcctcactcaaccgatttatcccggatcactttaagaaaacgctaccgcttatttccgggttaatctctatcagtatgggcgtgttcttccttaacaaactcatcaatctgccacccattgcgctggccgttatcatcggcacgattattggcggcctgttgaatattgagaagtggattgagcgggcgggaacacagctgcgaacgcccatcgagcgcatttttccaggccaaaacaacgcaggcgtagaagcggaggattttatgaaccagtttatcgcggtgctgatcctgttctgcgccagcggtaccggtatttttggcgccctaaccgaagggatgaccggcgacccgaccattctgctgaccaagtcgatactcgactttttcaccgccgccattttcgcttcgacgctgggctacattatcaccgcgatttttattccccagctgatcatcttcgtgattctgttcttcgccgccacgtttattatgacgttgataagcccatcgatgatcgctgattttactgcctgcggcggtattattatgctggcgaccggttttcggctttgcggtattcgccatttccccaccgccaacatgctgccgtcactgctgctggtgatgccattttccaccgcctggcagcagtttgtcgcctga

SEQ ID NO: 90808 - DNA, 2022 bp, Enterobacter aerogenes
atgcgtttaaaccctggccaacaacaagccgtcgaattcgttaccggaccgtgcctggtgctggcgggcgccggttccggtaagacccgcgttattacgaataaaatcgcccacctgatccgcggctgcggttatcaggcgcgccatatcgcggccgtcacctttactaacaaggccgcccgcgaaatgaaagagcgcgtcgggcaaacgctggggcgaaaagaggcgcgcgggctgatgatttccaccttccacaccctggggctggatatcatcaaacgtgaatacgccgcgctgggaatgaaatctaacttttccttgttcgatgataccgaccaggtcgcgctgctcaaagagctcaccgaagggttgatcgaagatgacaaagtggtgttgcagcagctgatctcgacgatctccaactggaaaaacgatctgaaaacgccggcgcaggcggcggctggcgcgaaaggcgaacgggaccgcatcttcgcccactgctatgggctctatgatgcgcatatgaaggcctgcaacgtcctcgattttgacgatcttattctactgccgacgcttctgttgcagcgcaatgaagaggtgcgcgaacgttggcagaacaagatccgttacctgctggtggatgagtatcaggataccaacaccagccagtatgagctggtgaagctgctggtggggcagcgcgcgcgctttaccgtggtgggtgatgatgaccagtcgatctactcgtggcgcggcgcgcggccgcagaacctggtgctgttaagccaggattttccggcgctgcaggtgatcaaacttgaacagaactaccgttcatcagggcgtattctgaaggctgccaacattttgatcgccaataacccgcacgtgtttgaaaagcggctgttctcagaacttggctacggtaccgagctgaaagtgctctccgccaataacgaagatcatgaagcggagcgcgtcgctggcgaactgattgcccaccactttattaataaaacaaactacaaagattacgccatcctttatcgcggcaatcaccagtcgcgggtctttgaaaagatgctgatgcagaaccgcatcccgtacaaaatctcgggcggcacctcgttcttctcgcgtccggaaattaaagatctgctggcctatctgcgcgtactcaccaacccggatgacgacagcgccttcctgcgtatcgtcaatacgccgaagcgagagattggcccggcgaccttgcaaaaactgggcgaatgggcgatgaaccgcaataaaggcttattcaccgccagctttgatatggggttaagccagacgctgaccgggcgcgggtatgaatccctcactcgtttcacccactggctgcgggaaattcagcaactgaccgaacgtgaaccagtcaatgccgtgcgggatttaattcgcgggattgattatgagtcctggctatatgaaacctcgccgagcccgaaagccgcggaaatgcggatgaaaaacgtcaaccagctgttcacctggatgaccgaaatgctggaaggcagcgagatagatgagccgatgacgctgacgcaggtggttacccgctttaccctgcgcgatatgatggaacgcggcgaatcggatgaagagctggatcaggtgcagttgatgaccctgcatgcctcaaaagggctggagttcccgtatgtttacctggtgggaatggaagagggattgctgccgcatcagagcagtatcgatgaagataatgttgatgaagaacggcgtctggcctatgtaggtatcacgcgcgcgcagaaagagttgacctttacgctctgtaaggagcgtcgtcagtatggcgagctggtacgcccggagccgagccgttttctgcttgagctcccgcaagacgatctgatttgggagcaggagcggaaagtcatctctgcggaagaacgtatgcataaaggccaggccaacgttgcgaatatcaaggcgatgctggcgaaggcgaaaaagggctaa

SEQ ID NO: 90809 - DNA, 282 bp, Enterobacter aerogenes
atggcaaaaagcgcagcggccctgcatattctggtcaaagaagaaaaactggcacacgagatcctcgccaagctggaacggggcgtcagcttcgatcatctggcgaagcgctactcaaaatgcccgtccggacgccatggcggcgatctgggggagttccagcagggcgcaatggtcgctccgtttgataaagccgtgttcagctgtccgctgctcaaaccctatggcccggtacaaaccaaatttggctaccatatcatcaaggtgctgtatcgccgctag

SEQ ID NO: 90810 - DNA, 282 bp, Enterobacter aerogenes
atggctaaaacagcggcagcactgcatatcctggtaaaagaagagaaactggctctcgatctgcttgagcagctcaaaaacggcgccgacttcggcaagctggcgaaaaaacactctatctgcccgtcaggaaaacgcggcggcgatctgggcgaattccgccagggccagatggttccggcattcgataaagtggttttctcctgcccggaactggagccaaccggcccgctgcatacccagttcggttaccacatcatcaaagtgctgtaccggaaataa

SEQ ID NO: 90811 - DNA, 1476 bp, Enterobacter aerogenes
atggctaactacttcaacacactgaatctgcgccagcagctggctcagctgggcaaatgccgctttatggggcgcgatgaatttgccgatggcgcaagctatcttcagggtaaaaaagtagtcatcgtcggctgtggcgcgcagggcctgaatcaggggctgaacatgcgtgactccggcctggatatctcctatgcgctgcgtaaagaagcgatcgccgagaagcgcgcatcctggcgtaaagcgacggaaaacggcttcaaagtgggtacctatgaagagctgatcccgcaggctgacctggtcgtcaacctgactccggacaaacagcactctgacgttgtgcgttccgtacagccgctgatgaaagacggcgcggcgttgggttactcccacggcttcaacatcgttgaagtgggcgagcagatccgcaaagacatcaccgtggtgatggtggcgccgaagtgcccgggtaccgaagttcgtgaagagtacaaacgcggtttcggcgtgccgacgcttatcgccgtacacccggaaaacgatccgaaaggcgaaggtatggccattgctaaagcgtgggcagcggcgaccggcggccatcgtgcgggcgttctggaatcctccttcgtggcggaagtaaaatctgacctgatgggcgagcagaccatcctctgcggtatgctgcaggcgggttctctgctgtgcttcgacaagctggtggctgaaggtaccgatccggcctacgcggaaaaactgattcagttcggttgggaaaccatcaccgaagcgctgaagcaaggcggcatcaccctgatgatggatcgcctgtctaatccggcgaaactgcgtgcttacgcgctgtcagaacagctgaaagagatcatggcgccgctgttccagaaacatatggatgacatcatctccggcgaattctcttccggcatgatggctgactgggcgaacgacgacaaaaaactgctgacctggcgtgaagagaccggtaaaaccgcgttcgaaaccgcgccgcagtatgaaggtaaaatcggcgagcaggagtacttcgataaaggcgttctgatgattgcaatggtgaaagcgggcgttgaactggccttcgaaaccatggttgattccggcatcatcgaagagtccgcttactacgaatcgctgcacgagctgccgcttatcgccaacacaatcgctcgtaagcgcctgtatgaaatgaacgtggttatctccgataccgcggagtacggtaactacctgttctcttatgcttgcgtaccgctgctgaaagagttcatgactactctgcagaccggcgacctgggcaaagcgattgccgaaggcgcggtggataacgctcagctgcgcgacgtgaacgaagcgattcgcagccacgctatcgaagcggtgggtaaaaaactgcgcggttatatgaccgatatgaagcgtatcgcggttgccggctga

SEQ ID NO: 90812 - DNA, 891 bp, Enterobacter aerogenes
atggatttacgcgatctgaaaacctttctgcatctggcggaaagccgccattttggccgcagcgcgcgggctatgcatgtcagcccctccacgctttcgcggcagattcaacgcctggaagaagacctcggccagccgctgttcgttcgcgataatcgcaccgtaaccctaaccgaggccggcgaagaactccgcacctttgcccagcagactttattgcagtatcagcaactgcgccacgccatcgaccagcaggggccgtcgctctccggcgagctacatattttctgctccgtgaccgccgcttacagtcacttgccgccgattctcgatcgctttcgcgccgcgcatccctcagtagagataaagttatcgaccggcgacgccgctgatgcgatggaaaaagtggtcactggagaagccgatctggccattgccggtaagccggagacgctgccgggttcggtggcgttttcgatgctggaaaatcttgcggtggtactgattgccccggcgttgccctgcccggtgcgcaatcaggtgacggtcgaacatcccgactgggcaacggtgccgtttatcatggccgatcagggcccggtgcgccgccgcatcgagctgtggttccgtcgccataaaatcagcaatccatccatttacgccaccgtcggcggccatgaagccatggtatcgatggtcgccctcggctgcggcgtggcgctactgccggaagtggtgctggaaaacagccccgagccggtccgcaatcgcgtgatgatcctcgatcgcagcgatgagaaaacgccatttgagctgggcgtctgcgcacaaaaaaagcggctgtacgagccgcttattgatgcgttctggaaaatcctgcctaaccactag

SEQ ID NO: 90813 - DNA, 1545 bp, Enterobacter aerogenes
atggccgagtcgcaacccctatccgccgcccctgagggggcggagtatctccgggcggtactgcgcgcgccggtttatgaagcggtacagaaaacgccgctgcaaaaaatggataagctctcttcgcggctggataacgttattctggtgaaacgcgaagaccgccagccggtgcatagctttaagctgcgcggcgcctacgcgatgatgtccggcctgacggcggaacaaaaatcaaatggcgtgatcaccgcttcggcgggtaatcatgcgcagggcgtggcgttttccgcatcccggctcggtgttaaggcgctgatcgtgatgccggtagcgaccgccgatatcaaagtcgatgccgttcgcggctttggcggcgaagtgctactgcacggcgccaactttgacgaagcgaaagctcgcgcgattgagctggcgcagcagcagggttttacctgggtgccgccgttcgatcacccgatggttatcgccggtcagggaacgctggcgctggagctgctgcagcaggatgcccacattgaccgcgtattcgtcccggttggcggcggcggtctggcggcaggcgtggcggtgcttatcaagcagctgatgccgcagattaaagtgatagcggtcgaagcggaagattcggcgtgtctgaaagcggcgctggatgccggtcacccggtggatctgccgcgcgtcggtttgttcgctgaaggcgtggcggtgaagcgcatcggcgatgaaacgttccgtgtatgccaggagtatttggacgacatcatcaccgtcgatagcgatgctatctgcgcggcgatgaaagatctgttcgaagatgtgcgggcggtagcggagccctccggcgcgctggcgctggcggggatgaaaaagtatatcgcccagcataacatccgcggcgagcgtctggctcacatcctgtccggcgccaacgttaacttccacggactacgctacgtttctgagcgttgcgagctcggggagcagcgcgaagcgctgctggcggtgacgataccggaagagaagggtagttttcttaagttctgccagctactgggcggccgttcggttaccgagttcaactaccgttttgccgatgccaaagatgcctgtattttcgttggcgtgcggctgagccgcgggctggatgagcgtaaagagatcctcgatttactgagcgaaggtggctacagcgtggtcgatctttccgatgacgaaatggcgaaactgcacgtgcgctatatggtcggcggacggccgtctaaaccgctgcaggagcgcctgtttagcttcgagttcccggaatcaccaggcgcgctgctcaagtttctccacaccctcggcacccactggaatatttcgctgttccactatcgtagccacggcaccgattttggccgcgttctggcggcgtttgagcttggcgagcatgagccggacttcgaaacccgtcttaatgaactgggctacgagtgtcatgacgaaacccataacccggcgttccgctttttcctcgcgggctag

SEQ ID NO: 90814 - DNA, 1851 bp, Enterobacter aerogenes
atgcctaagtaccgttccgccaccaccacacatggccgcaatatggcgggcgcccgcgcgctgtggcgcgcaaccgggatgaccgatgccgatttcggcaaaccgatcatcgccgttgtgaactcctttacccagtttgtaccagggcacgtgcatctgcgcgatctcggcaaactggttgccgagcaaattgaagctgctggcggtgttgctaaagaattcaacaccatcgcggtggatgatgggatcgccatggggcacgggggtatgctctattcactgccatcccgcgagctcatcgccgattcagtcgagtacatggttaacgcccactgcgccgatgctatggtctgtatctctaactgcgacaaaatcaccccggggatgctgatggcctccctgcgtttgaatattccggtgatctttgtctccggcggtccgatggaagccgggaaaaccaagctgtctgacaaaatcatcaagttggatctggttgatgccatgatccagggggcagacccgaaagtctctgacgatcagagcgaacaggtggagcgttccgcctgtccgacctgcggttcgtgctcggggatgttcaccgcgaactcaatgaactgcctgaccgaagcattaggcctgtcgcagccgggtaatggttctctgctggcgacccatgccgaccgtaaagcgctgttcctcaacgccggtaaacgtatcgttgaactgactaaacgctactacgagcaggacgacgcctccgctctgccgcgcaatatcgccagcaaggcggcatttgaaaacgccatgactctcgatatcgcaatgggcggctcaaccaataccgtactgcatctgctggcggcggcgcaggaagctgaaatcgacttcaccatgagtgatatcgacaagctgtcccgcaaagtgccgcagctgtgcaaagtggcgccgagtacgcagaaataccatatggaagacgtgcaccgcgccggcggcgtgctggggatcctcggcgaactggatcgcgccggtttactcaaccgtgatgtcaaaaacgtccttggcctgaccctgtcgcagaccctggaacagtacgatgtgatggtgacccaggacgacgcggtgaaaaaaatgttccgcgccggcccggcggggatccgtaccacccaggcgttctcgcaggactgccgctgggatacgctggatgacgaccgcgccgagggatgtatccgttctctggaacatgcctacagtaaagacggtggcctggcggtcctgtacggcaactttgccgaaaacggctgtatcgtcaaaaccgccggcgtggacgatagcatcctgaaatttaccggcccggcgaaagtttatgaaagccaggatgaagcggttgaggccatcctcggcggcaaagtcgtggaaggcgacgtcgtggttattcgctatgaagggccgaaaggcgggccaggaatgcaggagatgctctatccgaccactttcctgaagtccatggggcttggcaaagcgtgcgcgttgatcaccgatggccgtttctccggcggcacatccgggctttccatcggccacgtatcgccggaagccgcgagcggcggcaacatcgcgatcatcgaagatggcgacatgattgctatcgatattccgaaccgcggtattcagctgcagctcagcgatgccgaaatcgccgcccgtcgcgaagcgcaagaagcgcgtggcgataaggcgtggacgccgaaagaccgcgagcgccaggtctccttcgcgctgcgcgcttacgccagcctcgcgaccagtgccgacaagggcgccgtgcgcgataaatcaaaacttgggggttaa

SEQ ID NO: 90815 - DNA, 930 bp, Enterobacter aerogenes
atgacgacgaagaaagctgattacatttggttcaatggcgagatgaccccatggggcgaggcgaaagtacacgtcatgtcccacgcgttgcactacgggacttcggtattcgaaggtatccgctgctacgattctcacaaagggccagtggtgttccgccatcgtgaacacatgcagcgtctgcatgattcagcaaaaatctaccgtttcccggtttctcagagcgttgacgagctgatggaagcctgccgcgaagttatccgtaccaataaactgaccagcgcttatatccgtccgctggtgtttgttggcgatgttggcatgggcgttaacccgccggacggctataaaaccgacgttatcatcgcggcgttcccgtggggtgcataccttggcgcagaagcgctggagcaggggatcgatgcgatggtttcttcctggaaccgcgcggcgccaaacaccatcccaaccgcagcgaaagcgggcggcaactatctctcctctctgctggtcggcagcgaagcgcgtcgtcacggttatcaggaaggtatcgcgctggacgttaacggctatatctccgaaggcgcaggcgaaaacctgtttgaggtgaaagatggcgtgctgtttactccgccgtttacctcttccgcgctgccgggtatcacccgcgacgccatcatcaaactggcgaaagatctcggtatcgaagtccgcgagcaggtgctgtcccgcgaatctctgtacctggcggatgaagtgttcatgtccggtaccgctgcggaaatcacgccggtacgcagcgttgacggtatccaggttggcgcaggccgccgtggcccggtgaccaaacgcattcaggaagccttctttggcctcttcaccggtgaaacggaagataaatggggctggctggatccggtaagtaagtga

SEQ ID NO: 90816 - DNA, 258 bp, Enterobacter aerogenes
atgatgcaacatcaggtcgctttacaggctcgcttcaaccccgaaaccttagaacgcgtgctgcgcgtggtgcgccatcgcggttttcaaatttgctcaatgaatatggaaaccgcgtcggatgcgcaaaacataaatatcgagctgaccgttgccagccagcggcccgtcgaattactgtttagtcagttacgcaaactggtcgacgtcgcctgcgtcgagatccagcaacccacatcacaacaaatccgcgcctga

SEQ ID NO: 90817 - DNA, 1647 bp, Enterobacter aerogenes
atgaacggggcgcagtgggtggtacatgctttgcgaacacagggagtcgacacggtatttggctatccgggtggcgcgattatgccggtttacgatgctttgtatgacggcggcgtggaacacctgctgtgtcggcacgagcaaggcgccgcaatggccgccatcggttatgcccgcgcgaccggcaaaactggtgtttgcatcgccacttccggccctggcgccaccaacctgatcaccggtttggctgacgcgttacttgattctgtacctgttgtcgccatcaccggtcaagtggcggcgccgtttatcggcaccgatgcttttcaggaagtggacgttcttggtttgtcgctggcctgcaccaaacacagtttcctcgtgcagtcgttggaagagctgccgcgcgtcattgcggaagctttccaggtggcaaactcaggccgtcctggcccggtactggttgatattccaaaagatatccagttggctaaaggcgaattagatccgcatttctccaccgtccctgatgatgttgagttcccgcacacacaagtcgagcaggcgttagcgatgcttgcgcagtcccacaagccaatgctgtacgtgggcggcggtgttggaatggcacaggcggtaccggccgtgcgcgaatttctggcggtgacgcagatgccggtaacctgcaccctgaaagggttgggtgccgtcgccgcagattatccgtattaccttggcatgctgggtatgcacggaaccaaggcagcaaacctggcggtgcaggagtgcgatttattaatcgccgtcggcgcccgttttgatgaccgggttaccggcaagctgaatacctttgccccgcacgccaaagtaatccatatggatattgacccggctgagctgaacaaactgcgccaggcgcacgtcgccttaaccggagatttaaacgccatgctgccagcgttgcagcagccgttggccatcgatgcgtggcgcgagcacaacgcgcagctgcgcgcggagcacgcctggcgttacgatcatcccggcgaggcaatctacgcgccgctgttgctcaagcagctttccgatcgcaaaccggcggattgcgtcgtgacgaccgatgtcggccagcaccaaatgtggtcggcccagcacatgacctatacccgcccggaaaacttcatcacttccagcggcctcggcaccatgggttttggtctgccggcagccgttggcgcgcaggtggctcgcccggacgatacggttatctgtatctccggcgatggctctttcatgatgaacgtgcaggagctgggcaccgttaagcgcaagcaattaccgttgaaaatcgtgctgctggataaccaacgtttaggcatggttcgccagtggcagcagctgtttttccaggagcgttacagcgaaaccacgcttaccgataatcctgattttcttacgctggccaacgcttttggcattccaggccagcacatcacccgtaaagaccaggttgaagcggcactcgacaccatgctttcgagccaggggccatacctgcttcatgtctcaatcgatgaacttgagaatgtctggccgttggtgccgcccggcgccagtaatgcagaaatgctggagaaattatcatga

SEQ ID NO: 90818 - DNA, 1521 bp, Enterobacter aerogenes
atgtcactcgcaattgtctatacccgcgcggcgctcggggtcagcgcgccgctaattaccgtcgaagtccatatcagcaacggactacccggtttgacgatggtcggtctgccggaaaccacggtaaaggaagcccgcgatcgggtacgtagcgccattattaacagcggctacagctttccggcaaagaagataaccataaaccttgccccagccgatctgccgaaagagggcgggagatatgatttacctatcgctctcgcgctcctggtcgcttcgcagcagcttgccgccccgaaacttaatcagtatgagtttattggcgaattagcgcttacaggcgcgttacgcggcgttcctggggcaatatccagcgctatggaagcgataaaagtcgggaggcagattgtcgttgctggagataacgccgaagaggtcggcttgattaacggcaatgagtgccttatagcagggcacctgcaggaagtctgtgcgtttctggaagggaaacatactctgcagccgccgactggtgaaataactgcgggagaggacgattatgacgatctcggcgatgtcattggccaacagcagggaaaacgcgcgctggagatagtcgcagctggcggtcacaatttactcttgatgggtccacctggtacggggaagacgatgctcgccagccgtttgccggggcttttaccgccactaagcaaccaggaagcgctggaaagcgcggctatcctcagcctcgtcaatgctcattacgttacgcgtcagtggcgtcggcggccttttcgcgcccctcaccacagcgcttcgctaacggcgatggtcggcggcggctcaatccctgccccgggggagatctccctggcgcataacggtattctgtttcttgatgaactacctgaattcgagcgtcgggttctggatgcactacgagagcccattgaatcaggaaaaattcatctttcccgcactcgggctaagattgactatcctgcgcgatttcagttgattgccgccatgaatcccagcccaacaggacattaccagggtcagcataatcgggccacaccggaacagaccctgcgctacctgggccgattgtcagggccatttctcgaccgcttcgatctctcgcttgagattccactccctccaccgggcgtattaagccggggtggcgttggcgaagagcgaagcgccaccattcgtctacgggtattcgcggcgcgcgacagacagctcgcacggcagaataaacttaatgcacaattggacagcggggagataaaagtctggtgcaagctgaaagaagacgacgcgatatggctggaacagacgctctcactattagggctttcaatccgcgcatggcaacgtttactgaaagttgcgcgtactatcgccgatcttaatgaggatagggatatcgaacgtcatcatttgcaggaggcgataagctaccgggctatcgaccgtatgttaaatcacctgcagacgctgatggcataa

SEQ ID NO: 90819 - DNA, 339 bp, Enterobacter aerogenes
atggcggaaagctttacgacgactaatcgttttttcgacaataaaaattatccacgcgggttctcccgtcacggtgatttcaccatcaaagaggcgcaactgcttgaacgtcatggttacgcctttaatgagctggaattgggcaaacgcgagcctgttaccgaagatgaaaaacaattcgttgcggtatgccacggcgaacgtgagccggtgaccgaagcggaacgcgtttggattaagtatatggcgcgaatcaaacgtccgaagcgttttcacaccttatctggcggtaagccgcaggttgaaggcgctgaagactacactgaaagcgacgattaa

SEQ ID NO: 90820 - DNA, 822 bp, Enterobacter aerogenes
gtggacacggaattgctcaaaactttccttgaagtgagcagaactcgccactttgggcgggcagcggaagcgctttatttaacacaatcagcggttagcttccgcattcgtcagttggagaaccagctgggcgtaaatttattcacccgccatcgtaacaatattcgcctgacgtcagccggtgagaaactgttgccctatgccgaaacgttgatgaatacctggcaggccgcgcgtaaggaggtcgcccactcttctcgccataatgagttttcgatcggtgccagcgcgtcgctatgggaatgcctattgaacggttggctggggacgctctacaaagatccctataatctgcaatttgaggcgcggatagctcaacgccagtcattagtgaagcagttgcatgaacgccagctcgatctcctgatcaccacagaatcaccgaagatggatgaattaagcagccagttattgggtcatttcaccctggcgctctattgtgccgcgccgggaaaaaataagaatgatttgaactacctgcggctggaatggggaccggacttccagcaaaacgaagtgggtttgatcggcagcgatgatgtaccgctactgacgacgagctccgcagaactggcttatcaacagctcactaccttgaatggttgtacctggttacccgttagttgggcacagcagaaaactggcctgcacacggtgaccgatagcgcgaccctttcacgtcctctgtatgccatttggctacaaaatagcgataagcaggcacatattcgcgagatcctgaaaagcagcatcctggaatag

SEQ ID NO: 90821 - DNA, 129 bp, Enterobacter aerogenes
atgtctatgtcgcaacgtctgctttttgcactgttgatgatggccctgatggcggttcccgccatccaggacgccattaccctcggaattaacagccgttttatctatctgttgccgtactatttttaa

SEQ ID NO: 90822 - DNA, 1470 bp, Enterobacter aerogenes
atgaaagattttgccattccggcctcacgcaatacggcgactgtcgcgccggtcgatgaggtcctgccaattacgcaaatgattctctatggattgcagcacgtgctggtgatgtacgccggggcggtggcggtaccgctggtggtgggtaacgcggtcggtttgcctgcggagcatattattttgttaatcagcgccgatttgtttatttgcggcgccgcgaccatcgtgcaatcgatgggcatcaagcagtggttgggctgccgcctaccgctgatccagggctgtactttcgccgcgctgatcccgatggtgcttattggtaaagagtacggtatcggggcgatctccggctcggttatcgtctccggcatttttatcctctgctgcgcgccgtggattagccgcctgattcgcttctttccaaaggtggtgatgggcggcattgtaacgctgatcggcctctctattatgccggtcgcgggaggatggattggcggcggcagcagcgagatggccggtttcggcgatctcttctcgctgctgatggcggccatcacgctggtcattattcttaacctgtataccttcgctaccggcgtggtcaaaaacacctcggtgctgattgggctggtgatcggcactattttatggagcttcttcaagccgctggattttaacctcgtcaacgctacgccgtggctacatctgccacaggtgatgcagttcgcccggcctgagtttcatatcgtgcccgtcgccctgctgtcgatggtcatggtggtggtgatggtcgaaaccatgtcgtccatcatggcgaccggcgatatcgtcggtaaacaggtcacggccagcatgctgcgtaacggcctgaatacctgcggactggcgacgacgatctgcggcttcttcaacctgtttccctacgcggcctttgcgcaaaacgtcggcctgattggcctgaccggcgtacgcagccgtttcgtggtatcggtctcgggcgtcattctgatgctgatgggcattttcgccaaaatggcggcgctggtggtactgattccgaaaccgatcctcggcggcgccggtatcgttatgttcggcatggttgccgtttccggtattcgtacactcggtcaggtcaactatcgcaacaataacaacgggatggtggtcgcactcacccttggtctcggcatgatgccggtattggtgccgaatctgtttacccagttcccgccgatgatgcagctgtttctgcacagcggcatcactatcggcaccctgacggcgattgtcgccaacctgacgctgaacggcagcgtgccgttccgtatttctcacgatgtcccggaaccggacccggcgccgccgagcgcggctgcccgcaacatggccgtgcgtacggtacgcatgtggctgctgctgcgcaaagtacagaaaggtcaaaccgccgctgacggccaggagtga

SEQ ID NO: 90823 - DNA, 1938 bp, Enterobacter aerogenes
atgaatcgatttattgtggccgatgttgcgaactgtattggatgtcatgcctgcgaagtagcctgcgtcacggcgcatcatcaggatgcctggccggcacagcgcagcgcgtttgttccgcgcatccatgttgtcttccaccggaataccagtactgcgaccacttgccaccattgcaacgacgcgccttgcgtcacctcctgcccgacccaggcgctgtatgtcgccaacgacagcatccagtttacccaggccgagtgtatcggttgcaaaaactgcgttgtcgcttgcccatttggcgcaatcgagatggtcgccagcggggaagatggcccgcagctggcgcaaaaatgcgatctttgtcgcgatcgtccctccgcagagcaggcctgcgtggccagttgcccgactcaggcgctgcgcgtaatggacgagagcgccctgaagcggttgcagcgggaaagacaaatccgctccgcccaagggcagccgctggccgagcgtcgtggcgcaaggcgcgaagcgatactggataaagcgccgcgggtgggggcgaagaagcttgccgcggaggaccgaaaagggcattttgccgagatctaccagcgccttagcgaatgtgatgccgaatatgaaagcgagcgttgcctgtactgtgcgcaaaaagcctggtgcaactggacctgcccgttacacaaccatattcctgatttcatccgactggtgcgtgagggcaagattattgaggccgcagaactctgccatcaaagtagttcgctgccggaaatctgcggccgggtctgcccacaggacaggctatgcgagggtgcctgtacgctgaaaaacgaaggcggcgcggtggcggttggcaatctggaacgctatatcaccgataccgcgctggcgatgggctggcggccaaccacaggcgaggttgccccgcgtcaggaacgcgtggctattatcggcgccggcccggcgggactgggctgcgcggatattctcgcgcgcgccggggtacaggttgatgtttttgataaacatcctgaaattggcgggctgctgactttcggcattccgtctttcaagctggaaaaaacggtaatggcgctgcggcgcgagatcttcagcgatatggggattcgtttccatctcaatcaggaagtggggcgcgacgtggactttagcgaactgctggctaactacgatgcggtctttttaggcgtcggcacctatgggctgatgggcgcgggtcttgatggcgaagacgcgccgggtgttattcaggcgctgccgttcctgattgccaatacccgtgaggtgatgggtcttgaagagagcgccgaatatccgttaaccgacattaagggtaagcgggtggtggtgctgggcggcggcgatacggcgatggactgtttgcgcaccgcggtgcgtcgcggagccgagagcgtaacctgcgcctatcgtcgcgatgagttaagcatgccaggctcgaaaaaagaggtggtgaacgcgcgggaggagggcgtggcgtttcagtttaacgttcagccgcaatatatcctgcgtaaccgtaaaggccaggtcagcgccgtcgggatgatccgtaccgaaatgggtgaaccagggccggatggccgccggcgcccgcggccaattgccggttcagaattcgaactcccggccgatgtgctggtgctggcgtttggtttccaggctcacgacatgccgtggctgcgggggcatggcatcaaacttgaccgctgggggcagattgtaacgggcggcaaaggtcgcggcaccacacagaccagccatgacaaaatctatgccggcggcgatgcggtacatggcgccgatctggtggtgacggctatggttgccgggcgccaggccgcaagcgaaatgctggcgcgatttgaccataaggagcggtga

SEQ ID NO: 90824 - DNA, 477 bp, Enterobacter aerogenes
atgacccattttattcttgccagttcacaggcctgtatcggctgtcgtacctgcgaagttgcctgcgcactggagcatgtggcggaaggggcggagtttcatccgcgattgaaggtgatgcgactcgacacgttgagcgtgccggtgatgtgccatcagtgtgaaaacgcgccatgcgtcggggtctgtccgaccggcgcattggcgatgggcgccgagcgggtagaagccgatgccgggcgctgcattggctgccagagctgcgtcgtcgcctgtccatttggcgcgattactatcgaaacatcggcggcgcatccgccggttattgtgaagtgcgatctctgcgagcagcgagatggtggcccggcctgcgtatcggtgtgcccaacggcggcaatatcgctgatgaccggtgaggccctggcggcgctgcagaaacagagaacgatcgccagcgccagcttgttgagcttgtag

SEQ ID NO: 90825 - DNA, 1335 bp, Enterobacter aerogenes
atgagtatcttagtgcttaaaaatgccacccttgcccagcttcatccggcaaaagtggaagaaggtgtcgatatcgtcatcgaaaatgacagaattatcgaaacaggcgcgaacctgagcccgcgttacccgcaggcgcgtattaaagaaatgcacggccgactggtgatgccgggaatggtctgctcgcataaccatttttattccggactgtcgcgcggaattcaggccaatatcgcgccgagtcccgattttatctccacgctgaaaaacctgtggtggcgcctggaccgcgctctggatgaggagtccttatactacagcgggcttatctgttcgctggaggccattcgcagcggctgcaccgccgtcattgaccacagcgcgtcgccgaactatatcgctggatcattaagtcagttacgtaacgctttcatcaaggtcggcctgcgtggcatgacctgctttgaaaccaccgaccgtaacggcgggttgcaggaacttcaggcaagcgtcgaggaaaatatccgctttgcccgcgaaatcgatcgggcgcgggaaagcggcgacgaaccgtatctggtagaagcgcatatcggcgctcatgcgccgtttacggttcctgatgaggggcttttaatgcttcgcgaagcattaaaaacaaccgggcgcggcctgcatattcatatggcggaagaccgttacgacgtttctcacagccaccatcactacggtaaagatctgctggtacgcctggcggagttcgatctcatcgatagtaaaacgctggtagcgcacgggctgtatctgtcggaagctgatattgaactgctgaacgcgcacgatggtttccttgtccataacgcccgctctaacatgaacaaccacgttggttataaccagcagttgacggcgtttcgcaacctggcgctgggcaccgacggcatcggctccgatatgtttgaagaactcaagttcgctttctttaaacaccgtgatgccggcgggccactgtggccggatagctttgcgcgggcattaagcaacggtaacacgctgcttagccgcaactttaacgaccgttttggccgtattgaggcaggctataaggcggatttaaccatcagcgattatattccgccgacgccgctgctggcggcgaatctcgccgggcacatcgccttcggtctgggggccagccccgttcatagcgtgatggtaaatggcgtcatggtctatgaggatcggcagttcgctattgattgcgatacgattttcgccgaagcgcggaaggtggcgaagaagatgtggcagcggatggatgcgttgccgtaa

SEQ ID NO: 90826 - DNA, 3105 bp, Enterobacter aerogenes
atgggggatatcatgcgtcccgtcccgtttgaggaattattgacgcgcattttcgatgagtatcaacaacaccattccatttttggtattcctgagcagcagttctattcgcctgccaaccaacgccgggtaagcgtcttcggcgaaagctgcgccaccccaatcggccccgccgccgggccacatacccaactggcgcagaatatcatcaccgcctggctcaccggtgggcggtttatcgagttgaaaaccgtacagattctcgaccggcttgagctggaaaaaccctgcatcgatgccgaagacgaatgctttaacaccgaatggtctacggaatttacgctgcaaaaagcgtgggatgagtatcttaaagcatggtttattctgcatctgttggaagaggttttcccgttcacgccggcgaagaacggtaagtcctttattttcaatatgagcgtcggctataacctggaaggcattaaacaaccgccgatgcagcagtttatcgataatatgatgaacgccgccgggcagccaaaatttacccagtaccgcgacacgctgaaccgctggctgcatgatgacgccttcctcacccgcctgtcgctggatgatattcgcccacggctggcgacgctcgcggaacgcattcctgcaaaactggtacaaggggttaccctctctaccatgcatggttgcccgccagatgaaatcgaagccatctgccgctatatgctggaagagaaacagctcaacaccttcgtgaagctcaatccgacgctgttgggctacccgcgcgtacgcgaaattctcgacacctgcggctttgactatatcggtctgaatgaagaatcttttgaacacgatcttaaaatcggccaggcgctggaaatgttgacgcgcctgatggcgttggcgaaaagtaaacaacttggcttcggcgtgaagctgaccaacaccctcggcacggtcaacaataaaggcgcgctgcccggcgatgagatgtatatgtccggccgcgcgctgttcccgctctccatcaacgttgcagcactgctctcgcgtgaattcgacggcaaactcccgatctcctactccggcggcgccagccagctcaatattcgcgatatctttgaaaccgggatccgccccattaccatggcgaccgatctgctaaaacccggtggttatctgcgtcttagccagtgcatgcgcgagctggagcaggccgatggctgggagatgaatcaggtcgacgtcaagcgcctgaacgcgctggcggaaaaagcggtcagcatggagtacacgcaaaaacactggaagcctgacgatcgcatcgacgttggcgagccgctgccgttaaccgactgctacgtcgccccttgcgtcagcgcctgcgccatcaaacaggatattccggaatacattcgcctgatgggcgagcagcgctatgccgatgcgctggagcttatctatcaacgtaacgcgctgccggcgattaccggtcacatctgcgatcaccagtgccagtacaactgtacgcgtcttgattatgacagtgcgttaaatatccgcgagctgaaaaaaatcgcccttgagaaaggctggccggaataccaacgccgctggcataaaccggcgggttccggcagccgaaacccggtggcggtgattggcgcaggcccggcggggctggcggcgggctacttcctcgcccgcgccggccacccggtcacgctctttgagcgcgaagccaacgctggcggagtggtaaaaaatatcattccgcatttccgcattcccgctgaacttatccagcaggatattgagttcgttgttaatcacggcgtcaacattgtctacggctgcgaaccgcatctcaccgtcgaaaaactccgtcaggagggttatcgctatgtactgatcggcaccggcaccgacaaaaacagcggcgtgaagcttggcggcgataacccgcatattcataagtcgctcaacttcctgcgcgcgttcaaccgcggcgatcgcctgaacgtgggtaaacatgtggccattgtcggcgcgggtaacaccgcaatggactgcgcccgcgcggcgctgcgcatccccggcgttgagaaagcgacggtgatttatcgccgctcgcagcaggagatgccggcatggcgcgaggagtacgaagaagccctccaggatggcgttacgttccgttttctcagcaacccggaacacttcgccgctgacggcacgctaaccgtccgcaccatggccctcggcgagcctgatgaacagggtcgacgtcgcccaatacccaccgatgaaacctggacgctgcaggtcgatacgctgattaccgctatcggcgaacagcaggatggcgaagcgctggcggcgatggggatcccgctcaacgatcgcggctggcctgaagtcaacgctgatggcgaaagccggctggctaatgtattcctgattggcgacgtacagcgtggcccttcttctatcgtctcggcgataggcaacgcccgtcgcgccagcgatgcaattctcaaacgcgagaatatccgcagccacttcggcgataaacagtggaataacgtcgatcccgcggacatctaccgccgcaaagggaccattgctatcgctcaggttgataaagacgaccgcgatgcctttgtcgcgcaggaggcggagcgctgcctcgaatgtaattacgtctgcagcaaatgcgttgatgtctgcccgaaccgcgccaacgtctccattgcggtaccggggttcgacaaccgctttcagacgctgcacctcgacgcgtactgcaacgaatgcggcaactgcgcgcagttctgcccatggcagggaaaaccctataaggacaaggtcaccgtttttagcctcgaacaggatttcaacaacagcagtaatccgggttttctcgtggagcaacagcgcgtccacgtgcgtcaggatggcatgacctggctgctggatatcgaccagcgaggtcagttcgctgaagtaccgccgcagctggatgccatgtgccgcatcatcagccacgttcatcaacatcatcactatttgctgggagtcgtcgaagtatga

SEQ ID NO: 90827 - DNA, 570 bp, Enterobacter aerogenes
atgaaacaggtcgattgtattattaccgccgccggattgtcctcccggatgggacagtggaaaatgatgttaccctggcgcggaacgacaatacttgatgcaagtataaaaaacgccctgcaattctgctcgcgtattattctggtgagcggttttcgcgcagaggagctacatcaacgctattcggcgcatccgcaaataaccctggtttataatcccaactatcaacagggtctgtttacttctgtttgcgctggcgcgagccaggtgcgaaacaacttctgttttatcaccctcggcgatttaccctgcctgccgccagcgcttttccagcggctttggcaacaacgcggcgacagcgcccttcttccgcaatatcaaggcgtaccgggtcatcccatccttattaccggcacacagctgcgccaacttatcacttacgatggacctgactcaatgcgcaaacggttattacagagccgccatcgctgcctggagttagattttccgcaaatggtctgggatatcgatacccctgctgattttattcgcctgcaaaaccaggattaa

SEQ ID NO: 90828 - DNA, 759 bp, Enterobacter aerogenes
atggaaaatataccgcatctgcaatcgctgttttatgatttaggcgtaaatgatggtccgctgctcatttccgccgtcggcgcgggaggcaaaaccagtaccttaatgtggttggcgcagcgttttctggagtatggccggcgagttctgatcaccacgaccacccatatgtatctcccggcatcactacctgtggtgatttgccgcgatccgctggcgctgcctgacgaggtttggcagcggccgctgcaggcctgttacgcctcatggctcgcccctgcgggtaaggttcgtgggtttagcccgcaacagcttgatgcgctggttgccgcggggcgcgtggatgtggtgctggtagaagctgacggggctcacggtttcgccttaaaagcgccagctgagcacgaaccttgcatacctcaatcctgttgccgcgttattgccgtcatgggggcctggaggctcgggcaaaacgttgggccagcgaccgttcatcgctggccccttttttcccggatcaccggcgcggcgccggatacggcgctgagttggccaatgctgcatcgcttaattacgcatccgcagggagcgtttaaaggcgttccgcccgctagtcgccggatcctgctgctgaatcagctttctcaaaatgagaatttaccggagcaggcgctgttgcagcagtggggagttaacgcactgtgggcgggagcagtacaagagcagcccgcgataacgcgacgacgaacaacagagtga

SEQ ID NO: 90829 - DNA, 1626 bp, Enterobacter aerogenes
atgaatattttctctgaagcggcaaaactcgaagcacagaatcgcccgtttgcgctggcgcagattgtcgatagccgcggctcaacgccgcgccattcggcgcagatgttaattcgtgaagatggttcgatagtcggcaccatcggcggcggcatggttgagcgcaaagtgattgaacaggcgctggaagcgctcagcgaaaaggcgtcgcgcatgtttcatgggcggatggcgcgtagcggcagcgatgcggtcggctccgattgcggcggggcgatgtcggtctatattagcgtacatggcctgcgcccgcgtctggtgctgatcggcgccgggcacgtgaaccgcgcggtggcgcaaagcgcggcgctgctgggttttgaggtggcggtggccgatatctatccagagagcctgaaccccgactattttccgccgacaacgcagttgctgcatgctgaaaccttcagtgaggcggtggagaatctggcgatccgcggcgatgactttgtgttaatcgccaccaataaccaggatcgtgaagcgctggatacactgattgaacggccggtcgcctggcttgggctgctggccagccgccgtaaagtccaggtatttttacgccagctgcgggagaacggcgttgccgcagaacatattgtccgcctgcatgcgccggttggctataacattggcgccgaaacgccgcatgagatagcgattagcattctggcggaaatcctgcaggtaaaaaatcgcgcgcccggcggcctgctgatggcggctgccacgcctgcgcagcagcagttggtcgctattcgcggcgccggcgatatcgccagcggcgtggctctgcgtctgtggcatgcggggttcaaagtggtgatgttggaagtggctaaaccgacggttatccgccgcagcgtcgcgtttgcccaagccgtcttcgacggtgaaatgacggtagaaggggtgatggcgaagcgggtgtcatccgctcaggaggccatccgggtaattgaaaatggcgcgatcccggtattggtggatccgctatgcgaatcgctgactgaactgcgccctgtctgcgtcgtggatgccatactggcgaaagagaattttggtacgcagcgagagatggcgccagcggtaattgcgctaggccctggcttttgcgccggtgtggattgccatgcggtgattgaaaccaatcgcggccattggctggggcaggtgatttacgatggcaaagcgcaggagaacaccggggttcctggtaatattcttgggcatacctcacgacgggtgatccgcgccccgggtgccggggtgatgcatgcgaaggtggcgctgggggatatcgttaatgaaggcgatatcattgccaccgtcggcgaggccgagattattgcgccattaagcggtatggtgcgcggtttgctcagcgatgggttagtggtcgagagcggctttaaaattggcgatatcgacccgcgcggcgccagcgccgattttaccagcgtctccgataaggcgcgcgccattggcggtggggtgcttgaggcgctgatgacgctgatgaataaaagaataaaagagaagagtgagttattgtcggtggcgtag

SEQ ID NO: 90830 - DNA, 933 bp, Enterobacter aerogenes
atgagtaagaaaattgtactcgccctcggcggtaacgcgctcggcgaggatctggccggacaaatgcaggccgtcaaacaaaccgcgcaggccatcatcgacctgatagcccagggccaccaggtagtcgtgacccacggcaacggcccgcaggttgggatgattaatctggccttcgaagccgcagccaaaaccgaggcccataccccgatgctgcccatgtcggtctgtgtggcgctaagccagggttatatcggctatgacctgcaaaacgccctgcgcgaggagttgctgtcgcgatcgatgcatatcccggtggcaacaatcatcacccaggtggaagtcgacgccaacgatccggcgttcaaaaatccgaccaaacctatcggctcttttttcactgagcaggaagcagaacagctgacacgtcaggggtacgccatgaaagaagatgccggacgcggctatcgccgggttgtcgcctcgccgcagccggtcgatattattgagaaagagacggtcaaagcactcatggacgcctgccacgtagtgatcaccgcgggcggcggcgggatcccggtaatccgcgaaggcaatcatctgcgcggcgccagcgcggtaattgataaagactgggccagcgctaaactggcggcgatgatcgacgccgacatgctgatcatcctgaccgcggtcgagaaagtggcgatcaactttggcaaacccaacgagcagtggctggataagctgtcgctcagcgatgccgaacagttcattcgtgaaggtcacttcgctaaggggtcaatgctaccgaaagttgaggccgccgcctcattcgcccgttcacgtccggggcgcaaagcgttgatcaccgtattaaataaagccaaagaaggaattgaaggaaaaaccggtacggttattgaagggtaa

SEQ ID NO: 90831 - DNA, 1407 bp, Enterobacter aerogenes
atgcgcgtactgattaaaaacggcatcgtggtcaacgccgacggccaggcaaaacaggatctgctgattgaaaacggcctggtcagccagctcgccgaacggataaccccaaccgaaccttgccagactatcgatgccgcaggttgctatgtcatgcccggcggcattgatgttcatactcattttaatatcgataccgggcaggcccgcagctgcgatgatttcttcaccggcacccgcgccgccgcctgcggcggtaccaccactatcgtcgaccatatgggcttcggccccgccggctgccgccttcgtcaccagctagaggcctatcacggctatgccgcctacaaagcggtgatcgactacagttttcacggcgttatccagcatatcaaccatgccatcctcgatgaaatcccgatgatggttgaagccgggattagcagcttcaagctctacctcacctaccagtataagttgaacgatgatgaagtgcttcaggcgatgcgccatctccatcgcgctggcgcgctaaccaccgttcatccggaaaacgacgccgctatcgcccgtaaacgggccgaatttctggcggccggcaaaaccgcgccgcgctaccacgcccttagtcgcccgctggagtgtgaagcggaggctatcgcgcgaatgatcaatctcgcccagctcgccgacaacgcgccgctgtatatcgttcatctctccaacggtctggggctggattatctgcgtctcgcgcagcggcggcaccagccagtgtggattgaaacctgtccgcaatatctgttgcttgacgaccgctgctatgaacgcgaagacgctctgggatatctgttaagcccgccgctgcgcaacgccagcaacaatgatgcgctgtggtgtggtatcgccgatggttcgatcgacgtggtggcgaccgatcactgcgctttctcgatggcccaacgccagcagctctccggcggcgatttcagccgctgtccgaacggcctaccgggggtggaaaaccgcctgttgctcatgttttcccacggcgtcatgaccgggcggatttcagcgcagcgtttcgtcgcgctcaccagcgccactcccgcgaaactatttggcctgtggccgaaaaaagggcgattggcgcccggcgcagacggcgatgtcgtcattatcgatccgcagcgcaccaccacgatccgccatgagatgttgcatgacaacgccgactattcaccctgggagggctttatttgccagggcgcgattcgccagaccttatcgcatggccgggtcatttttgataacggcaccttcaccggcagcgctggtcagggacgttttttacgccgcgatcccttttctaccgctcacctgccggtcagcggaatcacatcttaa

SEQ ID NO: 90832 - DNA, 1212 bp, Enterobacter aerogenes
atggctaaacacattcctttcaaactgattgtcgaaaaagcaaaccactaccagcaggatatgacccgcttcctgcgcgatatgatcgctatccccagcgaaagctgtgacgaaaaacgcgtcgtgcatcgtattaaagaagaaatggaaaaagtcggcttcgataaagtcgagattgacccgatgggcaacgtgctgggctatatcggccacggcccgcgactggtcgccatggacgcgcatattgataccgttggcatcggtaacatcaagaactggaccttcgacccctatcaggggatggaaaccgatgagctgatcggcgggcgcggcgcgtccgaccaggaaggcgggatggcgtcgatggtctacgctgggaaaatcatcaaggacctcggtctggaagatgaatataccctgctggtgaccggtaccgtccaggaggaagattgtgacggtctgtgctggcagtacatcatcgaacagtccggcattcgcccggaattcgtggtcagtaccgagccgacggattgccaaatctatcgcggccagcgcgggcgtatggagattcgcgtcgatgttcagggggtaagctgccacggctcggcgccggagcgcggcgataatgccatcttcaaaatggggccgattcttaacgaactgcaggagctctcccataacctgggcaatgatgagttcctgggtaaaggcaccctcaccgtttcagaaattttcttcacttcgccaagccgctgcgcggttgccgacagctgcgcggtctctatcgaccgccgtctgacctggggtgaaacctgggaaggcgcgctggatgagatccgcgccctgcctgccgtacagaaggccggcgccgtggtctcaatgtacaactatgaacgcccgtcatggaccgggctggtttatccaacggaatgctacttcccgacctggaaagttgaagaggatcatttcaccgtacgcgcgctcagcaacgcttatgaagggctgttcggtaaagcgccggtggtcgataaatggaccttctccaccaacggcgtttccatcatgggccgtcacggcatcccggttatcggtttcgggccaggtaaagagccggaagcccatgcgccaaatgaaaaaacctggaaacagcatctggtgacctgtgccgcgatgtacgccgcaatcccgctgagctggctggccacagagtaa

SEQ ID NO: 90833 - DNA, 1200 bp, Enterobacter aerogenes
atgtctgctttttcgctgaaaatggatattgccgacaaccgtttctttaccggtgaaacctcgccgctgttctctcgtcagcaggcacaacaggcgcgccattttcatcaaaaaatcgccggttaccaaccgacgccgctgtatgccctgaaggaactggcgtcgctgttcggcgtaaagaacatcctggtaaaagatgaatcccagcgctttggcctcaacgccttcaaaatgcttggcggcgcctacgccatcgcccagctgttgtgtgaaaaataccatctcgatattaacgccttctcgtttgagaccctgaaatccaccatcaaagagaagatgactttcgccactaccaccgacggcaaccacgggcgcggcgtcgcctgggccgcccagcagcttgggcaaaacgcggtggtgtacatgccgaaaggttcagcgcaggaacgcgtggacgccattttacgcctcggcgcggaatgtatcgttaccgatatgaactacgacgataccgtgcgctttaccatgcaaaccgcacagaaaaacggctgggaagtggtacaggacaccgcatgggaaggctacaccaaaattccaacctggattatgcaaggttacgccaccctcgccgatgaagcggtagaacaaatggcggcgatgggcattgctcgccctacccacgtcttcctgcaggccggtgtcggcgcgatggcaggcggcgtgctcggttatctggtcgacgttttcggcgcccgcgatttgcactcggtgatcgtggagcctgaactggcggactgcatctatcgctccgggttaaaaggcgacatcgtcaacgtcggcggcgacatggccaccatcatggcaggactggcctgcggcgaacctaacccgctgggctgggaaattctgcgcaactgcgccacccaatttatctcctgccaggatgccgttgccgccctcggtatgcgcgtactcggtaatcctttaggcaatgaccaccgggttatctccggagaatccggcgccgtcgggctcgggacgctggccgccgtccacttccatccgcagcgccaggcgctgatgaacaaactggggctcgatagccactccgtggtgctggtcatcagcaccgaaggcgacaccgacgtgcagcattaccgcgaagtcgtctgggaaggcaagctgccggcagcacaataa

SEQ ID NO: 90834 - DNA, 1188 bp, Enterobacter aerogenes
atgaaaactgttaacgaactgatcaaggatatcaataagctcaactctaacctgcatgaaaaagatttcctgctgacgtgggagcaatcgccggacgagctgaagcaggtgctggatgtcgccgcagcgctgaaaacgttacgggcggaaaacatcgcgacaaaagtttttaacagcggactgggtatttcggtctttcgcgataactccacccgcacccgcttctcttatgcctcggcgttaaacctgctcggcctggcgcagcaggacctcgacgaaggcaagtcgcagatagcccacggtgaaacggtgcgcgaaaccgccaatatgatctccttctgcgcagacgctatcggtattcgcgacgatatgtatctcggcgccggcaacgcctatatgcgtgaagtcggcgaagcgctggatgacggccacaaacagggcgtactgccgcagcgcccggcattaattaacctgcagtgcgacattgaccatccgacgcaggcgatggccgatctggcctggctgcgtgagcacttcggctcgctggaaaatctgaaaggtaaaaaaattgccatgacctgggcctactcgccaagttacggcaaaccgctttccgtcccgcagggaatcatcggcctgatgacccgcttcggtatggatgtcaccctcgcccatccagagggctacgatctgatcccggacgttatcgaagtggcgaagaaaaacgccgcggcttccggcggcagcttccgtcaggtcaccgatatggcggaagcctttaaagacgccgatattgtctacccgaaatcctgggcgccatacaaagtgatggaacaacgcaccgagctactgcgcgccaacgaccatgacgggctgaaagcgctggaaaaagcctgtctcgcccagaacgccaatcacaaagactggcactgtaccgaagagatgatgaagcacaccaaagacggtgacgcgctgtatatgcactgcctgccggcggatattaccggcgtctcctgcgaggaaggcgaagtcaccgaagcggtgttcgagaaatatcgtatcgccacctataaagaggccagctggaagccgtacatcatcgccgccatgatcctctgtcgcaaatatgccaaacccggtcagttgctggagcaactgctgcaggacgcgcaaaaacgcatcaaataa

SEQ ID NO: 90835 - DNA, 1779 bp, Enterobacter aerogenes
atgattccctccaattcgctatccgttttaatgcagattcagccaacgattcaacgttttgcccgcatgctctccagcgtgttacaactcgaggtcgagattgtcgacaatacgctgtgccgggtcgccggtaccggcgcctacggtaaatttctggggcgaaaattaaatacagattcgcgacttttacgttacataatagaaacaaaaaaagaaaaggtcgtgactcattcgcgttttgatcccttgtgtaaagactgtaccaataaagagaactgtaaagagaaggcatttctgggtaccccggtgatttatcaggaacagtgtgtcggggttattagcctggtcgccttaactcgcgagcagcaggagcgcattaatgacaacctccacgagttttcagattatgtacgccacgtttcttcaatatttgtctcccgcctgttagaggaccagggcgggggagataatatgcttaaaatgttttccaccatgattgaaaacatggatcagggtgtgctggtggttagccaggatcaaaaagtgaaatttgccaatcaggcggcgatgaaaatccttggcgcgaatcatggcagtatgattggcaaaactattcattttcgtccgctgacttttgcgcaaaactttattcgcggtcacgtacagcacgtcatttcttttgatgataagaaagagcttattatcggtcagctgcacgctattcaggatcaatggctgttcttaatggccttccatcagtcgcattcgtcggccgatctggcgccgccgcaggatggcccgcagattgaacagatggttggcgaatgtcggccaatgcgtcagctgaaaaaactgattacccgcgtggcgccaagcccgtcgagcgtgatgattgtcggcgaaagtggaaccggcaaagaggtggtcgctcgcgcggtgcataagcttagcgaccgtcaggcgaagcctttcatcgcgatcaactgcgcggccattcccgaacagctactggagagcgaactctttggttacgtcaaaggcgcatttaccggggcctcggccaacggcaagaccggtctgattcaggcggctaatcacggcacgctgtttcttgatgaaatcggcgatatgccattaaccctacaggctaagctgctgcgggcgattgaatcgcgcgaaattcagccggtgggcgccagccatccggtgccggtcgatatccgcatcatttcggccactaaccagaaccttgagcagttcattgccgaagggaaattccgcgaagatctgttctatcggcttaatgtcatcccactgcgcctgccgcctttgcgcgagcgtcaggatgatatcgaactgctgattcactatttcctgcatctgcacacccgtcggctggagctggtctatcccggcgtgtccccggaagtcatcgccttactgaagaactaccgctggccgggcaatattcgcgagctgagtaacttgatggagtatctggttaacgtggttccctccggcgaggtgattgatctgtcgctgctgccgccaaatcttatcagcagcggcaaagtcaacgagcgcgaaagcagccgggcggcgccagccagcgttgcgaaagaagaagaggggggtacggcgctggaggagatggaaaaacagatgatccgcgatgcgctgacgcgctatagcaataaaaagcaggccgccgatgagctcgggatcggcattgcgacgctatatcgcaaaattaaaaagtatgaactggtcggggtctga

SEQ ID NO: 90836 - DNA, 1650 bp, Enterobacter aerogenes
atggtgcagataaatgagaatctcgcgactccgcccgtttcatcgttgagtcgtttttttgctaagccccgcattattgctaaacctggatttaaccgctggttggtccctcccgcggcgctggcggtgcatttgtgcattggcatggcctacggcttttccgtctactggctgccaatgtcgcagcttatcggcggcagcgcgccgctgcagtgtccggtcgatatgtcattctggcagcaactggtgacccgccagtgcgactggaaaatttccctgctcggctggacctatacgctgttcttcgtttttctcggctgctccgcggcgctttgggggagctggctggagaaggttggcccgcgtctggtgagttttgtcgccaccctctgctggtgtggcggcctgatgctggcgagcgcggcaatctattttcatcagctgtggctactgtggttgggcgccggtgtgattggcggcattggcctggggcttggctatatctcgccggtctcaacgctgttgcgctggttccccgataagcgagggatggccgcgggaatggcgatcatgggcttcggcggcggggcgctggtgggagcgccgctggccaattggctgattaattttttcgccgatggtcagggaagtggggtatggcagagcattctggcgctggcggtgatatatgcgctgttcatgctttgcggcacttttggttaccgtctgccgcctatgggctggcatccggtcggcgcgaaggcgcagcaagccatcagcaagcagccaaccgttcaggttcacgtcagcgtcgcgtggcgcaccccgcaattctggctgctgtggctggtgctgtggctcaacgttaccgccgggattggcattctcggcatggcctcgccgatgctgcaggagatttttgccggcaagctactatccctggatctgggctggcaggaacttaatacagaacagctgaagcgcatcgcgacgatggcggcgggatttaccgggctgctcagcctgtttaatattctggggcgctttttctgggcttctgtttccgatatgtgcggcaggaaagccaccttcgcgctgatcttctttctgggaaccctactttacggcacgttgccgttgattaaccacggcggctacgtggcgttttttgtttgtgcgctctgtgtgattatttctatgtacggcggcggtttcgcgaccatcccggcgtatcttgccgacgtatttggctcacaaatggttggcgcgattcatggccgtctgctgactgcctggtcggcggccgggatcagcggcccggtgctggtcaactatttgcgcgagtaccagctggcgcagggggtggaacccgcgagaatttatgacatcacgctgctggcgttgaccgggttgcttatcatcggctttatttgtaatcagctggttcggccgattccgcagaaatatgccatgaccgcggagcaacagcagcaggcgaggggcctgtatactatcaataaagacgcgcagctgagctgggaaccgacgcccgcgccgctgctgctgacgctaagctggctggccgtcggtatacccttgctgtggggaatgggcaccaccttgcaacaagcggtgaagttctttatgtag

SEQ ID NO: 90837 - DNA, 636 bp, Enterobacter aerogenes
atgcaacatatcattgagggcttcctcaacttccagaaagagattttcccgcaacgcaaagagctcttccgcagcctggcgtcgagccagaatccaaaagcgttgtttatctcttgttctgatagccgcctggtcccggagctggttacccagcaggagccagggcagctgttcgttattcgtaatgccggtaatattgtgccctctttcgggccggagccgggcggcgtgtcagccaccattgaatatgcggttgtcgccctcggtgtgacggatattgtcatctgcggccactccaactgcggcgcgatgaaagccatcgccacctgccagtgtctggaaccaatgcctgccgtttcccactggttgcgttattcggacgcggcgaaagcggtggttgagaagaaaacctgggccagcgagaccgataaagtgaacggtatggtgcaggaaaacgttattgcccagttgaacaacattaaaacgcatccgtcggttgcggttggcctgcgcgacaaaaccctgcgtctgcacggctggttctatgatattgaaagcggcgatattcgcgcgctggataaagacaccaaaaccttcgtttcactgtcggaaaatccggaagtctacttcgaataa

SEQ ID NO: 90838 - DNA, 633 bp, Enterobacter aerogenes
atgcaaaacccattgaacgcgcgccaacaggcgctgatcccggttgccgccctggccgccgaaggcaatatcgcggcgttggccccggcgctggataccgcgctggataccggcctgacgataaatgaattaaaagagacgctggtgcagctgtacgcctactgcggctttccgcgtagcctgaatgcgctctcctgcctgatgaaggtgataaccgagcgtcaggcgcgaggcgttattgataacgagggggcgacagcgaccccgttaccggagaattgggatagcctgcaggccggtagccgtaatcagacacaactggtcgggcaaacggtcagtggaccgctatttgaatttgcgccagctatcgactgctatctgaaggcgcatctgtttggcgatattttccagcgtgacgtcctggattggccgacgcgcgagctggcgacgatttcaatgctggccgcattatcgggcgtggaaagccagctgaagagccattacgcgattagcctgcacaacggcctgacggcgcagcaactgcgtggatttattgacgtgctagcgacaaaagtcagcgccgaaatagcggcaaaggcctcggcggtgctggagcaagtggcaggtagttga

SEQ ID NO: 90839 - DNA, 210 bp, Enterobacter aerogenes
atgaaatccatcaaaacttttgctgcagttaccgtgctgtccctgatgtcattcggtgctttcgcccagagcgtgacggcaaccgcttcaaccctcgaccgtgcggaagcgaaaattgccgcccaggctgcggagcaaggcgcgtcttataaaattaccagcgcccagttcaataaccgcgtctatatgactgccgaactgagcaaataa

SEQ ID NO: 90840 - DNA, 351 bp, Enterobacter aerogenes
atgtcactatttttaaccagttttatctttgagaagaaagagtacgacgatgacttttatcaactggacggcgagatcgagcgctatacccagtcgctggagggatttatcggtatggagagctatcatgatgccgccagcggccgaatcatcaacaactactactggcgcgaccgacagtctatggaaatgatgatgaaccatctgcaacaccagcaggccaaagctcaggggcaacgctggatcgccgggtatcaaaccatcgttgccgagattgagggcagccacaatatgaacctgccccatccacttgcggagtatccactacgctaccaatcaaaacatcagtga

SEQ ID NO: 90841 - DNA, 687 bp, Enterobacter aerogenes
atgtctcacccattaccgtcaattagcccacagttagccgggatcgctcctgggtttcgggcactgagtattaccgtcaacgctgcgccgctaagtgatgcttctatcggtgaagccgcgctggcgtcagcctgtcaggcagtattagccggagagcccgcatgggcggaggaccatctcgcggcatggtctacggtattcaaagcgtttggcgctaaaccgaaacgtacgccctgttccgcagaggcgttgcgtaaacgcgtacttcgcgatggcgccatgccggcaattgacccggtcgttgacctctacaatgccgtcagtctgcggtatgccattcccgtcggcggcgagaacatcgccgcctattgcggcgcgccgcgtctggtcatcgccgacggctctgagccctttgatacgatgaaggaaggcttagccgccgttgaatcaccggaaccgggagaagtcatttggcgtgacgatcgcggtgtgacctgccgccgctggaactggcgacagggagttcgtacccgcctgagcgctcgcgatcgacagatgtggtttattctggaaagcctgccagagatgccgctcgaagcgctgcatgaggccggccgcatgcttaccggggggctggagcagatgatgcccggcttgagccaccagtccacgctaatcagcctataa

SEQ ID NO: 90842 - DNA, 603 bp, Enterobacter aerogenes
atgaatgataaagtcaatataacgaccgataacagcaacgatctaagccgcattaatgaggcggtatcgcggcgtattaagcagtttcgacgcgaaaagaagatctctctcgacgagctttcccgtcgcgccggcgtcagtaaagggatgctggtggatatcgaagggtgtagggcgaatcccagtatcgcgctgttgtgcaaaatcgctgcggcgatgggggtgtcggtggcggagtttgtcaacgttgccagtgagccgatggttcatcttatcgaccgtgatgcgattccggtattatggcgcggcgagcagggcggcagcgccaggctgctggccggcaccagcggaccggatatgcttgaactctggcagtggcggatgttgcctggcgaatcgttccgttcgccggggcatccggccgatacctgggaactgctatacgtgaccgagggagaactcaccctgacggtgaataatgacccatatcaggtggctgaagggggttctgcggtagcacgtaccgatgtgccgcatgaatattgtaatttcagtcagttgcccgtcgtctttaccatgaccgtgtatgagaaagggcgctaa

SEQ ID NO: 90843 - DNA, 318 bp, Enterobacter aerogenes
atgagtgaagtcaaaattgttgccacgctgaccccccatcctgaatatatcgataccatcagagaggcggcattagccatggtgccgccgacgcacagagaagcagggtgcctgcaatatgacctgcacgaaagccgggagatccctgatgtcaggcagctttcccggcaaggaaagatctcatttgtgtttattgagcgttggcgctcggaagacgatctaaaacagcacgttgcgatgccgtatcatgacgattttctggcgattctggaggggaaactggagagtattcaggtacagcgactgatgtcgttatag

SEQ ID NO: 90844 - DNA, 570 bp, Enterobacter aerogenes
atgaaagcaattggcattttttgtggttcttctaccggggaaaacccgatttatcaggtttacgcgcaacaggttggcaaggcgctggcgcaagccggggtggagcttgtgtatggcggcggtaaagtaggactcatgggcgccgtggcagatgctgcattagaacacggcgggcgggtcattggcgtgatgccgcgcgggctggtggagcgtgagattgcgcatagcggattaagcgagctgcatgtcgttgagaatatgcatgagcgcaaaaacaagatgtcgctgctggcggatggcttcattgccatgccgggtggagccggaacgctggaagagatttttgaacagtggacctgggcgcagctcggtattcatgaaaagccctgtgctttcctgaacgtgaacggctattacaacccgctgcaggcgatggcggaaaaaatggccgccgaagggtttatgcatcgccgctatgctgagatgctgacttttagcgatgatgtacaggagattttaaccgcattccatcgctatacgccgccgcagcgcaaatggcttgcgaagtag

SEQ ID NO: 90845 - DNA, 1374 bp, Enterobacter aerogenes
gtgcagaagtactttatagaagcgcgtcagttattagcattggctatcccggtcattctggcgcaggtcgcccagacggcgatgggctttgtcgatacggtgatggccggcggctacagcgcaaccgatatggccgccgtggctatcggcacctcgatctggctacctgccatcctgtttggccacggtctgctgctggcgctaacgccggttatcgcccaacttaatggctccggtcgccgcgatcgtatcgcccagcaggtacgccagggcttttggctggcgggctttgtctccgtactggtgatggtggtgctgtggaacgcaggctatatcatcagctcgatgcacaacatcgacccacagcttgccgacaaagcggtggggtatctgcgtgcgctgctatggggcgcgccaggctatctgttcttccaggtcgcgcgtaaccagtgcgaagggctggcaaaaactaagcccggtatggtgatgggttttatcggcctgctggtcaacattccagtgaactacatttttatctatggtcatttcggtatgccggaacttggcggcatcggctgcggggtcgcgaccgcttcggtctactgggtcatgtttgccagcatgctgacctgggtgcgccgcgcgcgctcaatgcgcgatatccgctgcgctgagcgtttcagtaaacctgatttttcggtattaaaacggctggtacagctggggttgccaatcgcgctggcgctgttttttgaagtcacgctgttcgcggttgtggcgctgctggtttcgccattggggattatcgatgtcgcagggcatcaaatcgcccttaacttcagttcgctgatgttcgttcttccgctctcgctggcggcggcggtaacaatacgcgttggttttcgtctcggccagggctcgacgctggatgcacagacctccgcgcgtaccggggtcggcgtgggcgtctgcatggcaatgatcaccgcgattttcacgatcctgatgcgtaagcagattgccctgctgtataacgataaccctgaggtggtgctactggcctcacagctgatgctgctggcggcgatttatcagatttccgactccattcaggtgatcggcagcggtattctgcgcggttataaagatacgcggtcgatcttctttattaccttcaccgcttactgggtacttggcctgccaagcggttatctgctggcgctgacggatattgtggtgccgcggatggggcctgcgggcttctggtgcggctttatcatcggcctgacctccgctgccatcatgatgatgctgcgcatgcgcttcctgcaacgtcagccatcaagcgtgatcctgcagcgcgccgcgcgttaa

SEQ ID NO: 90846 - DNA, 636 bp, Enterobacter aerogenes
atgtttactggtattgtacaggggactgcgaaagtggtgtccatcgatgagaaaccgaatttccgcacccacgtggtggagctgccggcgcatatgctcgatggcctggagaccggtgcttcggtggcgcacaatggctgttgcctgaccgttaccgaaattgacggcccgcgaatcagctttgacttgatgaaagagacgctgcgtatcactaatcttggcgctatccatgaaggcgatatggtcaacgtcgagcgagcagcgaaattcagtgatgaaatcggcggccatttgatgtccggccatattatgaccaccgccgaagtcgttaaaatcctcacctcggaaaacaatcgccagatttggtttaaggtgcaggacccggcgctgatgaaatatatcctgtataaagggttcattggcgtggacggtattagcctgacggttggtgaagtgaccccgactcgtttctgcgtgcatcttattccggaaacgctgcagcgcaccacgcttggggtgaaaaagctcggcgataaagtaaatatcgaaatcgatccgcagactcaggcggtggtggataccgtggaacgcgtgctggcggcaaaagaagcggcgcaaaaaagcgcggaagaataa

SEQ ID NO: 90847 - DNA, 1149 bp, Enterobacter aerogenes
atgagttcatcgtgtatagaagaagtaagtgtaccaaacgatgattggtaccggattgcagctgaattattgggccgtgccggaattgagatcaatggttccgcaccctccgatatccgggtaaaaaacccgctcttttttaaacgcgtgttacaagaagggtctctcggattaggcgaaagctatatggacggctggtgggaatgcgaacgcctggatatattctttcacaaggtattgcgcgccgggctggataagcaactcccccaccacttcaaagatacgctacgtatcgctggcgctcgcctgtttaatctgcaaagcaaaaaacgcgcctggattgttggtaaagaacactacgatttaggcaacgaccttttccaccgcatgctcgatccctatatgcaatattcctgcggatactggaaagaggccgaaaatctggaacaggcgcagcaggataaattagatcttatctgtcgcaaactgcagcttgagccgggaatgaaagtgctggatatcggttgcggttggggcggactggcctattacatggccaaaaactataacgtcagtgtgacgggcgtgaccatttcggccgaacaacaaaaaatggcacaggagcgctgtgcaggattagatgtcaatattctgctgcaggactatcgcgatcttcacgaaagttttgaccgtatcgtctccgtcgggatgttcgagcacgttgggcctaaaaattacgccacttattttgaagttgtcgatcgtaatttaaaaccaaacggtcgttttctgctacacaccattggttcaaagattaccgatcacaacgtcgacccgtggattaataaatatatattccctaacggttgcctgccgtcggtacgccatatcgccgatgccagcgagaagcattttgtgatggaagattggcataactttggtgccgattatgacaccaccttgatggcctggtacgagcgttttcttgccagttggccggatattgccgaaaactattcagaccgtttcaaacgcatgtttacctattatctgaatgcctgcgcgggtgctttccgcgcccgcgacattcagctctggcaggtcgtcttctcgcgcggtgttgaacatggcctgcgcgtagcccgctag

SEQ ID NO: 90848 - DNA, 1158 bp, Enterobacter aerogenes
gtgtggctgggcggcctgagcgtgcttggctttctggccaccgacatgtatctaccggcttttgccgccattcagcaagacctcaacacctctgccgcatcggttagcgccagcctgagcttattcctcgcgggcttcgcgctcggccagttgttctgggggccgctgtcggaccgctatggccggaaaccgattttgctcgccgggctggctatcttcgctcttggctgccttgggatgctgtgggtacgcgacgcgacgctgatgctggtactgcgttttgtccaggcgatcggcgtatgcgccgccgcggtgacctggcaggcgatggtgaccgactactatccggcccagcgcaccaaccgcattttcgcaacgatcatgccgctggtcgggctctctccggcgctggcgccgttactcggcagctggctgttagttcatctggaatggcaggctatcttcgccaccctgttcgctatcaccttactgttgatgctgccggcttttcgtctgaaggcggtcggcaaacctgctggcgaaacccagcagaaacttacctttatggccctgctgcgttcacgtgaatatagcggtaacgtactcatttatgcggcgtgttccgccagcttcttcgcctggctcaccggttcgccgtttatcctccatgaaatgggctatggcccgacggtgattggtcttagctacgtgccgcaaactatcgccttcctgatcggtggttacggctgccgcgcggcgctgcaaaaatggcagggtcatcagatgctgccctggctgctggttgtttttgcgctgagcgtggcggcgacctggcttgccgggatacaggatcatccgtcactggttgcgctaatggttccgttttgcatcatggcgattgtgaatggagggatttaccctatcgtcgtcgcccaggcgctgaaaccttttccacaggcaaccgggcgcgccgccgccctgcagaatacgctgcagcttggcctctgtttcctggcaagcctgctggtctcaagccttatcgccactccgcttctgaccaccaccagcgtgatgctgatttccatcgttctggcaggcatcggtttctggatgcagcaacgacgcgtgcagttagtgaacgaatcgtctcacgcttga

SEQ ID NO: 90849 - DNA, 912 bp, Enterobacter aerogenes
atgtggtctgaatattccttagaagtggttgatgctgtagcgcgtaacgggagtttcagcgccgcggcgcaggagctacaccgcgtaccttcggcggtgagctatacggtgcgacagctggaggagtggctggcggttccgctttttgaacgtcgccatcgtgatgttgaattgacccccgccgggcactggtttttgcaggaagggcgttctgttatcaaaaaaatgcagatcacccgccagcagtgccagcaaattgctaacggctggcgcggccagctgtccattgcggtggacgatatcgttaaaccggcgcggatgcgccagatgatcgttgatttttatcgccattttagcgatgtcgaactgatcgtttttcaggaagttttcaacggcgtctgggatgcgttagccgatgggcgggtagaactcgctatcggcgcgacgcgttcgataccggtgggagggcgttacgcttttcgcgatatggggatgctgaactggcactgtgtcgtcgccagcagtcatccgctggcgcagatggaagggccgctcagtgatgacgtgttgcgcaactggccgtccctggtgcgcgaagatacctcgcgctcgctgccgaagcgcacaacctggctgcttgataaccagaagcgggtggtggtgccggattgggaatcttcagccacctgtctatcggcaggattgtgcgtcgggatggtgccaggccatttcgcccgcccgcatattgatagcggggagtggacggccttgacgctggaaaacccattcccggatgccgcctgctgcctgacctggcaacaaagcgatgcttcacccgctttaagctggctgcttgactatcttggcgacagcgaaacgttgaatcgggagtggttgcgggcgccggaataa

SEQ ID NO: 90850 - DNA, 1026 bp, Enterobacter aerogenes
atggcaactattaaagatgtagcgaaacgcgcaaacgtttccactacaactgtatcacatgtgattaacaaaacccgtttcgtggcggaagagacgcgcaatgcggtgtgggcggcaattaaagaactccactattcgccaagcgccgtggctcgcagcctgaaagtcaatcacactaaatcgatcggtctgctggccaccagcagcgaagcggcctatttcgctgaaattatcgaatccgtagaaaagagctgcttccagaaaggctataccctgattcttggcaacgcctggaacgatccggaaaaacagcgcgcctacttgtcgatgatggcgcaaaagcgcgttgacggcctgctggtgatgtgttccgaatacccggagtccgtgctcagcatgctcgaagagtatcgtcatattccgatggtggtgatggactggggcgaagccaaagcggactttaccgactcggttattgataatgcctttgaaggcggctacattgccggccgttacctgattgaacgcggccatcgtgaaattggcgttattccgggcccgcttgagcgtaacaccggtgccgggcgccttgccggcttcatgcaggcgatgaaagaagcgcatatcaatgtgccggaaaactggattgttcagggcgactttgaaccggaatccggctaccgcgccatgcagcagatccttaatcagcagcatcgcccaaccgccgtgttctgcggcggcgacatcatggcgatgggcgctatctgcgccgccgacgaaatgggcctgcgcgtgccgcaggacatttcgctgatcgggtatgataatgtgcgcaacgcccgctacttcagcccggcgctgaccacgatacatcaacccaaggactcgctcggagaagcggcattcaatatgctgctcgatcgcattgttaataaacgcgaagaatcgcagtccattgaggtgcatccgcgtcttatcgagcgccgctcggttgccgacggcccgttcgtcgattatcgtcgttaa

SEQ ID NO: 90851 - DNA, 1167 bp, Enterobacter aerogenes
atgaaaatcaactttcccttactcgcattggcgataggtgcctttggtatcggtaccaccgagttttccccgatgggattactgccggttatcgccaaaggcgtcgatgtttctattccggccgcggggatgctgattagcgcctatgccattggcgtgatggtcggcgcgccgttaatgacgttgctgctatcgcatcgcgctcgccgcaatgcattgatcttcctgatggggatcttcaccctcggcaacgtgctctcttctattgcgccggattacacgacgctactgctgtcgcgtattatcaccagcctcaatcatggcgcgttcttcggcctcggctcagtcgttgccgcaagcgtggtgccaaaacacaaacaggccagtgcggtcgcgaccatgtttatggggctgaccattgccaatatcggcggcgtaccggctgccacctggcttggcgaaaccatcggttggcgaatgtctttcctcgccacggcgggtctggggttaattgcgatggtcagtctgtggttctccctgccgaagggtagcgccggcgagcgtccgaacgtgaagcgcgagctgtcggtgttgatgcgtcctcaggtactctctgcgctgttgactaccgtgctgggcgccggggcgatgttcacgctgtatacctatatttctccggtactgcataccatcacccacgcttcaccgctgtttgttaccgccatgctggtgttgatcggcgtcggtttctcgcttggcaactatctgggtggtaaatttgccgaccgttcagtctccggaacgctgaaagggttcctgttgttactgattgccatcatgttggccattccgttgctggcgcaatcgcaactgggtgctgccgtcagcatggtcgtttggggcgcggcaaccttcgcggtggttccaccgctgcagatgcgggtaatgcgcgtggcgcacgaagcgccgggcctgtcatcgtcggttaacattggcgctttcaatctcggtaatgcgttgggtgcggcggcgggcggcgcggtgatatccggcggtctcggttatgcttttgtgccggtgatgggggcgattattgccgggctggcattagcggtggtgctgtttggcgggcgttcacaaccagaagaagcgttagcgaataactaa

SEQ ID NO: 90852 - DNA, 582 bp, Enterobacter aerogenes
atgtcgttcgaattacctgcattaccatatgctaaagacgccctggcgccgcacatttccgcagaaaccctggaataccattacggtaaacatcaccaggcctacgtgaccaacctcaacaacctgatcaaaggcaccgcttttgaaggcaaatctctggaagagatcgttcgctcttctgaaggcggcgttttcaataacgcagcgcaggtctggaaccacactttctactggaactgcctggcgccgaacgccggcggtgagccggaaggcgaactggccgcagcgattaacaaatctttcggtagcttcgctgattttaaagcgaaattcaccgatgccgcggcgaaaaacttcggcgcaggctggacctggcttgttaaaaacgctgacggcagcctggctatcgtctccaccagcaacgccggcactccgctgactaccgatgcgacgccgctgttgaccgttgatgtctgggaacacgcctactacatcgactaccgcaatgcccgtcctaattatctggaacacttctgggcgctggtaaactggaaatttgttgccgccaacctggcagcataa

SEQ ID NO: 90853 - DNA, 456 bp, Enterobacter aerogenes
atggcgcataaacatgaaatggtcagcggacatattattccgatcgtcatagatatcatcgagtggatcgaagacaacatttttaccgcgctacccgtcaccgcaatctcaaggaaatcgggttattcgcactggtactttcagcgccagttcgcgctgattaccggttatacgctgggaacatatgttagccgacgcaaaatgaccattgccgccggtattctcaaacagacgcaggattcggcgttgagtatctcattgctgctcgggtttgaaggccaggcgacattttgccgtactttccgtcgtcattttggtatgtcgccgaccagctaccgccgtcaccccgcgcaactggaggaacgaatgcagtatccgctgaatctggaagaggaggggaatgtacagaagagcggtttgccggcgcagcggcaaaccggggtctgcgcctcttaa

SEQ ID NO: 90854 - DNA, 876 bp, Enterobacter aerogenes
gtggcgcggctcaataaaatcgcgatatcgctctgtgcattactgtttacatctatctcgcttacgccattggcgcatgcttcagggcatacgcacgcttcggctacgccgaaggcgcacccggcgaaaggctccaccgccgagcgtaagaagaaagcaacgcaaaataaatccaaatccacggctaaaactacccgtaaaaaaacctcaagcgcgaagtcccctactcgtattaccgcagcaagccaaaccgcgcttaatcgtcaagtcgccggcgccactaaaaaatgcgtgttgcgtaaaggctataaaaagcagtgtgcgaaaacggtaaaatccagcgaagcatcgacgctggcgctgaacagcgtgaaaagcaaatgcgtggtgcgtaaaggctacaaaaaacgttgtaaacctgtcgctgatgaaccgaatctgacgattgccgatgcgcacaaagcccgagtgcaaaaagcgcaaagcactgccatgaataaactcatggatcagctaggcaaaccttatcgctggggaggctcctcaccgcgtaccggtttcgactgcagcgggctggtttattacgcctataaagatctggtaaaaattcatattccgcgcaccgctaacgaaatgtaccacctgcgcgatgcccgcccggttgaccgcgatgaactgcaaagcggcgatctggtcttcttccgcacccgcggacgcggcaccgccgaccacgtaggcgtttacgttggaaacggtaagtttatccagtcgccgcgtaccggccgtgatattcagataacctccctaagcgaagattattgggttcgtcactacgtcggcgcgcgccgcgtaatgacgccaaaaaccattcgttaa

SEQ ID NO: 90855 - DNA, 348 bp, Enterobacter aerogenes
atgagcaccactctagaaacgatccaacgtcaaatcgctgaaaacccgatcctgctgtacatgaaaggctctccgaagctgccgagctgcggtttctccgctcaggcagtgcaggcgctttccgcttgcggcgaacgttttgcctacgttgatatcctgcagaacccggatatccgcgctgaactgccgaaatacgctaactggccgaccttcccgcagctgtgggttgacggtgaactggttggcggttgcgacatcatcatcgaaatgtatcagcgcggcgaactgcagcagctgatcaaagaaacggctgcaaagcacaacgctgacgagccgaaagcagagtaa

SEQ ID NO: 90856 - DNA, 645 bp, Enterobacter aerogenes
atgtccgagaacgctcaacttaatggtctgtgcggccgttttcgcggtttttatcctgtggtaattgatgttgaaacagccgggtttaatgccaaaaccgacgccctgctggagatcgccgctattacgttgaagatggatgagcagggctggctgatgccggacgaaacgctgcattttcacgtggctcccttcgaaggggccaacctgcagccggaagcgctggctttcaatggaattaacccaaacgatccggagcgcggcgcgataagtgaatacgatgcgctgcacgccatttttaaaatggttcgcaaaggaatgaaagagagcgattgtagccgcgcgattatggtggcgcataacgcgactttcgatcacagctttacgatggccgccgccgagcgcgccgggttgaaacgcaacccgttccatcctttcgtgaccttcgataccgccgcgttgagcgggttggccttagggcaaacggtattgtctaaagcctgcatcgccgcgggcatggagtttgatggcagcaaagcccattctgcgttgtacgataccgagcaaaccgcccagctattctgcgaaatcgtcaaccgctggaagcgccttggcggctggccgttacctgtacctgaagcgtaa

SEQ ID NO: 90857 - DNA, 408 bp, Enterobacter aerogenes
atgcgcttacttcacaccatgctgcgcgttggcgacctgcaacgttctattgagttttacaccaacgtgctgggcatgaagctgctgcgtaccagcgaaaaccctgaatataaatactcgctggctttcgtcggctacggcgaagagagcgataccgcggttatcgaactgacctataactggggcgtggatagctacgaactcggtaccgcctatggccatattgcgctgagcgtcgacaacgcggcgcaagcgtgcgagcgtattcgccagaatggcggcaatgtcactcgcgaagctggcccggttaaaggcggcagcacggttatcgcctttgttgaagatccggacggctacaaaattgagctgatcgaagagaaagatgccggaaaaggtctcggcaactaa

SEQ ID NO: 90858 - DNA, 1098 bp, Enterobacter aerogenes
atgtcagaatctaaattgttcagcccgttaaaagtcggtgcggtgaccgtacctaaccgcgtatttatggctccgctgacccgtctgcgcagcatcgaaccaggtgacatccctactccgctgatggctgagtactatcgtcagcgcgccagctccggcctgattatcaccgaagcgacgcaaatttccgcccaggcgaaaggctatgccggcgcgccgggcctgcatagcgcagagcaaatggccgcatggcaaaaaatcactgctggcgttcatgctgaaaacggtcatatcgccgtgcaactgtggcacaccgggcgtatttcccataacagcctgcagccgggaggcgcggcgccggttgcgccatcggcgctgagcgcaggtacgcgtacttcgctgcgtgatgaaaacggtcatgccattcgcgtcgatacgtcgatgccgcgcgcgctggaaacagacgaaatcccagggatcgtggatgacttccgtcaggcggtaggcaatgcccgcgatgtcggcttcgacctggtagagctgcactccgcgcatggctatctgctgcaccagttcctgtcgccttcttctaaccagcgtaccgaccagtacggcggcagcgttgagaatcgcgcccgcctggtgctggaagtggtcgatgccgtcagtgaagagtggagcgccgatcgtatcggcattcgcgtgtcgccaatcggtagtttccagaacgtcgataacggcccgaacgaagaagccgatgcgctctatcttattgagcagctggcaaaacgcggtatcgcttatctgcacatgtccgaaccagactgggccggcggccagccgtacagcgacgaattccgtcagaaagttcgcgatcgcttcccgggcgcgattatcggcgctggcgcctatacggtggagaaagccaacgaccttatcaataaaggactgatcgatgccgtggcctttggccgcgattacatcgctaacccggatctggtggcgcgtctgcagaagaaagcggcgcttaacccgcagcgcccggaaagcttctacggcggcggcgcggaaggttataccgattatccaaccctgtaa

SEQ ID NO: 90859 - DNA, 537 bp, Enterobacter aerogenes
atgcatcgtggttttaccggcatgggcttaagtgaacttctgaaaacggcggaagtgccgaaaggctctttctatcactactttcgctcaaaagaagccttcggcgtcgcgctgcttgaacatcactacaccggctatctgcagcgcctggttgatcactttgaccatggcgaaggcaactaccgcgaccgactgctggcctactatcagcacacgctgaatcagttttgccaacagggcattatcagcggttgcttaaccgtgaagctgtcggcggaggtgtgcgacctgtcggaagatatgcgtaccgccatggataaaggcgccagccagattatcgccctattgggcgaagcgctggaaaagggccgtctggagggtagcctgttgtttgagggggaagctatcaccctttcacaggtgctgtactcgttgtggttgggagccaatttacaggccaaaattacgcgtagcgcaacgccgctggaaagcgcccttgctcacgccaaacaaatcattgcagcgcctgcggtttaa

SEQ ID NO: 90860 - DNA, 240 bp, Enterobacter aerogenes
gtggcagagcagctggagtttttcccggtacaaagtccgtgccggggaatatgtcagtccgacgaacgcgggtattgccgcggctgttttcgtagccgggatgagcgctttaactggcaaaagctgaccgacgcgcaaaagcaggaggttctacgtctgtgccgccagcgtttactgcgtaaaattcgcgcgactaagcaggagccggcggaagaaccgcagcaaccctcactgttttga

SEQ ID NO: 90861 - DNA, 897 bp, Enterobacter aerogenes
atggttcagcgtattgctatggctccgcaagggccggaattttcacgttttgtaatgggctactggcgtctcatggactggaagatgtccaccgacgctttggttggctttattgagcagcacctggatctgggggttacgaccgtcgaccacgccgatatctacggcgattatcagtgtgaagccgcgtttggcgaagcgcttaaacgcgccccgcacctgcgtaagcgtatggaaatcgtcagcaaatgcggtattgcgaccaaggcgcgcgcggaaaatactattggccactatattactgatcgcgaccatattattctcagcgccgagcaatccctgcgtaatctggcgaccgatcatctcgatttactgctgattcaccgcccggatccgctgatggatgccgatgaggtcgctgaggctttcctcgcgttacatcatagtgggaaagtgcgccactttggggtatctaactttacgccggcgcagtttacacttttacaatcgcgcctgcctttcaccctggccactaaccaggtcgagctctcgccggtacatcagccgctgctgctggacggcaccctcgatcaactccagcagttgcgtatccgtccgatggcctggtcgtgcctcggcggcggacgcctgttcaacgacgaaagcttccagccgctgcgcgacgagctggcgcaaatcgcccaggagcttaacgcagaaagcattgaacaggtggtttacgcctgggtattgcgcttgccgtcgaaaccgctgccgattattggctcggggaaaatcgagcgcgtgcgctcagctattgtggcggaaaaactgcatatgacgcgccagcagtggttccgcattcgtaaagcggcgctgggttacgacgtcccgtaa

SEQ ID NO: 90862 - DNA, 522 bp, Enterobacter aerogenes
atgcaacgatgtttactcgctattttcactctcgcattttgcgctggcgctcaggccgccagtgaagatgtctcccttaatcttgtcaccagccagagcgttggccaggccgtcggcagcgttaaaatcactgaaaccgacaggggtcttgagtttacgcctgatttacgcgcgcttccgccgggcaaacacggctttcatatccacgcagaagggagctgccaaccggcgataaaagacggtaaggcggtcgccgctggcgcggcgggcggtcatttcgacccacaacataccggcaaacatgaagggccattaggggcagggcatcttggtgatcttcctttgctggtggtgaacgacgatggcgtggctaaccaaccggttattgccccgcgcctgaaaacgctcgcggaagtgaagggcaaagcgctgatggtgcatgtcggaggcgataatatggccgatagcccgcagccgctgggcggcggcggcgagcgttttgcctgcggggtgattaagtag

SEQ ID NO: 90863 - DNA, 2025 bp, Enterobacter aerogenes
atgaagctgcaggctctgcgctggcaatcactgccgtggtttaaagccagccgcccgcaatggcgctacgcattgcgcaatgggatagccatgtgtctggcgcttagcatcgcctatgcgctggatcttgatgagccctactgggcaatgacctcagccgcagtcgtgagcttcccgaccgtcggcggcgttatcagtaagagttttggccgtatcgccggcagcctgctcggcgcctgcgccgccctgctacttgcgggccatacccttaacgacccgtggctattcttattcagtatctcagcctggattgcgctctgtacctgggcctgcgcgatgtttaccaataacgtcgcctacgcttttcaactggcgggctatacctgcgcaatcatcgccttcccggttataaatgttaccgacgcgaatgaactgtggactatcgctcagtcgcgggtctgtgaagtgattgtggggatattgtccggcggattcatgatgatgatcctgcccagtacctcagatggcgtcacgctgctgacggcgttgaagaatatgcactcacggttattagagcatgccagcctgctgtgggtgccggaaaccaccgatgcgattcgtagcgctcatgaaagcgtcatcggtcagatcctgactatgaatctactgcgtatccaggccttctggagccattatcgtttcagacggcagaaccccttgctgaattatctgctgcatcagcagttgcgaatgaccagcgtcatctccagcctacggcgaatgttattgaactggccggatgcgcctggtaatacgcgggcggtgctggaaacgttacttagcgagctcgccaatccgcacgcaaatgtttatagcgtggcgcgaattctggtgccgctagcccccggccctaacgccgactatcgccatctggcgttctggaaacggctgcgttatttctgtcgtatctatctcgaaagcagccgctggatccgccgcatcgagaacgccagcgctatcacggtgttcaatgtcccttcggcgcccgcgctgtcgcgccataccgatcaggcggaagcgttatggaacggcttacggaccttctgcgcgctggtggccgtgggcgcctggggtatcagcacccaatggcaggcctgcgccgccgcgctcaccctcgccgccattagctgcgtactctactcgatatcgccttcgccctttaaatcgctcaccttattgatgcgtacgctggtgctgttgtcgctgttcagctttgtggtgaagtttggcctaatggtgcagataaccgacctgtggcagtttttactgtttctcttcccgctgctcaccaccatgcagttattgaaactccagatgccgaagttcgcagggctgtgggggcagttaatcgtctttatgggatcgtttatttcggtcaccaaccctccggtttacgattttgcctcgttccttaatgataacctcggcaaaatcattggtgtcggtcttgcgtggcttgcctttgcgattatcagccccggctcggatgcgcggaaaagccgccgccatattcgtgcgttacggcgtcactttgtcgatcagttgagccgacgcccgcagcacagcgagcatgaatttgagtcactggtgtaccaccacattagccagttaagcagcagccaggacgcactggcgcgacgttggctgctgcgctggggcgtggtgctgctcaactgctcgcatgtcgtgtggcaactacgtgattgggagacacgctccgatccgctttcacaagtgcgcgacttgtgtattagcctgctacgcgacgtcatgagcgaacgcggcgtccagcaacgcccacttgcctcgacgttgctggaactgcagcggatttgcgacacccttaatcaccatcatcagccggcggctaaagagctggcggcgattatctggcggttatactgctctctatcgcaattagaacaagcgccgattgccggcaccattaccgaacggactacttaa

SEQ ID NO: 90864 - DNA, 897 bp, Enterobacter aerogenes
atgaagaaactaaaatatctctcaaccttaattatcgccgcctgcgcaatcatcgccgcctggctggtctggaactactacactcagtcgccatggacccgcgacggtaaaatccgcgccgaacaggtcggcatcaccccgcaggtctccggcagtattttgcagttgaatgttaaagataaccaattggtcaacgccggcgacgtgctgttccgtattgacgatacgccttatcgcattgcggtattaaacgctcaggcgcagttggcaaaagccaaagcggaactggcaaaagccaaagccgagcaaaccaaggccgccagcgacgttactcgccgccgcagtctgtcgcaaaacttcatctccgctgaagatatggaaaccgtcaataccgcgctgaataccgccaatacgacttatgaggcggctaaagcggtcgttggcgtggcgcaagccgcgctggagcatgcgcagtggcagctgtcgcaaaccgtggttaaagccccggttgatggctggataactaatttgtcaacgcgggtcggggactatgcctccgtcggccatcccgtatttgcccttgtcgacagccactctttctatgtcctgggttattttgaagagaccaaactacgtcacatccgcgaaggtgatagcgcccaggtcgttctttacagcagcaaacaaacgttacagggtcacgtttccagcattggccgcgctatcgtcgaccagagtgtcgaaggcggttcggcgttggtcgctaatattaaacccaatattccgtgggtgcgcctcgcgcaacgtgtaccggtacgtatcgagttcgataaattgcctgcggatgtcacattggtttcaggtaccacctgtaccgtgtcaattggcggacaataa

SEQ ID NO: 90865 - DNA, 237 bp, Enterobacter aerogenes
gtgaaactgagtcttaacactcccggattgtcgctacaggacctggtgttcggcgcttctatctattttcccccgttatttaaagccgtcgtgcttggtttctttatttggctaatagttcatcgtcagttgcgcgactggatgtacgccggcgaaatctggcatcccctgctgatggacctttccctgtttgcgctggccgtttgcctggcgctggttctcctgactctcttgtga

SEQ ID NO: 90866 - DNA, 435 bp, Enterobacter aerogenes
ttggaatcgccacttggttctgatctggcacgtttggtacgcgtttggcgcgcgctgatcgaccatcgcctgaaacctctggagttaacgcagacgcactgggtcacgctgcataacattcatcagctacctcctgagcagtcgcaaatccagttggccaaggcaattggtattgaacagccctctttggtgcgcacgctggatcaactggaggagaaagggcttatttctcgccagacttgtgcaaacgatcgtcgggcgaaacgtatcaagctaacggaaaaggctgaaccgctgatcaaccaaatggaagacgtgatcggcaaaacgcgtgatgaaatccttgcaggtgtatcaaagcaggaagtcgaaacgctgctcaacttaatccgtaaacttgaaaacaatatcctcgatcttcaggctaaagactag

SEQ ID NO: 90867 - DNA, 1359 bp, Enterobacter aerogenes
gtgcctctgaaactaaaccggttatcacaccgcttatttgcttatattattgcctgcagcctggcaattattacgatcgatttattatctaattcagttgttaatcgtatccctacgacttcttcaccacttttccctttactgacaataatattaatgatttttcacattactatttcctgttttatgagcatgaagtattggtgtgataaaaaccggctgtatctgatgcccatcgccttcgcttttgccagctctgccctgttgatgctaggcactctgagcagctatcccggctggctactgtgcaacagcgaatatattgttaaacaaaatgacgcgctgatcttttattcgttccgcaatattctgatggccgtgttatttatcactgccattataatatatcgttttcgccaacatcttaaccaggctgctggcgcacatgctataatactgacggtatgctttctattcagtgccgccattcttattttatcctggctacactccagtaatagtccgttattaagcatcgattttatcgacgatatcaccagcacttttactccgttatggcataactggatgggctggctgctatttttagcctgggtatgtacgttgatattattgattatgctaacccggctacgtaatatcttctggtacagcggcgcatttttctgtgccgcctatatatttacgctaaacgtattactcacagcgacaggtagtcagcatattatcgcctggaatcaggcgcgcctgttcgaaaccttaagtaccttatttatgctgttcgtcctgttaagcgacgtttttcttctctatcgcgactctaacaacaaatacatcaattcatatcagaactctatccgtgacccgttaaccgggctgtacaaccgcagctacttttacgacacgctgaatggactattgccgcatacttcagcagcacaaccgctttccgtcatcgtcagcgatctcgatcactttaagcgtatcaacgacaactacggtcatgtccagggtgacaaggtgattcagtttgccgccagcgtattacaaacctatgtccgtcgtgaggatattgccgcgcgcatcggcggcgaagagtttgccctgttgttggtaaatactgatgctgatgatgcgctggcgatagccgagcgaattcgccagatggtcagcgccgggcaggattcactgccggaacaaatgaccattagtatgggtgtctacacggcgacaagctcgctcattgaggctgaagagtgcgttaagcgcgcggatacggctatgtacgcggcgaaaaacggtggccgcaatcgcgtggtggtctggcagaataaataa

SEQ ID NO: 90868 - DNA, 468 bp, Enterobacter aerogenes
atgattttacgtgttttggctgtctcgatgattggcttaaccctggcgggttgcgtcagcagcagtggcctatccggcgatgtttacacagcctcagaagccaagcaggtgcaaagcgtgacctacggtaccatcgtacatacccgtgcggtccagatccaaagcggcgatgacagcaatgccatcggcgcgattggcggcgcggtactcggtggcttccttggtaataccatcggcggcggtaccggtcgttctcttgcaaccgctgcaggcgcggttgccggtggcgtagccggtcagggcgtacagggcgcgatgaacaaaacgcagggcgttgagctggaaatccgtaaagatgacggtaacaccatcatggtggttcagaaacagggtaacaccccattctccgtcggccagcgcgtagccattgccggcagcggcagtcaagtgacggtttccccgcgttaa

SEQ ID NO: 90869 - DNA, 1125 bp, Enterobacter aerogenes
atgaaatcaggtcgttttattggcgtaatgtctggcaccagccttgatggcgttgatgttgttctggcggcaataaatgaaaacatagtggcgcagcaggcgagcctctcgtaccccatcccggtcaatctgaaagaagatattttagcgatttgccaggggcagcagctgaccttgtcgcaactggggcgactcgatacccgtttgggccggctattttctgacgcagtattagcgctgatgcgccaacagaaccttcaacctgaggatatcgtcgctatcggttgccatggccagacggtgtggcatgagccgaccggcgatgcgccgcacacgatgcaaataggcgataacaatcagatcgcagcgcataccggcgtgaccgtggtgggggatttccgccgccgcgatatggcgcttggcggccagggcgcgccgctagtccctgccttccatcaggctctgttggcgcacccggttgaaaggcgcatggtgcttaacatcggcggcatagccaatctttccttgctggttccggggcagccggtacgcggttacgataccgggccggggaatatgctgatggacgcctggatctggcgccaatgtggtaaaccctacgataaagacgcgcaatgggccagtgaaggcaaagtcttgctaccgctgctgcaggatatgcttagcgatccgtggttcgcgttacccgcgccgaagagcaccggtcgcgagtatttcaattatggttggctggaaaaacatctggcgcgctacgccaatctgcgagggcaggatgttcaggctacgctgacagaactgaccgcagtgaccatcagtgagcaggttttgttaagcggcggctgcgagcgtttgttagtttgcggcggcggggcgcgaagtccgctgttgatggcgcgtctggcggcgctgctgccaggtactgaagtcacgaccaccgatgacgccggcatcagcggcgacgatatggaagcgttggcctttgcgtggctggcatggcgtacgcttgccggcctgccgggtaatcttccttccgttaccggcgccagcgaagcgaccattcttggtgccatctatcccgcgaatcgagcgcagaatcagagttaa

SEQ ID NO: 90870 - DNA, 324 bp, Enterobacter aerogenes
atgaaaaaaattcttattgcggtagtccctttcatgctggcagggtgtagctattacaaccaattcgttgaacggatgcagaccgacacccttgaatatcagtgcgatcaaaaaccgttgaccgtccatctgaacaacgcgcgtcagcaggtaagctttatctatgataatcagcaattaaacctgacccaggggctgtcggcttccggggctcgttatactgatggcgtttatgtcttctggtcgaagggcgacagcgccactgtttataagcgcgaccgcgtcgtactggacaactgccagttgcagaccgcgaaacgttga

SEQ ID NO: 90871 - DNA, 657 bp, Enterobacter aerogenes
atgtctgataacgacgaattgcagcaaatcgcgcatctgcgccgtgaatacacccgtggcggccttcgtcgccacgatcttcccgctgaacccctgacgttatttgaacgttggttgcgtcaggcctgcgacgctaagcttgccgacccgacggcaatggtggtcgcgaccgttgatgaaaacggccagccctatcaacgcatcgtattgttaaagcactatgacgaaaaagggctggtgttttataccaacctgggtagtcgcaaagcacatcaaatcgaaaaaaatccccatatcagcctgctgtttccctggcatatgctggagcggcaggtgatggtaataggtcaggcagagcgtctgtcgacgctggaagtggttaagtatttccacagccggccgcgcgatagccagatcggcgcctgggtctcccaacagtccagccgtatctccgcgcgtgggatcctggaaagtaaattccttgagctgaaacagaaattccagcaaggcgaagtgccgttgccgagtttctggggcggcttccgcgtcagcatcgaacagatggagttctggcagggcggcgaacatcgtctacacgaccgctttttataccagcggcaaaatgatggctggcaaatcgaccgtctggcgccataa

SEQ ID NO: 90872 - DNA, 1275 bp, Enterobacter aerogenes
atggcaagcagtaacttgattaaacaattgcaagagcgggggctggtagcccaggtgacggacgaagaagcgttagcagagcgactggcgcaaggcccgatcgcgctctattgcggcttcgatcctaccgctgacagcttgcacttggggcatcttgttccattgttatgcctgaaacgcttccagcaggcaggccacaagcctgtggcgctggtgggcggcgcgaccggtctgattggcgacccgagcttcaaagccgctgagcgtaaactcaataccgaagataccgtgcagcagtgggtggacaaaatccgtaaacaggttgcgccattcctcgatttcaactgcggcgacaactcggcgattgccgcgaataactacgactggttcggcggcatgaacgtgctgaccttcctgcgtgacatcggtaagcacttctctgtgaaccagatgatcaacaaagaagcggtgaagcagcgtctgaaccgtgacgatcagggtatctctttcaccgagttttcctataacctgctgcagggttatgactttgcctgcctgaataaactgcacggcgtggcgctacaaatcggcggctccgaccagtggggcaacatcacatctggtatcgaccttactcgtcgtttgcaccagaatcaggtcttcggtttgaccgttccgctgatcaccaaggccgatggcaccaagttcggtaaaaccgaaggcggcgcggtatggctggatccgaagaaaaccagcccgtacaaattctaccagttctggatcaacaccgcggatgcggacgtttatcgcttcctgaagttcttcaccttcatggacattgcagagatcaatgcgctggaagaagaagataagaacagcggtaaggcgccgcgtgcgcagtacgtgctggcagagcaggtgacgcgtctggtccacggcgaagaaggcctggaagcagcgaaacgtattactgaaagcctgttcaatggcaatctgagcgacctgagcgaagcggattttgaacagctggcgcaagacggcgtgccgatgatcgaaatggaaaagggcgccgatcttctgcaagcgctggtagattccgagctgcagccgtcccgcggccaggcgcgtaaaaccgtagcctccaacgcggtgaccattaacggtgaaaaacagtccgatccggaatatgtattcagcgatagcgaccgcctgttcggccgctataccttactgcgtcgcggtaagaagaattactgcctgatctgctggaaataa

SEQ ID NO: 90873 - DNA, 861 bp, Enterobacter aerogenes
atgaagaacatcctcgccattcagtctcacgttgtgtttggccatgcgggcaacagcgccgctgaatttccgatgcgccgtctcggcgccaacgtctggcccctcaataccgtacagttctccaaccatacgcaatacggcaaatggaccggctgcgtcatgccgccttcgcatttgaccgaaatcgtgcaggggattgccgacatcgataagctgcagagctgtgatgcggtactgagcggttaccttggctccgccgagcagggtgaacatattctcggcatcgtgcgtcaggttaaagcggcgaatccggcagcgaaatatttttgtgatccggtgatgggccacccggaaaaaggctgcatcgtcgcgcctggggtggctgaattccacgtacgctatgcgctgccggccagcgatatcatcgcgccgaatcttgtcgagctggagatcctgtgcggccatccggttgctaacgttgacgaagccgttagcgcggcgcgtgagctgatagcgcaagggccgcagatcgtgctggtgaagcatctggcgcgggcggggatgagtatggatcgctttgagatgttgctggtgacagcggatgaagcctggcatatcagtcgcccgctggtcgattttggcagccgtcagccggtcggcgtgggcgatgtgaccagcggcctgctgctggttaagttactgcagggcgccagcctgcgcgatgcccttgaacacgttactgccgcagtgtatgaaatcatactggcaaccaaaaatatgcaggagtatgaactgcaggtggtggcggcacaggaccgcatcgccaaaccggagcattatttcagcgctacgcaactgtaa

SEQ ID NO: 90874 - DNA, 606 bp, Enterobacter aerogenes
atgaaactgttctacaagcccggcgcctgttcccttgcctctcatatcgccctgcgcgaaagcggcctcgactttaccatcgatagcgtcgacctggcgaagaaacgcctcgaaaatggcgacgactacctgctgattaaccctaagggtcaggttcccgcgctgctgcttgacgacgaagtgctgctgaccgagggcgtggccatcatgcagtacattgccgaccgcgtacctgaccgtcagctgctggcgccagtgggcaccattgcccgctaccagacgctggaatggctgaattacatcgccaccgaattacataaaggcttcaccccgctgttccgcccggatacgccggatgactacaagccaacggtgcgtgccctgctggaaaaaaagctgcagtatgtcgatgaggcgctgaaagataaacagtggctgaatgggcatcgctttaccatagctgatggctatctgttcacggtactgcgctggggctatgcggtgaaactgaatatggaagcctacgcaaatattggcgcctggatggcgcatgtcgcggcgcgtccgtccgttgcggcggcgctgtcggcggaaggtctgaagtaa

SEQ ID NO: 90875 - DNA, 1506 bp, Enterobacter aerogenes
gtgtcaactgcaaacaataaaccagcagaaagcgtgagtctgaacgctttcaaacaaccaagagcgttttatctcatcttctccattgagttatgggagcgttttggttattacggcctgcaagggatcatggccgtttacctggtaaaacagctgggtatgtcggaagcggattctatcaccctgttctcttcctttagtgcactggtttatggcctggtcgctatcggcggatggctcggcgacaaggtacttggcaccaaacgcgtcatcatgcttggcgcgattgtcctggctatcggctatgcgctggttgcctggtccggtcacgatgccgccatcgtctatatgggtatggcgactatcgccgtcggtaacggcctgttcaaagctaacccgtcctccctgctctctacctgctacgacaagaacgacccgcgtctggacggtgcattcaccatgtactacatgtccgtcaatatcggttccttcttctctatgctggctacaccgtggctggcagcgaagttcggctggagcgtggcgttcgcgctgagcgtcgtgggcatgctgattaccgtggttaactttgccttctgccagaagtgggttaaacagtacggttccaaacctgacttcgcaccggtgcatgtcggcaaactgctggcaactatcgtcggcgtagtcgtgctggtcgcgattgccacctggctgctgcacaaccagggcatcgcacgtatggcgcttggcgtcatcgcactgggtattgttatcatcttcgctaaagaagccatggcgctgcagggcgcggcgcgtcgtaaaatgatcgttgctttcctgctgatggttgaagcgattgtcttcttcgtactgtacagccagatgccaacctcgctgaacttcttcgcgatccgtaacgttgagcactcgattctgggtatcgcgttcgaaccggagcagtatcaggcgttgaacccgttctggattatgattggtagcccgattctggcggcgatttataacaagatgggtgaccgcctgccgatgccgcataaattcgccatcggtatggtactgtgctccggcgctttcctggtgctgccgctgggtaccaaattcgccagcgatgctggtatcgtctccgtcaactggttgatcctcagctacgcgctgcagagtatcggcgaactgatgatttccggcctcggcctggcgatggtggctcaactggtaccacaacgtctgatgggcttcatcatgggtagctggttcctgaccaccgcaggcgccgccatcattgcaggtaaaatcgctaacctgatggcagtaccggaaaacgtgaccgacccgctggtttctctggatgtttacggccacgtgttcctgcagattggtatcgcgaccgcagtcatcgccttcctgatgctgctgaccgcgccgaagctgaaccgcatgacgctggacgacgacgctgtcgccaaagcgcgcgaaaccgcaaccgcttaa

SEQ ID NO: 90876 - DNA, 636 bp, Enterobacter aerogenes
atgaataaagccaaacgcctggagatcctgaccaggctgcgggacaacgacccgcacccaaccaccgaactcaatttcacctcaccgttcgagctacttatagcggtgctgctgtcggcgcaggccaccgatgtgagcgtcaacaaagcgacggcgaagctctatccggtcgccaatacgccggcggcgatgctggagcttggcgttgacggcgtgaagtcctatatcaagaccattggtctgtttaacagtaaagccgaaaacgtcatcaaaacctgccgcatcttactggagaaacataacggtgaggtgccagaggaccgggcggcgctggaagcgctaccaggagtcggacgtaaaaccgctaatgtcgtgctgaataccgcctttggctggccgactatcgccgtcgacacccatatcttccgcgtttgcaatcggacacaatttgctcccggcaagaacgttgaacaagtcgaagaaaagttgttaaaggtggtgccggcggagtttaaagttgactgccaccactggcttattcttcacggccgttacacttgcatcgcgcgaaaaccgcgctgtggttcctgcctgattgaagatttgtgcgagtataaagagaaggtagagtcctga

SEQ ID NO: 90877 - DNA, 699 bp, Enterobacter aerogenes
atgagcgaagtaaaagacgtcattgttcaagggttgtggaagaataactcggcgctggttcagctgttgggtatgtgtcccctgcttgcggttacctcaacggctaccaatgccctgggcctcggcctggcgaccacgctggtactgacgctaaccaacctcaccatctccagcctgcgccgctggacgccggcggagatccgtattccgatctacgtgatgatcatcgcctcggtagtcagcgtggtacaaatgcttatcaatgcctacgctttcggcctgtatcaatcgctgggtatcttcattccgcttatcgtcaccaactgtatcgtggtggggcgcgccgaagccttcgccgccaaaaaagggccggcgctgtcggcgctcgatggtttttccattggtatgggcgcgacctgcgccatgtttgtgctggggtcgctgcgcgaaataatcggcaatggcacactgtttgatggcgccgatagcttattaggcagttgggcaaaagtcctgcgcatcgaagttttccataccgatacgccgttcctgctggcgatgctaccgccgggcgctttcattggcctcggtatgatgctggcgataaaatacctcattgatgagcgtactaagcagcgtaaggcgaaagcggcgcaggccgtctccgtcgccccaactgatgtgacagggaaagcgtaa

SEQ ID NO: 90878 - DNA, 621 bp, Enterobacter aerogenes
atgttaaaaagcatgcgtaaacacggcatcacgctggcgctctttgccgctggctctaccggactaacggccgccatcaatgagttaaccaaaaacaccatcgagcagcaggccgcgctgcagcaaaaggccctgttcgatcaggtcctgccagcggagagttataataacgacctgctgcaaagctgttatctggtgaccgcgccgcagttaggcaaaggtcagcataaaatatggattgcaaagaataacaatgcgccggtcggcgcggtgatggaagccacggcaccagatggttattccggggcgattcagctgctggtagcagccgactttaaaggcaccgttctcggttcacgtgtcaccgagcatcatgagacacccgggctcggtgataagatcgaactgcgtatttctgactggattacccacttcagcggcaaggttatccatggtcaaaatgatagccactgggcggtgaaaaaagacggtggcgatttcgaccaattcaccggcgcgaccattaccccacgcgcggtggtaaatgccgttaaacgcgcgggtctgtatgcgcaaacgctgcccgcgcagatccctgaattcaccgcctgcggagactaa

SEQ ID NO: 90879 - DNA, 1053 bp, Enterobacter aerogenes
atggttttcagaatcgcaagctccccttatacccacaaccagcgccagacctcgcgaattatgctcctggtgctgctggcggcgatccctggcattgccgtccagagctggtttttcggctggggtaccctgttgcagattatcctcgcggccttcaccgcatggggaaccgaagcggctattctcaagttgcgcaaacagaatatcgcggcaacccttgcggataactctgccctgctgaccgggctgttgttggccgtgagtattccgccgctggcgccgtggtggatggtggtgttgggcaccgcctttgcggtggtgattgccaagcaactgtacggcggattaggacataacccctttaacccggcaatgatcggctatgtcgttctgctaatctctttcccggtgcagatgacctcctggttaccgccgcacgaaattgccgctcaggttcctggctttatggatgcgctgcaggtcattttcagcggccataccgctagcggcggcgatatgaacagcctgcgcatgggaatcgacggtatcagccaggccacgccgctggatacatttaagacttcgcttcatgccggacacagcgcaaaagagatcctgcagtatccaatttacggcggccaactggccggccttggctggcaatgggttaacctcgcctggctggctggcggtctgttcctgctttggcaaaaaaccattcgctggcatatcccggtgagcttcctgctaagccttgccgtctgcgccactctcggctggattttctcgccggaaagcctggcatcgccgcaaatgcatctgctttccggcgccaccatgctcggggcgttctttatccttaccgatccggtgacggcatccaccaccaaccgcggacgcctgattttcggcgcgctggcaggtttactggtgtggctgatccgcagcttcggcggttatccggacggcgtcgcctttgccgtgctgctggcgaatataaccgtcccattgattgactactacacgcgtccgcgcgtgtatggccaccgttaa

SEQ ID NO: 90880 - DNA, 2223 bp, Enterobacter aerogenes
atgtttaagttattttccgctttccgaaaagacaagatctgggacttcaacggcggtattcatccgccggaaatgaaaactcagtccaacggcacgccgctgcgtcaggttcctctgccgcagcgttttgtcattccgctgaagcagcatatcggtgctgaaggcgaactgtgcgtccaaccgggcgacaaagttttgcgcggtcagccgttaacccgcggctttggcaggatgctgccggttcatgccccgacttccggaacggtgacggctattgccccccattccaccgcccacccttccgcgctggcggaactcagcgttattatcgacgccgatggcgaagactgctggatcgagcgcgacggctggagcgactaccacaacaagtcgcgtgaagagctgatcgagcgtattcaccagtttggcgtcgccggactcggcggcgccggcttccccacgggaacaaaactgcgcggcggcggcgataaaatcgataccctgattatcaatgctgcagaatgcgaaccctatatcaccgcagacgatcgcctgatgcaggattgcgcggcgcaggttgttgaagggatccgcatccttgcgcatattctgcaacccaaacaggtgctgattggtatcgaagataacaaaccgcaggccatttccatgctgcgcgcggtgttatccgacgcccacggcatagcgctgcgggtgattccaaccaaatatccctccggcggtgcgaagcaacttacgcaaattctcaccggtaagcaggtgccgcatggcggccgctcctccgatattggcgtcctgatgcagaacgttggcaccgcttatgctgttaaacgcgcggtgatcgacggcgagccgttaaccgagcgcgtcgtcacgttaactggcgaagcgattagccggccgggcaacgtttgggcgcgcctgggtacgccggtgcgccatctgctgaacgatgccggtttctgcgccagcgccgagccgatggtcatcatgggcggcccgttgatgggcttcactctgccctggctcgacgttccggtcgtgaaaatcactaactgtctgctggcgccgtcggtgactgagatgggcgaaacacaggaagagcaaggctgtatccgctgtagcgcctgcgctgatgcctgcccggcagatctcctcccccagcagctgtattggttcagtaaaggccagcagcacgacaaagccactacccataacttagccgactgcatcgaatgcggcgcctgcgcctgggtctgtccgagtaatattccgctggtgcaatatttccgccaggaaaaagcggaaattgccgccatccgtcaggaagaacagcgcgcagccgaggcgaaagctcggtttgaagcgcgacaggcgcgtcttgaacgtgaaaaagcggcgcgccaggagcggcacaaaaaagcagccgtacaaccggcggcaaaagatcaggatgccattaacgccgcattagcccgcgtgcgtgaaaagcagcgtgatgcggcgcagccgattgtcattcaatccggcagcaaaccagataacagcgaagcgattgccgcccgcgaagcgcgtaaagccgaggcccgggcgcgcaaagctgaacagcaagccgctgttgaatcgacaaccgatgcaagcgatccgcgtaaagccgccgttgaggccgctatcgcccgcgccaaagcgcgtaaagccgcgcagcagggtgaaaacgccgcaccctctgctgaaagtgaaaccaccgctgaagctgcgcccgcggtcgatccgcgtaaagccgccgttgaggccgctatcgctcgcgccaaagcgcgcaaagccgcgcagcagggtgaaaacgccgctccctctgccgaaagtgaaaccaccgctgaagctgcgcccgcggtcgatccgcgcaaagccgccgttgaagccgctatcgctcgcgccaaagcgcgtaaagccgcgcagcaggttgaaaacgcagctccctctgccgaaagtgaaaccacggttgagacagcgcccgcggtcgatccgcgtaaagccgccgttgaggccgctatcgcccgcgccaaggcgcgtaaagccgcccaacaagcagaacaacaaaccgcgccggacgccgccaatgacgatccgcgtaaagcggccgtcgcggcagctatcgctcgcgttcaggcacgtaaagcaacacagcaggcagttaacgaggaataa

SEQ ID NO: 90881 - DNA, 579 bp, Enterobacter aerogenes
atgagcgctgtctggatagccgtgatcgccatcagcctgctcgggctgattttcggcttaatactggggtacgcgtcgcgccgttttgcggtggaagacgacccggtggtggaaaaaattgatgagttgctgccgcaaagtcaatgcggccagtgcggctttcctggctgccgtccctacgcggaagccgtgggcactcagggtgaaaaaatcaaccgctgcgcccccggcggtgaagcggtcatgttaaaaatcgccgcattattgaacgtcgacccgcagcctattgacggcgatgagcagcagcaagaaccggttcgcatgttggcggtgattgatgaagccaactgcattggctgcaccaaatgtattcaggcctgcccggttgatgccatcgttggcgcgacccgcgccatgcatacggtgatgagcgacctgtgcaccggctgtaatctctgcgttgccccctgcccgactcagtgtattgacctgcgtccagtcgctcagaccaccgaaacctggaaatgggacctgcaggccatcccggtacgcaatattcctgtggaacaacatgtttaa

SEQ ID NO: 90882 - DNA, 582 bp, Enterobacter aerogenes
atggctgattatttactgctctttgtcggtactgtccttgttaataacttcgtgctggtgaagtttcttggattgtgcccgtttatgggggtttccaaaaagctggaaaccgctatggggatgggactggccaccacctttgtgatgacgctggcctcaatttgcgcctggttgattgatacctggatccttatcccgctgaaccttgtttatctgcgcaccctggcctttatcctggtcatcgcggtggtggtgcaatttaccgagatggtggtacgtaaaaccagtccggcgctgtatcgcctgctggggatcttcctgccgttaatcaccaccaactgcgcggtgctgggcgtggcattgctgaatattaacctcgggcataatttcctgcagtccgcgctgtacggtttcgccgccgccgttggtttctcgctggtgatggtgttattcgccgcgattcgcgaacgtctggtggttgccgatgttcccgcgccgtttcgcggtaacgcgattgcgctggtgaccgctggattaatgtcgctggcatttatgggctttagtggtttggtgaagttgtaa

SEQ ID NO: 90883 - DNA, 441 bp, Enterobacter aerogenes
atgtcctctcaatctgcagaacgtatcggcggatggctactggcgccgctggcgtggttactgctcgcgttgctcagcacctccttatcattaatactgtacgcgaatgcgctgatggcgccgcagacctgggcattgctgaaagccatgagctttggccatctggcgctctggctagcttcgctgctgttcgccgtcgcgatgtggtattataccctgtggctgacgatagcgtttttcaaacgccgcgcggtggtacccaaacactacattatctggctgcttatttctctgctgctggcgattaaggcgttcgctttttcgccgatttcggatcttctggccatgcgccagctgctgtttccgttgctcgctgcggcactgtttgcgccctattttcgacgctctgcgcgggttaagcggaccttcgtcaatccgtaa

SEQ ID NO: 90884 - DNA, 216 bp, Enterobacter aerogenes
atgaccgtacaggattatttattaaaattccgcaaaattagttcgctggaaagcctggaaaaactttttgatcatcttaactattctctctctgacaccaatgaaatcgtcaacatgtatcgcgccgccgatcaccgccgcgccgagttagtctctggcggaaaactgttcgatgtaggccaggtgccgaagtcggtgtggcgttacgtgcaataa

SEQ ID NO: 90885 - DNA, 1371 bp, Enterobacter aerogenes
atggccgcatttccgcaagattttctctggggggcagcaacggccgcctaccaggttgaaggcgggcacgatgccgatggcaaaggcccttctatttgggatatctactcgcaccagccgggaaccacctttcagggcaccaatggcgatatcgccgtcgatcactatcaccgctttcgtgaagatgtcgccctgatggctgaaatggggctacaaagctaccgcttttctatctcctggcctcggttattgcctcgtggccgtggtgaagtcaatgaaccaggcgtgaagttttacagcgatctgatcgacgaactgctggcgcacaatattgaaccgatgatcaccctttatcactgggatttgccccaggcattgcaggacgaagggggttgggaggctcgcagcacagcggaagccctcgccgaatacgcgcgactgtgctatcagcgcttcggttccagggtcaagctgtgggcaacctttaacgaaaccattgtatttattggccacggttatattaatggctgccatccaccggcggtacgcgacccggctcgcgccatccaggcttgccaccatgtctttatcgcccacgcgctggccgttaagaccttccgtgacatgaacattaacggccagattggtttcgttaacgtactgcagccccatacgccgttgacgcaaagcgccgaggacattgaggccaccgcgttggccgatgctatccatacccactggctatacgatccggtactcaaaggcgcctatccagacgctttgcttcaacaggctcaggcgctgtggaacgtaccgcgcttcgcaccgggcgacgacgcgctgctcagggaaaaccgctgcgattttatcggcctgaattattatcgtcgggagacggtctccgccacgccgcaggatgctccaggcgttggcgagtccggcgtggatggattattttattttgtccgcaatccgcaaagtacttataccgaatggggttgggaaatttggccgcagggattaaccgacggcatcatgatgataaaagagcgttacggcgatatcccaatctatatcaccgaaaatggtttgggggcgaaagatccgattattgacggtgaaatagtcgacgatccgcgaattgactatctgagtagccacattaatgcgctggaaaaggcaatagcattaggtgcggatgtccgcggtttttacccatggtcctttattgacctgctaagctggctcaacggctatcagaagcagtatggctttgtctacgtcgatcaccagcagaaccgcgctcgcaaacgaaaaaagagttatttctggtaccaaaacgttattgccagccgaggcgaacagcgttaa

SEQ ID NO: 90886 - DNA, 1179 bp, Enterobacter aerogenes
atgttactaaaccgcggaaacaacgcaagtattaccgcccgtagattgcgcaactggcgcaaagataaacagcgtgcacggataagcggaagattgcggtttatagttgaagtcatggttgcgtacgaggatgaggtcatgagtgatgctatacgggtagggctgataggttatggttatgcaagcaagacatttcacgcgccattgatttccggtacgccgggcatggagctgtcgaccgtggtcagtagcgatgcgcagaaagtgctggcggactggccggcgacccaggtggtgacttccgcgaattcgctatacgctgaccctgatatcgatctgattgttattccaactcccaacgatactcatttcccgctggcgcgagcggcgctggaggcgggcaaacatgtcattgttgacaaaccttttaccgtgacactgtcacaggcgtgtgagttggatgctatcgccagaagccgcgggcggctgttatcggtgttccataatcgccgttgggatagcgattttctcacgctgaaggccttgattgccgcaggggatttgggggaggtcagttattttgaatcacatttcgatcgttttcgcccgcaggttcgtgaccgctggcgtgagcagggcggccctggcagcggtatctggtatgacttaggcccccatctgctggatcaggcggtcaacctgtttggcctaccggtaagtattgccgtcgatctggcgcagcagcgccccggtgcgcaggcgacggattatttccacgcggtgttagtttatccgcaacggagagtgattttgcacagcacgctgctggcggcggcggaaacggcgcgttatatcgtccatggttcacgaggaagctatgtaaaatatggtctcgatccgcaggaagagcgtttgaaaagcggcgagcgactgccgcaggaggattggggctacgatatgcgcgacggcatattgacccgcgttgaaggcgaagagcgcgtcgaggaaacctggctgacgctgcccgggaactatcccgcttattatgcggcgatccgcgatgcgctcaacggcagcggagaaaacccggtacccgcaagccaggcgattcagattatggaactgattgaactggggattgaatcggcacggcaccgggcggcgctgtgcctgttttaa

SEQ ID NO: 90887 - DNA, 1005 bp, Enterobacter aerogenes
atgattgattcaactttgcctttaacagacattcaccgccatcttgacggcaacatccgtgcccaaaccattctcgatcttggccgccagttcaatattactctcccggcagatacccttgaaacgctgcgtccgcatgtgcaggtcaccagcaatgaacccgatctggtcagcttcctggcgaaactcgattggggcgtgaaggtgctggcttctctggaagcctgccgccgtgttgcctgggaaaacgttgaagacgccgcgcgcaacggcctgcactacgttgagctgcgtttttctccgcgttatatggcgatgacccatcaattaccggtcgctggcgtcgtcgaagcggtgattgccggggtacgcgagggctgccgtgatttcggcgtcgaagcgcgtctgattggcatcatgagccgcaccttcggcgaggcggcctgtgaagaggaactcgacgccctgctggcccatcgcgatgggatcaccgcgctggatctggcgggcgacgagctgggattccccggcgcgctgtttatggatcatttccgtcgcgcgcgtgacgcgggttggcgtatcaccgtccacgctggtgaagccgccgggccggaaagtatctggcaggccattcgtgaactgggcgccgaacgcatcggtcacggggtgaaagccgtgcaggatccgaagttaatggacttcctcgccgctgaacgtattggcattgaatcctgcctgacgtcgaacatccagaccagtaccgtctcctcactggcgcagcacccgctgaagaccttcctcgatcacggcgtgctggcctgcattaacaccgacgatccggcggtacagggggtggatattattcacgagtacaatgtcgccgcaccggcggcgggcctcagccgtgagcagatccgtcaggcgcaaattaacggtctggaactggcgttcctcagccgtcaggaaaaagaggcgctgatccaacgcgttctaaaggctaattaa

SEQ ID NO: 90888 - DNA, 396 bp, Enterobacter aerogenes
atggagcttctggatttgctcagaaccatttttgagcgagtacgcactgatgcggattttatttcatttactgaagtacttctggagaacaatgtctcttattacatctattttgtcgctacagggaatgtgaattttgttatgtcatcagatactttcgtttccctgaaaagcaacagaaagttgttgcgggttaattcccagtcctgcagagcgctcacccgagatgccgcccggcgccactttagcggtattaccacttttgataactattgcgccgaactggcaaatgccggggtattcaagtgggtggttgatctcaatgaaaaaacgcgacactactggtcaaaagacaatacgttattgcatatggaaaatatgattctgcccgtttga

SEQ ID NO: 90889 - DNA, 816 bp, Enterobacter aerogenes
atggctttttcacttaaaggtttaactcattcattggccctcgttagcgcgttgctgctagcgggctgtgggccaaaagatcaggatcctaatcatattaaggtggggattagcgcgggtatcgatcagcaagtctgggcggtggtgcaaaaagtcgctaaacagaaatataaccttgatgttgaagtggtgacttttaatgatttcgttctgcccaatgaggcgctgaataatggcgatctcgatatcaatgctttccagcataaaccctatcttgataaacagatccaggagcgcggctataagctggtggatgttggtactacttttgtctatccgattgccgcttattcaaagaaaatcaccgccatttcacagcttccggacggcgcccaggtagcggtgcctaatgacccaaccaaccttgggcgttctctgttattgctggagcagcaggggctgatcactctgaaagagggggttggcctgctgccaaccgtgctggatatcgtgaataacccgaagaagctgaaaatcgtcgagattgaagcaccgcagctgacccgtgcactggatgataaacaagtgaccatggctattataaataccacgttctccagccagattggcctgtcgccgacgcgcaatggtctgttcattgaggataaaaattcgccgtacgtcaatattttcgccagccgcgaagataataaagacagcgaaaaagtgaagaatttggtgaaagcataccagaccgacgaagtcgccaacgccgccgccgaattgtataaaggcgatgcggtgaaaggctggtag

SEQ ID NO: 90890 - DNA, 429 bp, Enterobacter aerogenes
atgaacatcggaactctggcaaaacgcagcggcctggcgccttcgcggatccgttattacgagcgcgcggggatcctcaaaaccgtgcagcgtaaagccaatggctatcgcagctatccggaagaaacgctggtggtgctggggctaattaccaccgctcaggcagcgggtttcagcctcgaagagatatcatccctattgccgtcagacctcaatcactgggatcgacaaacgctactcaccaccctgcaacaaaaagtggcggatatcgaaaagctggaacagaaactcgcgcacagtaaagcgcaactggtcaacgttatccatgagatacaacagaagccggatgacattgactgcgccgcgaatgcgcggcgcgtattaactgaggtgctggatgtacagcaccagacggggaaggaagaataa

SEQ ID NO: 90891 - DNA, 1227 bp, Enterobacter aerogenes
atgaccctctttacccctctgcgactggcctctggcgtcgtcattaacaaccgcatcgttaaagcggcgatggaagaaaatatggccgatgccgatcatgcgccgtcaacggaattactcaccctttatcaggcctgggcgcagggcggcgccggggtgattattaccggtaatgtgatggtggacgcccgggcgatgaccggcccggcaggcgtggtgctggaagatgaacggcatctggataagttccgcgcctggtcgcaggcggcgcgctcgaagggtgcacaggtgtggatgcagataaaccatcctgggcggcagatgcccggtggccttgggcaggagacgctggccccttcggcgctggcgctggatcttggctcgcagtcttcacgctttcgcctgccgcgggcgatgaatgataaggatatcgccgacgtgacacgacggttcatcaccacttcccggttagcggagcgcgccggatttcacggcgtcgaaatccatgccgcccacggctatttgctgagccagttcctctcgccgctcagtaaccagcgcaccgatcggtatggcgggagcattgaaaatcgcgcccgtttactgctggatattgtgcgcggcgttcgcgagacggtggcggcgggttttaccgtggtggttaaactcaattcagcagatttccagcgcggcggcttttcgattaacgatgcgaagacggtggtgcaactgctggcggaaagcggcgtcgatctggtcgaactttccggcggcagctacgaagcgccggcgatgatgggcgccatgcgcgatgaacggacgctggcgcgggaagcctatttcctgcagtttgccgagcaaattgccgacgtcgcgacgattcctttaatggttaccggcggcgtgcggcggcgtgaagtggcggagagggtagtgaatagcgggattgcgttggtgggcatcgctacggcaatggcgatagtccccggcttgccgcagtactggcgtaagggggagtacgatgcgccactgctgcgtcagggtaactggaagaacaaggctattgccgccaccgcgcatatggcggcggtgaaatatcagctgcagcggctaagccgccaccgcgcggtgcggccacaggtctcaccgctgtgggcgctgctgacggcgcaactgacagcaaaacggcaggctaaacgttatcggcgctggatggcgggcaagtaa

SEQ ID NO: 90892 - DNA, 234 bp, Enterobacter aerogenes
atgaaagagatcgttcctgattaccgcctcgatatggttggtgaaccttgcccctacccggccgtggccacgcttgaagcgatgccggcactcaaaaaaggggaaatacttgaagtggtgagcgactgtccgcagtcaatcaacaacatcccgcacgatgctaaaaatcacggctataccgtgctggatattcagcaggatgggccgacgatccgctatctgattcaaaaatga

SEQ ID NO: 90893 - DNA, 1212 bp, Enterobacter aerogenes
atgacatggcaacaattcaaacaagcctggttaatcaaattttgggcgcctgcgcccgcggtgatcgccgccggtattctttctacttactattttggcattaccggtactttctgggcagtcaccggcgaatttacccgctggggcggccaactgctgcagttgatgggcatcccggccgaaaactggggttactatcaattaatccatctcgaaggcacgccgttaacgcgtatcgacggtatgatgatccttggcatgtttggcggctgcctggccgccgcgctgtgggcgaataacgtcaagttgcggatgccgcgtagccgcatccgcattttccaggccctggccggcgggattattgccggcttcggcgcccggctggcaatgggctgtaatctggcggccttctttaccgggatcccacagttttccctgcacgcatggttcttcgccatcgccaccgccatcgggacctggttcggcgcgcgctttacgctgctgcctgttttccgtatcccggtcaaaattgagaaagtctccgcggcctcaccgttaactcaaaaatccgcgcaggcccgccgccgctttcgtctgggaatgctggtatttttcgctatgatcggttgggggctactgaccgccgccaatcagcctaaattgggtctggccctgctgttcggcgttgcttttggcctgctcatcgaacgggcgcaaatctgtttcacctccgcctttcgcgatatgtgggtgaccgggcgcacctatatggcgaaagcgatcatcttcgggatggcggccagcgccatcggtatctttagctatgtacagctcggcatggagcccaaaatcatgtgggccgggccgaacgcggtgattggcggcctgctgttcggtttcggcatcgtgctggccggtggctgtgaaaccggctggatgtatcgcgccgttgaaggtcaggttcattattggtgggtcgggttaggcaacgttatcggctccaccctgctggcttacttctgggatgatttatcgccggcgcttgccacccactgggataagattaacctgctgacgacctttggtccgttcggcggcctgcttatcacctacctgctgctatttatcgcgctgatgttggtcatcgcctgggaaaaacacttctttcgccagaaaaacacttcggcgacccgtattaaggaaaccgcatga

SEQ ID NO: 90894 - DNA, 204 bp, Enterobacter aerogenes
atgaaaacctacgatcgtaaccgtaatgctattgatgccggcagccgggtcatggtggccgacagcggcgcgacgggagtgattaaggctattcatggcgccaataaaaacagcgaacagctgcgccgcagtgactgcgtagaattagacggtagccatgaattgtattgcccattgaatcttattcgcctgggctttaattaa

SEQ ID NO: 90895 - DNA, 1185 bp, Enterobacter aerogenes
atgtttgattttgccacaccagttgaccgccacgggacctggtgcacccaatgggattatgttgccgaccgtttcggcgccgctgacctgctgccgttcactatctccgatatggatttcgctaccgccccttgcattatcgacgccgtcagccagcgactggcgcacggcgtttttggctatagccgctggaaaaatgacgagtttctcggcgccatcagccactggttcgccagccgttttcatagccccattgaccacgaggccatcgtttacggcccgtcggttatctatatggtggccgaaatgattaggcaatggtccaatccgggcgacggtatcgtggtccataccccggcttacgacgcgttttacaaaactatcgacggcaaccaacgccgcattgccccggtggcgctcaagcttgataagggtgagtggcgctgcgacatgaacgaactggaagccgcgctcgcccgtcccgacaaccgcattttgctgctttgcagcccgcataacccgacgggcaaagtctggagccgcgacgaactgaccaccatggcgcagctgtgcgcgaagcataacgtccgggttattagcgatgaaattcatatggatatgacctggggcgaacaccgtcataccccctggtgcgccgttgcgcagggcccctgggcgctgttcacgtcgggctcaaaaagcttcaatatcccagcatttaccggcgcctatgggctcatcgccgatactgcttcgcgcgatggctatctgcaagcgctgaaaggtcgcgatggtctctcttctccatcggttccggcgctggtcgcgcatatcgccgcctatcgtcagggggcgccctggctggatgcgctacgtgattacctgcaggaaaacatgcgctatatcgccgagcagctgaatcaggccttcccgcagttaaactggcagccgccgcaggccacctatctggcgtggatcgatctgcgcccgctcgaaatcgacgaccgtgcgctgcaacgcgcgctaattgaagagcaaaaagtcgcgattatgccgggttatacctatggcgaagagggtaatggtttcatcaggctaaatgccggctgcccgcgggagaagcttgagaaagggattcaaggattgattgccgctctgcggccattacgccctgacttaaaataa

SEQ ID NO: 90896 - DNA, 1593 bp, Enterobacter aerogenes
atgacggcgaaaacagcaccaaaaattaccttatgggagtttttccagcagttaggaaaaacctttatgttgcccgtggcgttgctctcgttttgcgggatcatgctggggatcggcagctcgttaagcagccacgatgtgattacgctgctgccgtggctgaacgtgccgctgctgcaggcgatttttgtctggatgagtaaagtcggctccttcgcttttagcttcctgccggtcatgttctgtatcgcaattccgctcggcctggcgcgtgaaaacaaaggcgtcgccgctttcgcgggcttcgtcggctacgcggtaatgaacctcgcggtcaacttctggttgacggcgaaaggcatcctgccgactaccgacgcggcgatcctcaaggccaacaacatccagaatattatcggtattcagtcgatcgacactgggatcctcggggcggtgatcgccgggattatcgtctggatgctgcacgaacgcttccacaacatccgtctgccggatgcgctggccttctttggcggcacgcgctttgtgccgatcgttaccaccgtggtgttaggcctggtcgggctggtcattccgctggtgtggccggtattcgcgatgggtatcaacggactgggccacgttatcaatagcgccggcgattttggcccgatgatcttcggtaccggagaacgcctgctgctgccgttcggcctgcatcatattctggtggcgctgatccgctttaccgaagcgggcggcaccatggacgtttgcggccacagcgttagcggcgcgctgaccatcttccaggcgcagctgagttgcccgacgacgcacggcttctctgaaagcgcgacccgcttcctgtcgcagggtaaaatgcccgccttcctcggcggcctgcccggcgcggcgctggcgatgtaccactgcgctcgtccggaaaaccgtcataaaattaaagggctgctcatttccggcgtcattgcctgcgtggtcggcggtaccactgagccattggaattcctgttcttgttcgtcgcgccggtactgtacgtcatccacgccctgctgaccggccttggtttcactatcatggcggtacttggcgtcaccatcggcaacaccgacggcaacattatcgacttcgtggtgtttggcatcctgcacggtctggcgaccaaatggtatatggtgccggttgtcgccgccatctggttcgcggtgtactacggtatcttccgtttcgccatcacccgcttcaatctgaaaacgccgggccgcgatatcgaaacggcggctaacatcgaaaaagcggttgccggaacgattggcaaatcaggttataacgtgccggcgattctggccgcgctcggcggtgctgataatattgtcacgctcgataattgtattacccgcctgcgcctgtcggtgaacgacatgagcaaagtcgataccgccgcgttaaaagccaaccgcgcaatcggcgtggtccagcttaacgatcacaacctgcaggtggtcatcggcccacaggttcagtcggtaaaagatgaaatggccaccctgatgaataccgttcaggcctaa

SEQ ID NO: 90897 - DNA, 1029 bp, Enterobacter aerogenes
atggctatcgcaaaaaagacaaccatcaatgatgtggcgctggcggctggcgtctcggtcagtacggtatcgctggtgctcagcggtaaagggcgcatctcttcggccaccggcgagcgcgtcaatcaggccattgagcaactcgggtttgtgcgtaatcgccaggcggcgtcgctacgcggagggcaaagcggggtaattggccttatcgttagcgatctgtcgaagccgttttatgccgagctaaccgccgggttgaccgatgcgctggaatcacagggtaaaatggtatttctcacccagggcgggcatcgcggtgagaaaatgctccagcgcttcgaaaccctggtctcacagggcgtggacggggtgattatcgctggcgctatcgacaagggcggcgaactgcgcgatcgtgccgccgaagtggggatgccgctggtttttgcctcccgcgccagctatctggacgatattgacctgatccgcccggataacatgcaggcggcgcaaatggtaacggaacatctgattcgccgcggtcatcagcgcatcgcctggcttggcggacaaagcgcgtccttgacccgcgccgaacgggtgggcggctattgcgccaccttattgaagtacggcctgccgtttcatagtgaatgggttgtcgagtgtggctccagtcagcagcaggcggcggaagccatgatcgcgctgctgcggcaaaacccgaccatcagcgcggtactttgctataacagcgtcatcgccaccggggcgtggtttggtctgctgcgcgccgggcggcagagcggcgagggtagcgtggaaagttattttgagcaacgcatcgcgctggcggcctttgccgaagtgccggaagcggcgctcgatgatgtccccttgacctgggtgactacccccgcgcgtgagatggggaacagcctggcggagtgtattttacgccgcctcgaggaagggcaaggcagcgcgcgtaatcagattatgccgccgcggctggttatcagaaagtag

SEQ ID NO: 90898 - DNA, 1494 bp, Enterobacter aerogenes
atgaaaaaaacattggtcgctgcgggagttatcgtcgcgctcggcgtcgtctggacaggcggggcctggtttaccggtaagcaactggaaaaccgtattgccgaaatggtgcagcaggcgaatgcccaactacagagcaacgcgccggaagctggcgtagagctgagctatcaggactaccagcgcgggttattcagcagccacctgcaattggtggtgaagccgcaggccggtaaagagcacagcctgttggccgccggtcagagcctgatttttgacgaaaaggtcgatcatggtcccttcccgcttgcctcgttaaaatcttttaacctggtaccggcaatggcctcggtcaacaccactctggtgaataacgatgccagcaaagcgctgtttgatatcgccaaagggcagtcgccgtttaacatcgacacccgtattgcctacagcggcgatacccagtcggccatcttccttaacccgctggattacgctaaagacaatgaaaaagttatctttagcggcggtcagttccagctcaatgccgatcgcgatggcaaaacgatcagcctgagcggcgaagcggccagcgggcagatcaacgcggtcaacgaatacaaccagaaagtccagctcagtttcagcaacctgaaggctgacggcgccaccgaaatgaccgccttcgaagaacgtatcggcaagcagaagatttcccttgataaactggctatcggcgttgaaggtaaagagctggcgctgctggaaggcatgaatatcgacggccgctcgacgctctccgatgacggcaaacgtatcaatagccagcttgattacaaccttaacagtctgaaactgcaaaaccaggatatgggccgcggcaaactcaccgttaagctggataatctcgatggtcaggcgtggcatcaattcagtcagcagtataacgcccaggcgcaggcgctgatggcgaagcccgagctggcgcagaatccggagctctatcagcaggcgttaaccgagatcttctttagctcgctgccgattctgttgaaaggtaatccgtcgctgacgatttccccgctgagctggcaaaacgctaaaggcgaaagcaccctgaatctgtcggtgctgatgcaggacccggcgcaaacgaccgccgcgccgcagaccgtcgccgatgaactggaccgcagcgttaaatcgctggacggtaagctggtgatcccagtggatatggccaccgctctgatgacgcagattgccgggctggaaggctatcagccggaggatgcggcgaaacttgccgatcagcaggttaaagggctggcggcgatgggacagatgttccgtctgaccacgatggaagataacgcgattacctccagcctgcagtacgccgacggccaggtaacgctaaacgggcagaaaatgccgctggctgatttcgccgccatgttcggcctgacgctccccaccgccgaaccgcagcagtaa

SEQ ID NO: 90899 - DNA, 1200 bp, Enterobacter aerogenes
atgtggaaacagggattgagaatgcagaagctcattaactcagtgcaaaactatgcatggggaagtcacaccgcgttaaccgacctttacggtatcgccaatccggacaatctgccgatggcggaactgtggatgggcgcacacccgaaaagcagttcgcggatccttaacgccgacggccagccgcagtcgctgcgcgacgtgattgaggccgataaaaatgcccttctcggcactaatgtcgccgagcgtttcggcgaactgccgttcttgttcaaagtcctgtgcgccgcccagccgctctccatccaggttcacccgaataaacgcgcgtcggaaattggctttgccaaagagaacgccgcgggtattccgctggatgccgccgagcgcaactataaagatcccaaccataagccggagctggtcttcgctctgacgccgttcctcgccatgaacgcgttccgcgaatttaatgaaattgtcgcgctgctgcagccggttgccggggcgcatcctgccatcggcgaattcattcaacagccggacgccgggcgtttaagccagctgttcgccagcctgctgaatatgaaaggcgaagaaaaagcgcatgcgctcagcgtgctgcaaagcgccctcgaccgcgaacagggcgagccgtggcagaccattcgtctgatcgctgaattctacccggatgacagcggcctcttctctccgctgctgctcaacgtggtgaaactgaatcctggcgaagcgatgttcctgtttgccgaaaccccgcacgcctacctgcagggcgtcgcgctggaagtgatggccaactcagataacgtactgcgcgccggtctgacgccgaagtacatcgatattccggaactggtggcaaacgtgaagtttgtcgccaaaccggcttctgagctgctgacccagccggaacaacacggcagcgagctggatttcccaatcccggtcgacgatttcgccttctcgttgcacgatctgaccagcaatgaagcctctctggcacaagagagcgccgcgattctgttctgcgtggaaggcgaagcaacgctgcgtaaaggcgaacagcgtctgaccctgcagccgggtgaatcggcgtttatcgcctgcaacgaatcaccggtacaggtcagtggccagggtcgtctggcgcgcgtgttcaataagcttaagtaa

SEQ ID NO: 90900 - DNA, 1647 bp, Enterobacter aerogenes
atgtcgaacaaaccgtttgtttatcaggatccttttccgcttaaaaaggatgacaccgagtattatctcctcagcagtgattacgtctccgtcgccgaattcgccggccaggaggttctgaaggttgaaccccaggcgctaaccttactggcccaacacgcgtttcacgatgcctcctttatgctccgcccggcacatcagcagcaggttgcggatatcctcaacgacccggaagccagcgaaaacgacaaatacgtcgcgctgcaattcctgcgtaactccgatatcgccgctaaaggcattctgccgacctgtcaggataccggcaccgcgatcatcatgggcaaaaagggacagcgcgtatggaccggcggcggcgatgaagccgcgctggcgcagggcgtgtacaacacctatatccaggacaatctgcgttactcgcagaacgcgccgctggatatgtataaagaggttaacaccggtaccaacctgccggcgcagatcgatctttatgctaccgatggcgatgagtataaattcctctgtatcgccaagggcggcggctccgctaacaaaacgtatctctaccaggaaacgaaagcgttaatcaccccggcgaagctgaaaaactacctcgtcgagaagatgcgcaccctcggcaccgcagcctgtccgccgtaccatatcgcctttgtgattggcggcacctcggcggaagcgacgctgaagacggtaaaactggcctcgaccaaatactacgatggcctaccgaccgaaggtaacgaacatggccgggcgttccgcgatgtgcaactggagcaagagctgctgctggaagcgcagaacctcggcctcggcgcgcagttcggcggcaagtacttcgcccacgatatccgcgtggtccgcctgccgcgtcacggcgcctcctgtccggtggggatgggagtctcctgttccgctgaccgcaacatcaaagctaaaatcaaccgcgacggcatttggctggagaaactggagagcaacccagggaaatacatccctgagcacctgcgccaggccggcgaaggcgaagccgtgaaggtgaacctcaatcagccgatgagcgagattctggcgctgctgtcgcagtatccggtgtcgacgcgtctgtcgctgagcggcacgatcatcgtggcccgcgatattgcccatgccaagctaaaagagcttatcgataatggcgaagcgctgccgcagtatgtcaaagatcacccgatctactacgccggcccggcgaagacgccggatggttacgcttccggttctctggggccgacgactgctggccgcatggactcatatgtcgatctgctgcaatcgcacggtgcgagtaaaatcatgctggccaagggtaaccggagccagcaggtgaccgatgcctgccacaaacacggcggtttctatctcggtagtatcggcggcccggcggcggttctcgcgcagcagagtatccgcagcctcgagtgcgtggcttatccggagctgggaatggaagctatctggaaaatcgaagtggaagatttcccggcctttatcctcgttgatgataaaggtaacgacttcttccagcagatccagacgtcgcagtgctcgcgctgcgtgaagtga

SEQ ID NO: 90901 - DNA, 852 bp, Enterobacter aerogenes
atggctaccaaactgcaggacgggaatacaccttgtctggcagctacaccttctgatccacgtcccaccgtgctggtgtttgattccggcgtcggtgggttgtcggtatataacgagattcggcagctgttgccggatctacattatatttatgctttcgataacgttgccttcccctatggcgagaagagcgaagagtttatcgttgagcgtgttgttgaaatcgtgactgccgttcagcaacgctatcctctggcgctggcggtcatcgcctgtaataccgccagtaccgtttccctgccagccctacgtgaaaagttcgctttcccggtggtcggcgtcgtaccagcgattaaacctgccgcgcgcttaacggcgaacggtattgtcggcctgctggcgacgcgcggtaccgtcaagcgtccttatactcgtgaactcattgaccgctttgccaatgagtgccgcatcgaaatgctgggttccgctgagctggtggaactggcagaggcgaagctgcacggcgaagcggtaccgttggaagagctgcgccgaattctgcgcccgtggctacggatgcaggagccgcccgatacggtcgtattaggttgtacgcacttcccgctcctggcggaagaactgcaacaggtcatgccggaagggacgcggtttattgattccggcgcggcgattgctcgacgcaccgcctggttgctggagcatgaagcgccggatgcaaaatcgaatgatgccaataaggctttttgcatggcgattaccccggatactgaacagcttttacccgttttacagcgttacggctttgaaacgctggaaaaactaccgctttaa

SEQ ID NO: 90902 - DNA, 1848 bp, Enterobacter aerogenes
atgattaaaaaagcttcgctgatgacggctttatccgtcacggcattttccggctgggcgcaggacagcaattcaaatacgttagtggtgacggcaaaccgtgtggcgcaacctatcgagaccgtgctggcgccggtgagcgtggtgacgcggcaggacatcgatcgctggcagtcaacctctctcaccgatgtgatgcgccgcctgccgggcgtggacatcgcgcaaaacggcggcatggggcagcagagctctcttttcgtacgcggcaccaactccagccatgtcttaatcctggtggatggcgtacgtctgaatcaggcgggcgtcagcggctcttccgacttaagccagttccctatcgctctggtacagcgcattgaatacgttcgtggcccgcgctcggcggtctacggttcggatgcgatcggcggggtggtaaacattattaccactcgcgaccaggacggcaccacgctcaatgccggcgtgggctcaaatggctaccagaactatggcggcagcacgcagcagactttcggcggacatacccgcgtcaccctggcgggcgactacacctataccaaaggctttgatgtggtcgccgaaggcaataccggcggcgttcgccagccggatcgcgatggctttatgagcaaaacgatctacggcgcgctggagcatagcttctccaatgagtggagtggctttgtgcgtgggtacggctatgacaaccggacggcctacgacggctctccttatggcggcgtattagtcgatactcgccagttgtatagccagacctgggatgccggcctgcgttttaatcaggatatcttccactcgcagctgacttccagctatagccacagcaaggactacaattacgatccgcgactggggcgctatgacacctcggcgacgctggatgaagtgaaacagtacaatgtgcagtgggcgaacacggtcgatgttggccacggcaacgttggcgctggaattgactggcaaaaacaaaccaccgagcctggcacgaactatgtgaccgatggctatgaaatccgtaataccggactgtttatcaccggcttgcaaaagttgggcgatttcaccctggaaggggcggcgcgtagtgatgataactcgcagtttggccagcatggtacctggcagagcagcgccgcgtgggagtttatcgacggctaccgctttatcgcctcttatggcaccgcctacaaagcgccgaatctcggccagctgtacggcttctacggtaatcagaatctcgacccggaagagagcaagcagtgggagggggcctttgaaggcctgacgtctggggtgacatggcgtctgtccggatatcgtaacgacatcgacaatctgatcgactacgactcgcagctgatgaaatattacaacgtcggcaaggcgcgtattaaaggtattgaagcgacggcgtcgtttgataccgggccgctggcgcacagcatcagctatgactatgtcgatgcgcgtgatgcgaaaaccaacgagctgctggtgcgccgggcaaaacagcaggtgaaataccagttggactggcaggtttatgatttcgactggggtgtgacctatcactatcttggcacccgttatgacaacacttacgacccggtaacctatgcgcctgagagcgttaagttgggcggtgtaagcttgtgggatctcgcagtttcgtatccagtcacctcacatctcacagttcgtggtaaaatagccaacctgttcgataaagattacgagacagtatatggctaccaaactgcaggacgggaatacaccttgtctggcagctacaccttctga

SEQ ID NO: 90903 - DNA, 1101 bp, Enterobacter aerogenes
atgacccccgaacaccttcctaccgaacaatacgaagcgcaactggcagaaaaagtcgtccgtttgcagaaaatgatggccccttttgccgcgccggttccggaggtgtttcgttcgccggtcagccattaccggatgcgcgctgaatttcgcctgtggcacgacggcgacgacctctatcacatcatcttcgatcagcagaccaagtcgcgtattcgcgtcgataccttcccggccgccagcgagctcatcaaccagctgatgccggcaatgctcgacggcgtgcgccataacccggtcctgcgccataaacttttccagattgattatctgacgaccatgagcaaccaggccatcgtctcgctgctctatcacaagaaactcgacgacgaatggcgccagcatgcggaagcgctgcgcgatgccctacgcgcgcaaaatctcaacgtgcagctgataggccgcgccactaaaaccaaaatcgagctcgatagggattatgtcgatgaacgtctgccggttggcgggcgcgaaatgatctatcgtcaggtggaaaacagctttacccaaccaaacgcggcgatgaatattcagatgctggagtgggcgctggacgtcaccaaaggttccaccggcgatctgctggagctctactgcggcaacggcaacttctcgctggcgctggcgcgtaacttcgatcgcgtgctggcgacggaaatcgctaaaccgtcagtcgcctccgcgcaatacaatattgccgccaaccatatcgataacgtgcaaattatccgtatggcggcggaagaatttactcaggcgatgaacggcgtgcgggagtttaaccgcctgcagggtatcgatctgcaaagctatcagtgcgaaaccatttttgtcgatccgccgcgcagcgggctggatagcgagacggaaaaaatggtccaggcctatccacgaattctctatatctcctgcaacccggaaacgctgtgccagaacctggaaaccctcagccagacgcacaatgtcacccgcctggcgctattcgatcagttcccgtatacccaccatatggaatgcggcgtactgttaacgaagaaataa

SEQ ID NO: 90904 - DNA, 360 bp, Enterobacter aerogenes
atgaaacactcagttcaagataaaggtacgctactgctggcgctgatcgcgggtctgtccattaatggcaccttcgccgcgctgttcagctcaatcgttcccttttccatcttcccggttctgtcgctgctgctgacggtatactgtctgcaccagcgctatcagaaccgcagtatgccagtcgggctgccggggctttccgccgcctgctttattctcggcgttctgctgtatagcaccgtggtgcgcgcagaatatccggatatcggctctaacttcttcccggcggtgctgtctgtcgcgatggtgttctggatcggttacaagatgcgcaaccgcaaagataccgcggcggagtaa

SEQ ID NO: 90905 - DNA, 636 bp, Enterobacter aerogenes
gtgatgggcgtaagagcacaacaaaaagaaaaaacccgccgctcgctggtggaagcggcatttagccaacttagcgctgagcgaagctttgccagcctgagcttgcgcgaggttgcgcgggaagcagggatcgcgccgacgtccttttatcgtcattttcgcgatgtcgatgagttaggcctgacgatggtagacgaaagcgggctaatgctgcgccagctgatgcgccaggcgcgccagcgcattgccaaaggcggcagcgtgatccgcacctccgtctctacctttatggagtttattggtaacaacccgaacgcctttcgcctgctgttgcgtgagcgttctggcacatccgcggcgtttcgagccgctgtagcgcgcgagatccagcatttcatcgcggaacttgccgactatttagaactcgaaaatcatatgccgcgcgcctttaccgaagcgcaggctgaagctatggtcaccatcgtattcaacgccggtgcggaagcgttggacgtcagtccggagcagcgccgacagctggaagaacggctggtactgcagctcagaatgatttcaaaaggcgcgtattactggtatcgccgtgaacaagaaaaaatgtcacatcattccgaataa

SEQ ID NO: 90906 - DNA, 1401 bp, Enterobacter aerogenes
atgtcacactcttgggattatgatgcaatagtgattggttccggtcctggcggcgaaggcgccgctatgggactggtgaaacagggagctcgtgttgccgttatcgagcgctaccataacgtcggcggtggttgtacccactggggaaccatcccgtcaaaagcgcttcgccatgccgtcagccgtattatcgagtttaaccaaaaccccctctacagcgaccattcccgtcttctccgttcttccttcgccgacatcctcaaccatgccgacagcgtcattaaccagcaaacccatatgcgtcagggtttctatgagcgcaaccactgcgaaattctgcagggcaacgcccactttgttgatgagcacacgctggcgctggagtgtcacgatggcaccgtagaaacggtcaccgccgagaaattcgttatcgcctgcggctcgcgcccgtatcatccggccgatgtcgatttccaccacccgcgtatttacgacagcgattccattcttagcctgcaccacgaaccgcgccacgtgatcatttacggcgccggggtgatcggctgcgagtacgcgtcgatcttccgcggtatggaggttaaggtcgatctgatcaatacccgcgatcgtctactggcgttccttgatcaggagatgtccgattcgctctcctatcacttctggaacagcggcgtggttatccgccataacgaagagtacgagaaaatcgaaggcgtcgatgacggcgtgatcatgcatctgaagtctggtaagaagctgaaagctgactgcctgctgtacgccaacggtcgtaccggtaacaccgatacgctggcgctggaaaatatcggtctgcaaaccgacagccgcggccagctgaaagtaaacagcatgtatcagaccgccctaccgcacatctatgccgtcggtgacgttatcggttatccaagcctggcgtcagcggcttacgatcagggacgcatcgccgcgcaggcgctgatcaaaggcgaagcctccgcgcatctgattgaagatatcccgaccgggatctacaccattccggaaatcagctcggtgggtaaaaccgagcagcagctaaccgcgatgaaggtgccttatgaggtaggtcgcgcacagtttaaacatctggcgcgggcgcaaatcgtcggtatgagcgtgggtactctgaagattctgttccatcgcgagacgaaagagatcctcggcatccactgctttggtgagcgcgcggccgaaattattcatatcggccaggcgattatggagcagaaaggcggcggtaacaccattgagtacttcgttaacaccacctttaactacccgaccatggccgaagcctatcgggtagcggcgttaaacggcttaaaccgcctcttttaa

SEQ ID NO: 90907 - DNA, 918 bp, Enterobacter aerogenes
atgaatattcgcgatcttgaatacctggtagcgctggctgaacatcgccacttccgacgtgcggcagattcctgccacgtcagtcagcccacgctcagcggacaaattcgcaagctggaagatgaacttggggtgatgttactggagcgcaccagccgtaaggttctgttcactcaggcgggtttgctgctggtggatcaggcgcgtaccgtgctacgcgaagtaaaagtgctcaaggagatggcaagccagcaaggggaaaccatgtccgggccgctgcatatcggcctgatcccgacggtggggccatatttgctgccgcacataattccgatgctgcatcagactttcccgaagctggaaatgtatctgcatgaggcgcaaacccatcagctgctggcgcagctcgatagcggtaagctcgactgcgcgatcctcgcgctggtcaaagagagtgaagcctttatcgaagtgccgctgttcgatgagccgatgatgctggctatctacgaagaccacccgtgggcagagcgcgatcgcgtgccgatggcggatttagcgggtgaaaagctgttgatgctggaagacggacactgtctgcgcgaccaggcgatgggcttctgctttgaagcgggtgcggatgaagatacccacttccgggcgactagccttgaaacgctgcgcaacatggttgccgccggaagtggtattacactgctgcctgcgctggcggtgccgcaggagagaaaacgcgatggcgtggtctatattccgtgcattaagccggaaccaagacgcaccatcgggctggtttatcgtcctggttcgccgctgcgtagccgctatgagcatctggcggaggccatccgcagtactatggatggccacttcgataaggcgttaaaagaggcggtttaa

SEQ ID NO: 90908 - DNA, 1374 bp, Enterobacter aerogenes
atggcactttggggcgggcgttttacacaggcagcagatcagcggttcaaacaattcaacgactctttacgctttgactatcgtctggcggaacaggatatcgtgggatccgtcgcctggtccaaagcgctggtaaccgtaggcgtactgaccgccgatgagcagctgcagctggaagaggcgctgaacgtcttgctggaagaggtacgcgccaacccgcagcaaatccttgaaagcgatgccgaagatatccatagctgggtcgaagggaaactgatcgataaagtcggccagttgggcaaaaaactgcataccggacgtagccgtaatgaccaggtcgccaccgatctcaagctgtggtgcaaagagaccgtcaccgagttgctgtccgcgacccgccaactgcaaagcgcgctggtggaaaccgctggcaacaatcaggatgcggtgatgccgggttatacccatctgcagcgcgcccagccggtgacttttgcgcactggtgtctggcctacgttgaaatgctggcccgtgatgaaagccgtctgcaggacgcgctcaagcgcctcgatgtcagcccgctgggctgcggcgcgctggcgggaaccgcttatgaaatcgaccgtgaacaactggccggttggttggggttcgcatcggcgacccgtaacagcctcgatagcgtctccgatcgcgatcacgtgctggagctgctttccgatgcctcaattggcatggtgcatctgtcgcgttttgccgaagatctgattttcttcaataccggcgaagcgggttttgttgaactctctgatcgcgttacttccggctcgtcgctgatgccgcagaagaaaaacccggatgcgctggaactgatccgcggtaaatgcggccgcgtgcagggcgcgctgaccggcatgatgatgaccctgaaagggctaccgctggcctacaacaaagatatgcaggaagacaaagaagggctgttcgatgcgctggacacctggcttgactgcctgcacatggcggcgctggtgctggacggtatccaggtgaaacgtccgcgctgtgcggaagcggcgcagcagggttacgccaacgctaccgagctggcggattacctggtggcaaaaggcgttccgttccgcgaagcacaccatatcgtcggtgaagcggtggttgaagcgattgctcagggcaaagcgctggaagatttaccgttaagcgacttgcaaaagttcagcagcgttatcggcgatgacgtctacccgatcctgtcgttgcagtcctgccttgataaacgtgcggccaaaggcggcgtctcgccgcagcaggtggcgcaggcgattgccgacgccagacagcgcctggtgtaa

SEQ ID NO: 90909 - DNA, 777 bp, Enterobacter aerogenes
atgaacaatccattgattatcaaacttggcggcgtgttgttggatagcgaagaagcgctggaacgtctgtttaccgccttggtgcactaccgcgaaacacaccagcgtccgctggttatcgtccacggcggcggctgcgtggtggatgagctgatgaaacagcttaatctgccggtgaaaaagaaaaatggcctgcgcgtaacgcctgccgatcagattgacatcattaccggcgcgctggcgggaactgccaataaaacgctgctggcatgggcgaaaaagcatggtctttcctcggtagggctgttcctcggcgatggcgatagcgtgaaggtgactcagttggatgaagaactgggccacgtcggtaaagcgcaggcaggctcgccgacgcttatcaatacgctgttggcgggcggctacctgcctgtcgtgagctcgattggcgtcaccgacgaaggacaactgatgaacgtcaacgccgatcaggcggcgacggcgctggcggcgacgttgggcgcggatcttatcttgctgtccgatgttagcggcattctcgacggtaaaggtcagcggattgcggaaatgaccgcctccagggccgagcaactgattgaacagggcattattaccgacggcatgatcgtgaaagtgaacgcggcgctggacgcggcgcgcgagctgggccgcccggtggatatcgcttcctggcgccatgccgagcagctgccggcattatttaacggtaccccgatcggtacgcgtattttggcttaa

SEQ ID NO: 90910 - DNA, 1005 bp, Enterobacter aerogenes
atgctaaatacgctgatcgtgggagctagcggctatgccggcgcagagctggtggcctatgtaaatcgccaccctcatatgaacataaccgctttgaccgtctccgcgcaaagcaatgatgctggaaagttaatttccgatatacatccgcagctgaaaggtattgtcgacctgccgctgcaggcgatgtctgatatcagcgaatttagcgccggcgcggatgtggtgttcctcgccaccgcgcatgaagttagccacgatctggcgccgcagtttttggccgcggtctgcgtggtgttcgatttatccggcgcgtttcgcgtcaacgatggggcgttctacgaaaaatactacggtttcacgcatcagcatccggacctgctcaaacaggcggtatacggcctggcggagtggaacgtcgaagcattgaaagaggcgaatttgatcgcggtgcctggctgctacccgacggcggcgcagctggcgttaaaaccgctgatcgatgccggtctgttggatctgaagcaatggccggtgatcaacgccaccagcggcgttagcggcgccgggcgtaaggcggcgatgagcaatagcttctgcgaagtcagcctgcagccgtacggtgttttcaatcatcgccaccatccggaaatttctacccatctgggcgcagaggtgatcttcactccccatttgggcaattttaaacgcggtattctggaaaccattacctgccgcctgaagccgggcgtcagtaaagatcaggtggctgatgtcttcctgcaggcctatgccaataagccgttggtccgtttatacgataaaggcgtaccggcgctgaaaaacgtagttgggctgccattctgtgatatcggttttgccgtccaggacgaacatattatcgtcgtggccgcagaggataacctgctgaaaggcgcggcagcgcaggccgtgcagtgcgctaacattcgtttcggcttcgctgagacgcagtctttaatttaa

SEQ ID NO: 90911 - DNA, 1152 bp, Enterobacter aerogenes
atgaaaaacaatttaccgccctttatcgagatttaccgcgcattgatcgccacaccctccatcagcgcgaccgaagaagcgctggatcaaagcaatgagtctttaatcaatttactcggcggctggttccgcgatctgggctttaacgtcgagatccagccggtacctgagacgcgcaataaattcaatatgttggccagcactggccacggcgctggcggcctgctgctcgccgggcataccgataccgtgcctttcgacgatggccgctggactcgcgacccgtttacccttaccgagcacgacaacaaactctacgggctcggcacagccgatatgaaaggcttcttcgcgtttatcctcgatgccctgcgcgacgttgacgtcagtaaattgaaaaaaccgctgtatattctggccaccgctgacgaagaaaccagcatggcgggcgcgcgctactttgccgaaaccacgcaactgcgcccggattgcgccatcatcggcgagccgacctcgctgcagccggtgcgggcgcataaaggccacatttcaacagcggtacgcgtactgggacagtccggccactccagcgacccggcgcgcggcgtgaacgctatcgaactgatgcacgatgcgattggccgcattatgcaactgcgcgatgatttaaaagagcgttaccactatgccgctttcaccgtgccttatccgacgctcaacctgggcgccattcacggcggcgatgcatccaatcgcatctgcgcctgctgcgaattgcacatggatattcgtccattgccggggatgacgcttaacgacctgaacggcctgctggatgaagcgctggcgccggtcagcgaacgctggccggggcgtctgacggtctctgagctgcatccgccgattccaggctatgaatgcccgccggaccacaagctggtcgaagtggttgaaaaactgctcggcgcgcagaccgaagtggtgaactactgcaccgaagcgccgtttatccagacgctgtgtcctacgctggtgttaggaccgggctccatcaaccaggcccaccagccggatgaatatctggagacgcggtttattaagccgacgcgcgaactcatcacccaggttgtccatcacttctgctggcattaa

SEQ ID NO: 90912 - DNA, 2652 bp, Enterobacter aerogenes
atgaacgaacaatattccgctttgcgtagtaatgtcagtatgctcggtaaggtgctgggcgacaccatcaaggatgcgttaggagaaaacattcttgatcgtgtcgaaactatccgtaagttgtccaaatcttctcgcgcgggcaatgaagccaatcgccaggagctgctcaccacgctgcaaaacttgtccaacgacgagctgctgccggtggcgcgcgcctttagccagttcctgaatctggccaataccgctgagcaatatcacagcatttcgcccaacggcgaagccgccagcaatccggaagttattgcgcgtaccctgagaaaactcaaagaccaacccaatctcaacgaagacaccataaaaaaagcggtggaatccctgtcgctggagctggtattaaccgctcacccgaccgaaatcacccgccggacgctgatccataaaatggtggaagtgaacaactgccttaagcagttggataacaaagatatcgccgactatgagcacaaccagctgatgcgccgcctgcgccagctgatcgcccagtcctggcataccgatgaaattcgtaagcaccgcccttctccggtcgatgaagccaaatggggtttcgcggtagttgaaaacagcctgtgggaaggcgtgccgaactatctgcgcgagctgaacgaacagctggaagccaacctcggttaccagctaccggttgattttgtgccggtacgattcacttcatggatgggcggcgaccgtgacggcaacccgaacgtcaccgccgatatcacccgccacgtgctgttgctcagccgctggaaagcgaccgatctgttcctgaaagatatccaggtgcttatctccgagctgtcgatggtcgaatgcaccgacgagctccgcgatttggcgggtgcggaaggcgcgcaagagccgtatcgttatcttatgaaaaagctgcgtagccagttgatggagacccaggcctggctggaagcgcgtctgaaagggcaaaaactgccgaaaccggcggggcttatcacgcaaaacgaacagctgtgggaaccgctgtatgcctgctataaatcgctgcaggcctgcggaatgggcatcatcgccaacggcgaactgctcgataccctgcgccgggtgaaatctttcggcgtaccgctggtgcgtatcgatatccgtcaggaaagtacccgccataccgaagcgctgggcgaaatgacccgctacctcgggatcggcgattatgaaagctggtcggaagccgacaagcaggccttcctgatccgtgagctgaactccaaacgcccgctgctgccgcgtcagtgggagccgagcgaagagacccgcgaggtcctcgacacctgtaaagtgatcgccgaagcgccgcgtggatcgatcgccgcttatgtgatctcaatggccaaaacgccgtccgacgtgctggcggttcatcttctgctaaaagaagccggtatcggctttgccctgccggtcgcgccgctgtttgaaacgctggacgacctgaacaacgccaacgacgttatgactcagttactgaatattgactggtatcgcggctttattcagggcaagcagatggtcatgatcggttactccgactcggccaaagatgccggcgtgatggccgcctcctgggcccagtaccaggcacaggacgcgctaatcaaaacctgcgaaaaagccggtattgaactgactctattccacggtcgcggtggctccatcggtcgcggcggcgctccggcccacgcggcgctgctctcgcagccgccgggcagcctgaaaggcggcctgcgcgtcaccgaacagggcgaaatgatccgctttaagtacggcctgccggaagtgaccatcagcagcctgtcgttgtacaccagcgcgattctggaagccaacctgctgccgccgccggaaccaaaaccgcagtggcgcgaaatcatggccgagctgtccgacgtctcctgcaagatgtaccgcggctacgtgcgggaaaacaaagacttcgtcccttatttccgctccgcgaccccggaacaagaactgggcaaactgccgcttggctcgcgcccggcgaagcgtcgcccgaccggcggcgtcgagtcactgcgcgccatcccgtggatcttcgcctggacccagaaccgcctgatgctgccggcctggctgggcgccggtgccgcgctgcagaaagtggtcgagggcggtaagcaaagcgagctggaaagcatgtgccgcgactggccgttcttctcgacccgcctcggaatgctggaaatggtctactcaaaagccgacctgtggctggcggagtactacgatcagcgtctggtgaaaccggaactgtggaagctaggcgaagagctacgtcagctgttaaccgccgatatcaaagtggtgctggctatcgctaatgactcccacctgatggccgacctgccgtggatcgccgaatccatccagttgcgtaacatctataccgacccgcttaacgtcctgcaggccgaactgttgcaccgttcgcgccaggctgaagaggctggcgaggaaccggatgcgcgcgttgagcaagcgctgatggtcaccattgccggcgtcgcggcagggatgcgtaataccggctag

SEQ ID NO: 90913 - DNA, 651 bp, Enterobacter aerogenes
atgacccgaaagatccccatgctcgcgtttggcttaggcatggcgcttgcgagcgtccaggcgttcgcccacggtaaccatagccatggcccagcgttgaccgacatagaacgccaggctagcgaaggcatttttgccgataaagatgtgaaggatcgcgcgttgagcgattgggatggcgtctggcagtccgttaatccgtacctgctgaatggcgaccttgatccggttctggagcagaaggcgaaaaagcccggcggcaagagcgtggaagagtatcgcgcctattataagaagggttacgccaccgacgtggagcagattggcatcgaagatgacgtgatagagttccacgtcggcaagaccgttaatagctgcaaatatacctactcaggctacaaaatcctgcaatacgcctccggcaagaagggcgttcgctatctgtttgagtgccaacagggcgatggtaacgcgccgaaattcgtccagttcagcgaccatattattggcccgcgcaaatcgcagcatttccatatatttatgggcaatgaatcacaggaggccttgctgaaagagatggataactggccgacctattatccctatgcgctgcataaagagcagatcgtcgatgagatgttgcatcactaa

SEQ ID NO: 90914 - DNA, 858 bp, Enterobacter aerogenes
atggataacagcatcaatcagctcattgattcattagtgaaaaaacaaacctgcattgcagaagtgcattttaccggtgagtcacgcccccctgccgacgccgcgatcaaggttgattttcctcgtctgaatattgtcattgaggggcagttgtacgatctcgccctcggcgataatgccgcgccgctgcagccgcgcgatgtactgtatattgcgggcgatagatggaactggccgcaatggcagacaccctgcctgctattaagcatcttattcggcaaacagcagttggaattttcgctgcagcgctggagcggcgaggcgctaactcttgtccagaagatccaggtaccgcgccgcgggccgcgcgtgggttcattcctgctacaggcgctaaatgaaatacgtatgcagccgcaggaacaacaaaccgcccgcagcatcgtgattagcctactcagccactgtaccgatctgctgggtagtcaggcgcaaacttcatcgcgcagccaggcgctgttcgaggcgatccgccagtatatcgatctccatttcgctgagccgctgagccgggaatccgtagcccaggagttttatctctctcccaactatctctcgcatctgtttcagaagtgcgggcccatgggctttaacgaatacctcaatcatatccgcctcgaacaggcgcgcatgctgttgaaaggccatgatatgaaagtgaaagacgttgcccacgcctgcggcttcgccgacagcaactacttctgccgtctgtttcgcaagaacaccgaacgttcgccttccgaataccgccgccagtatcacagccagttgacggaaaaatcctctgcgccgtaa

SEQ ID NO: 90915 - DNA, 663 bp, Enterobacter aerogenes
atggaactctatctggacaccgcgaacgtcgctgaagttgaacgtctggcccgcatttatccgctggctggcgtcaccaccaacccgagcatcatcgccgccggcaaaaccccggtttgggacgtgctgccgcgcctgcaaaaagccgtcggcccggaaggtgttctgttcgcgcagaccatgagtcgcgatgcgcagggcatggtggaagaagccaaacgcttgagcaacgccgtgccgggtatcgtggttaaaatcccggttaccgccgaaggtctcgccgccatcaaactgctgaaaaaagaaggcatcccgacgcttggcaccgcggtctatagcgcttcccaggggctgctggcggcgctggccggcgcgaaatacgtcgcgccatacgtcaaccgcgtcgacgcccagggcggtgacggcattcgcatggtgcaagaactgcaatctctgctggaaatgcacgccccggaaagcaaagtcctggccgcgagtttcaaaaccccgcgccaggcgttggattgcctgttggctggctgcgaagctatcaccctccccttagacgtagcgcaacaaatgctcggcacccccgcggtagagtcagccatagagaagttcgagcaggactggaataacgcatttggcacgttgaacctgtaa

SEQ ID NO: 90916 - DNA, 1104 bp, Enterobacter aerogenes
atggatcgcattattcaatcacccggtaaatacattcagggcgctggcgccatcaagcgcctcggcgaatatcttaaaccgctggccgaacggtggcttatcatcggcgataagtttgttcttggctttgccgaagagcagttgcgtaccagccttggcggcgctggcctggtggccgaaatcgcaccgttcggcggtgaatgttcgcaaaatgaaatcaaccgcctgcgcgatatcgccagcagcgcccaatgccatgcggtgctcggcatcggcggcggcaagactttggataccgcgaaagcgctggctcactatatgcatctgccggtggtcgtggcgccgaccatcgcctccaccgacgcgccgtgcagcgcgttgtctgttatctataccgacgatggggaattcgaaagctatttgatgctgccgcacaacccgaacatggtggttgtcgatacgcagatcgtcgcggccgcgccagctcgcctgctggcagccgggattggcgatgcgctggcgacctggtttgaagcccgcgcctgctcgcgcagcggtgcgaccacaatggcgggcggtaaatgcactcaggcagcgctggcactggcggaactctgctacaacacgctggttgaagaaggcgaaaaggcgatgcttgccgccgagcagcatgtggttaccccagcgctcgaacgggtgatcgaagccaacacctacctgagcggcgtcggctttgagagcggtgggctggcggcggcgcacgcgattcacaacggtttgaccgccatcccggacgcccatcacttctatcacggcgagaaggtcgcgtttggtaccctgacgcagctggtgctggaaaacgcgccggtggaagagatagaaaccgcggcggcgttgtgtcacagcgtcggcctgcccatcacgctggcgcagctcgatattaaaggcgacatcccggccaaaatgcgcacggtcgcggaggccgcctgcgccgaaggcgaaaccatccacaacatgccgggcggcgcctgcgccgaccaggtttacgccgcgctactggttgccgaccaatacggtcagcgtttcctgcaagagtgggaataa

SEQ ID NO: 90917 - DNA, 915 bp, Enterobacter aerogenes
atgacggttgcaaggaacagcaatctcctggccggttgcggcctcgtcctgctgacgcttatctggagctacagctggattgcgatgaaacaggtaacgctctatatcggcgctttcgattttaccgccctgcgctgtattttcggcgcgattgtgctgatggcggtgttggcgctgcgcgggcgcggcatgcggccaacgccatttggttacaccctggcgattgcgctgctgcaaacctgcggcatggtcggtctggcgcagtgggcgctgatgagcggcggcgcaggtaaagtcgccattctcagctataccatgccgttctgggtggtgatcatggcggcgctgtttttaggcgagcgcatgcggcggctacaatatgccgctatcgtactggcggcgtgcggtctactgctggtgctgcagccctggcagttggatttctcctcgatgaaaagcgcgctgctggcgatcctctccggcatcagctggggggcgagcgcgattgtcgccaaacgcatgtatcgccgctatccgcgcctcgatttactgtcgttaaccgcctggcagatgctgtatgccgcgctggtgatgagcgtggtggcgtggctggtgccgcagcgcagcattgactggcaacctggggttttttgggcactggcctatagcgcaatcctggcgacggcggtggcctggagtctgtggctgtatgttctgcgtaacctgcctgccagcgtcgccggcctgagtaccctggcggtaccggtttgcggcgtgctgttttcctggtggctgctgggtgaaaatccggggctagtggaaggcgctggtattgtgctgatcgtcgcggcgctggcgataatcagccttaaaaaacgtcaacctcagattaccaggcaaggtattactcgttaa

SEQ ID NO: 90918 - DNA, 888 bp, Enterobacter aerogenes
atgagcttttttcacgccaatcagcgggaagccctgaatcagagcctggcggaagtccagggccagattaatgtgtcctttgaattctttccgccgcgtaccagtgaaatggagcaaaccctgtggaaatccatcgatcgcttaagcagcctgaagccgaagtttgtttccgtcacctacggggcgaactccggcgagcgcgaccgcactcatagcattatcaagggcattaaagaccgcaccggtctggaagcagcgccgcacctgacctgtatcgacgccagccgtgatgaactgcgcgcgattgcccaggattactggaacaacggtatccgccatatcgtcgcgctgcgcggcgacctgccaccgggtagcggcaagccggagatgtacgccgccgacctggtgacgctgctaaaagacgtcggtgattttgatatctccgtcgccgcctatccggaagtgcatccggaagccaaaagcgcgcaggccgacttattgaacctgaaacgtaaagtagaagcgggcgctaatcgcgcgatcactcagttcttttttgatgtcgaaagctacctgcgtttccgtgaccgctgcgtctccgccggtatcgatgtggaaattattccgggcattctgccagtctccaactttaaacaggcgaagaaatttgccgatatgacgaacgtgcgtattccgacctggatgtcgaaaatgttcgaagggttggataacgatgccgaaacgcgccaactggtaggggcgaatatcgccatggacatggtgaaaattttaagccgcgaaggagtgaaagatttccacttctataccctgaatcgcgccgaaatgagctatgccatttgccatactctgggcgtgcgtccagcgtaa

SEQ ID NO: 90919 - DNA, 2433 bp, Enterobacter aerogenes
atgagtgtgattgcgcaggcaggggcgaagggtcgtcagctgcacaaatttggtgggagtagtttagcggatgcgaaatgttacctgcgcgtcgccgggatcatgaccgactatgcgcaggcaggcgatatgatggtcgtctctgccgccggtagcaccaccaaccagctgattagctggctgcagctaagccagaccgatcgtctttctgcgcatcaggtgcaacaagcgctgcgtcgctatcaaatggatctgatcgccagcctgttgccggcggacgccgctgacgcgctgatcgcgacgtttattcacgatcttgaacgtctggcgggcctgctggatagcggcatcaccgatgcggtatatgctgaagtcgtcggccacggcgaagtgtggtccgcacgcctgatggcggcggtactgaatcaccttggcgttgaagccgcctggctggacgcgcgcgccttcctgcgcgcggaacgcgccgcgcagccgcaggttgatgaaggcttatcctacccgttgttacaacagttgatggcgcagcaccccaacaaaaggctggtggtgaccggctttatcgcccgtaacaatgccggagaaaccgtgctgctgggccgtaacggttccgactactccgccacccagattggcgcgctggccggggtctcccgcgtcaccatctggagcgatgtggccggggtctatagcgccgacccgcgtaaagtgaaagatgcgtgcctgctgccgctgctgcgccttgatgaggccagcgagctggctcgcctggcggcgccggtgctgcacgcgcgtacgctacagccggtttccggcagcgatatcgatttacagctgcgctgcagctacaccccggaccagggttcgacgcgcattgagcgcgtgctggcatctggcaccggcgcgcgtattgtcaccagtcacgacgacgtctgcctgattgaattccaggtgccggctggtcaggatttcaagttggcgcataaagagctggatcagattttcaaacgcgcgcagctgcgcccgctagcggtgggcgtgcatgccgaccgtaagctgctgcagttctgttacacctctgaagtggccgacagcgcgctgaagctgctggacgaggcgggcctgccgggcgagctgcgtctgcaccagaagctggcgctggtggcgatggtcggcgcgggcgtgacccgcaatccgctgcattgccaccgtttctggcagcagttgaaagggcagccggtagagtttacctggcaatcggaagagggcatcagcctggtggcggtgctgcgcgccggcccaaccgagagcctgattcaggggctgcatcattccgtgttccgcgctgagaaacgcatcggtctggtgctgtttggcaaaggtaatatcggctcccgctggctggagttgttcgcgcgcgagcagagcacgctttccgcccgcaccggctttgagttcctgctggctggggtggtggatagccgccgtagcctgctgaactatgaaggtctggatgccagtcgcgcattggcattctttgaagatgaagcggttgagcaggatgaagaatcgctattcctgtggatgcgcgcgcacccttatgatgatttagtggtgctggacgtgaccgccagcgaacaactggccgatcagtatctggatttcgccagccacggttttcacgtgatcagcgccaataagctggcgggcgccagcagcagcgataaatatcgccagatccacgacgccttcgaaaagaccggacgtcactggctgtataacgccaccgtcggcgcaggcttgccggttaaccatacggtgcgcgatctcatcgacagcggcgataccatcctggggctgagcggtatcttctccggtacgctctcctggctgttcctgcagtttgacggcacggtgccatttaccgaactggtggatcaggcctggcagcaagggctgaccgaaccggacccgcgcgttgacctgtcaggtaaagacgtgatgcgcaagctggtgatcctggcgcgcgaagctggttacaatatcgagccggatcaggtgcgcgtggaatcgctggttccggcgcattgcgaagagggctcggttgaccacttctttgagaacggcgaagagctgaacgaacagatgctgcagcgccttgaagccgcccgtgagatggggctggtgttgcgttacgtggcgcgttttgatgctaacggtaaagcgcgcgtcggggtagaagcagtgcgtcaggaacatccgctggcggcgctgctgccgtgcgataacgtcttcgccatcgagagtcgctggtatcgcgataatccaatggtgatccgcgggccaggcgcgggtcgcgatgtcaccgccggggctattcagtcagatattaatcgtctggcgcagttgctgtaa

SEQ ID NO: 90920 - DNA, 1161 bp, Enterobacter aerogenes
atgacgcgtaaacaggccaccattgcagtgcgtagcggtttaaatgacgacgaacagtacggttgcgttgtcccgccgatccacctctccagcacctataatttcaccggtttcaatgaacctcgcgcccacgattattcccgtcgcggcaacccgactcgcgatgtcgtacagcgcgcgctggcggaactggaaggcggcgcgggcgcggtactgaccaataccggaatgtcggctattctgctggtgaccacggtgttcctgaaaccgggcgatctgctggtggcgccgcacgactgttatggcggcagctatcgtctgtttgacagcctggcgaaacgcggctgctatcgcgtgcgctttgtcgatcaaagcgatgaacaggcattacgtgaagcgctagcggaacaaccgaagctggtgctggtcgaaagcccgagcaacccattgctgcgggtggtcgatattgcgaaaatctgcgggctggcgcgtgaagccggcgcggtgagcgtggtggataacaccttcctgagcccggcgttgcaaaatccgctggagctgggcgccgatctggtgttgcattcgtgcaccaaatatctcaacggccactctgatgtggtcgccggggtggtgattgccaaagatcctgaaactgtcaccgaactggcatggtgggcgaataatatcggcgtcaccggcggggcgtttgatagctatctgttattgcgtggtttgcgtaccctttctccgcgaatggaagtggcgcagcgcaacgcgcaggcgatagtcgactatctgaaaacccagccactggtgaaaaagctgtatcatccgtccctgccggaaaaccaggggcatgagattgcggcgcgtcagcaaaaaggttttggggcgatgctaagcttcgagctcgatggcgatgagcagacgctgcgtcgcttcttgagcggtttatcgctatttacgctggcggaatcgttggggggcgttgagagcctgatttcccatgcggcgacgatgacgcatgcgggcatggcgccggaagcgcgtgcggcggcagggatctcggaaacgctcctgcgtatttcgaccggtattgaagatggtgaagatttaattgccgacctggaaaatggcttccgggcagcaaacgaggaataa

SEQ ID NO: 90921 - DNA, 318 bp, Enterobacter aerogenes
atggctgaatggagcggcgaatatatcagcccatacgctgagcacggtaagaagagtgagcaagtaaaaaaaattacggtttccattcctctgaaggtgttaaagatcctcaccgatgaacgcacgcgtcgtcaggtgaacaacctgcgtcacgccacgaatagcgaactgctgtgcgaggcgttcctgcatgcctttaccggtcaaccgttgcctaacgatgaagacctgcgtaaagagcgcagcgatgaaatcccggaagcggcgaaagagattatgcgtgaactgggtatcgacccggatacgtgggaatactaa

SEQ ID NO: 90922 - DNA, 213 bp, Enterobacter aerogenes
atgaaaaaaggtattcacccaaattacgacgaaattactgctacctgttcttgcggtaatgtcatgaaaatccgttccaccgttggtcacgacctgaacctcgacgtgtgcggtaaatgccacccgttctacaccggcaaacagcgtgatgttgctaccggtggccgtgttgaccgcttcaacaagcgcttcagcatcccgggcagcaagtaa

SEQ ID NO: 90923 - DNA, 2196 bp, Enterobacter aerogenes
atgtccgtcgctcatgtcgccctgcccgttccgctgccccgcacctttgactatttgttgcctgaaggcatcccggtcaaggcgggctgtcgcgtacgcgtgccgttcggcaaacaggagcggatcggtatcgtggtgtcggtcagcgaacgtagcgaactcccgctcgccgaactcaaaccggtcgccgaagcgctggatagcgaaccggtattttcctctaccgtctggcgcatgctgctctgggccgcggattactatcatcatcccatcggcgacgtgctgttccacgcgctgccgattatgctgcgccagggcaaaccggccagcgccgcgccaatgtggtactggtttgcgacggaacagggacaagcgctggatatcaacagccttaaacgctcgccgaagcagcagcaggcgctggcggcgctgcgccagggcaaaatctggcgctatcaggtcgcagaacttgaattcaatgacgcggcgctacaggcgctgcgtggcaaagggctggcggagctagcctgcgaagcgccagcgattattgactggcggaccagcttcgcggtgcccggcgaacggctgcgcctgaataccgagcaggcgaccgccgtcggggcaattcatagcgcctccgaccgtttctccgcctggctgctggcgggtattaccggctcagggaaaacggaagtctatctgagcgtgctggagaacgtgctggcgcagggtcgacaggcgctggtgatggtgccggaaatcggcctgacgccgcagactatcgcccgcttccgccagcgttttaacgccccggtggaggtcctgcattcgggtctcaacgacagcgagcgcctcgcatcatggttaaaggcgaaaaatggcgaagcggcgatcgttatcggcacccgctcgtcgctgtttacgccgtttaaagacctcggcgttattgtcatcgacgaagaacacgatagctcctataaacaacaggaaggctggcgttatcacgctcgcgacctggcggtatggcgcgcccatagcgaacagatcccgattatcctcggctcggcgaccccggcgctggagacgctctataacgtgcgccagcgcaagtaccgtgagttaaagctgaccaaacgcgcgggcaacgcccgcccggcgcagcagcacgtgctggatttaaaaggccagcagttgcaggcgggcctatcgcctgcgctgattaaccgcatgcgacagcatctgcaggccgacaatcaggtgatcctgtttttgaaccgccgcggtttcgccccggcgctgctatgccacgactgcggctggatagcggagtgcccgcgctgcgatagttactacaccctgcatcaggcgcagcatcatctgcgttgccaccactgcgacagccagcgccccattccgcgccaatgtccttcctgcgggtcgacgcacctggtgccagtgggtctcgggactgaacagctggagcaggcgctggcgccgatgttccctgatgtaccaatctcacgtatcgaccgcgataccaccagccgtaaaggggcgctggagcaatatcttgccgacgtccatcgcggcggcgcacgcattctgattggcacccaaatgctggctaagggacatcatttcccggacgtcaccctggtgtcgctgctggatgtcgacggcgcgctgttttccgccgacttccgctcggcggagcgttttgcccagctctatacccaggtctccggccgcgccgggcgcgcgggcaagcagggtgaagtgatcctgcaaacccatcatccggaacacccgctgctgcagaccctgttgtataaaggctacgatgcgtttgccgagcaggcgctggcggaacggcaaaccatgcagctaccgccgtggaccagtcacgtgctgatccgcgccgaagaccataataaccagcaggcgccgctgtttttacaacagttacgtaacctgttgcaggccagcccgctggccgatgataaactgtgggtactcggcccggtccccgcgctggcgccaaagcgcggcggtcgctggcgctggcaaattctgctgcagcacccttcccgcatacgtctacaacatatcgtcagcggtacgctggcgttgataaacaccctgccggaagcgcgtaaagtgaagtgggtactggatgtcgatcctattgaaggctaa

SEQ ID NO: 90924 - DNA, 1029 bp, Enterobacter aerogenes
gtgaagcccaaaaaacaaatggttgccgccaccatgaaagacgtcgccctgaaggcaaacgtttcaacggcaaccgtatcccgtgcgctaatgaatcccgacaaagtgtcgcaggcaacccgcagtcgggtggagcaggcggcgcaggaagtcggctatttaccgcagtcgctcgggcgtaacatgaaacgcaatgagtcgcggacgatccttgtgatcgtgccggatatttgcgatcccttcttcagtgaggtgattcgcggcattgaagtgaccgccgccgacgaaggctatctggtgctgatcggcgattgcgcccatcagaatcagaaagaaaaaacctttattgatctcattatcaccaaacaaattgacggtatggtgctgctgagctcgcgcctgccgttcgacgccagcgtcgaagagcagcgtaatttgccgccgatggtcatgtcgaacgagtttgcgccggagctggagctccctaccgtgcatatcgataacctgaccgccgcgtttaatgccgttaattatctccacgaactggggcatcaacgtatcggctgtatcgccgggccggaggatatgccgctgtgccattaccggctgcagggatatgttcaggcgctgcgccgcagcggtatcaccgtcgatccgcactacatcgcccgcggcaactttacttttgaagccggggccaacgcgctggagcaactgctggcgcagccggtgccgccgaccgcggtattttgccatagcgacgttatggcgctgggcgcattgtcgctggccaaacgtcgcggcctgagggtgccggaagatttatcgattgttgggtttgataacatcgcgttgtctgaattttgcgatccgccgttaactaccgtttcacagccgcgttttgatatcggccgtgaaggaatgctgctattactcgagcaaatgcaaggccgtaacgtcaacagcggctcgcgtctgctcgattgcgaactgatcgttcgcggcagtacgcaaaaaatcagacgataa

SEQ ID NO: 90925 - DNA, 855 bp, Enterobacter aerogenes
atggttgcgatcgcagcggccgtgctggtggcctttatcggtggtctgtatttcattacccatcacaagaaagaagaagcggaagcgctgcagaaccgtcaggcggcaggcaacggtctcccgccgaaaccggaagagcgctggcgctatattaaagagctggaaagccgccagccgggcgttcgcgcgcctacagagccgaccgccggcggcgaagtgatgaaacccgagcagcttaccgacgagcagcgccagttgctggcgcaaatgcaggcggatatgcgtcagcagcctacgcagctgactgaagtgccgtggaacgaacaaacgccggcgcaacgtcagcagacgctgcagcgtcaacgtctggcgcagcaacagcagcagacacaacagcagcagtgggcgcagacgcagcagcagaccgcgcagcaacagccgcgcgtccagcagccgaagccggtgcagcaacagcagccgaagcaaacagcgtccaaccagcagccgtaccaggatctgctgcagacgccggcgcataacaccactgcgcagccgaaaacccaggccgccgcgccggtcgcccgcgtagaagaagcgccgaaagccgcggccgccgagaagaaagacgatcgcagctggatggttcagtgtggttcctttaaaggcgccgagcaggccgaaaccgtgcgcgctcagttggcctttgagggctttgcttcgcatatcaccaccaacaacggctggaaccgggtagtgattgggccgctgaaaggcaaagagaacgccaacgatatgatcaaccgtctcaagatggccggacacgcaaactgcattcgtctcgccgccaggggttga

SEQ ID NO: 90926 - DNA, 531 bp, Enterobacter aerogenes
gtgacaacaatagttagtgttcgccgtaatggccatgtcgttatcgccggtgatggccaggccacgctgggcaacaccgtgatgaaaggcaacgtgaagaaagtgcgtcgtctgtacaacgacaaagtgatcgctggtttcgctggcggcaccgctgacgccttcaccctgttcgaactgttcgagcgtaagctggagatgcatcagggtcatctggtgaaagccgccgttgagctggcgaaagactggcgtaccgaccgcatgctgcgcaaactggaagcgctgctcgccgtcgctgacgaaaacgcgtcgcttatcatcaccggtaacggcgacgtggttcagccagaaaacgatttgattgcgattggctccggcgggccatatgcccaggccgccgctcgcgcgctgctggaaaacaccgaaatgggcgctcgcgacatcgccgagaaagcgttggatattgcaggggatatctgcatctataccaaccacttccacaccatcgaagaattaccttctaaagcgtaa

SEQ ID NO: 90927 - DNA, 1335 bp, Enterobacter aerogenes
atgtctgaaatgaccccacgcgaaattgtcagcgaactggacaaacatattatcggccaggacgcggccaagcgttctgttgctatcgccctgcgaaaccgctggcgccgtatgcagcttaatgaagagctgcgtcatgaagtcacgccgaaaaacattctgatgataggcccgaccggcgtcggtaaaaccgaaatcgcccgtcgcctggcgaaactggccaacgcgccgttcatcaaagttgaagcgaccaagttcaccgaagtgggctatgttggtaaagaagtggactctatcatccgcgatctgaccgacgctgcgatcaaaatggtacgcatgcagtccatcgataaaaaccgctatcgcgccgaagaaatggccgaagagcgtatcctcgacgtgctgatcccgccggcgaaaaataactggggccaagctgaacagccgcaggaaccttccgctgcgcgccaggcattccgcaagaaactgcgcgaaggccagcttgacgacaaagagatcgaaatcgatctcgccgcggcgccgatgggcgttgaaatcatgtcccctccgggcatggaagagatgaccagccagctgcagtccatgttccagaacctgggcggccagaaacagaaaccgcgtaagctgaaaatcaaagacgcgatgaagctgcttatcgaagaagaagcggcgaagctggttaacccggaagagctgaagcaagaagctatcgacgccgttgaacagcacggtatcgtgttcatcgacgaaatcgacaaaatctgtaagcgcggcggcaacgcctccggcccggatgtgtctcgtgaaggcgttcagcgcgacctgctgccgctggtggaaggctgcaccgtctccactaaacacgggatggtgaaaaccgatcacattctgtttatcgcctccggcgcgttccaggtcgccagcccatcagatttgatcccggaactgcagggccgtctgccgatccgcgttgagctgaaagcgctgactacccatgatttcgaacgtattctgaccgagccgaatgcctctatcaccgtgcagtacaaagcgctgatggcgaccgaaggcgtgaatatcgaattcactgaagatggtatcaagcgtatcgctcaggcggcatggcaggttaacgaaaccaccgaaaacatcggcgcgcgtcgcctgcacacggtgctggaacgtctgatcgaagacatctcttatgatgccagcgaaatgaacggccagacggtgaccatcgacggcgattatgtcggtaaacacctggatgttctggtggcagatgaagatctgagccgttttatcctataa

SEQ ID NO: 90928 - DNA, 957 bp, Enterobacter aerogenes
atgatagccccatttttttggctgaaagaaatgactgaacaaccgataacacgcactaaggcctggcttgaaagcctgcgtccaaaaacattacctctggctttctccgctatcatcgtcggcaccgcgttggcgtggcagcaaggccacttcgatccgctggtcgcgctgctggcgcttattaccgccggtttgctgcaaattttatctaatctcgccaatgattatggcgacgccgtcaaaggcagcgataaacctgaccgtatcgggccgctgcgcggaatgcaaaaaggcgccatcacccagtcgcagatgaaacgcgcgctgatcgtaacggtagcgctgatttgcctgtccggcctggcgttgctgttctccgcctggcagacaatggcggacttcatcggctttatggtactcggcgggttgtcgattatcgccgctatcacctataccgtcggcacgcgtccttacggctatattggccttggcgatatctcggtgctggttttcttcggctggctgagcgttgtcggcagttggtatctgcaggcgcatagcatcgaggcggttattttcctgcccgctaccgcctgtggcctgctggccgccgcagtgctgaatatcaataacctgcgcgatatcgatagcgaccgcctgaacggtaaaaataccctggcggtccgtctggggccggtgaacgctcgccgttatcacagcgtcctgctgcttggcgctccgctgtgtctggcgctttttaacctgctggcgctacatagcctgtggggctggctgtttattctcgccattccgctgctggtaaaacaggcgcgttttgtcatgcgtgaacgcgaaccggtggcgatgcgtccgatgctggaacgcacggtcaaagcggcattattaaccaacctgctgtttgtcatcgggattatcggcagtaagctggcggcataa

SEQ ID NO: 90929 - DNA, 486 bp, Enterobacter aerogenes
atgaaatacgatacttccgagctttgcgacatctaccaggaagatgtcaatgtcgtggaaccgctgttttccaactttggagggcggtcgtcgtttggtggacagatcattacggtaaaatgtttcgaggataacgggttgctctacgatctgctcgagcagaatggccgtggtcatattctccttatcgacggcggcggttccgtgcgacgcgcgttaattgacgccgacctggcgcgtctggcggtacagaacgaatgggaagggctggtggtctatggcgcggtgcgccaggttgacgacctggaagatttagatatcggtatccaggcgttagccgccattcctgtggccgctgcaggggaaggtatcggcgaaagcgacgtgcgcgtcaacttcggcggcgttaccttcttctccggcgatcatctgtatgccgacaataccggtatcatcctttccgaggatgcgctggatatcgaataa

SEQ ID NO: 90930 - DNA, 963 bp, Enterobacter aerogenes
atgattaagaaaatcggtgtgttgacaagtggcggtgatgcgccgggcatgaacgcagcaattcgcggcgttgtgcgcgcggcattaacggaaggtctggaagtttttggaatctatgacggttacctcggcctgtatgaagatcgtatggttcagcttgaccgttacagcgtgtccgacatgatcaaccgcggcggtacattcctcggctccgctcgtttcccggaattccgtgaagagcatattcgcgcagtcgccattgaaaatatgaaaaagcgcggcctggacgcgctggttgttatcggcggcgacggttcctatatgggggcgatgcgtctgaccgagatgggtttcccttgcatcggcctgccgggcaccatcgacaacgacatcaaaggtactgactacaccatcggtttctttaccgcgctgagcaccgttgttgaagcgattgaccgcctgcgtgacacctcctcttcgcaccagcgtatctctgtggtggaagtgatgggccgctactgtggcgatctgactctggcggcggcgattgccggcggctgtgagttcatcatggtgccggaagtagaatatacccgcgacgatctggtggctgaaatcaaagccggcatcgcgaaaggtaagaaacacgcgatcgtggccatcaccgagcacatgtgcgacgttgacgaactggctagcttcattgagaaagaaacgggccgtgaaactcgtgcgaccgtgctgggtcacattcagcgcggcggctctccggttccttacgaccgtattctggcttcccgtatgggcgcatatgccatcgaactgctgctgcagggctttggcggccgctgtgttggtatccagaacgaaaagctggttcaccacgacatcatcgatgctatcgaaaatatgaagcgtccgttcaagtctgactggatggattgcgcgaagaaactgtactaa

SEQ ID NO: 90931 - DNA, 897 bp, Enterobacter aerogenes
atgaatcaatcttatgggcggctggtgagtcgcgcggctattgccgcgacggcgatggcctccgtgttacttttgatcaaaatttttgcgtggtggtataccggttcggtgagtattctggcggcgctggtggattcgctggtggatattgccgcctcgctgaccaacctgctggtggtgcgttactcgctacaacctgctgatgaagaacatacttttggccatgggaaagcggaatcgctggcggcgctggcgcagagcatgtttatttctggttcggcgttgtttctgttcctgaccgggatccagcatctgattcgccctgaaccgatgcaggcggcgggcgtcgggatggtggtgacgctgatcgccttgataagcaccctgatgctggtgacctttcagcgctgggtggtcagaaaaacccagagccaggccgtgcgtgcggatatgcttcattatcagtctgatgttatgatgaacggcgctattcttatcgccctcggcctctcctggtacggctggcaccgcgccgatgcgctgtttgcattagggattggcatctatattttatatagcgcgctgcgtatgggttacgacgcggtgcaatcgttattagaccgtgcgcttccggatgaggaacgtcaggaaatcatcagtatcgtgaacagctggcccggcgtcagcggcgcgcacgatctacgaacgcggcagtcagggccgactcgctttattcaaatacatttggaaatggaagataacctcccgctggtacaggcgcacgtgatcgccgaccaggtggagcaggctattttgcgccgtttcccgggatcggatgtcatcatccatcaggatccctgttctgtggtgccgccggcgcggcagggcgttttttga

SEQ ID NO: 90932 - DNA, 504 bp, Enterobacter aerogenes
atgcgcaatgttatcgctgccgtcatggcctcaacgctggcgctaagtgctactagccaagccgctgaagtcgttaccggcgttaactggctccacggtgaagagggagcccagcgcagcggccagagccatatgtttgacggcataagtctaaccgaacagcaacgacagcagttacgggatcttatgcaacgggcgcgccatgaccggctccctgttaatgttagcgaactggagacaatgcatagccttgtcaccgcagataaatttgatgaaagcgctgtgcgcgctcaggcagaaaagatggcgcaggaacaggttgcccgccaggtagaaatggcgaaagtccgcaaccagatgtaccacctgctaactcctgagcagcaagcggttttaaatgctaagcaccagcagcgtatggatcagttgcgtgaggttgcaaggatgcagaaaggctcagccatgatgctttccagtagtagcagtaccgtgcaacccaagtaa

SEQ ID NO: 90933 - DNA, 699 bp, Enterobacter aerogenes
atgaataaaatcctgttagttgatgatgaccgggagctcacctccctgttaaaagagctgctcgatatggaaggttttaatgtgctcgttgcccatgacggtgaacaggcgctggcgcttcttgacgacagcattgatctccttttgcttgatgtgatgatgccgaagaaaaacggtatcgacacgcttaaagaattacgtcagacacaccagaccccggttatcatgctaacggcgcgcggaagcgagctggatcgcgttctcggcctcgaactcggggcggatgactatttgcctaagccgtttaacgatcgcgagctggtggcccgtatacgcgcgattctgcgtcgttcccactggagcgagcagcagcagaccaccgaatccggttctccgaccctggaagtggatgcgttaagcctcaatccgggtcgtcaggaagccaattttgatgggcaaacgctggagctgaccggcaccgagttcaccctgctgtatctgctggcgcagcatctgggtcaggtggtgtcacgtgaacacttaagccaggaagtgctgggcaagcggctgacgccgttcgaccgcgctatcgatatgcatatttccaacctgcggcgtaagctgccggagcgcaaagacggccatccgtggtttaaaacattgcgcggacgcggctatctgatggtttctgcttcatga

SEQ ID NO: 90934 - DNA, 1374 bp, Enterobacter aerogenes
atgattggaagtttaaccgcacgcatcttcgctatcttctggctcacgctggcgctggtgttgatgctggtactgatgttgcccaagctggactcgcgccagatgaccgagctgctggaaagcgagcaacgtcagggcatcatgattgagcagcacgtcgaggccgaactggcgaacgacccgccgaacgacctgatgtggtggcgacgcctgtttcgcgccatcgataagtgggcgccgccggggcagcgactgttgctggtcaccagcgaaggccgcgtgatcggcgcagaacgcaacgaaatgcagatcattcgtaactttatcggccaggccgataatgccgatcatccgcagaagaagcgttacggacgcctggagatggtcggcccgttttccgtcagggatggtgaagataattatcaactttatctcatccgccctgccagtacttcacaatcggacttcatcaacctgctatttgaccgtccgctattactgcttatcgtgacgatgctggtcagcgccccgctgctgctctggctggcgtggagcctggcgaaaccggcgcgcaagctgaaaaacgccgccgacgaagttgcccagggtaacctgcggcagcatccggagctggaagccggtccgcaggagtttctggccgccggggccagcttcaaccagatggtgaccgcgcttgagcgaatgatgaccagccagcagcggctgctgtcggatatctcgcacgagctacgcacgccgttaacccgtctgcagttaggcactgcgttgctgcgccgccgcagcggtgaaagcaaagagctggagcgtatcgaaaccgaagcgcaccggctggatagcatgattaacgacctgctggtgatgtcgcgtaatcaggcgaaaaacgcgctggtcagcgagacggtgaaagcgaatcagctgtggggcgaagtgctggacaacgcggcatttgaagccgaacagatggggaaatccttcaccgttgagtatccgccgggcccctggccgctgtacggtaaccctaatgcgctggaaagcgcgctggaaaatatcgtgcgcaacgcgctgcgctactcgcacacgaaaatttccgtcagtttctcggtggataaagacggaatcacggtcaacgtcgatgatgacggcccgggcgtcagcccggaggatcgcgaacagattttccgtccgttctatcgtaccgacgaggctcgcgatcgcgagtccggcggcaccggtctggggctggcgattgtcgaaacggcgattcagcaacatcgcggctgggttaaagccgacgatagcccgctgggtgggctgcgtttaacaatctggctgccgctgtataagcgtacttaa

SEQ ID NO: 90935 - DNA, 675 bp, Enterobacter aerogenes
atgcattatccggtgaatgtctttgtcggcaaaatcagggactacgacggtagccgccccagcgcaattggcaaaatccaggtcgatggcgaattacagctcggcgatctcgggctggaaggggacgagcaggcggaaaagaaaattcacggcgggccggatcgcgcgctgtgccactatccccgcgagcattacctcgactggatccgcgaattcccgcagcaggccgatctgttctgcgcccccgcattcggcgaaaacctttctaccgaagggctaacggaaaaaaacgtctatatcggcgatatctttcgttggggcgaggcgctaattcaggtcactcaaccgcgctctccctgcttcaaactgaattaccatttcggtattagcgatatggcgcaactgatgcaaaacagcggcaaggttggctggctctaccgcattatcgccggcggccgggtttccagcgatgcgccgctggagctggtatcgcgtctgagcgacgtgagcgtgcatgaggctggtgcgattgcctggcatatgccgtttgacgacgaccagtatcaccgtctgctatcggcggcgggactgtcggtgagctggagcagaaccatgcagaaacggcgtttaagcgggcagatcgaggataattcgcgcagattatgggggaaataa

SEQ ID NO: 90936 - DNA, 621 bp, Enterobacter aerogenes
atgagttatacactgccatccctgccgtacgcttacgatgctctggaaccgcatttcgacaagcagacgatggagatccatcatactaagcatcaccagacctacgttaacaacgctaacgcagcgctggaaagcctgccggaattcgctaacctgtccgcggaagagctgatcactaagcttgatcaactgccggctgacaaaaaaaccgtactgcgtaacaacgcgggcggccacgctaaccacagcctgttctggaaaggcctgaaaaccggcaccaccctgcagggcgacctgaaagccgctatcgagcgtgatttcggttctgtggacaacttcaaagctgaattcgaaaaagcggcagctacccgctttggttccggctgggcgtggctggtgctgaaaggcgacaaactggccgtcgtttctaccgctaaccaggactccccgctgatgggcgaagccatttccggcgcttcaggcttcccgattatcggcctggatgtgtgggaacacgcttactacctgaaattccagaaccgccgtccggactacatcaaagccttctgggacgtggtgaactgggacgaagcagcagcgcgttttgccgccaaaaaataa

SEQ ID NO: 90937 - DNA, 1035 bp, Enterobacter aerogenes
atgaatcatgcgattacgatgggaattttttggcatttaatcggcgccgccagtgccgcctgtttttatgcccctttcaagaaggtgaaacactggtcgtgggaaaccatgtggtcgatcggcgggattgtttcctggctaattctgccgtgggcgataagcgccatgctgctgcccgatttctgggcctactatcgctcatttagcgcttccacgctgctgccggtgtttttgttcggcgcgatgtggggcatcggtaacatcaactatggcctgaccatgcgctatctggggatgtcgatgggtatcggtatcgctatcggcattacgcttatcgtcggcaccttaatgacgccgatcctcaacggccactttgatgtgttgattcacaccaaaggcggacaaatgaccctgctcggcgtgctggtggcggtgattggcgtgggtatcgtcactcgcgccggccagcttaaagagcgcaaaatgggcatcaaagcggaagagttcaacctgaaaaaagggctgatgctggcggtaatgtgcggtattttctccgccggcatgtcatttgcgatgaacgccgctaaaccaatgcatgaagccgccgcggcgctgggcgtcgacccgctgtataccgcgctgccaagctacgtggtgatcatgggcggcggcgcgctggttaacctcggcttctgttttattcgcctcgccaaagtgaaggatttgtcgctaaaagccgacttctcactggcaaaaccgcttatcatcagcaacattctgctttccgcattgggcgggctaatgtggtatctgcagttcttcttctatgcctggggccacgccagtatcccggcgcagtatgactacatgagctggatgctgcatatgagcttctacgtactgtgtggcgggctggttgggctggtgctgaaagagtggaacaacgccggacgccgcccggtcagcgtgctcagcctcggctgcgtggtgattatcatcgccgcgaatatcgtcggcctgggaatggctaactga

SEQ ID NO: 90938 - DNA, 849 bp, Enterobacter aerogenes
gtggcaggtcagctggtgcttcgcaaagatgagttttttgcctccccctcgcaggcggtggcggtggctgaccgctacccgcaaaacgtcttcgccgagcatacccatgaattttgcgagctggtgctggtgtggcgcggcaacggtctgcatatcctcaacgatcgcccgtggcggattacccgcggcgatctcttttatattcgcgcggaagataaacactcttatgcgtcggtcaacgacctggtgctgcagaatattatttattgcccggatcggctgcggctcaattttgactgggcggcgcatattccgggattattcggcacgccgtggcagccgcactggcggatcggcagcagcgggatggcgcaggtcaggcaggtgattaaccagctggagcacgaaagcgcgcggcaggatgcgcaggcggatagcatggcggagctgctgtttgcccaactggtgttgacgctccagcgctatcgctacgccactgataacctggcggcaacgcaaagcgaaacacagctcgataaactgctaacggcgctggccggaagtctgaatcgcccctttaatctggatagcttctgtctgcatgaaggctgcagcgaacgtgcgttacgccagcagtttcgccagcaaacgggaatgacgataactcactatttgcgccagctgcggatctgccatgcgcagtatttactgcagcataccgagcggttaatcggcgagatcgccatgcagtgcgggtttgaggacagtaactatttttcggtggtgtttaatcgggaaattggcatgacgccgggacagtggcggcagcgcagtcgcgccgccgcgtaa

SEQ ID NO: 90939 - DNA, 837 bp, Enterobacter aerogenes
atgaccgtgttgcacagtacggatttctttaaggccggcgtctcggcggtggcgattgaaccgcggcttcctcaagcggctttccctgagcatcaccatgattttcatgagattgttatcgtcgagcagggtacgggcattcacgttttcaacggccagccctataccatcagcggcggttcggtctgctttattcgcgatcacgatcgtcatctttacgaacacaccaataacctgtgtctgaccaacgtgctctaccgcgcgccggatgcttttcgttttctgactggcgtgaaccagctgctgccgcaggagcaggacggtaactatctttcacactggcgggtcaatcagacggtgctgcagcaggtgcggcaaatcgtcggccagatggaaaagatcggccctggcgtcgagccgcataccatcgccagccgtgaaatcctttttatgcagctactggtgctactgcacagcaacagcctggcggaaggcgccggcaaccacgaggcgcggctgaatcagctgatggcctggctggaagaccattttgccgaagagatatgctgggaggaggtagcggcgcagttttcgctctctttacgcaccctgcatcgccagttaaagctgcaaaccgggctgacgccccagcgctacctcaaccgggtgcgcctgatgaaagcgcggcacctgctgcgccacagcgatgatagcgtgacagaaatcgcttatcgctgcggttttggcgacagtaaccatttttcgacgctatttcgccgtgaattcgactggtcgccgcgcgatattcgccaggggcgcgacgctattcttcagtaa

SEQ ID NO: 90940 - DNA, 1467 bp, Enterobacter aerogenes
atgagtattcgtcattgtgtcgccgttgatttaggcgcttccagcggtcgggtcatgctcgcgaattatgcaaccgcgacgcgatcgctgacgctgcgcgaggttcatcgtttcactaaccgcctgcagaaagtggatggctacgattgctgggatatcgatagcctggaagcggaaattcgttgtgggctggtgaaagtatgcgaacaggggatcctgatcgacagcatcggtatcgacacctggggcgttgatttcgtcttgctggataagcgcggccagcgcgtcggcctgccggtttcttaccgcgatagccgcactcacggcctgatggcgcaggcaatcgaacaacttggccgcgccaatatttactgccgcagcggcatccagtttctgccgtttaacaccctttatcaattgcgggcgctggtcagccagcagccggcgctggcggaacaggtcgcccatgcgctgctgatcccagactacttcagctaccgcctgaccggcgcgatgaactgggaatacaccaacgccaccaccacgcaactggtcaatatcaatagcgataactgggatgacgagctgatccgctggagcggcgcgcagccggactggttcggtacgccgacgcatccgggcaatgttatcggccactggatctgcccgcagggtaaccgcatcccggtggtcgccgtcgccagccacgatacggccagcgccgtgatcgcctcgccgctggcggacaaaaatgccgcctatctctcatcgggcacctggtcgctgatgggctttgaaagtaaaacgccttacaccagccagcaggcgctgaaggcgaatatcaccaatgaaggcggcgccgaggggcgttatcgggtactgaaaaacatcatgggcctgtggctgctgcagcgggtactgcaggagcagaacattagcgatctgcaggcgctgattgtcgacacggcgcagctaccggcctgtcgttatctgattgattgcaataacgatcgctttatcaacccggccaatatgagcgccgaaattcaggccgcctgcgcggagtccgcccagccgatcccggtcactcccgccgaactggcgcgctgcatttttgacagcctggcgctgctgtatgcccgggtattgggcgaactggcggcactccgcggtcaccctttcagccagctgcatatcgtcggcggcggctgccagaacgcgctgcttaaccagctatgcgccgatgcctgcggcctgccggtggtggccggccccattgaagcctccacgcttggcaatatcggcatccagctgatgacgctggatgaactgcacaacgtcgatgaattccgtcaggtggtaggcgacaacgcgtcgctaaccacgttcaccccacattcagatagcgaaattgcccgcttcgtcgcgcaatttcagccacaacctacgaaggagctttgcgcatga

SEQ ID NO: 90941 - DNA, 1260 bp, Enterobacter aerogenes
atgaccactcaacttgaacaagcctgggaaattgctaagcagcgctatgccgccatcggcgttgatgccgaagaagctctgcgtcagttggaccgcctgccggtatcaatgcactgctggcagggcgatgacgtggcgggctttgaaaacccggaaggcagcttaaccggcggcattcaggccaccggcaactatcccggcaaagcgcgtaatgcccaggagctacgcgccgatctcgaacaggcgctaagcctgataccggggccgaagcgccttaatctgcacgcgatttatcttgagtccgccacgccagttgcgcgtaacgaaatcaagccggaacactttaagcactgggtggaatgggccaaacgccaccagttggggctcgattttaacccttcctgcttctcacatccgctaagcgccgacggctttacgctgtcgcacgccaatccggagattcgtcagttctggatcgatcactgcaaagccagccgccgcatatccgcttatttcggcgagcagcttgggacgccatcggtaatgaatatttgggtgccggacggcatgaaagatattaccgtcgaccgcttcgccccgcgccagcggctgctgaacgcgctggatgaagttatcagtgaaaaactcgatccggcgcaccatatcgacgccgttgagagcaagctgttcggtatcggcgccgaaagctataccgttggctccaatgaattctacatgggctacgccgccagccgtcaaaccgcgttgtgcctggatgccggccacttccatccgacggaagtcatctctgacaaaatctccgccgccatgctctatatcccgcgcctgctgctgcacgtcagccgcccggtacgctgggacagcgatcacgtggtgctgctggatgacgaaacccaggccatcgccagcgaaattatccgccacaacctgttcgaccgcgtgcatatcggcctcgacttctttgatgcctccatcaaccgcatcgcggcgtgggttatcggtacccgcaatatgaaaaaagccctgctgcgcgcgctgctggagccgacggcgctgctgcgccagctggaaaacgacggtgattacaccgcccgcctggcgctgctcgaagagcagaaatcgctgccgtggcaggccatctgggaaatgtactgccagcgtcacgatacgccggcaggcagccagtggctggaaaacgtgcggacctatgaaaaagacgtgctgagccagcgcggctaa

SEQ ID NO: 90942 - DNA, 825 bp, Enterobacter aerogenes
atgcacaacattatcaattcatggttcgttcagggcatgatcaaagccacctccgacgcctggcttaaaggctgggacgaacgtaacggcggcaatctgacgctgcgcctggatgaagcggatatcgcgccattcaaagccgattttcacccccagccgcgctatatcgccttaagccagccgatgccggaactggctaatcagccgtttatcgtcaccggatccggtaaattcttccgtaatgtgcagctcgatcccgccgccaatctcggggtagtgaaagtggacagcgacggcgcgggctacttcattctgtgggggctgacggaagaagctgtgccgacgtcggaactaccggcacatttcctgtcgcattgcgagcgcatcaaagccaccggcggcaaagaccgcgtgatcatgcactgccatgccaccaacctgattgccctgacctacgtgctggagaacaacagcgatctgttcacccgcaagctatgggaaggcagcaccgaatgcctggtggtgttcccggacggcgtcggcattctaccgtggatggtgccgggcaccgacgagattggccaggcgaccgccggcgaaatgcagaaacattctctggtgctgtggccattccacggcgtcttcggcagcggcccgacgctggatgaaactttcggcctgatcgataccgccgaaaagtccgctgaggtattggtgaaagtctattcgatgggcggcatgaaacagacgataagccgcgaagagttgattgcgttaggccaacgatttggcgtcacgccgctggccagcgcgctggcgctctaa

SEQ ID NO: 90943 - DNA, 1149 bp, Enterobacter aerogenes
atgagctttatgttggcactgccgaaaatcagcctgcatggcgcgggcgcgatcggcgatatggtgagcctggtggcggacaagcagtggggaaaagcgctgattgtcaccgacggccatctggtggaaatgggcctgctcgatagcctgtttcaggcgctggaagcgcatcaactgtcttatcatctgttcgataacgtctttccgaacccaactgaagcgctggttcagcaaggtatcgccgcattccgtgcggcgcagtgcgactatattatcgccttcggcggcggcagcccgatcgataccgctaaggcggtgaaaatcctcagcgctaacccagcgccgtcgacggcctattccggcgtgggcaaagtgaaaaatgccggcgtgccgctggtggcaattaacaccaccgccggaaccgccgccgaaatgaccagcaacgcggtgattatcgatagcgaacgtcaggtgaaagaggtcatcatcgacccgaacatcatcccggatattgccgtcgacgatgccagcgtcatgctggatattccgccgtcggttaccgccgcgaccggtatggatgcgttaacccacgctatcgaagcgtttgtctccgttggcgcccatccgctgaccgacgccaacgcgctggaagcgattcgcttaattcaccagtggctgccgctggccgtcgatgacgggcacaatctgcaggcccgcgagcagatggcatacggccagtatctggcagggatggcgttcaacagcgcaggtcttggtctggtacacgcgctggcgcatcagccgggcgcaacccacaatttgccgcacggcgtttgtaatgccatcctgctaccgattatcgaaaactttaaccgcccgaacgcggtggcgcgttttgcccgcatcgcccaggcgatgggcgtcgatacgcgcggcatgagcgatgaaaccgccagcatggcggcgattaacgcgattcgcgcgttgagcaaacgagtcggtattcctgaaggttttagccagcttggcgtgagtaaggctgatatcgaaggctggctggataaagcgctggccgacccctgcgcgccctgtaacccgcgcagcgccagccgcgacgaggtacgcgagctgtacctggaggcgttatga

SEQ ID NO: 90944 - DNA, 315 bp, Enterobacter aerogenes
atgatccgcaaagccttcgtgatgcaggtcaatcccgacgcccacgaggagtatcggcgccgtcataatcccatctggccggaactggaagcgacgctgaaagcgcatggcgcgcaccactatgcaatctacctcgacaaacagcgccatctgctattcgccacggtggaaattgaatcggaagcccgctggaatgcggtggcggaaaccgaggtctgccaacgctggtggcgctatatgcgcgaggtgatgccgacgaatccggataacagcccgttgagcgctgaactgagtgaagtgttttaccttgcgtaa

SEQ ID NO: 90945 - DNA, 1176 bp, Enterobacter aerogenes
gtggtcaattacctcgatcgcgccaacctgagcatcgcgaacaccaccatcgccagggagtttggcttctctggtactgagatggggctgttattgtcagcgtttctctggccctatgcgctggcgaatttacccgccggctggctggtagaccgtttcggcgcgaagaaaatgttcagcggcgcgctgggattgtggtcagcggtaacgttcttaatgggttttgtgaatacctatagcttcttctatggtttgcgcatgctgctgggcgtggcggagtcaccgttcttcacttccggtatcaagatcacccagagctggttctcggagaaagagcgcgggctgccgacatcgattatcaataccggttcgcaaatcgccaatgcgatagcgccgccggtgctgactattttgctgttatggatcggctggcgcggtatgttcatggttgtcggcctgctcggactgccattgttgctggcgtggcttaaattttatcgcgacccggacgcgcgcgaggcgatgctgataaacaccggcaaagtcatgcgtcccgaaggtgagcagccgaaggtcagctggggcgaactgtttcgccggaaaaccacgtggttcatgattgccggtaacttctgcatcatgtttaccatttgggtttatctgacatggctgccgggatatctggaaacctcgctgggctttagcctcaagcagaccggttttatcgcctcgattcctttctttgccggtattatcggcgtgctgtgtggcgggatgctttctgacagactggtgcgtaaagggatgaacgccgttaccgcgcgtaaagtgccgattgtggcgggtgccgcgctggcggcctgtttcgtgatgccgattccgtttgttgataatagcggcgttgcgatcgccctgctgacgctgggctacttctgttcacaaatgccttccggcgtgatctggacgttagcgaccgatatggcgccgaaagaacaggtcgcctcattgggtgctatccagaactttggcggctttctcggcgcggcgctggcgccgattatcaccggcattattcttgatgctaccgggcactttaccaacgtatttattctcggtgggatactgctgtttatgggcgcctgctgctacggtttctttgtgcgcaaaaatgcctaa

SEQ ID NO: 90946 - DNA, 492 bp, Enterobacter aerogenes
atgatcgtatcgagtctgcaggcgtggcctgcgcaacaggccgcgtttcatccggcgatccgccaggcgctggcgtttatcgccagccaggatttccagcgcttcgcgccggggaaaatcgacctgatccccgggaaacttttctgcctgctgcaggagatggagagcgtgcctttcgcgcaggcacggccggagtcgcacaagcagtttattgatattcagtatctgatttccggcgaggagcggatgggtgtcagccgcgcagaaagcggctgtcctcgcgttaccgaggatcggacgccgcagcaggacatcctgttctggcacgtcgaagatgaggagatgcagataaccctgaagcccggcatgttcgccattttctttccccaggacatccatcgtccctgctgccatccgcgcgatggcgagcggcaacatatccgtaaagcggtgatgaaaatcgatcgcgccttgctggaggagggtttatga

SEQ ID NO: 90947 - DNA, 924 bp, Enterobacter aerogenes
atgaaaacgattaacggtgttgtacccgtcatgctgaccccttttaccgctgacgaccagattgattatccggcgctggtgaagctgatcgactggtatctggcaaaaggcgtggatgcgctttttgccgtctgccaatccagcgaaatgcaatatctcagcctacaggagcgtgtcgagctggcgcgtttcgtggtgcaacgcgtggcggggcgcattccagtcattgcctcgggccatatcagcgatgatctggcggcgcaaaaagaggagttgctggcaatggcgcagaccggcattgatgcgctggtgctggtcactaatcatctcgatccgcgtaatgagggcagtgaagtctttttcgctaccctgcaatcgctgttggcggctttaccttcttccatgccgctggggctgtatgagtgcccggcgccgtatcgccgcctgcttagcgacgacgagttcgcctggtgcgccaacagcggtcgtttcgtggtgctgaaagatgtgagctgcgatctgcctaccgttgagcgccgcgtgcgtctggcgcagggaaccccgctaaaggtcatcaacgccaatgctgcgatcgcctggccggcgatgctggcgggcgccgaaggattcagcggcgtgttcaccaacttccatcccgaactgtatagctggctgtggcgggaaggcaaaaatcagcgggcgctggccgatgaactggcgatatttctgtcgctgggtgcggtaaccgaaacgctgggctacccgaaaaacgccaaaatttaccatcagcgcctcgggaccttcgacagtatcgcttgccgggttaataaagacgatgtgctgagcaaattctgggggctgacggtgatcctcgaccagatccgcgccgggactgaactgtggcagcagcggatcgccggctaa

SEQ ID NO: 90948 - DNA, 1212 bp, Enterobacter aerogenes
atgtttttagaagaacgtagaaagcatatcctgaaatatttaaacgatcatgagcgtggttttgttaattattttgctgcttattttagtgtttcaaaagaaaccattcgcagtgatttaaatattcttgcagaaatggggttggtgcaacgttgttatggcggagcgattatttcccggcacaatttaaaggctgaacttatttctgaaaccggtgatagtttcggcgtgctgctgcagccgattaaccatcggaaacctacggcgagcggtcagcagaaaggaaaatcgatgaacggcaaagtgtgtgtattcggctcatttaatgtggatatcgtggcccgagtggagcgttttccgcgcggcggggaatcgctactggcgctcgccagcagccttgggcccggtggcaagggggcgaatcaggcgacggcggccagtaaagccggcgcgcaggtcccttttgtcgctaaggtgggcaaggatcagtttagccacctggcggccgatcatctcactcgttcagaaatacactcctatacgctttatcaatctgagagcgaacctaccggcaatgccattatttatgtttcgcaggaaaatggcgaaaatatgattgctatttactccggcgccaatactacaataactcataatgagattgaggcgattattcctgaacttagcgcctccgacgttttacttgttcagcttgagaataattttgatgccactcattcgctaataaaaatagccagggaactcggtaagacagtcattctcaatccggcgccatactcggcggaaattatcaaaagcattccttatatcgatgtgattacaccgaatgaaaccgaggcttcattattatccggtatcgacattcacgatgttgatactgccaaagaagccgcgctgcgcatcgctgaattaggcgcaaagaaagtgctgattaccatggggtcgcgcggggcgctgctgctggataatcgccagtttagtcaaattcgcgcctttccggcggtcaccgtcgataccaccggcgctggcgatgcgtttaatggcgcgctcgccgcctcgctggctgccggcaacaccctggttcaggctgcgacctgggcctctgctttcgcctctctggccgtcgagctggagggggcttccaacatgcctgactttgcgcaggcaaatgcccgactccgtaccctctaa

SEQ ID NO: 90949 - DNA, 549 bp, Enterobacter aerogenes
atgacacagcccatcagcgtaattgctaaaagcctgacgcgcgagcgctcgcgcaccggactctcactggcggaggtggcgcgccgcgccgggatagccaaatcgaccctgtcacagctggaatccggcaatggcaaccctagcctggaaacattgtgggcgctgtgcgtggcgctggatattcccttcgcccgtttgctggagccgcaggccaaccagacccaggtgattcgccgcggcgaaggcaccaaagtggttgctgaacaggccaactatcaggccattttgctggcggcttgccctcccggcgcgcgtcgcgacatctatctgctgttgacgcagcccggcgccgatcggatctcgcacccgcacccgcccgggtcggtcgaacatattattatcactcaggggcgcgcgcgcgttggcctcaccgaagcgccagaagagctgggggaaggggattacatctgctacccggccgatcgggaacatctctttcaggcgctggagccggatacccaggcgctgctggtggcagagcaaaattag

SEQ ID NO: 90950 - DNA, 690 bp, Enterobacter aerogenes
atggaaattcgttcgatatggctaaagcgtatgcgttacaaattttcctgtctcagtggggacaccattaaagcaatcgttctggtatgcctggcggtcggtgtggtcggcatgtcttacggttcattagcgatggcctacggttttccgctgtgggtgccgtttgtcctttccattacggtgctggccggcgcctcggagtttatgtttatcggtattgtcgccagcggcggtaaccctctcgccgccgccgccgcaggcttactggtgaacgcccgccacgttccttttggcgtcaccgtgcgcgatctggtcggcgcacgcgccgccagcctgctcggctgccacattatgaatgatgagagcgtggtgttcggcttgtcgcagaaaaccccggagcaacggaaagccgcctactggctctgcggcctgggtgtggcgctcatctggccgctcggtaccctgctgggcgccggggtcgggaaattgttacccgctccagaaaccatcggcctggatgcggtattcccggccatcctgctggcgctggtggtaccggcttttaaaaaacgtaccacactgattcgcgcctgcagcggcgcggttatttcgctggccgccgtgcccttcgcgccggttggattaccggttctgctctcattgtttggcttactggcgaggaaaaaataa

SEQ ID NO: 90951 - DNA, 324 bp, Enterobacter aerogenes
atgggcaatatgacgctgtttatcgccgggatcgcgattctgtcgatcggcacatatctgatgcgtttgggtggggcaaagcttggcagtcgtttagcgttttccgagcgctcgcaggcgctgctttctgatgccgcgacggtgttgctattttccgtggcgctggcgaccaccttttatgaaggcgagcatttttccggcatggcgcgggtacttggcgtcggttttgccgtgttccttgcctggcgcaagatgccgcttatcgtggtgattatcgccgcggcggtggtgacggcgttgctacgcctggcgggtataaactaa

SEQ ID NO: 90952 - DNA, 213 bp, Enterobacter aerogenes
atgaaaagcatcaaaacttttgtcgctgttatcgctctggccgcttctttcggttctttcgccgcgcaatccgtgaccgccaccgcctccactatggacgccgcggaagcgaaaatcgccgctcaggcgcaggctgccggcgcgtcttcttacaccattaccgaagcgtttaacggtaaccgcgtgcatatgaccgctgaactgaacaaataa

SEQ ID NO: 90953 - DNA, 843 bp, Enterobacter aerogenes
atgaaagtgaataagaaccttcctgaacaaatcaaaaatgtgacagatgtcacaggttatcgccaggttaccctctggaaacgtgaggatttgcaacatcctcagccagacgaggtagcagaagaggtacccgtcgctctggtttataacggcatctcgcacgtcgtcatgatggcgacgccacgtgacctggaacatttcgccgtcggtttttccctgtcggaagggattatacaaagccgacaagagatctacgggatggacgtggtacaggcctgtaacggggtagaagtgcaaatcgaactctccagccgccggtttatggggttgaaagagcgccgccgggcgctcgccgggcgtacaggctgtggagtatgtggcgtcgagcagctaaatgatatcggtaagcccgttgagccgctgccctttagccagacctttgcgctctctcatctcgatcgcgggctcaaacagttaaatgaggttcagccaatcggccgcctgaccggctgtacgcacgccgccgcgtgggtgcgccctgacggcgaactggcgggcgggcatgaagatgtaggccgtcacgttgcgctggataaactgctgggtcgccgtagtgcagaaggagagggctggcagcagggcgcagccttagtctccagccgcgccagttatgagatggtacagaaggccgcgatgtgtggggtggaaattctgtttgcggtctccgcggcgacgacgctggcggtggaagtcgccgaacgttgtaatctgacgctggtggggttctgcaggccaggcagagcgacgatttatactcatccgcagcgtcttattgccggttaa

SEQ ID NO: 90954 - DNA, 588 bp, Enterobacter aerogenes
atgcaggtcagcagaaggcagttctttaagatctgcgctggcggtatggcaggcacgacggcagcagcgctgggctttgccccggctactgcgctcgcggaaacccggcagtacaaactgctgcgtactcgcgaaacccgcaacacctgtacgtactgttccgttggctgcgggctattgatgtatagcctcggcgacggtgcgaaaaacgccaaagcatccattttccatatcgaaggcgatccggatcatccggtaaaccgtggtgcgctctgcccgaaaggggccggtctggtggactttatccattctgaaagccgcctgaaattcccggaatatcgcgcgccaggttctgataaatggcagcaaatcagctgggacgaagcgttcgatcgcatcgcgaagctgatgaaagaagaccgtgacgccaactttatcgcccaaaacagcgccggcaccaccgttaaccgttggctgaccaccggtatgctgtgcgcctccgcttccagtaacgaaaccggctatttaacgcagaaattcacccgcgccctcgggatgctggcggtggataaccaggcgcgtgtctga

SEQ ID NO: 90955 - DNA, 2415 bp, Enterobacter aerogenes
atgaccaaccactgggttgatattaaaaacgccaacctggtcgtagtgatgggcggtaacgccgcagaagcgcatccggtggggttccgctgggcgatggaagccaaaattcataacggcgccaagctcatcgttatcgatccgcgctttacgcgcacggcgtcggtggctgatttctataccccgattcgttccggtaccgacataaccttcctgtcgggcgtcatcctgtatctgctgaataacgaaaaattcaaccgtgaatacaccgaagcctataccaacgccagcctgatcgtgcgtgaggactacagctttgatgatggtctgttcagcggctacgatgccgaaaaacgccagtatgacaaaaccagctggaactatgaactggatgaaaacggcttcgccaaacgcgataccacgctgcagcatccacgctgcgtctggaatctgctaaaacagcacgtttcccgctatacgccggatgtggtcgaaaacatctgtggtacgccgaaggccgatttccttaaagtttgcgaatatattgcagaaaccagcgcgcacgataaaaccgcgtcgttcctgtatgccctcggctggacccagcactccatcggcgcgcagaacattcgcaccatggcgatgatccagttgctgcttggcaacatggggatggcaggcggcggcgtcaatgccctgcgcggtcactccaacatccagggtctgaccgacctcggcctgctctcaaccagcctgccgggttacatgtcgctgcctaatgaaaaacaggccgacctgcagacctacctgagcgccaacacgccaaaaccgctgttgaaagatcaggtgaactactggggcaactatccgaagttcttcgtctccatgatgaaagccttcttcggcgataaagctacggcggaaaatagctggggctttgactggttgccgaagtgggataagagctacgacgtgctgcagtatttcgagatgatgaatcagggcaaagtgaatggctacatttgccagggctttaacccggtcgcctcgttcccgaacaaaaataaggtagtggcttccctgtcgaagctgaagttccttgtgaccatcgacccgctcaacactgaaacgtccaccttctggcaaaaccacggtgagtccaacgatgttgatccggcgaaaatccagaccgaagtgttccgcctgccgtccacctgcttcgccgaagaaaacggttctatcgtcaactccggccgctggctgcagtggcactggaaaggcgcagacgccccggggatcgccgtgaccgatggtgaaatcctcgccggtatcttcacccgcctgcgtaagatgtatgccgaagaaggcggcccaacgccggagccggtgctcaacatgacgtggaactactccacgccgcacgagccggcgtctgaagaagtggcgatggaaagcaacggtaaagcgctggcggatatcatcgatccggcaaccggcgcggtaatcgttaagaaagggcagcagttgagctccttcgcacagctacgcgacgacggcacgacttccagcggctgctggatcttcgccggtagctggacgccggaaggcaaccagatggcgcgccgcgataacgccgacccgtcaggcctcggcaatacgctgggctgggcctgggcatggccgctaaaccgccgcattctgtataaccgcgcctccgcggacccgcagggtaaaccgtgggatccgaagcgtcagttgctgaaatgggacggcgcgaaatggggcggagtggatattccggattacagcgccgccgcccctggcagcgacgtcggtccgtttatcatgcagcctgaagggatggggcgtctgttcgctatcgataagatggctgaaggaccgttcccggaacactacgaaccgtttgagacgccgttggggactaacccgctgcacccaaacgtggtctctaacccggccgctcgcgtctttaaaggcgatctcgagcagatgggcaaggccgagaagttcccgtacgtcggcaccacttaccgcctgaccgagcacttccactactggaccaaacacgcgctgcttaacgccatcgcgcagccggaacagtttgtggagatcggcgaaaaactggcgaataagctcggcattggccacggcgataccgtgaaggtctcctctaaccgcggctatatcaaagccaaggcggtggtgaccaagcgtattcgtacgctgcaggttcacggtaaagaggtggataccatcggtattcctattcactggggctacgaaggcgtggcgaaaaaaggctttatcgccaatacgctgacgccgtttgtcggcgacgccaacacgcagacgccggagtttaaggccttcctcgtgaacgtggaaaaggtgtaa

SEQ ID NO: 90956 - DNA, 903 bp, Enterobacter aerogenes
atggcttatcaatcgcaagatattattcgtcgttccgcgactaacggtttcactcccgcgcctcaggcgcgggaccaccagcaggaagtggcgaagcttatcgacgttaccacctgcatcggctgtaaagcctgccaggtggcctgttccgaatggaacgatctccgtgacgaagtgggtaacaacgttggggtgtatgacaacccggcggacctgaccgccaagtcatggacggtcatgcgcttctcggaagtggaacaaaacgacaagctggaatggcttattcgtaaagatggctgcatgcactgcgctgacccgggctgcctgaaggcctgtccgtcagaaggcgcgatcattcagtacgctaacggcatcgtcgacttccagtctgagcagtgtatcggctgcggctactgcatcgcaggttgcccgttcgatgtaccgcgcctgaacccggaagacaaccgcgtctacaaatgtacgctgtgcgtagaccgcgtgactgtcggccaggagccggcctgcgtgaaaacctgcccgaccggcgctatccactttggttcgaaagaggatatgaaaacgctggccggcgagcgcgtcgcagagctgaaaacccgcggttatgacaaggcgggtctgtacgatccggctggcgttggcggcacccacgtgatgtacgtgctgcaccatgccgataaaccgaatctctaccacggtctgccagagaatccggaaatcagccaaacggtgaaattctggaaaggtatctggaaaccgctggcggcggtcggctttgctgcgaccttcgcagccagtatcttccactacgtcggcgtcggtccgaaccgcgcagatgaagaagaagacaacctgcatgaagagaaagacgaggtgcgcaaatga

SEQ ID NO: 90957 - DNA, 627 bp, Enterobacter aerogenes
atgagaaaacgtgacaccatcgtgcgctacacggcgccggaacgcatcaaccactggataaccgccttctgctttattctggcggcggtaagcgggttaggctttttcttcccgtcgtttaactggctgatgcatattctcggtacgccgcagctggcgcgtattctccacccgttcgtcggggtggtgatgttcgcgtcgtttatcatcatgtttttccgttactggcatcacaacctaatcaatcgggatgatatcttttgggcgaagaatattcgtaagatcgtcgtcaacgaggaagtaggcgataccgggcgttataacttcggccagaaatgcgtattctgggcggcgattattttcctggtgctgctgctggtaagcggcgtgatcatctggcgtccgtactttgcgcctgcattctcaatcccggtgatccgattcgcgctgatgctgcattcttttgccgcagtcgcgttaattgtggttatcatggtgcatatctacgccgccctttgggtgaaaggcaccattaccgcgatggtggaaggctgggttaccaaaacgtgggcgaagaaacatcacccgcgctggtaccgtgaagtccgccagaaacaggaaaaatag

SEQ ID NO: 90958 - DNA, 930 bp, Enterobacter aerogenes
atgagtattcgcataatcccgcaagacgagctgggttcgagcgagaaacgcacggcggaagcaattccgccgctactgttccccagactgaagaatctttataaccgccgcgcagagcgcctgcgcgagctggccgccaacaacccgctgggcgattacctgcgctttgccgcgctgatcgctcatgcgcaggaagtggtgctgtacgaccatccgttgcagatggatctgactgcccgcattaaagaggccaacgatcagggcaagccgccgctggatattcacgtattgccgcgtgataaacactggcacaaactgctgcattcgctgatcgccgagctgaaaccggagatgagcggcccggcgctgtcggttatcgagaatctggaaaaagcttccgggccggaactggaagagatggccagcgcgctgtttgcttccgatttcgcctcggtcagcagcgacaaagcgccgtttatctgggccgcgctgtcgctgtactgggcgcaaatggccagcctgatcccggggaaagcgcgcgccgaatacggcgagcatcgccagttctgcccggtttgcggctcgatgccggtctccagcatcgtgcaaatcggcaccactcaggggctgcgctatctgcactgcaacttgtgtgaaaccgaatggcatgtggtacgcgtaaaatgcagcaactgcgaacagagccgcgacctgcactactggtcgctggataacgagcaggcggcggtgaaagccgaaagctgcggcgactgcgggagctacctgaagattatgtatcaggagaaagacccgaaagtcgaagccgttgccgacgatttagcctcgctggtactcgatgctcgcatggaacaggaaggcttcgccagaagctcaattaacccgttcatgttccccggcgaaggggagtaa

SEQ ID NO: 90959 - DNA, 918 bp, Enterobacter aerogenes
atgacgttggaaaaaggtattgcttcgctggttgaggagtttattgctgcggggcggccatcatcacgagcacagagtattgatgaccggagaaacggctatctcgccagcgccgttctcgctggggcaacggaaacgcgtgtgcaggttgaagacatcacgctcgatggcatgaccttgcgcgtcgtctcgccgccaaaaagcaacggcttgctacccaccattgtgtattaccacggcggctgttttgtgagcggcggctttgccacccatgacaaccaattgcgccagcttgcctggttcagtgggtgccgggtgatcgccgtgcagtaccgtctggcgccggagtacacttttccggcggcgcacgatgatgcggaacgaggcgccaacattatctatcggtatgcgcagcggcttggcgttgacgccgcgcgcatcacgatggccggcgacagcgccggcggccacctcgccctggtcactgcgctacgcctgaaagcggcgggagtatggcaacctgcgcagcttatcctgatttaccctatgctcgacgctaccgccagcatggcaagctacgccagcaatggcgaggattacatcattacccgggatacgctgcttagcggctacgaaatgtatttagcggccacacccgctacccatccggaagccagtccgctgtggcgcgaagattttaacgggctgccgccggttcatatcctgacggccgaatttgatcctttgcgcgatgagggagaagcgctgtaccggcggttaatagcacaagggatagaaagcacctgccagcgctatctgggcgtcattcacggtttctttcagttaggcgggataagcctcacggcaaagcaggcgatgcgcgatatcgcctggcgtacgcaaacgccaggccaataa

SEQ ID NO: 90960 - DNA, 942 bp, Enterobacter aerogenes
atgtatcaccttcgtgtaccgcaaacagaagaagagttagaaagctattatcagttccgctgggagatgttgcgtaagccgctgcatcagcctaaagggtcggaacgcgacgcctgggatgccatggcgcatcaccagatggtcgtcgatgaagagggcaatctggttgccgtcggccggctttatattaatgcggagaatgaagcctcgatccgttttatggccgttcatccttccgttcaggataaaggtttaggcacccttatggcgatgacccttgagtcagtcgcccgtcaggaaggggtgaagcgggtgacctgtagcgcccgtgaagatgcgatggagtttttctctaagctgggctttgtgaaccagggggaaatcaccacgccgacaacgacgccgattcgccacttcttgatgattaaacccattgcttcactggacgacatcctgcaccgcggcgactggtgcggccaactgcagcaggcctggtatcagcatattccgctgagcgaaaagatgggggtgcgcatccagcagtacaccgggcaaaaatttatcaccaccatgcccgaagcggggaaccagaatccgcaccatacgttatttgccggcagcctgttttcgctcgctaccttaaccggctgggggctaatctggttaatgctgcgcgagcggcaccttggcggcacgattatcctggccgatgcgcatatccgttacagcaagccgatcagcgggaggccgaatgccgtggccgatttgggctcgctaagcggcgatctcgatcgcctggcgcgcgggcgtaaggctcgcgtgcagcttcaggtcgaactgttcggtaacgataagctgggcgccgtttttgagggaacctatatcgtactgcccgcgaagccgttcggttcgtatgaagagggcgggaacgaggaagagtaa

SEQ ID NO: 90961 - DNA, 438 bp, Enterobacter aerogenes
atgattgcattaattcaacgcgtatcccgtgcaagcgttaccgtggagggtgaagtgacgggtgaaatcggtccgggactactggtgctgctgggcgtcgagaaagacgatgacgaacagaaggccaatcgtctgtgtgaacgggtgctcggctatcgcattttcagcgacgccgaaggcaaaatgaaccttaatgtccagcaggcgggcggcagcgtgctggtagtttcgcagtttacgctagcggccgataccgagcgcggcatgcgcccgagtttttccaaaggcgcggcgccggacagagcggaagcgctgtatgaatactttgttgagcgctgccgccaacaagaaatgaatactcagaccgggagattcgctgcggatatgcaggtctcgctggtaaacgatggtcccgtgaccttttggttgcaggtatga

SEQ ID NO: 90962 - DNA, 861 bp, Enterobacter aerogenes
atgctaaaaagcgttcatcaaaaaaccaaataccataccaggccgctggtggcctggcttaagctgctgtggcggcgaattgaagaagacaacatgacgacgttggcggggaatctggcctacgtgtctttacttgcgctggtaccgctgatcgccgtggtttttgccctgtttgccgcctttccgatgttctccgacgtcagcgtgcagatccgccattttatctttgccaacttcattccggcgaccggcgatgtcattcagggatatatcgaacagtttgtggcgaactccagcaggatgacggccgtcggcgcctttgggttaattgtcacctcattactgctgatgtattcgattgatagcgcgctgaacaccatctggcgcagcagtcggacgcggccaaaaatctattcatttgcggtctattggatgatcctgactctcgggccgctgttggctggcgccagtctggcaatcagttcctatcttctctcactacgctgggccagcgatctcaatagcgtcattgatgatgtactccgtatattcccgctaatcttatcgtgggcggcgttctggatgctttatagcattgtgcccaccacccaggtacgcaatcgcgatgcggtaatcggctcgctggtggcggcactgctttttgaagccggtaaaaaggcttttgctttatatatcaccatgtttccgtcataccagctgatttatggcgtgattgcggtagtacccattttgtttgtctgggtttactggacctggtgtatcgtcttgcttggcgctgaaataactgtcactctcggtgaataccgcaaactcaaaaaagaagaaacagaacaaccatga

SEQ ID NO: 90963 - DNA, 600 bp, Enterobacter aerogenes
atgctctatatctttgatttaggtaatgtgattgtcgacattgacttcaaccgggtgctcggaacgtggagcgatttgacccgcatcccgctggcgacgctaaagcaagactttgttatgggcgatgccttccaccagcatgaacgcggggagatcagcgatgaagagtttgccgctgcaatgtgtcatgaaatgaacatgccgctgagctatgaacagtttgcccacggttggcaggccgtttttgtcgccttgcgtccagaagtcaccgacatcatgcaaaaacttcgcgaccaggggcaccgcgtggtcgtactctcgaacaccaaccgattacataccactttctggccaagcgaatatccacaagtacgtgctgccgcagatcatgtgtatctctcacaagagatggggatgcgcaaacccgaaacgcgtatctaccaaagcgtgctgcaggcggaaggattttcgccgcaagacgcggtctttttcgacgataacgccgataatatagctggggctaaccagttggggatcaccagtattctggtcacggataaggagaccatccccaactactttgcgaaacagctatgctaa

SEQ ID NO: 90964 - DNA, 1824 bp, Enterobacter aerogenes
gtgatcgaaaatctgcgtaatatcgccatcatcgcgcacgtcgaccatggtaaaactaccctggttgataagctgctacagcaatccggtacgttcgacgcacgtactgaagcacaagaacgtgtgatggactccaacgatttggagaaagagcgtgggattaccatcctcgctaaaaacactgcaatcaaatggaatgattaccgtatcaacatcgttgataccccagggcacgccgacttcggaggtgaagttgagcgtgttatgtccatggttgactctgtgctgctggtggttgatgcctttgacggcccgatgccgcagacgcgctttgttaccaaaaaagcgtttgctcacggtctgaagccgatcgtggtcatcaacaaagttgaccgtccgggcgcgcgtccggattgggttgtcgaccaggtattcgacctgttcgttaacctcgacgcgaccgacgaacagctggacttcccgatcgtttacgcttccgcgctgaacggtatcgcgggtctggaccacgaagacatggctgaagacatgaccccgctgtaccaggcgattgttgaccgtgtaccggcgccggacgttgaccttgacggtccgctgcagatgcaaatctcccagctcgactacaacaactacgttggcgtaatcggcattggtcgcatcaagcgcggtaaagtgaagccgaaccagcagatcactatcatcgatagcgaagggaaaacccgtaacggtaaagtcggtaaagtactgactcacctgggtctcgagcgtatcgagagcgacgtagccgaagccggcgacatcatcgcgatcaccggtctgggcgagctgaacatctccgacaccatctgcgacccgcagaacgtcgaagcgctgccggcactgtctgttgatgagccgaccgtatctatgttcttcaacgtcaacacctctccgttctgcggtaaagaaggtaagttcgttacctctcgccagattctggaccgtctgaacaaagagctggtgcacaacgttgcgctgcgcgttgaagaaaccgaagacgccgatgcgttccgcgtttctggccgtggcgaactgcacctgtctgttctgattgaaaacatgcgtcgtgaaggtttcgagatggcggtttcccgtccgaaagttatcttccgcgaaatcgatggccgtaaacaagagccgttcgaaaacgtaacgctggacgtcgaagagcagcaccagggttctgtcatgcaggcgctgggtgagcgtaaaggcgacctgaaaaacatgaatccagacggtaaaggccgcgtacgtctcgactacgtgatcccaagccgtggtctgatcggcttccgttcagagttcatgaccatgacttccggtaccggtctgctgtactccaccttcagccactacgacgatgttcgtccgggcgaagtgggccagcgtaacaacggcgtactgatctctaacggtcagggtaaagcggttgcgttcgcactgttcggcctgcaggatcgcggtaagctgttcctcggccacggcgctgaagtttacgaaggtcagattatcggtattcacagccgttctaatgacctgacggtaaactgcctgaccggtaagaaactgaccaacatgcgtgcgtccggtactgacgaagcaacggttctggttccgccggttaagatgaccctggagcaggctctggagttcatcgatgacgacgaactggtagaagttactccgacgtctatccgtatccgtaaacgtcacctgaccgagaacgatcgtaaacgcgctatgcgcggtgcgaaagaagagtaa

SEQ ID NO: 90965 - DNA, 1410 bp, Enterobacter aerogenes
atgtccgctgaacacgttttgacgatgctgaacgagcacgaagtgaagtttgtcgatctgcgcttcaccgataccaaaggtaaagaacagcacgtcacgattccttcccatcaggtaaatgccgaattctttgaagaaggcaaaatgtttgatggctcctcgattggcggttggaaaggtattaatgaatccgacatggtcctgatgccggatgccaccacggcgctgatcgacccgttctatgaagaaccgacgctgatcatccgctgcgatatcctggaaccaggcaccctgcagggttacgaccgcgacccgcgctctatcgccaagcgcgctgaagagtacctgcgcgccaccggcatcgccgacaccgtgctgttcgggccggaaccagaattcttcctgttcgacgacatccgctttggcgcatccatctctggttcccacgtggccattgacgatatcgaaggcgcatggaactcttctaccaaatacgaaggcggcaacaaaggccaccgtccgggcgtgaaaggcggttacttcccggttccgccggtagactcctctcaggatatccgttctaccatgtgtatgatcatggaagagatgggcctggttgttgaagctcaccaccacgaagtggcaactgccggtcagaacgaaatcgctacccgcttcaacaccatgaccaaaaaagcggacgaaattcagatctacaaatatgttgtacacaacgtcgctcaccgtttcggtaaaaccgcgaccttcatgccaaaaccaatgtttggcgataacggttccggcatgcactgccacatgtccctgtccaagaacggcgtaaacctgttctccggcgacaaatacgcgggcctgtctgagcaagcgctgcactacatcggcggcgttatcaagcacgctaaagcgatcaacgccctggcgaacccgaccaccaactcctacaagcgtctggtcccgggttacgaagcgccggtcatgctggcttactccgcccgtaaccgctctgcttccatccgtattccggtagttgcctcgccgaaagcgcgtcgtatcgaagtgcgcttcccggacccggctgccaacccgtacctgtgcttcgccgcgctgctgatggctggcctggacggtattaaaaacaaaattcaccctggcgatgcgatggacaaaaacttgtacgatctgccgccggaagaagcgaaagaaatcccgcaggttgcaggttctctggaagaagccctgcaggctctggacgcagaccgcgagttcctgaccgcaggcggcgtcttcactgacgaagctatcgatgcttacatcgccctgcgcattgaagaaaacgaccgcgtacgtatgactccgcacccggttgagttcgaactgtactacagcgtctga

SEQ ID NO: 90966 - DNA, 1050 bp, Enterobacter aerogenes
atggcaacaggcacacagcccgatgctgggcagatcctcaactcgctgatccacagtatcttattagtcgatgacgacctcgcggtgcattacgctaacccggctgcccagcagttactggcgcaaagttcgcgtaaattattcggtacgccgctgccagaattgctgagctacttttcgttaaacattggcctgatgcaggaaagcctgcaggcgggtcagggcttcacggataatgaagtgacgctggtgattgacggccgctcgcacattctctccctcaccgctcagcgcctgcctgaaggctatatcctgcttgagatgtcgccgatggataatcagcgtcgtttgagccaggaacagctgcagcatgctcagcaggtggcggcgcgcgatttagtgcgcggtctggcacatgaaattaaaaacccgctcggtggcctgcgcggtgcggcgcagctattgagtaaagcgctaccggatcccgcgctgatggaatatacccaggtgattattgaacaggccgacaggttacgtaacctggtcgatcgcctgctggggccgcagcatcccggtatgcatatcacggaaagcattcataaagtcgcggagcgcgtggtggcgctggtctccatggagttgccggataacgtcaaactgatccgcgattacgacccgagcctgcctgagctggcccacgacccggaacaaatcgagcaagtgttgctgaatatcgtgcgcaacgcgctgcaggccctggggcccgaaggcggcgaaatcatcctgcgcacccgtaccgcctttcagctcacgctccacggcgtacgttaccgtctggcggcgcgtatcgacgtggaagataatggtcccggtatcccaccccatctgcaggatacgctgttttaccccatggtcagcggccgcgaaggcggtaccggtcttggcctttctatcgcccgcagtcttatcgatcagcactccggcaaaattgaatttaccagttggcctggccataccgagttttcggtatacctgcctattcggaaatag

SEQ ID NO: 90967 - DNA, 1410 bp, Enterobacter aerogenes
atgcaacgagggatagcctgggtagtcgatgacgatagctccatccgttgggtgcttgaacgcgcactcaccggagcgggtctaagctgtaccacatttgagagcggcaatgaggtgcttgatgccctcaccaccaaaacgccggacgttttactctccgacattcgcatgcctgggatggacggtctggcgctgttaaagcagattaaacaacgccatccgatgcttccggtcatcattatgaccgcacactcggatctcgatgccgccgtcagcgcctatcagcagggcgcctttgattacctgccgaaaccttttgatattgatgaggcggtggcgctggttgaccgtgcgattagccattatcaggagcagcagcagccgcgtaatacgccggtcagcagcccgacagccgatattattggcgaagcgccggcgatgcaggatgtgtttcgcatcattggccgcctgtcacgctcctcaatcagcgtactgatcaacggcgaatcaggtaccggtaaagagctggtcgcccacgcgctgcatcgccacagtccacgcgccaaatcgccgtttatcgcccttaacatggcggccattccgaaagatttgattgaatcggaactgttcggccatgaaaaaggggcttttaccggcgccaataccgtccgtcaggggcgttttgagcaggccgatggcggtacgctgttccttgatgaaattggcgatatgccgctggatgttcagacgcgactgctgcgcgtgctggctgacggccaattttatcgcgttggcggctatgcgccggtgaaagtcgatgtgcggattattgccgcgacccaccagaaccttgagctacgcgtgcaggaaggaaaattccgtgaagatttgttccatcgcctgaacgtgattcgcgtgcatttgccgccgctgcgcgaacgccgggaagatattccgcgcctggcgcgccacttcctgcagattgccgcccgcgaactgggcgtcgaagccaagcagttgcatccggaaacggaagcggcgctgacgcgactggcctggcccggtaacgtgcgacagctggagaacacctgtcgctggctaacggtgatggcagcaggccaggaggtattgacccaggatctgccgtccgagctgttcgaaacgtcgattcccgatagcccaacgcagatccaaccggatagctgggcgacgctgctggggcaatgggctgaccgtgccctgcgttccggtcatcaaaacctgctatcagaagcgcagccggagatggagcgtgcattgctcaccaccgcgctacgtcatacgcaagggcataagcaggaagccgctcgtctgctgggctgggggcgaaatacgttaacgcggaagctaaaagagctgggaatggaataa

SEQ ID NO: 90968 - DNA, 1374 bp, Enterobacter aerogenes
atgtctgagcagttaatcgactgggatctggcccttatccagaaatataactattccgggccgcgatatacctcgtatcccaccgcgctggagttttctccggcgttcggcgctgctgattttgccgccgccgtcgcccgctacccgcagcggccgctgtcgctgtacgtccatatcccgttctgccataagctctgctatttctgcggctgtaataagattgtcacccgtcagcagcataaggccgatcagtatcttgatgtccttgagcaggaaattattcaccgcgcgccgctttttgccggccgtcaggttagccagctgcactggggcggcggtacgccaacctatctcaacaaagcgcaaatcagccgcttgatgaatctgctgcgcgaccactttaacttcaacgccgatgcggaaatctcaattgaggttgatccgcgtgaaatcgaactggatgtactggatcatttacgatccgcagggttcaaccgtctgagcatgggggtgcaggatttcaataaagaagtacagcgcctggtgaaccgtgaacaagatgaagaattcatctttgcgctgctgcgtcatgcgcgtgagattggcttcacatcgaccaacatcgatttgatttacggtctgccgaagcaaacgccggaaagctttgccttcacgctgcagaaagtggctgaactcaacccggaccgtctgagcgtctttaactacgcgcatctgccaacgttattcgctgcgcagcgcaaaattaaagacgcggatttaccgagcgcagagcagaaactggatatcctgcaggaaaccatcgcttcgcttaccaaagcgggctatcagtttatcggcatggaccactttgcccgcccggacgatgaactggcgattgcccaacgtgaaggcgtgctgcaccgtaacttccaggggtacaccactcaaggtgataccgatctactcggaatgggcgtgtcggcgatcagtatgattggcgactgctatgcgcagaaccagaaagagctgaaacagtattatcagcaggtcgatgaaagcggcaccgcgctgtggcggggtattgcgttgacccgcgatgattgcatccgccgggatgtcattaaggccctgatttgtaacttccgtcttgagttcgcggcggttgaagcgcagtgggatcttatcttcaacgattactttgccgaagatatgaaattgctggcgccgctggcgaaagatgggctggtggatgtggatgaaaaaggaatacaggtcacggcaaaagggcgtctgttgattcgtaacatctgtatgtgcttcgatgcctatttgcgacagaaagcgcgcctgcagcagttctctcgcgttatttaa

SEQ ID NO: 90969 - DNA, 504 bp, Enterobacter aerogenes
atgaaaaaaccggcatccgcatcgcgcggtaaagcacgtggtaagtcgcgtgaagagttgaaccaggaagcacgcgaccgtaaacgtcagaaaaaacaccgcggccatgccgcaggcagccgcaccagcggcggcgatgctgcttcagcaggcaaaggccgcagccagcagcaggacccacgcattggcagcaaaaaaccgatcccgctgggcgtgacagaaagcaccccggccgttaagcagcacaaaccgaagagcgagaaacctatgctttcaccgcaggctgagctggatttgctggagaatgatgagcgcctggacgcgctgctggaacgtctggaagagggcggtaccctgaatgctgaagagcaggcctgggtcgatgccaaactggatcgtattgacgcgctgatgcagcagcttggcctctcctatgacgacgaggacgaggaagaagaagagcgtcaggaagatatgatgcgtctgctgaagggtggaaactaa

SEQ ID NO: 90970 - DNA, 633 bp, Enterobacter aerogenes
ttgaccaactggaattatcaacagacgcattttgtcacgagcgcgcctgatatccgccatcttccatccgataccggaatcgaagtggcattcgctggccgctcaaatgcgggcaaatccagcgcccttaatacgctgactaaccagaaaagcctggcgcgtacgtcaaaaacgccgggtcgtacccagcttatcaacctgtttgaggttgcggaaggtaaacgcctggtcgacttgccggggtatggctacgcgcaggtgccggaagagatgaaaatcaaatggcagaaggcgctgggtgagtatcttgaaaaacgtctgtgcctgaaaggcctggtggtattgatggatatccgtcatccgctgaaagatctcgatcagcagatgatcgaatgggcggtagaaagcgatattcaggtgctggtcctgctaaccaaagccgataagctcgccagcggcgcgcgtaaagcgcaggtcaatatggtgcgtgaagcggtacaggccttcaatggcgatatccaggttgagcctttctcttcgctgaaaaaaactggcgtggataaattgcgtcagaagctggatagctggtttaacgacatcccgccgcaagaagccgccgaagacgcagagtaa

SEQ ID NO: 90971 - DNA, 2781 bp, Enterobacter aerogenes
atggttcagatcccagaaaaccctctcatcctcgtcgacggctcctcttacctatatcgggcttaccacgccttcccaccgctaaccaatagcgccggggagcctaccggcgctatgtacggtgtgctgaatatgttgcgtagcctgatcctgcagtatcagccgacgcatgccgtcgtggtatttgatgccaaagggaaaaccttccgtgacgaattgtttgagcattacaaatcacatcgtccgccgatgccggacgatctacgtgcgcagattgaaccgctgcacaagatggtgaaggcgatggggctgccgctgatggcggtgcctggcgttgaagcggatgacgttatcggcacgctggcccgcgaggcggaaaaagtgggccgcccggtactgatcagcaccggtgataaagatatggcgcaactggtgacgccgggcattaccttaatcaacaccatgaccaacactatcctcggcccggaagaggtcgtgaataagtacggcgtaccgccggaactgattattgatttcctcgcgctgatgggcgactcctcggataacatacctggcgtcccgggcgttggggaaaaaacggcgcaggcgctactgcagggtttgggtggtctggatacgctctatgcagaaccggaaaaaatcgccgggctgaccttccgcggcgcgaaaacgatggcggcgaagctggagcagaacaaagaggtggcctacctctcttatcaactcgcgacgataaaaaccgatgttgaactggatctgggttgcgaagagctgttagttgcgcagccggcggcagatgagctgctggcattgtttaagcaatatgaattcaaacgttggatcaccgatgtcgaatccggcaaatggctacaggggaaaggcgctaaaccagcggcgaaaccagctgaagccgcggtaattatggaagaagaggtcgccgcgacgctctcttctgagtattatgtgacaatcctggatgaagcgacgctggtcgaatggattgccagattgaagaaagcgccgctattcgcttttgataccgaaacggatagcctcgataacatttccgccaatatggtgggtctgtcattcgcgattgagcctggcgtcgcggcttatgtgccggtggcccatgattatctcgacgcgccggaccagatcccacgtgaacgcgtgctggagctgctcaagccgctgctggaagatgacaaggtgctaaaagtagggcaaaacctgaagtacgatcgcggcatcctggccaactatgacattgaactgcgtggtattgccttcgacaccatgctggaatcctacaccctcgatagcgtcgcgggtcgacatgatatggatagcctgtccgatcgctggttgaaacacaaaaccatcacctttgaagagattgccggtaaggggaaaaatcagctcacctttaatcagatcgcgctggaagaggccgggcgttacgccgcggaggatgctgacgtgacgctgcaactgcatctgaagatgtggccgcaactgcagcagcatgaaggtccgctgaatatctttaaaaatatcgagatgccgctggtgccggtgctgtcgcgggttgagcgcaacggcgtgaaaatcgatccggcggtgcttcacgcgcattcgcaggagatcgctaagcgtctggttgaactggaacaacgcgcccatgaaattgccggtgaggagttcaacctctcttctaccaaacagttgcaaactatcctgtttgaaaagcagggcatcaagccgctgaagaaaacgcctggcggtgcgccgtcgacttctgaagaggtgctggaggaactggcgctggattacccgctgccgaaggtgatcctcgagtatcgtgggctggcgaagcttaaatcgacctataccgataagctgccgctgatgattaacccgaaaaccggtcgtgttcatacttcgtatcatcaggcggtgacggcgaccgggcgtctctcttcgaccgatcctaacctgcagaatattccggtacgtaatgacgaaggtcgtcgtattcgtcaggcgtttattgcgcctcaggactatctgattgtgtctgccgactattcgcagattgagctgcgcatcatggcgcacctgtcgcgcgatgaggggctgctgaaggcgtttgcggaaggtaaggatattcaccgcgccaccgcggcagaggtatttggcttaccgttagaaagcgtcagtaatgaacagcgccgtagcgcgaaggcgattaacttcggcctgatttacggtatgagcgcatttggtctggcgcgtcagctgaatatcccgcgtaaagaagcgcagaagtacatggatctctatttcgagcgctatccgggcgtactggactatatggaacgtacccgcgcgcaggcgaaagagcagggttatgtcgaaacgctggaagggcgtcgtctgtatctgccggatatcaaatccagcaatggcgcgcgccgcgcgggcgcggaacgtgcagcgattaacgctccgatgcagggaacggcggcggatattattaagcgggcgatgattgccgttgatgactggctgctgagcgaaaaaccgcgcgtgcggatgatcatgcaggtgcacgatgaactggtgtttgaagtgcacaaagacgatctggacagcgtatcgaagaaggtgcatgagctgatggaaaacagcaccacgcttgcagtgccgttattggtggaagtcggtagcggtgaaaactgggatcaagcgcactaa

SEQ ID NO: 90972 - DNA, 903 bp, Enterobacter aerogenes
atgtcgagattactcgctgcgataacgctcccgctgagtatcgcccttaccatcttagtcaccattatctgttccgtaccgattatcatcgccggactgattaaactgctggtacctatcccggcggtatggcgttctatttccgttttttgcaattttatgatgtattgctggtgcgaaggactggcgctgctgctgcatctcaacccatggttgaaatgggatattcaggggctggaagggctgaataaaaagaactggtatctgcttatcagcaaccatcatagctgggcggacatcgtggtgctctgcgttctgtttcgcaagcatatcccgatgaataaatacttcctcaagcagcagttggcctgggtaccgtttatcggcctggcctgctgggcgcttgatatgccttttatgcgccgctattcgcgcggctacttactgcgccacccggaacgtcgcggtaaagacgtcgaaacgactcgccgctcatgtgaaaaattccgctctcatccgacaaccattgtcaacttcgttgaaggttcaaggtttaccgctgaaaagaagcgcgagacgcgctcgccttaccacaacctgttgccgcctaaagctgcgggcattgcgatggcgttaaacgtcctcggcgcacagttcgataagctactgaacgttacgctgtgctatccggataataatgccaggccgttttacgatatgttaagcggccgcctgacacgtatcgtggtacgtattaatctggtgccgattggcgaggaactacacggtgattacgtcaatgataaaaactttaagcgcggtttccagcgctggctgaatgggctttgggaagaaaaagatcgtcagctcactgacattatgcagggtaacgaaaagtcgtga

SEQ ID NO: 90973 - DNA, 624 bp, Enterobacter aerogenes
atgaaaaaaatttggctggcgctggctggtatgattctggctttcagtgcatccgctgcccagatcaccgacggcaagcagtacaccacccttgataagccggttgcaggtgaacctcaggtccttgagttcttctcattctactgcccgcactgctatcagtttgaagaagtgctgcacgtttccgacaatgtacgtcagaaactgcctgaaggcaccaaaatgaccaagtatcacgttgaattcctgggcccgttgggtaaagacctgacccaggcgtgggctgtggcgatcgcgctgggcgttgaagataaagtaaccgcgccgatgtttgaagcggtacagaaaacccaaaccgtgcagtccactgccgacatccgtaaagtcttcgttgatgcgggcgttaaaggtgaagattacgacgcggcatggaacagctttgtggtgaagtctctggtcgcccagcaagagaaagccgcagccgatttacagctgcagggcgttccggcgatgtttgttaatggtaaataccagctgaacccgcagggtatggataccagcaatatggacgcgtttgtttcccagtacgcagatactgtgaaacaactggttgaaaagaaataa

SEQ ID NO: 90974 - DNA, 987 bp, Enterobacter aerogenes
atgcacgataaggcttttacttttcagacgcttcacccggataccatcattgatggattattcgatctgggaatgcgggtcgactccggtctgaccccgcttaatagctatgagaaccgtgtttaccagtttcaggacgaagatcgccgccgctacgtggtgaagttctatcgtcctgaacgctggtctgcagaacagatcctcgaagaacatcagtttgcgcttcaactcgtagaagatgaagtgcccgttgccgcgccgctcttatttaacgacagcacgctacatcaacatcaaggattcttctttgccgtcttcccaagcctcggtggccgccagttcgaagcggataatcttgaccaaatagaatgggtcgggcgctatcttggccgcctgcaccagaccggtcgtaagcagcgttttaatgcgcgcccggagattggcgtacaagaatatctgttggaaccacgtcaggtattcgaacaggcgacgcttattccatctggcctgaaggctgatttcctgggtgcggctgataaactcatcgatgccgtcagggcgcagtggcacgggcgtgcggatacgcttcgtctacatggcgactgccacgccggtaatatcctgtggcgcgatggtccgctgtttgttgatttagatgatgcccgcagtggcccggcggtacaggatctctggatgctgctgaatggcgataaagccgaacagcgcatgcagctggagaccatcattgaggcttatgaagaattcagtccgttcaacacggacgaaatcgctctcatcgaacctttacgcgccatgcgtttagtttattatctggcgtggctgctcaggcgttgggacgatcctgctttccctataaatttcccatggttaaccggggaagattattggcgcgggcagactgaaacatttcttgagcaggtgaaggttctgcaggaaccccctcttcagttaacgccaatgtattaa

SEQ ID NO: 90975 - DNA, 270 bp, Enterobacter aerogenes
atgaaatgtaaacgcctgaatgaagtaattgagcttctccagccagcctggcaaaaagaacctgaactgaacctgatgcaattcttgcagaaactggcggctgaagcaggttacaaaggtgaactagccgatctttctgatgatattctgatttatcacctgaagatgcgtgattcatcgaaagaggctgtcatcccgggtattcagaaagattatgaagaggattttaaaaccgcactgttacgcgcgcgcggtgttattaaagagtaa

SEQ ID NO: 90976 - DNA, 582 bp, Enterobacter aerogenes
atgcaaagcgaggcaataaccggcgtcgtgctggcgggtggaagagctacgcgcatgggcggtgttgataagggattgcagttgctgaatggtcgtcctctctggcgtcacgttgcggattcattagagccgcaggtaggcagattagtgattagcgctaatcgcaatcttgagtattggcatactagcggatatgccgtttatcgcgatacccaagctgattttccaggcccactggccggaatgcttgccgttatgcagcaggtagatagcccatggtttgtattttgcccctgcgacacgccgttcatcccctcttttctggtcgagcgctttctacaacagaaagcttcagcgccggtggtttgggtacacgatggcgagcgcgatcatcccgccgttgcattagttcatcgtcaaatcattccggaactggagacttatctggctcatggagaacgccgggtgatggtctttatgcgtcaagtaggtgggcacccggtgaatttcagcgatgtgaaatcagcgttcatcaatgtaaatacgttggatgagttgcagcagatgcaggagtcatcatga

SEQ ID NO: 90977 - DNA, 507 bp, Enterobacter aerogenes
atgatccccttactggcgatcgccgcatggagcggtaccgggaaaacaacgttattaaaacgccttatccctgaactctgcgctaaaggattgcggccggggctaataaagcacactcatcacgatatggatgtcgataagccgggcaaggatagttatgagctgcgcaaagctggcgcttcacaaaccattgtcgccagtaagcagcgttgggcgctgatgacagaaaccccagatgaacccgaattagatcttcaatggctggtaagcagaatggatccggacaaattggatttcgttttggtggagggttttaagtatgaacctgtgccgaagatcctgcttttccggcaaaatagcgggcatcttgtagaagagctagtgattgatgaacatacgatcgccgtagccagcgatgtgcccatcgtgacgtcacttccgctgttggatttaaataatattccacagatcgcgacgtttattgcgagttggttagagaggcaatag

SEQ ID NO: 90978 - DNA, 390 bp, Enterobacter aerogenes
gtgaccatcttatatatctcgttgtataaaaatcgaatgaccgtacgtaacctcgatgatagccgcgaatgcagtggcagcggggcatttagcaatcaacgtctcctcgtggcacagttttttgccgcgcatgacgtcttatatcccctgatccaacaacaaaaaggcgaaaactggctggcgcgtttgctgaaaagaaagcgctttcgcattctggtcgatgccatggagttaaatgaaggagggttatcacaagtcgaagagcgcgcaataatggaaatggttgccagcgccgtatcaatgcgttaccgccagcttgaagttcgctgcagcagccatgtacgcaatgatgttgaagttcgtgcgttgctggctaattccacgtcctga

SEQ ID NO: 90979 - DNA, 930 bp, Enterobacter aerogenes
atgccaattcgggtgcaggacgagctaccggccgtcaatttcttgcgcgatgaaaacgtcttcgtgatgaccacatcgcgtgctacaactcaggaaatccgcccgctgaaggtgttaattctcaatctgatgcccaagaagatcgagacggagaatcagttcctgcggctgctgtcgaactcgccgctgcaggttgatatccagctgctacgcatcgatgcgcgtgagtcgcgtaatacgccgacggagcacctgaataacttttactgcaatttcgaagatattcgcgagcagaacttcgatggtctgattgttaccggtgcgccgttggggctggtcgagtttaacgatgttgcctactggccgcagattaaacaggtactggagtgggctaaggatcacgtcacgtcaacgctatttgtctgttgggcggtacaggcggcgctgaatattctgtatggcatccctaagcaaactcgtaccgaaaagatctctggcgtttatgaacaccatattttgcacccgcatgcgctgctgactcgcgggtttgatgacaccttccttgcgcctcattcgcgctatgccgacttcccggccgggctgattcgtgactacaccgacctcgatattcttgctgaaaccgaagatggcgatgcctatctgttcgccagcaaagacaagcgtatcgcttttgttaccggtcaccctgaatacgatccgcataccctggcaagtgaatacttccgcgatctggaggcaggtttagcgccacagcttccggacaactacttcccgaataacgatccaaacaataaaccgcgggcgacctggcgcagtcatggcaatctcctgtttgccaactggcttaactattacgtctaccaaatcacaccatacgatctgcgacatatgaatcccacgctggattaa

SEQ ID NO: 90980 - DNA, 1602 bp, Enterobacter aerogenes
atgacgcaccaggcgacaatgaccgatgaactggccttcagccagccttatggcgagcaggagaagcaaattctgactgcggaagcggtggagttcctgacggaactggtgagccgctttatgcctgagcgtaatcaactgttggcggtacgcgtccagcaacagcaggccattgatgatggaaatcttcctgattttatttcggaaacggcttccattcgtaatggtgactggaagattcgaggtattccggccgatttacaggaccgccgcgtagaaatcaccggtccggttgaacgcaagatggtaattaacgccctgaatgctaacgtcaaagtctttatggctgatttcgaagactcgctggcgccggattggcacaaagtcattgatggccaaatcaacctgcgtgatgcggtcaacggcaccatcagctacaccaacgaagcggggaaaatttatcagttgcagcccgatccggcggttctggtctgccgcgttcgcggcctgcatctgccggaaaaacacgttacctggcgtggtgaggcgattcccggcagtctgttcgattttgcgctctatttcttccacaactaccaggctctgctggcgaaagggagcggcccctatttctatctgccgaaaacccagtcctggcaagaggcggcatggtggagcaaagtcttcagtttcaccgaagatcgttttgaactgccgcgcggcaccattaaggctactttgctgattgaaacgctgccggcagtgttccagatggatgaaatcctgcatgcgctgcgcgaccatattgttggcctgaactgcgggcgctgggactatatcttcagctatatcaagacgctgaaaaatcaccccgatcgtgtcctgccggatcgccaggtggtgacgatggataaacctttcctgagcgcctattcacgcctgctgattaagacttgccataagcgcggcgccttcgcgatgggcggtatggcggcgtttatcccgagcaaagacgccgagcgcaatcgtcaggtgctgaataaagtcaccgccgataaagagctggaggctaacaatggccacgatggcacctggattgcgcatccgggactggcggatacggcaatggatgtctttaaccgcgtactgggtgaacatcctaaccagctgtttgttacccgcaatgacgacgcgccgattaccgccgagcagttgctggctccctgcgagggcgagcgtactgaagccggcatgcgcgccaatatccgcgtggcggtgcagtacatcgaggcctggatctccggcaacggctgcgtaccgatttacggcctgatggaagatgcggcgacggctgagatttcacgtacctctatctggcagtggatccatcatcagaaaaccctgaacgacggcacaccggttaccaaggcgctgttccgccagtggctggctgaagagctgatggtgattcaggaagagttgggggaacaccgcttcagccacggtcgctttgacgatgcggcacggctgatggagcaaatcaccacttccgacgaactgatcgacttcttgacgttgccaggttaccgcctgctggcgtaa

SEQ ID NO: 90981 - DNA, 1305 bp, Enterobacter aerogenes
atgaaaacccgtacccaacaaatcgaagaattaaacaaagagtggacgaacccgcgctgggaaggcattacccgcccatacagcgcggaagaggtggtgaagttacgcggctcggtgaacccggaatgcacgctggcgcagcttggcgcggcgaaaatgtggcgtctgctgcatggtgaagcgaaaaagggttatatcaacagccttggcgcgttaaccggcggccaggcgctgcagcaggcgaaggcgggcattgaagccatctacttgtctggctggcaggtcgccgccgacgccaacctggcctccagtatgtacccggatcaatcgttgtacccggctaactcggttccgtcggtggttgatcggatcaataacaccttccgtcgcgccgatcagatccagtgggcggcggggattgagccgaacgatccgcgttttatcgactatttcctgccgatcgtcgccgatgcggaagccggttttggcggcgtgctgaacgcctttgagctgatgaaatcgatgattgcggccggtgcagcggccgtgcatttcgaagatcagctggcgtcggtgaagaagtgcggacatatgggcggcaaggtgctggtgccgacacaagaggcgattcagaagctggtcgccgcgcgcctggcggcggatgtgatgggcgtgccgacgctgcttatcgcccgtaccgacgccgatgccgctgacctgattacctcggattgcgatccttacgatcgcgagtttatctccggcgatcgcaccagcgaaggtttttatcgcacccatgccggaatcgaacaggcaatcagccgcggcctggcctacgccccttacgctgacctggtatggtgtgaaacctccaaaccggacattgaacaggcgcgtcgttttgccgaggcgatccacgcccgcttcccgggcaagctgctggcctataactgctcgccatcttttaactggaagaaaaatctcgacgataaaaccatcgccagcttccagcagcagctttcggatatgggctataaattccagttcattaccctggcgggtattcacagcatgtggttcaacatgttcgacctggcccacgcctacgcgcagggtgaaggcatgcgtcactacgtcgaaaaagttcagcagccggagtttgccgccgggccggaaggctacaccttcgtgtcgcatcagcaggaggtgggtaccgggtacttcgataaagtgaccaccattatccagggggggacctcgtcggtaacggcgctgaccggctcgaccgaagaatcgcagttttaa

SEQ ID NO: 90982 - DNA, 1785 bp, Enterobacter aerogenes
atgacgcgtggcctggaactactgattgcccaaaccattttacagggattcgacgcccagtacgggcgttttctggaagtcacttccggcgcgcagcagcgctttgaacaggctgactggcacgccgtgcagcaggcgatgaagcagcgtatccacctctacgatcaccacgtgggtctggtggtagaacagctgcgctgtattaccgaagggaaaagtaccgacgtcgattttcttctgcgggtgaaacagcagtacacccaacttttgccggattaccctcgctttgaaattgcggagagctttttcaactcggtctactgccgactgtttgaccaccgctcgctgacccccgagcggctctttattttcagctcccagccggaacggcgttttcgcacgatttcgcgaccgctggcgaaggacttttatcccgaacgcggctgggaatacctgatgcataacctgcttgccgatttgccgctgcgcctgccgtggcaaaacaaagggcgtgatatcggttatatcgtcagtcatttacgcgaagcgcttggcggcgagttgctgtcgcagtcgcatctgcaggtggcgaatgagctgttttaccgtaataaagccgcctggctggtgggtaaactgattacgccgatggcgacgctgccgttcctgctgccgatacatcgtagcgatgacggtcagctgtttgtggatacctgcctgacgacccacgccgaggcgagtatcgtctttggtttcgcccgctcctatttcatggtctacgcgccgctgcccgcggcgctggttgaatggctgcgcgagattctgccgggaaaaactaccgccgagctatatatggcgattggctgtcagaagcatgctaaaacggaaagttatcgcgagtatctgcactatgttacccgcagcgatgagcagtttattgaagcgccaggcatccgtgggatggtgatgttggtctttaccctgccgggattcgaccgggtatttaaggtgattaaagaccgctttgcgccgcaaaaagagatgactgccgcccacgtccgcgcctgctatcagttggtcaaagaacacgaccgcgtcggacggatggcggatactcaggaatttgaaaactttgtgctcgataagcggcaaattgcgcccgagctgatgacgctgttgcaggcggaagcgggaaataagttgaccgacctcggcgatcgcattgccatcagccatctttatattgaacgacggatggtgccgctcaatatctggctggagcaggtggaaggccaggcgctgcgcgacgcggtagaagagtatggtaatgccattcgccaactggcggccgccaatatcttccccggcgacatgctgttcaaaaacttcggcgtcacgcgccacgggcgggtagtattctacgattacgatgaaatttgctacatgaccgaggtgaatttccgcgatattccgccgccacgctatccggaagatgagctggccagtgaaccctggtatagcgtgtcccctggcgatgtcttcccggaagagttccgtcactggttgtgcgccgatccgcggatcggaccattactggaggaaatgcacgccgatttgctgcgtgccgattactggcgcgaattacagacgcgaattaaaaacggacacgtggaagatgtttatgcttaccggcgtaggcagcgttttagcgtgcgctatggcgccgacagtaggccggataaggcgtttacgccgccatccggcaaggtgcgccgatctgcctga

SEQ ID NO: 90983 - DNA, 831 bp, Enterobacter aerogenes
atggctaccccggttcccgccaaacgcggcagaaaacccgccgctgccgcccctgccgcgcaggctggcgggcaagtgcagtcgcttacccgcggtttgaaactgcttgaatggatttctgaatcgcatagcagcgtcgcgctcaccgaactggcgcagcaggcgggactgcctaactccacgacccatcgtctgctcaccaccatgcagcagctcggttttgtgcgccaggtcggcgagctggggcactgggcgattggcgcgcatgcgtttgtcgtcggcagcagcttcctgcaaagccgcaatctgctggccattgtccatcctatcctgcgccaactgatggaagattccggcgaaacggtcaacctggcggtgctggataaaagcgatcatcaggcgattatcatcgaccaggtgcaatgtacgcagctgatgcgcatgtcggcgccgattggcggcaaattgccaatgcacgcgtcaggcgccggaaaagcgtttctgtcgcagttgagcgaagaagaggtcaccacgctgctacatcggaaagggctgcatgcttacacccacgccaccctggtttctccggtacatttgaaagaggatttggcccaaacgcgtaaacgcggctattcatttgatgatgaagaacatgcgctggggctgcgctgtatcgcctcctgcatttacgacgaacaccgcgagccgttcgccgctatctccatctccgggccgatttcgcgcatgaccgatgaccgggtgaccgagcttggcgcgctggttattaaggctgcaaaagaagtcacgctggcatacggcggggttaaataa

SEQ ID NO: 90984 - DNA, 3684 bp, Enterobacter aerogenes
gtgagtaacaaagtagaacaattacatcagcagttaagagaacgcattctggttctggacgggggcatgggcaccatgatccagggctatcgtctgagtgagcaggatttccgcggcgaacgctttgccgattggccgtgcgacctgaaaggcaataacgacctgctggtcctcagcaagcctgaggttattcgcgagatccacgacgcctatttcgccgccggcgcggacattatcgagaccaataccttcaactcgacaaccatcgcgatggcggattaccaaatggaatccctgtcggcggaaatcaactttgccgccgcaaagctggcccgcgccagcgccgacgcgtggaccgcacgtacgccggaaaaaccgcgctatgtggcgggggtgctcgggccgaccaatcgcaccgcttctatttctccggacgtcaacgatccggcatttcggaatatcacgttcgatcagctggtggccgcctatcgtgaatccaccaaagcgctggtggaaggcggctcggatctcattcttattgaaacggtctttgacaccctgaacgccaaagcggcgattttcgcggtcaaagaagaatttgaggcgctcggtgtcgagttgccgattatgatttccggcactatcaccgatgcctccggacgtacactgtccgggcagacgaccgaagcgttctataattcgctgcgccacgccgatgccctgacctttggcctgaactgcgcgctggggccggatgagctgcgccagtacgtgcaggagctttcgcggatcgccgaatgctacgttaccgcgcacccgaatgccggcctgccgaacgccttcggcgaatacgatttggatgccgacaccatggcggcgcaaattcgcgaatgggcgcaggctggtttccttaatatcgtcggcggctgctgcggcaccaccccggaacatatcgccgccatgagccgggcggtagaaggcttaccgccgcgccagctgccggaactgccggttgcctgccgtctgtctggcctggagccgctgaacatcggcgacgatagcctgttcgtcaacgtgggtgagcggaccaacgtcaccggctccgctaaatttaagcgcttaatcaaagaagagaaatacagcgaagcgctggacgtggcgcgtcagcaggtggaaagcggcgcgcagattatcgatatcaacatggatgaggggatgctcgatgccgaagcggcgatggtgcgtttcctcaacctgatagcgggtgaaccggatattgcccgcgtgccgattatgatcgactcctccaagtgggaagtcatcgaaaaagggctcaagtgcattcagggcaagggcatcgttaactcgatctcgatgaaagagggcgtcgaaccctttattcatcacgctaagctggttcgccgctacggcgcggcaatggtagtcatggcctttgatgaagtaggccaggccgatacccgcgagcgcaaaatcgaaatttgccgccgcgcctataaaatcctcaccgaagaggtcggcttcccgccggaagatatcatcttcgaccccaacatttttgccgtcgctaccggtattgaagagcacaacaactacgctcaggactttatcggcgcctgtgaagacataaaacgcgagctgccgcatgcgctgatttccggcggcgtctccaacgtgtcgttctcgttccgcggtaacgatccggtacgtgaagcgatccacgccgtattcctctactacgctatccgcaacggtatggatatgggcatcgtcaatgccggccagctggcgatatacgacgatctgcctggcgagctgcgtgacgcggttgaagatgtaatccttaaccgccgcgatgacagtaccgaaagattacttgagctggcggaaaaatatcgcggcagcaaagcggacgatagcgcgaacgctcagcaggcggaatggcgcagctgggacgtgaaaaagcgtcttgaatactcgctggtcaaaggcattaccgaatttatcgagcaggatactgaagaggcgcgccagcaggccgaacgcccaatcgaggtgattgaagggccgctgatggatggcatgaacgtcgtcggcgacctgttcggtgaaggcaaaatgttcctgccgcaggtggtaaaatccgcgcgggtgatgaaacaggcggtggcctacctcgaaccttacatcgaagccagcaaagaacagggctccagcaacggtaagatggtgatcgccaccgtgaagggcgatgtacacgatattggtaaaaacatcgtcggcgtagtgctgcagtgcaacaactacgaaattatcgatctcggcgtgatggtgccggcagagaaaatcctgcgtaccgcgcgcgaagaaaacgccgatctgattggcctctctgggcttatcacgccgtcgctggacgaaatggtcaacgtggcgaaagagatggagcgtcagggctttaccattccgctgctgattggcggagcgacgacctcgaaagcccataccgcggtgaaaatcgaacagaactacagtggcccgacggtctacgtgcagaacgcctcgcgtaccgtaggcgtggtttcagccctgctgtcggcaacccagcgcgatgattttgtcgcccgtacccgtaaagagtatgaaaccgtgcgaatccagcacgggcgtaaaaagccgcgcacgccgccggtgactctgcaggcggcgcgggaaaacgatctggcgtttgactgggagagctacacgccgccggtagcccaccgtctgggcgtgcaggaggtggaagccagcatcgaaacgttgcgtaactacatcgactggacgccgttctttatgacctggtcgctggcgggtaaatatccgcgtatcctggaagatgaagtggtgggtgaagaggcgcaacgcctgtttaaagacgccaacgatttgctggataaactcagcgccgaaaaaacgctcaacccgcgcggcgtggtcgggctgttcccggccaaccgagttggcgacgacgtggaaatctatcgtgatgaaatccgcacccacgtgctgacggtcagccatcacctgcgccagcaaacggaaaaagtcggcttcgcgaactactgcctcgctgattttgttgcgccgaagctgagcggtaaagcggactatatcggggctttcgcggtgaccggcgggttggaagaagacgcgctggcggaagcctatgaagcgcagcacgacgactataacaagatcatggttaaggccatcgccgaccgtctggcggaagccttcgccgagtatctgcatgagaaagtgcgtaaggtttactggggctatgcggccaatgagaacctcagcaatgaagagctgatccgcgaaaattaccaggggatccgcccggcgcccggttatccggcctgcccggaacacaccgagaaagcgaccatctgggaactgttggatgtggaagcgcataccggcatgaagctcaccgagtccttcgccatgtggcctggcgcatcggtttccggctggtacttcagccatcctgatagtaagtacttcgccgtggcgcagattcagcgcgaccaggtagaagattacgccctgcgtaaagggatgacggcggccgaagttgagcgttggctcgcccctaacctcggctatgatgctgactaa

SEQ ID NO: 90985 - DNA, 1632 bp, Enterobacter aerogenes
gtgttaacgctgttacacctactttccgccgtagccctactggtgtggggtacccatattgtgcgcaccggcgtgatgcgcgtctttggcgcgcgcctgcgtaccgtgctcagcagcagcgtggagaaaaaaccgctcgccttctgcgcggggattggcgtcaccgcgctggtgcagagcagtaacgccaccaccatgctggtgacgtcgtttgtggcccaggatctggtcgcgctggcgccagcgctggtcatggtgctgggtgcggatgtggggacggcgctgatggcgagggtactgaccttcgacctctcctggctatcgccgctgctgatatttatcggcgttattttcttcctcgggcgtaaacagacccgcgcgggccagcttggacgggtggggatcggcctcgggcttatcctgctggcgctggagcttatcgtccaggcggtgcatccgattacccaagccaacggcgtccaggtgattttcgcctcgctgaccggcgatatcatgctggatgcgctgattggcgccgtgttcgccattatcagttactccagcctggcggccgtgctgctgaccgcaacgttaaccggcaccggggtgatctctttcccggtggcgctatgtctggtcatcggcgctaaccttggctcaggtctgctggcgatgcttaacaacagcggcgccaacgcggcggcgcggcgggtggcgcttggcagcctgctgttcaagctggtggggagcttgataattttgccatttgtgcacgtactggcggatgtcatgcacaaattgccgctggaagagtcggagctggtgatctacttccacgtcttctacaacctgattcgctgtgtggcgatggtgccgttcgccgggccgatggcgaacctgtgtaaacgcctgatccgcgatgagccggagctggataaccatcttaagccgaagcatctggatccctcggcgctggatacgccagcgctggcgttggccaatgccgcccgtgagaccctacgtatcggcgacgccatggagcagatgctggaaagcctgcgcaaggtgatgcacggcgagccgcgcgaagagaaagagctgcggcggatggcggacgatatcaatgtgctgtatacggcgattaagctttatctggcgcggatgccgaaggacgagttggcggaagaggagtcgcgccgctgggcagaaattatcgagatgtcgctcaacctggagcaggcgtctgacatcgtcgagcgaatgggcagcgagatcgccgataaatctctggcggcgcggcgcgcattttccgtcgaggggctaaaagagctggatgcgttatacgagctactgctcagtaacctgcagctggcaatgtcggtcttcttttccggcgacgtgccgagcgcccgtcggttgcgccgtagtaagcaccgttttcgtattcttaaccgccgttactcgcacgcgcatgttgaccgcctgcatcagcaaaatgtgcagagtatcgaaaccagtacgttgcatctggcgctgttgggcgatatgaagcgtctgaactcgctgttctgcgctgttgcctatagcgtgatggagcagccggatgaagacgacgagcgggatgattattag

SEQ ID NO: 90986 - DNA, 690 bp, Enterobacter aerogenes
atggaactgctgttactgagtaactcaacgctaccgggcaaagcctggatggaacatgcgctgccgctgattgccggccaggtcaaaggccgccgttcggcggtatttattcccttcgccggggtgacgcaaagctgggatgattacaccgccaaagccgccgcagtcatggcgcctatgggcgtcagcgtgaccggtattcacagcgtcgccgaccctatcgccgccattgaaaacaccgagatggttatcgtcggcggcgggaacaccttccagcttctgaaagagtgccgcagccgcgggctgctggcgccgattgtcgatgtcgtcaagcgcggagcgttgtatatcggctggagcgcgggatctaacctcgcctgcccgaccattcgcaccaccaacgatatgccaattgtcgatcctcaggggtttgacgcgttagggctgttcccgctgcagattaacccgcacttcaccaacgcgctgccgaccgggcatcagggtgagacccgcgagcaacgtattcgcgaattgctggtcgtggcgccggaattaacggtgattggcctgccggaggggaactggattcaggtcagcgacggacacgccacgctcggcggcccgaacccgacgctgttgttcaaagcgggagaagaagcggtaaccctggccgcgggacaccgtttctag

SEQ ID NO: 90987 - DNA, 246 bp, Enterobacter aerogenes
atgaacaatgaaataccgctgaaatattatgacatcgtggatgagtactcgacggagtgcgcagaagcggtaaaagagtccgagcgcgattgtctggcgcattacttccagctgctgattacgcgcttaatgaataacgaggagatcagcgaggaagcgcagcaggagatggcccgtgaagcaggcattgccgaacagcgtatcgacgatatcgccaatttcctcaatcaatggggtaatgaataa

SEQ ID NO: 90988 - DNA, 879 bp, Enterobacter aerogenes
atgctgaccgactcatctactcgattaaataaatacatcagcgaaagcgggatttgctcgcgtcgcgaagcggaccgctttattgaacaaggcaacgtctttatcaacggtaagcgcgccgccattggcgatcaggtgaagccgggcgatgtggtgaaagtcaacggtcagctgattgagccgcgagaagccgatgatttggtgctgattgcgctgaataagccagtaggtattgtcagcactaccgaagatggcgagcgcgataatattgtcgacttcgtgaaccacagtaaacgtgtgttcccgattggccgtctcgataaagactcccaggggttaattttcctgaccaaccatggcgatctggtcaacaaaatcctgcgcgccggcaacgaccacgaaaaagagtatctggtcaccgtcgataagccggttaccgatgagtttattcgtggcatgggcgcgggggtgccgattcttggtaccgtgaccaagaaatgtaaggtcaagaaagaagcgccgttcgtgttccgcattacgctggttcaggggttaaaccgtcagatccgccgcatgtgtgagcatttcggctatgaagtcacgaagctggagcggacgcgcattatgaacgttagcctgacgggcattcccctgggtgagtggcgcgatttaaccgatgatgagctgatcgacctgttcaagctgattgaaaactcctcttccgaagcgaagccaaaagctaaaccgaaggccaaagcggcgaccgccgggatcaagcgcccggtggtgaagatggaaaaaaccaacgataaaggaggccgcccggcctcgaacggtaaacgtttcgctcagccgggacgtaaaaagaaaggccgctaa

SEQ ID NO: 90989 - DNA, 273 bp, Enterobacter aerogenes
atggcactcccccgcattacacaaaaagagatgaccgagcgcgaacagcgcgaattgaaaacgctgttggaccgcgcgcgtatcgcgcacggccgcccgctgagcaatgcggaaacgaacagcgtaaaaaaggaatatatcgataagctgatggcggtgcgcgaagcggaagcgaagaaagcccgccaggcgaaaaaacagcaggcttacaaagtagacaaagaggcgacattttcgtggtcggcgaatacgccgacccgcggcaggcgttag

SEQ ID NO: 90990 - DNA, 357 bp, Enterobacter aerogenes
atgttgaatcaagggcaaagtttacgacgtattgtctggatggggtcttcctttgatgatttgcgccaatttcctgaggaggtccgccgtgatgccggtttccagctttaccgtttacaggcggggttagaagctgctgattggaaagcaatgcctcagttgggtcgaggcgtggaggaaatacggttacgtcattattccggcgcttatcgggtgatttaccttgctcgttttgaggcagaggtttatgtcctgcactgttttaacaaaaaaactcgacgtaccgccgaacatgaaaaacaaattgtcagaagccgtttgcagcttataccgcaggaacacaggagtcgtaaatga

SEQ ID NO: 90991 - DNA, 339 bp, Enterobacter aerogenes
atgaatcgtaagaaagtagatggcatccgtcacgtgacggcagcagagacgaatattttccgtgaactcggctttgatgactgtgaagcggagcggttaagggcgcaagcggaacaagaagttgaacagctaatgatactaaagcggcaactcatgcaggaaattgctgagtggatagatgaaaatcaactgaagcaagcggatgctgcagcgaagttgaatatttcacgaccacgtatttcagatgtggtaaaccagaaaaccagtaagtttacccttgatgcgttggtcatgatgttaatgaagttaggcaagccggtgagtttacaggtgggataa

SEQ ID NO: 90992 - DNA, 930 bp, Enterobacter aerogenes
atgctcgccacgcttacgcggctgttccccttatgggcgctgctgctctccgtcatggcttattacacgccaaccacttttacccctatcggcccgtgggtcaccacgctgctgatgctgattatgttcggcatgggcgtccatttgaagctggacgattttaagcgcgtgctatcacgtccggcgccggtcgctgcgggaatttttctgcattacctggtgatgccgctcgccgcctgggtactggcgctgctgttccacatgccgccagaactctccgccgggatggtgctggtcggcagcgtcgccagcggcacggcatccaacgtcatgatctacctggcgaaaggcgatgtcgcgctgtcggtaaccatctcttccgtttctacgctggttggcgtggttgccacgccgttgctgacgcgcctgtacgttgatgcgcacattcaggtcgatgtgatgggcatgttgctaagcatcctgcaaatcgtggtgatcccaatcggcctcggtctgattgtccatcacctgttgccaaaagtggtaaaggcggtggaacccttccttcccgccttctccatgctgtgcatcctggcgattatcagcgccgtggtcgccggttccgcatcgcatatcgcttcggtaggcctggtggttatcgtggcggtgatcctgcataacgctattggcctgctcggcgggtactggggcgggcgcctgttcggttttgatgaatccacctgccgcaccctggcgatcgaagtgggtatgcaaaactccggcctcgccgcggccctcgggaaaatctacttcggcccactggccgccctgcccggcgcgctgttctcggtatggcataacctttccggctcgctgctggcgggttactggtccggtaagccgacgaccaaaaaaggcaaccagcgctaa

SEQ ID NO: 90993 - DNA, 1350 bp, Enterobacter aerogenes
atgacagatttagttgttgctaagttcggcggcaccagcgtggccgatttcgacgcgatgaaccgtagcgtcgacgtcgcgctgctggatgcgaatacccgcgtagtggtgttatccgcatcggctggcgttaccaatatcttagttgctttagcggcagggctggaacccaccgaacgtttcgctaagctcgatgaaatgcgccaaatccagttcaatattctggagcgtttacgttatcccaacgttattcgtgaagaaattgaacgtctgctggaaaacattactaccctggcggaagccgcctcgctggccagctcggaagccttgaccgatgaactggtgagccacggcgaactgatgtccaccttactgttcgttgagatcctgcgcgaacgcggtattgcggcgcagtggttcgacgtacgtaaagtgatgcgcaccaacgatcgtttcggccgtgccgaaccggatatcgccgcgctggcggaactgacgcaacaacaactggcgccgcggctggaagaaggcctggttattacccagggctttatcggcagcgaagccaaaggacgcaccactacccttggtcgcggcggcagcgattacaccgcagcgctactcggcgaggccttaaacgccagccgtgtcgatatctggaccgatgtccctggcatctacacaaccgatccgcgcgttgcgccagcggcgaagcgcatcgatgtgatcgctttcgctgaagccgcggagatggccacgttcggggccaaggtattgcatccggccaccctgctgcccgccgtacgcagcgatatcccggtattcgtcggctccagcaaagaacctaaagccggcggcacgatggtctgtcataaaaccgaaaatccaccgctgttccgcgcgctggcgctgcgtcgtcgtcaaacgctgctgacactgcacagcctgcatatgctgcactcccgcggcttcctggccgaagtgttcggtattctggcgcggcataatatttccgtcgatctgatcaccacctcggaagtgagcattgcgctgaccatggacaccaccggttctacctccgctggcgacaccctgctcacccaggcgctgctgaccgagctctcttcgctgtgccgcgtcgaagtggaagagaatctggcgctggtcgccctgatcggcaacgagctgtcgaaagcctgcggcgtcggtaaagaggtgtttggcgttctggaaccgttcaatatccgcatgatctgttacggcgcatccagccacaacctgtgcttcctggtgccgggcgacgatgcggagaaagtggtgcagaagctgcatcataatttgtttgaataa

SEQ ID NO: 90994 - DNA, 1650 bp, Enterobacter aerogenes
atgaaaaatatcaacccaacgcagaccgctgcatggcaggcattacagaaacacttcgatgaaatgaaagacgtcactatcagcgagcttttcgccaaagatagcgatcgtttctctaaattctccgccacttttgacgatctgatgctggtggacttctccaagaaccgcatcactgaagagacgctgtctaagctgcaggatctggcgaaagagaccgatctggccggcgctatcaagtcgatgttctccggtgaaaaaattaaccgtaccgaagaccgcgcggtactgcacgtcgcactgcgcaaccgcagcaatacgccaattgtggttgacggcaaagatgtgatgccggaagtcaacgctgtactggagaagatgaaagtcttctcagaagcgattatctctggtagctggaaaggctataccggcaaaccgatcaccgacgtggtgaacatcggtattggtggttcagatctcggcccgttcatggtgaccgaagcgctgcgcccgtataaaaaccacctcaacatgcacttcgtttctaacgttgacggcacccatatcgccgaagtgctgaaagcggtgaatccggaaaccacgctgttcctggtggcttctaaaaccttcaccactcaggaaaccatgaccaacgcccacagcgcgcgtgactggttcctggcgaccgcgggcgacgagaaacacgtggcgaaacacttcgcggcgctctccaccaacggtaaagcggttggcgagttcggtatcgatacggctaacatgtttgagttctgggactgggtcggcggtcgttactccctgtggtccgccatcggtctgtctatcattctgtccgtcggcttcgacaacttcgttcagctgctgtccggcgcccacgccatggacaaacacttctctaccacgccggctgagaaaaacctgccggtactgctggcgctgattggtatctggtacaacaatttcttcggcgccgaaaccgaagcaattctgccgtacgatcagtacatgcatcgctttgccgcttacttccagcagggcaacatggaatccaacggtaagtacgttgaccgtaacggcaacgtcgtggattaccagactggccctatcatctggggcgagccggggactaacggtcagcacgcgttctatcagctgatccaccagggcaccaaaatggtaccgtgcgatttcatcgccccggctatcacccataacccgctgtctgaccaccatcagaaactgctgtctaacttcttcgctcagaccgaagcgctggcctttggtaaatcccgcgaagtggttgagcaggaatatcgcgatcagggtaaagatccggctcagcttgagcacgtggtgccgttcaaagtgttcgaaggcaaccgtccgaccaactccatcctgctgcgtgaaattaccccgttcagcctgggcgcattgattgcgctgtatgagcacaaaatcttcacccagggcgcgatcctcaacatcttcaccttcgatcagtggggcgttgagctgggtaaacagctggctaaccgtatcctgccggaactgaaagatggcgcggacgtcagcagccacgacagctctaccaacggcctgattaaccgttataaagcctggcgcgcataa

SEQ ID NO: 90995 - DNA, 480 bp, Enterobacter aerogenes
atgtcgaatgagccaaatattcccccttttacgcttcgcgataccggcgttcgcaacgtcatttgcggcgaaaacgtggtcatataccagcccgccaacctctatgattgccagcttggcgataacgtctttattgggccgttcgtcgagattcaggggcacacgcgcatcggtgcggacagcaaaatccagtcccacagttttatctgcgagtacgtcaccatcggccaacgctgttttatcggccacggcgtgatgttcgctaatgatatgttccgcgatggcaaaccgaatgccgaccgcgacagttgggggcgtattgaaatcggcaatgacgtctctatcggcagcggcgccaccattctggcggtgagtatctgcgatggcgtggtcatcggcgccgggagcgtggtgacaaaatccatcaccgagaaaggcgtttgggcgggcaacccggcgaggctgctgcggcgactataa

SEQ ID NO: 90996 - DNA, 381 bp, Enterobacter aerogenes
atgattattaccaccgctgacgcgcctgccgctatcggcccgtacgtgcagggcgtcaatctcggcgcgatgaccatcacctccggtcagctgccgattaatccgctggacggcaccatgcccagcgatatcgccgaacaggcgcggcaatcgctggaaaatgtgaaagccatcgttgaagctgccggactcacggtcgggcagattgttaaaaccacggtgtttgtcaaagacctgaaggattttgccgccatcaacgccgcctatgaggccttctttaccgaacatcaggccacctttccggcacgctcctgcgtggaggtcgcaagactgccgaaagacgccggcgtcgaaatcgaagccatcgccttcgctcgttaa

SEQ ID NO: 90997 - DNA, 321 bp, Enterobacter aerogenes
atgaataatagctactttatcgccctgactttggggatggccgccgtgacctttctgatccgattttcgtttatcggcctggccggaaaaatccagatgtccgagcgggtgaccaaaacgctgcgctttgtcccggtcaccgtcctgccggccattatcaccattcagatcctgagcgtgaattccagcatggagtttgacttaaagaatccgaaggtgatcgccgccattatctgcacgctcgccagcttccgtttaggcctggtgtgggtggtggtgagcggcgtcggctcgctggtgttgttgaattactttatgtaa

SEQ ID NO: 90998 - DNA, 741 bp, Enterobacter aerogenes
atgaataaaaaagtcatcttccgcggcgccagcgccattatgccgctgtgcatcggcgactttccattttcatttattgtcggcgcattaagcgtcagcgccggcatgagcgtctggcagagtacggcgtggtcggctattgttattgccggctccgcgcaaatgctggcattaaatatgcttaaaaccggcgccacgctcggggttattatattcaccacattaataattaacctacgtcacgtactgtacagcgcctctatttccggtaccgtccgtgaagcgtcattctttaaaaaatgctttatgtcctacgcgctgaccgacgaagtgtacgccaccaccgtcaaagagatggaaggcaataagcaggataagtatctgttttatggttcggcgatgatcaccttctgggcaatttgggtactggcggatttcctcggcgcgctggtcggcgcttccttcccgaacattgaaaagtacggtctggatttcgccatggtcgccgcttttatcgctatcgtggtgccgcaaataaaaagccaggcctgcaccgtcgccgccgtggtggccgccgtctccggcgtgctgttggtcatcctgccctactcgctgggcattgtcgtcgcgtcagtgcttggcgtgctcgccggactgtgcgtcgacctggctgaagaacgtaaacaggcagcaattgccaaatccgggatgccgctcgtggaggcgctggaacatgaataa

SEQ ID NO: 90999 - DNA, 1278 bp, Enterobacter aerogenes
atgaacaccgataacgcttccctgtacgtaaaatggctcaaacaagaagttgccccggctttaggttgtactgaacccgtcgctatttccttcactgccgcctacgccgctcaatatctggatcagccttgcaccagaattagcggttttatttccgccaatctctataaaaacgcgatgggcgtgactattcccggcaccgccgtttgcggtgtagcgctggccgccgcaattggcgcatttggcggcaatccgcaaaagggattaaaaacgctggaagatatcaccccgctacacgtcgaaatggcgcagaaactgatcgccaataatgccgttgatattgccgtcgaagagactccggactttattcatctcgatttaaccctctctgctggcgagaataactgtcgcgtcgtggtgaaaggaacccacaccaacgtggtcgaactttatattaatgaccagccacagccattaagcgcaaaacagaatgcgagcgcccggcacgaaacgctgcccacattttcgctacagcaggcttacgaatttattaatagcgccgactttaatgatattcgctttattctcgaagccgcgcgcttaaactccgcgctggcggcagaaggcaaaaccaaaaaatatggcctgaacattaacggtacctttgctgacgccgtgaaaaacggcctgatgagcaacgatctgttaagcaaggtgatcatcgacaccgtcgccgcttcagatgcccgcatgggcggcgcgccggtggtagcgatgtctaactttggttcaggcaatcagggcattacggcaaccatgccggtagtggtggttgcagagcatcttggcgccgatgaagagaccctggcgcgcgctttgtctctatctcatctcaccgccatctcaattcattctcgttatacgcgcttatctgcgctatgcgcggcctcaaccgccgccatgggcgccgccgccgggatggcctggctatttactcgcgacatcaacaccattaacaccgcgattattaatatggtcagcgatattaccggcatgatttgtgatggcgcctctaatagctgtgcgatgaaagtctcatctgtggtatccagcgccttcaaggcggtactgatggcaatgcaaaatagctgtgctggcgccaatgacggtattgtctgcgccgatgtcgagcagactattaataacctgtgtcgcctggtgattaaaccaatggccctcaccgataaagaaatcatcagcatcatggtcgctaaataa

SEQ ID NO: 91000 - DNA, 411 bp, Enterobacter aerogenes
atgccgtcggtatatcgtccgctggttaattttgttgcgaaggccatgcaggctgtgctcaacctggcgctattgtgcctgggaattattctggtggtgttcctgggaaaggagaccctgcatctggcgcacgtgctgtttacgccggagccggtgagtaagtacaagctggtcgaagggctggtggtctattttctctacttcgaatttatcgcgttgattgtgaaatactttgagtccggttttcacttcccgctgcgttatttcgtctatatcggcattaccgcgattgtacggcttattatcgtcgaccatgagtcgccgatggcggtgctgatttactctgcggcgatccttatcctggtgattaccctgtggttgtgtaattccaaccgcctgaaacgggaataa

SEQ ID NO: 91001 - DNA, 891 bp, Enterobacter aerogenes
atggctatggtccaacccaaatcgcagaagctacgtttatttaccacgcatctcctgctgctgatttttatcgccgcgattatgttcccgctgctgatggttatcgctatctcgctgcgcgaaggcaacttcgcgaccggcagcctgatcccggataccatctcctgggagcactggcgtctggcattaggcttcagcgtcgaacacgccgatggccgggtaacgccgccgccgttcccggtcctgctgtggctgtggaactcaattaaggtggccgggattactgcgatcggcatcgtcgccctctccaccacctgcgcttacgctttcgcccgtatgcgcttcccgggtaaagcgacgctgctcaaagggatgttgattttccagatgttcccggcggtactgtcgttggtggcgctgtatgcgttgttcgaccgcctcggtcagtatctgcctttcgtcggcctcaacactcacggcggggtgatcttcgcctatatgggcggcatcgcgctgcacgtctggacgattaagggctacttcgaaactatcgatggttcactggaagaagcggccgcgctggacggcgccactccgtggcaggccttccgcctggtgctgctgccgctctcggtgccgattctggcggtcgtgtttattctgtcgttcatcgccgcgattaccgaagtgccggtggcctcgttgctgctacgcgatgtgaacagctataccctggcggtggggatgcagcagtatctcaatccgcagaactacctgtggggcgacttcgccgcggcggcggtactgtcggcgattccgattaccgtcgtcttcctgctggctcagcgttggttggtcaacggcctgacggcgggcggggtgaaaggttaa

SEQ ID NO: 91002 - DNA, 1545 bp, Enterobacter aerogenes
atggatgccgttaaaaagaaacactggtggcaaagcccgcaactcacatggtctgtgattggtttgctgtgcctgctggtgggttaccttgttgttttaatgtacgcccagggggagtacctgttcgccatcatgacgctgattttaagctcagttggcctgtatatcttttccaatcgcaaggcttacgcctggcgctatgtttatccgggtctcgccgggatggggctgtttgttctgttcccgctgatctgcaccattgccatcgccttcaccaactacagcagcaccaaccagctcaccttcgaacgcgcccaacaggtactgatggatcgttctttccaggccggcaaagcctataacttctcactctacccggcaggcgatgagtggcagctggcgctgacagacggtgaaagcggtaaaaattatctctctgaagcctttaaatttggcggcgagcagaagctggcgttaaaagaagccgatgccctgccgcaaggcgaacgcgcgaatttacgcgtaatcacccagaaccgcgccgcgctgaaccaactgaccgccgtgctgccggatgaaagcaaagtgattatgagttcactgcgccagttttccggcacccagccgctgtacgcgctggctaacgacggcacgctcaccaacaaccaaagcggcgtgaaatatcgccccaacgccgacatcggcttttatcaatccatcaatgccgacggcagctggggcaatgaaaagctgagcccgggttataccgtcaccatcggctgggataacttcacccgcgttttccaggatgaagggatccagaagccgttcttcgccattttcgtctggaccgtggtgttctcggtgctgacggtgattttgaccgtcgccgtgggaatggtgctggcctgcctggtgcagtgggaagcgttgaagggcaaagcgatttaccgcgtgctgttgattctgccgtatgcggtgccgtcatttatttcaatactgattttcaaggggctgtttaaccagagctttggtgaaatcaacatgatgctgagcgcgctgttcggcattaaaccggcctggtttagcgacccaaccaccgcgcgcacgatgatcatcatcgtcaacacctggctgggctacccgtacatgatgatcctgtgcatgggactgctgaaggcgattccggacgatctgtacgaggcgtcggcgatggatggcgcgggcccgttccagaacttctttaaaattacgctaccgctgctgatcaagccgctcacgccgctgatgattgccagcttcgcctttaactttaacaacttcgtgctgattcaactgttaaccaacggtggcccggaccgtctcggcaccaccacgccggccggttataccgacctgctggtgagctacacctatcgcatcgcctttgaaggcggcggcggtcaggacttcggcctggcggcggctatcgccacgcttatcttcctgctggttggggcgttagcgattgtgaatctgaaagccacgcgcatgaagtttgattaa

SEQ ID NO: 91003 - DNA, 1191 bp, Enterobacter aerogenes
atgaaaatcaaaactggcgctcgcatcctcgcgctgtctgcattgacgacgatgatgttttccgcctctgccctcgcaaaaattgaagaaggtaagctggttatctggattaacggcgataaaggctataacggcctcgctgaagtgggtaaaaagttcgaaaaagataccggcattaaagtttccgtagaacatccggataagctggaagagaagttcccgcaggttgcagcgaccggcgacggcccggatatcatcttctgggcgcatgaccgctttggcggctacgcgcagtccggtctgctggcggaaatcaccccggataaagcgttccaggacaagctctatccgttcacctgggatgccgtacgttacaacggcaaactgatcgcttacccggtggcggtggaagccttatcgctgatttataacaaagacctggtcccgaacccgccgaaaacctgggaagagatcccggcgctggataaagcgctgaaggcgaaaggtaagagcgcgctgatgttcaacctgcaagaaccgtacttcacctggccgctgatcgccgccgatggtggatacgcgtttaagtttgaaaacggcaaatacgacgtgaaaaacgtcggcgtcgatagcgccggggcaaaagccggtctgaccttcctggtcgacctcatcaaaaataaacacatgaacgccgacaccgactactccatcgcggaagcggcattcaacaaaggcgaaaccgcgatgaccatcaacggtccgtgggcgtggtctaacatcgacaagagcaaggttaactacggcgtcactctgctgccgaccttcaaaggcaaaccgtctaaaccgttcgttggcgtactgagcgccgggattaacgccgccagtccgaataaagaactggcgaaagagttcctcgaaaactacctgatgaccgatccgggcctggaagcggtgaacaacgataaaccgctgggcgccgtggcgctgaaatccttccaggagaagctggagaaagacccgcgtatcgccgccaccatggctaacgcccagaaaggcgaaatcatgccgaacatcccgcagatgtcggcgttctggtatgccgtccgtaccgcggttatcaacgccgcaagcggccgtcagaccgtcgatgccgcgctgaaggatgcacagggccgtatcaccaagtaa

SEQ ID NO: 91004 - DNA, 1110 bp, Enterobacter aerogenes
atggcgagcgtacagctacgaaatgtaacgaaagcctggggcgacgtggtggtatctaaagatatcaatctcgagatccaggatggggagttcgtcgtgtttgtaggaccgtcgggctgcggcaaatccaccctgctgcgtatgattgccggactggaaacggtcaccagcggcgatctgtttattggcgatacccgaatgaacgatgtgccgcccgccgagcgcggcatcggcatggtattccagtcttatgcgctctatccccacctttccgttgccgaaaatatgtcttttggcctgaaactggccggggcgaaaaaagaggtgattaaccagcgcgtgactcaggtcgccgaggtcttacagctggcgcacctgctggagcgtaagccgaaagcgctctccggcggccagcgtcagcgcgtggccatcggccgcaccctggtcgccgagccgcgggttttcctgcttgatgagcccctgtccaacctcgatgccgcgctgcgcgtgcagatgcgtatcgaaatctcccgtctgcataagcgccttggtcgcacgatgatttacgtcacccacgatcaggtggaagccatgaccctggccgacaaaatcgtcgtgctggatgccggccgcgtcgcgcaggtcgggaaaccgctggaactctatcactatccggcagaccgcttcgtcgcgggctttattggctcgccgaagatgaacttcctgccggtcaaagtcaccgcgaccgctatcgaacaggtacaggtcgaactaccgaaccgccagcaggtctggctgccggtagacagcgcccacgttcaggtcggcgccaatatgtctttgggcatccgcccggaacacctgctgccgagcgacatcgccgatgtcacccttgagggcgaagtgcaggtggtcgaacagcttggtcacgaaacgcaaattcatatccagatccccgccatccgtcagaacctggtgtaccgccagaatgacgtggtgttggtagaagagggagccacattcgccatcggtttgccgccggagcgctgccatttattccgtgaggatggcaccgcttgtcgtcggttgcataaagagccgggcgtataa

SEQ ID NO: 91005 - DNA, 1299 bp, Enterobacter aerogenes
atgatgattactctgcgcaaacttccactggtggtagccgttgcggcgggcgtgatgtctgcccaggcgctggctgtcgatttccacggctacgcgcgttccggtattggctggaccggcagcggcggcgaacagcagtgcttccaggccactggcgctcaaagtaaataccgtctcggtaacgaatgtgaaacttacgctgaactgaaactgggccaggaagtgtggaaagagggcgataagagcttctacttcgataccaacgttgcctactcggtatcgcagcagaacgactgggaatctaccagcccggccttccgtgaagttaacgtgcagggtaaaaacctgatcgactggctgccgggttcaaccctgtgggccggtaagcgcttctatcagcgtcatgacgttcacatgatcgacttctactactgggatatatccggtcctggcgccggtatcgaaaacatcgatctgggcttcggtaaactctctctggccgccactcgttcttctgaatccggcggctcggcaacctatgctgaccgcgatccgctgactggcgaacgcgtttatgatcatctggtaccgaacgacgtcttcgatgtgcgtttagcgcagatggaaaccaacccaggcggtacgctggagctgggcgtggactatggtcacaccaacgtgccggatgactactacctgcagccggatgcatcaaaagatggctggatgttcaccgctgaacatacccagagcatcctgaaaggctacaacaaatttgttctgcagtacgcgaccgacgccatgacctccaacggcaaaggcgtaccgcagggcggcagcattaataacgatggttccatgtggcgtgtgcttgaccacggcgcggtctctctggcggacgattgggacatgatgtacgtcgccatgtaccaggacgtcaacctggacaacaacaacggtaccaaatggtggaccgtcggcgtacgtcctatgtacaagtggacgccgatcatgagcaccctgctggaagtcggctacgacaatgtcaaatcgcagaaaaccggcgacagcaacaaccagtacaaaatcaccctggcgcaacagtggcaggcgggcgacagcatctggtcccgtccggcaattcgtctgttcgccacctacgcgaagtgggatgagaagtggggttacaccgatagcggcgtcgccatgcgcgatacctctggtaccggtatcaacacttccagccgcggcgacgacgatgagtggaccttcggcgcccagatggaaatctggtggtaa

SEQ ID NO: 91006 - DNA, 948 bp, Enterobacter aerogenes
atgaatatgaagaaaagtctcgttgccctctgcctgtccgccggcctgctggccagcgtacccgcagtcagttttgctgatgtcaatttcgtgccgcagaatacctctgccgcgccgtcaatcccggcttcctcgctgcagcagttgacctggacgccggtcgatcaatcgaaaacccaaacctctaaagtggcgatcgccggtcaaacgctgaatgtccccggtatcgccgggccggtggtggcctatagcgtaccggccaatatcggcgagttaaccctgacgctgaccagtgaagtcgacaaacagactagcgtctacgcgccaaatgtcctgatcctcgatcagagcatgacgccgtccgccttcttcccgagcagctatttcacttatctggagccgggcgtgatgagcgccgaccgcctggaaggggtaatgcgcctgacgccggcgctgggacagcagaaaatttatgtgctggtgtttaccactccgcaggatctgcagcagaccaccaaattaatcgacccggcgaaagcctacgcgaaaggcaccggtaacgcggtgccggacattccggatccgatcgctaaacataccactgacggcaccttgagcctgaaggtgaaaacgtcttcgagttccagcgtgctggtgggcccgctgtttggctcctctggcccgggcccggtcaccgttggcaataccgccgcgccggtctataacgccccggccgccgcgcctgttgtcgcaccggtcgctgccgccccagcagccaaaagcgaaccgatgcttgacgataccgaaacctacttcaacaacggtattaagcaggcggtgaagcaaggcgatatcgacaaagccctgaaattgatgaacgaagctgaacgcctcggctcgaaatctgctcgttccacctttatcagcagtgtaaaaggcaaggggtga

SEQ ID NO: 91007 - DNA, 498 bp, Enterobacter aerogenes
atgccacatcctgcgcttacgcaactgcgtgcgctgcgctattttgccgccatacccgagctggacgcgccgctgcgcgactggctgttgctggaagactcaatgaccaaacgctttgagcaacaagggaaaaaggtcaccgtgaccatgattaacgaaggtttcgtcgggcgcgacgcgctggcgggagaagaagccctgctgccggaagaggcgcggtattggctgcgggagatcattctttgcgccgatggcgaaccctggcttgccggccgtactctcgtgccggaatcgacgctatgcggcccggaattagccctgcagcagttggggcagacgccgctgggtcggtatctgtttacgtcgtcgacgttaacccgtgattttattgagattggccgtagtgcacagctgtgggggcgacgttcccgtctccggctgagcggcaaaccgctgctgctgacagagctttttctgcctgcatcgccattgtattaa

SEQ ID NO: 91008 - DNA, 870 bp, Enterobacter aerogenes
atggagtggagtctgacgcagaataagctgttggcgtttcaccgcctgatgcgtactgacaaaccaatcggcgcgctattgctgctgtggccgacgctgtgggcgttatgggtggcttcacccggggtaccgccgctgtggattctggcggtatttgtcgctggcgtctggttgatgcgcgccgccggctgcgtcgtgaatgactatgccgaccgtaaatttgatggtcacgttaagcgtacggctcgccggccgttaccaagcggcgaggtcacagaaaaagaggcgcgcgtattattcgcggtgctggtggggctctccttcctgttggtgctgacgctcaataccatgaccatcctgctgtcggtcgcggcgctggcgttggcctgggtctacccctttatgaagcgctacacccatctgccgcaggtggtgctgggcgcggcctttggttggtcgatcccgatggcgttctcggcggtaagtgaagcgctgccgctcagctgctggctgatgttcctcgccaatattctgtgggcggtagcctacgacacccagtacgcgatggtcgatcgcgacgatgatgtcaaaatcggcattaagtcgacggcgattctgttcggcgaaaacgatcgtttgattatcggtattctgcaggttgccgtgctggtattgatgggggctgtaggctggctgaatgggctgaacttggcgttttactggtcgctgtttatcgcggcaggactgtttgtctggcagcagaaacttatcttcaagcgcgaacgcgataactgcttcaaagcgtttatgaataataactacgttgggctggtgctgtttctcggtctggcgatgagttacctgcagtaa

SEQ ID NO: 91009 - DNA, 2424 bp, Enterobacter aerogenes
atgtccggctggcaacgaatttactataaattactgaatttaccattacgggtgctggtaaaaagcaagtctattccggcagaacctgctcaggaattagggctcgatacctcgcgtccgataatgtacgtcttgccttataactccaaggcggacctgctgaccctgcgcgcccagtgcctggcgcatgatttacccgatccctttgaaccgctggaaatcgacggcacactgctgccgcgctacgttttcatccacggcggcccgcgcgtgtttacctactacacgccgaaagaagagtccatcaagctgttccacgactacctggatctccaccgtaaccatcccgacctcgacgtgcaaatggtaccggtgtcggtcatgttcggccgcgcgccgggtcgtgaaaaaggcgaagagaatccgccgctgcggatgcttaacggtattcagaaattcttcgccgtttcctggcttggccgcgatagcttcgtgcgtttctcgccgtcggtctctctgcgccgcatggcggatgagcacggtaccgataaaatcatcgcccagaagctggcccgcgtggcgcgtatgcacttcgcccgtcaacgtctggccgccgtcggcccgcgcctccctgcccgtcaggatctcttcaacaagctgctggcgtcgaaagctatcgcccgcgcggtagaagatgaagcgcgcagcaagaagatttctcacgagaaggcccagcagaacgccattgcgctgatggaagagattgccgctaacttctcttatgaaatgatccgcctgactgaccgtattctgggctttacctggaaccgtctgtaccaggggattaacgtgcacaatgccgagcgcgtacgccagctggcgcatgacggccatgagattgtctatgtgccttgtcaccgtagtcacatggactacctgctgctctcctatgtgctctatcatcagggtctggtgccgccgcatatcgctgcaggcataaacctcaacttctggccggctgggccgattttccgccgcctgggcgctttctttattcgtcgtacttttaagggcaacaagctctactccacggtattccgcgaatatcttggcgagctgttcagccgtggttattcggtggaatactttgtcgaaggcgggcgttcacgtaccggccgtctgctggatccgaaaaccggcaccctgtcgatgactatccaggcgatgctgcgcggcggtagccgccccatcacgctggtgccgatttatatcggctacgagcacgtgatggaagtgggtacctacgccaaagagctgcgcggcgcgacaaaagaaaaagagagcctgccgcagatgatgcgcggtctcagtaagctgcgtaatcttggccagggctacgttaacttcggtgaaccgctgccgctgatgacctatctcaatcagcacgtgccggaatggcgcgaagccatcgatcctatcgaagccgtccgtccttcctggctgacgccgacggtgaataatatcgccgccgacctgatggtgcgcatcaacaatgccggggcagctaacgccatgaacctgtgctgtacggcgcttctggcgtcacgtcagcgttctttgacccgtgagcagctaacccaacagttggattgctacctcgacctgctgcgtaacgtgccgtactccaccgattcgaccgcgccgacggcttccgccagcgagcttatcgaccacgcgctgcagatgaacaagttcgaagtcgagaaagacaccatcggcgatatcatcatcctgccgcgcgagcaggcggtgctgatgacttactatcgtaacaacatcgcccatatgctggtgatgccgtcgctgctggccgctatcgtgacccagcatcgccgcatctcccgtagcgaagtgctgcgtcatgtcgagatgttctatccgttcctgaaagccgaactgttcctgcgctgggaaaaagaagaactggcgggcgttatcgatgcgctgatggcagagatgcagcgtcaggggctggtggtgctgaatggcgatgagatgagcgtcaatccggcgcactctcgttccctgcagctgctggccgccggcgcgcgcgagacgttacagcgctacgcgatcaccttctggctgctgagcgccaacccgtccatcaaccgcagtacgctggagaaagaaagccgcaccatggcgcagcgtctgtcggtactgcatggtatcaacgcaccggagttcttcgataaggcggtgttcagtaccctcgtgctgaccctgcgtgacgaaggctacatcagcgatactggcgatgccgagccggcagaaaccctgaaggtctaccagatgctggcggatttgattacgtcggatgtacgtttgacgattgaaagcgccgctcaggacgacgcataa

SEQ ID NO: 91010 - DNA, 369 bp, Enterobacter aerogenes
atggccaataataccactgggttaaccagaatcattaaagcagcaggttattcctggaaaggtttccgcgcggcatgggttaatgaagccgctttccgtcaggaaggggtcgccgctattgtggccgtggcgatagcctgctggctggatgtcgatgtcattacgcgagtcctgcttattggctcggtcctgttagtgatgatagtcgaaattcttaacagcgcgattgaagcggtggttgatcgtatcgggcctgaacaccatgaactttccgggcgcgccaaggatatggggtcggcagcggtactactggcgataatcatcgcgctgatcacctgggccatgctgctgtggtcgcattaccgttaa

SEQ ID NO: 91011 - DNA, 609 bp, Enterobacter aerogenes
atgaaagcgttaacgaccaggcagcaagaggtgtttgatctcatccgggatcacatcagccaaacgggcatgccgccgacgcgtgcggaaattgctcagcgcttggggttccgttccccaaacgcggcggaagaacacctcaaagcgctggcgcgtaaaggcgcgattgaaatcgtctccggcgcttcccgcggcattcgtctgctgacggaagaagaacatggcctgccgctgattggccgcgttgccgccggcgagccgctgctggcgcagcagcatattgaaggtcactatcaggttgatccggcgatgtttaaaccgaatgccgacttcctgctgcgcgtaagcgggatgtcgatgaaagacatcggtatcctcgacggcgatctgctggcggtgcataaaactcaggacgtgcgtaacggccaggtggttgtcgcgcgtatcgatgaagaagtgaccgttaagcgtctgaaaaagcagggcaacgtcgttgaactgctgccggaaaacagcgagttttccccaatcgtcgtcgatctgcgccagcagaacttcaccattgaaggtctggccgtcggcgtgatccgtaacggtgagtggctgtaa

SEQ ID NO: 91012 - DNA, 1365 bp, Enterobacter aerogenes
atgacgctgcgatgttcctcctctgtctggtccctcttcatgctgctcaacgccgccgataaagcactgtggcgcctcgcgctaccaatgattttctccaatatcaccgttccgctgttagggctggtcgataccgccgttgtcggtcatctcgatagccccgtctatcttggcggcgttgccgtcggcgcgacggccaccagtttcctctttatgctgctgctgttcctgcgaatgagcaccactggcttaaccgctcaggcctatggcgccaaagatccgcagcgcctggcgcgcgcgctggtgcaaccgctgatcctggcgctggccgccgggatgctgatcgttctgttccgcatgccgctcattgacctcgcgctgcatatcgtcggcgggagcgaggcggtactggaacaggccaggcggttcctggaaatccgctggctcagcgccccggcgtcgttggccaacctggtgctgttagggtggctgcttggcgtgcagtacgctcgcgccccggtcatcctgctggtggtcggcaacgtgctgaatatcgtgctcgatctgtggctggtgatggggttgcatatgaacgtgcagggggcggcgctggcgacggcgctgtcggaatacgccacctttatcatcggcctgctgatggcgaaacgggtgctggcgctgcgtggcgtgacgtttgccatgttgaaggaggcgtggcgcggcaatatgcggcgcctgctggcgcttaaccgcgacatcatgctgcgctcgctgctgctgcagctctgctttggcgccatcaccgtcttcggcgcccgtcttggcagcgacgtggtggcggtcaatgcggtactgatgaccatgctgacctttaccgcatacgcgctggacggttttgcctatgccgtcgaagctcattccgggcaagcctacggcgcgcgtgacggtagccaactgctggaagtctggcgcgcggcctgtcggcagtcgggaatggtagcgctggcgttcgcgttaatctacagcgtggccggtgagcatatcatcgcgctattgacctctatcccatcattgcagcagctggcagaccgctatctgttctggcagatgatcctaccggtgattggcgtttggtgttatctgctggatggcatgtttatcggcgcgacgcgcggcgcggagatgcgtaatagcatggcggtagccgctgcggggtttgcggtgatgttgctctctgtgcccatgctcggcaatcacggcctgtggctggcgctggccgtgttcctggctttgcgtgggctttcgctggcgctcatctggcgccgccactggcagcgtggcacctggtttaactcaccctcctga

SEQ ID NO: 91013 - DNA, 213 bp, Enterobacter aerogenes
atgatgaataaagacgaaatcagcggtaactggaaacagttgaaaggtaaagccaaggaacagtggggtaagctgaccgatgacgatatgacggtcatcgaagggaagcgcgaccagttggtcggtaaaattcaggaacgctacggctatgccaaagatcaggccgaaaaagaggtgtctgactgggagcgtaagaacgatacgcgctggtag

SEQ ID NO: 91014 - DNA, 516 bp, Enterobacter aerogenes
atggataacaccacttcgcaagaaatgttagcgcaggctgaaaagctttgcgtgcaacgtggcgtacgcctgaccccgcagcgtctggaagtattgcgtctgatgagcctgcagcaaggggcgattagcgcctacgatctgctggatctgctgcgagaaaaagagccgcaggcgaagccgccgacggtctatcgcgcgctggagtttctgctggagcaaggttttgtgcacaaagtggaatcgaccaacagctatgtgctgtgccaccttttcgatcagccaacccacagttcggcgatgtttatctgcgatcgctgcggcgtggtcaaagaagagtgtgcggaaggcgtagaggatattatgcatacgctggcggccagaatgggcttcgctctacggcataatgtgattgaagcgcatggcctgtgcgcggcctgcgtggaagtcgaagcctgcagtactcgcgaacactgccatcacgatcataccatccagattaaaaagaaagcccgctga

SEQ ID NO: 91015 - DNA, 489 bp, Enterobacter aerogenes
atgaaacgacctgattgcattcgacattggcgcgaactggaaggtgcggatgattccacctaccccgatagtcacgagcttttttctattggcgcgccccttgcccgcggcctacggctaaatcggctgggcatccatcatgaacgtttaccgccgggacgcagaacctcttatccgcacgcggaaagcgatgaagaagaattcatctacgtgctggaaggctttccggaagtctggatcaatggctatttatggaagctggagccgggcgatagcgtcggctttccggcgggaactggcgtatgtcataccttcctgaataataccgagcaggaggtgcgactgctggtcgttggcgaggcgaataaaaagcacaaccgtatttactatccgctgaacccgggctatgccgcgactcgccaggaccgttgggtggatcaccctccgcagttctttggcccgcacgacggtaaaccgcgtaaaatatag

SEQ ID NO: 91016 - DNA, 1065 bp, Enterobacter aerogenes
atgcgccgtggtttgtgtttgtgctatagtagcgcccctttttacccggatgcttatttattcgccatgatgccagaatccacgtctaccgcttttgccgcccaccgtttttctatcgcgcccatgctcgattggaccgacagacattgccgctatttcctgcgtctgctgtcgcgccatactctgctgtataccgaaatggtcactaccggcgcgattattcacggtaaaggcgactatctggcctatagcgaggaagaacatccggtggcgctgcagctgggggggagcgatcctgcggcgttggcgcaatgcgcgaagctcgccgaggcgcgcggctatgacgagattaacctcaacgtcggctgcccctctgaccgcgtgcagaacgggatgtttggcgcttgtctgatgggcaatgccgcgctggtggcggactgcatcaaagcgatgcgcgacgtggtgtcgatcccggtaacggtaaaaacccgtattggcattgacgatcgggatagctatgaattcctgtgtgatttcattgagaccgtctccggcaaaggggagtgtgaaatgttcatcattcacgcccgtaaagcctggctttccggcctgagcccgaaagagaaccgtgaaatcccgccgctggattatccgcgcgtctggcaactgaaacgtgattttccgcatctgacgatggcgattaacggcggaattaaatctctggcagaggccaaacagcagcttgagcacatggatggcgtgatggtggggcgtgaagcctatcaaaatccgggcattctggcttcggtggatcgtgagattttcggcgtcgacggcgcggatgccgatccggtggcggtggtgcgcgcaatgtacccctatatcgagcgtgagctcagcaacggtacctatctgggtcatatcacccgccatatgttggggttgttccaggggatccccggcgcgcgtcagtggcgccgctatctcagcgaaaacgcccacaaagcgggcgccgatatcaacgtgctggagcacgcgctgaagctggttgccgataagcgttaa

SEQ ID NO: 91017 - DNA, 243 bp, Enterobacter aerogenes
atgctggaactcttatttgttattggcttttttgtcatgttgctggtcaccggcatctcgctgcttggcattattgccgcgctggttgtcgccacggcgctgatgttcttcggcggcctgttcgcattaatgtttaaactgctaccctggctgctgctggcggtggctgtcgtatgggtcattcgggcgatgaaatcgccgacgaccacccgctatcgtcgtgaagatcgctggcgctattaa

SEQ ID NO: 91018 - DNA, 984 bp, Enterobacter aerogenes
atggcaacacgaattgaatttcccgcgcatggaggccccgaggtgctgcatgcggtcgagtttacccccaacgatcctgccgagcacgaaatccaggtagaaaataaagctatcggtatcaactacatcgacacctacatccgcagcggcctgtatccgccgccctcactgccgagcggtttgggcaccgaagccgccggtatcgtcagtaaaatcggcagcggcgttaaacatatcaaggttggcgatcgggtggtgtacgcccaggccgcgcttggcgcttatagctcggtgcataacgtgcatgccgacaaagcggcgattttacccaatgcgatttcctttgagcaggccgccgcctcgtttcttaaaggattgaccgtctggtatctgctgcgcaaaacctacgagattaaagccaacgagaccttcctgttccatgcggctgcgggcggcgtggggctgattgcctgccagtgggcgaaagcgctgggggcgaaacttatcggcaccgtcggcagcgagcaaaaagcgcagcgcgcccggcaggccggcgcctgggaaaccattaactaccgcgaagagaatattgccgagcgcgtcaaggcgctgaccggcggcaaaaaagtcgccgtggtttacgattccgtaggtaaagatacctgggaggcctcgctcgattgtcttcagcggcgtgggctgatggtcagcttcggcaattcatctggcccggtaaccggcgtaaatttgggtatcctcaatcagaaaggctcactctatgtgacccgcccttctctgcaaggctacatcaccaaccgggaagagctaacggaagccagcaatgaactgttttcgctgatcgccagcggcgtgatcaaggtcgatgtcacggataatcagaaatacgccctgcgtgacgcccggcgcgcgcatgagattctggaaagccgggtgaccgaggggtcgagcctgctgctgccgtaa

SEQ ID NO: 91019 - DNA, 1416 bp, Enterobacter aerogenes
atggcaggaaataaacccttcaacaaaccacagacagaacctcgcgaacgcgatccgcagctcgccgggttgaaagtcccgccgcactcgattgaagcggaacagtcggtgttgggcggtttaatgctggataacgagcgctgggacgacgtcgccgaaagggtggtgtcggaagatttctatacccgtccgcatcgtcatatctttaccgagatggcgcgcctgcaagagtcaggtagcccgattgacctgatcaccctcgccgaatcgcttgagcgtcaggggcaactggatagcgttggcggcttcgcctatctggccgagctctccaaaaatacgccaagcgcggcgaacatcagcgcgtatgccgacatcgtgcgcgaacgcgcagtggtgcgtgaaatgatttcggtggccaacgaaatcgccgaagccggtttcgacccccaagggcgcaccagcgaggacctgctggatctggcggaatcgcgggtatttaaaattgccgaaagccgcgccaataaagatgaagggccgaagaacatcgccgatgtgctcgatgccaccgtcgcccgtattgagcagctgttccaacagccgcacgatggcgtcaccggggtgaataccggctatgacgacctcaacaaaaagaccgccgggctacaaccttcggatctgattatcgtcgccgcgcgtccttcgatgggtaagacgacatttgcgatgaacctcgtggaaaatgcggcgatgctgcaggataaaccggtattgatcttcagtctggagatgccctccgagcagatcatgatgcgttctctggcctcgctatcgcgcgtcgatcagactcgtatccgtaccggccaactggacgatgaagactgggcgcgtatctccggcactatgggtatcttgctggaaaaacggaacatttatattgatgattcctccggcctgacgccgacggaagtgcgttcgcgcgcccgacgtatcgcccgcgagcacggcggtatcggccttatcatgatcgactacctgcagctgatgcgcgtaccgtcgctctccgacaaccgtactctggagatcgccgaaatctcccgctcgctgaaggcgctggcaaaagagttgcaggtgccggtggtggcgctgtcgcagctgaaccgctctctggaacagcgcgccgataaacgcccggtcaactccgacctgcgtgaatccggctctattgaacaggatgccgacttaatcatgttcatctaccgtgatgaggtttatcacgagaacagcgatttaaaaggtattgctgaaattatcattggtaaacaacgtaacggcccgatcggtacagtacgactgacctttaacggccagtggtcgcgtttcgataattatgccggccctcagtatgacgatgagtaa

SEQ ID NO: 91020 - DNA, 1080 bp, Enterobacter aerogenes
atgcaagcggcaactgtagttatcaaccgccgcgctctgcgacacaacctgcaacgcctgcgtgaactggctcctgccagcaaactggttgcggtggtgaaagcgaacgcctacggacacggccttcttgagaccgcgcgaacgctgaccgacgccgatgccttcggcgtcgcccgcctggaggaggcgctgcgcctgcgtgaagggggtattacccaaccgatattgctgctggaaggtttctttgaagcggcggatctggcgctgatttccgcgcagcacctgcataccgtggtacatagcccggaacagctggcggcgctcgaacaagcggaactggccgaaccggttaccgtctggatgaagctggataccggtatgcatcgccttggcgtactgccggaacaggccgaagcgttttatcagcggctaagccggtgcaaaaatgtccgccagccggtgaatatcgtcagccatttcgctcgcgccgatgagcctgaatgcggcgcgaccgagcgtcagctggatattttcaccacctttaccgaaggtaagccggggctgcgttctattgccgcctcgggcgggatcctgctgtggccgcagtcgcatttcgactgggcgcggccgggcatcattctctatggcgtttcgccgctggagaaccactctaccggtgaggatttcggctgcctgccggtcatgtcgctgacctccagcctgattgcggtgcgcgagcataaagccggggagccggtgggctacggcggcacctggattagcgagcgcgatacccgcctcggcgtcgtggcgatgggctatggcgatggctatccacgcgccgcgccctccggcacgccggtgctggtcaacggccgcgaagtgccgatagtcggccgcgtggcgatggatatgatttgcgttgacctcggccctcaggcgcaggatcaagccggcgatccggttgtgttatggggagaagggctccccgttgagcgcatcgcggaaataacgaaagtgagtgcttacgaacttatcactcgcctgacctccagactggctatccgttacctcgactaa

SEQ ID NO: 91021 - DNA, 1194 bp, Enterobacter aerogenes
gtgtttcaaaaagttgacgcctacgccggcgaccccattctctccttgatggagcgtttcaaagaagatccgcgtagtgacaaagtgaacctcagcatcggtctttactacaacgaagacggcattattccgcaactacaggccgtggcggatgccgaagcacgactcaatgcccagccgcacggcgcctcgctgtatctgccgatggaaggtctcaatagctaccgccacgccattgcgccgctgttatttggtgccgaccatccggtgctgaaacaaaaccgcgtagcatcaattcaaaccctgggtggctccggcgcgctaaaggttggcgccgatttccttaaacgctacttcccacagtctcgcgtatgggttagcgacccgacctgggaaaaccacatcgccatatttgaaggggctggattcgaagtaagtacttacccatggttcgatgatgagaccaacggcgtacgttttgaagccttcctcgccaaactacagacgctccctgagcgcgatatcgtgctgctgcatccatgttgccacaacccaacgggcgccgatttgagcaacgcacagtgggatgaagttgttaaggtgttgaaagcacgtaatttaattcctttcctcgatattgcctatcagggctttggcgccggtatggaagacgatgcctacgctatccgcgcgattgccagcgccggcctgccgatgctggtcagcaactcattctccaaaatcttctcgttgtacggcgaacgcgtcggcggcctgtcaatcgtctgcgatgatgctgaaaccgctggccgcgtgctgggtcagttgaaagcgacggtgcgtcgtaactactccagcccgcctaattttggcgcgcaggtggtggcggcagtattgaacgacccggcgctgaaagcctcatggctggcggaagtggaagctatgcgtacccgcatcctggcgatgcgtcagacgctggtggatgcgctgaaagaggccgttcccggcaaaaactttgactacctgctgaagcagcgcggcatgtttagctacaccggattgagcgcggcacaggtagatcgtctacgcgaagagtttggcgtttatctgattgccagcggccggatgtgcgtggcgggacttaactcgcgtaacgtccagcgtgtcgcccaggcgtttgctgccgtaatgtaa

SEQ ID NO: 91022 - DNA, 714 bp, Enterobacter aerogenes
atgcgtaagttaactttggccattagcgccacttgtctgttgttcgctctgaatagctccgttgtcgctcgcgcgtccactccacagcccatttgggaagggacgaatgttgcgaaactcgccgaacaggcgccgatccattgggtatcggtagcgcaaatcgaaaatagcctgctgggccgcgcgccgatggcggtgggtttcgatatcgatgataccgtgttattttccagccccggtttctggcgcgggcaaaaaacctattctcccggcagcgaagcttatctgaagaacccggagttctgggaaaagatgaataacggctgggatgagttcagtatgccgaaagaagtgggccgccagctgatcgcgatgcatattaagcgcggcgacagcatctacttcgtcaccggccgcagccagaccaaaactgagaccgtctccaaaaccctgcaggatgatttcctgatccccggtgctaacatgaacccggtgatttttgccggcgataagcccggccagaacacgaaaactcagtggttacgcgagaagaatatcaaagtcttctacggggactctgacaacgatatctcggcggcccgcgatgccgatgcgcgaggaattcgcgtgctgcgtgcggcaaactcctcctataaacctttgccgatggccgggtcgcagggggaagaggtgattgtgaattcagaatattaa

SEQ ID NO: 91023 - DNA, 417 bp, Enterobacter aerogenes
atgtggcatcagcaaaccctgacattaggcccgaaatctcgtggtttccatctggtgaccaacgaaattattggtcaaatccgcgagctctcgcatatcaaggttggcctgctgcatctgttactccagcatacttccgcttccctgacgttgaatgagaactgcgatcctacggtccgttttgatatggaacagcatttcctcaatgccgtaccagacaacgcgccgtatgaacacgattatgaaggtcctgatgatatgccctcgcacattaaatcatcgctgctgggcgtttccctgatgttgccggtgcagaacggcaacgtcatgttagggacctggcaggggatctggctgggggagcatcgtattcacggcggttcgcggcatattgtcgcaacgctcatgggagaataa

SEQ ID NO: 91024 - DNA, 354 bp, Enterobacter aerogenes
atgaccatatcggatctactgctgtactgcatggcgaagccgggcgcggagcaaagtgttcatagcgactggaaagcgacgcaaatcaaggtcgcggatgtgttattcgccatggtgaaagaggtggaggataagcggccggccgttgcgttaaagaccagcccggagcttgccgagctgctgcgcgaacaacatcgcgatgttcgccccagtaggcatctgaataaagctcactggagcacggttttcctcgatggctctctgccagattcgcagatttactatctggtggatgcttcctatcaacaggcggtcgacctgctgtcggaggataagcggaggcagttggcctag

SEQ ID NO: 91025 - DNA, 318 bp, Enterobacter aerogenes
atgccgacaaccatggagattcgcgcgctgttgtccgcttgcgcgattgatagcgccgaatggatgccattactgaatagagtacttggcgatgagcagcgcgaagtacgcgatagcgccatctttttgctacaggcattgcagcaaaaagctcagggctggctgaccgaagacgatctacggctactgctggaaggtcagcgcgatattgcccgcattcgcgccaacaaccagagcatcgcgcgccaggcgcagctgcaggggacgttgttacggctgctcgatatcacgctgctggcgctggctggcaggctataa

SEQ ID NO: 91026 - DNA, 408 bp, Enterobacter aerogenes
atgcgagtaccacgcctcattccgttatttatcatcgccgccgcgctatgtacgttaagcgcctgctcatgggttggccgctacagcgatacggcctatcagcaattgctcacactcaagcagttgcatttgcagttcatcgccaccgcagcgacgcaggacgatcaacaattgaacaaggaagatgaacagattcgccagcagttcacgcaggcgatcgcccaaggcgacgcgctgcgccaggaaaatttcaggatacttgaaggtaactatttacgcgtttacgcccatcgccagatgctgggcgcgcccattacccctgccgaagcgcaatatttaacgcggcagaccatttatctctatcaacaggctatcgctggcgaatgtcagcgtacagggagggaataa

SEQ ID NO: 91027 - DNA, 2826 bp, Enterobacter aerogenes
atggataagatcgaagttcggggcgcccgcacccataatctcaaaaacatcaacctggtcatcccgcgcgacaaactcattgtcgtcaccgggctttctgggtcaggcaaatcctcactcgctttcgacaccctgtatgccgaaggccagcgtcgctacgtcgaatcgctctccgcctatgcgcgacagttcctgtcgctgatggagaaaccggacgtcgatcatatcgaagggctgtcgccggcgatttctatcgaacagaaatcgacctcccacaacccgcgttcgacggtaggcaccattactgaaatccacgactatctgcgactgctgtacgcccgcgtcggcgaaccgcgttgcccggaccacgacgtcccgctggccgcgcaaaccgtcagccagatggtcgataacgtgctctcacagccggaaggtcagcgcctgatgctgctggcgcccattattaaagagcgtaagggcgagcacaccaaaacgctggaaaaccttgccagccagggctacattcgcgcgcggatcgatggcgaagtctgcgatctttcggatccgccgaagttagagctgcaaaagaaacacacgatcgaagtggttatcgatcgcttcaaagtacgtgacgatctggcgcagcgtctggcggagtctttcgaaaccgcgctggagctctcaggcggcaccgccattgtttccaacatggatgacagtaaagcggaagaactgctgttctcggcgaacttcgcttgcccgatttgcggctatagcatgcgcgaactggagccgcgtctgttctccttcaacaacccggcaggagcctgcccgacctgcgacggccttggcgttcaacagtatttcgatcccgatcgggtgattcagaatccggagctatcgctggctggcggcgccatccgcggctgggatcgccgcaacttctactatttccagatgctgaagtcgctggcggatcactataagtttgatgtcgaagcgccctggggcaccctcagcgctaatgttcagaaagtcgtgctgtacggttcaggtaaagagaatattgaattcaaatacatgaacgaccgcggcgacacgtcagtacgccgccatccgtttgaaggcgtgctgcacaacatggagcgccgttacaaagagacggaatccagcgcggtgcgcgaagagctggcgaaattcatcagcaaccgtccgtgcgccagctgcgaaggcacgcgtctgcgccgcgaagcgcgccacgtgtttgtggagaacacaccgctgccgaccatttccgatatgagcatcggccacgcgatggacttcttcaacaacctgaagctgtccgggcagcgggcgcaaatcgctgagaaagtgctgaaagagattggcgatcgtctgaaattcctcgtcaacgtcggtctgaactacctgacgctctctcgttcggcggagacgctctccggcggtgaagcgcagcgtattcgtctggcgagccagattggcgcggggctggttggcgtgatgtacgtgctggatgagccctccatcggcctgcaccagcgtgataacgaacgcctgctcggtacgcttatccacctgcgtaatctgggcaacacggtcattgtcgttgaacatgacgaagacgccattcgcgccgccgaccacgtgatcgacatcggtcccggcgctggggttcacggcggccaggtggtggctgaagggccgctggacgccattatggcggtaccagaatcgctcaccgggcagtacatgagcggtaaacgcaaaatcgaagtgccgaaacagcgcgtcgccgccgatccggaaaaagtgctgaaactgaccggcgcacggggcaataacctcaaggatgtgacgctgacgttgcctgtcggcctgtttacctgcattaccggcgtttccggttccggtaaatcaacgctgattaacgataccctgttccccatcgcccagcgccagctgaacggcgcgacgattgccgagcctgcgccgtatcgcgatgttcaggggctggagcacttcgataaagtcatcgatatcgaccagagcccgattggccgtacgccacgttcaaacccggcgacttacaccggcgtgttcacgccggtgcgcgaactgtttgccggtgttccggaatcacgttcacgcggctatacgcctggccgcttcagttttaacgtccgcggcggccgctgcgaagcctgccagggcgacggagtgatcaaggttgagatgcacttcctgccggatatctatgtgccgtgcgaccagtgcaaaggcaaacgctataaccgcgaaacgctggaaattaagtacaaaggcaaaactatccacgaagtgctggatatgaccatcgaagaagcgcgcgaattctttgatgccgtgccggcgctggcgcgtaagctgcaaaccctgatggatgttggtctgacctatattcgtctcggccagtcggcaaccacgctctccggcggtgaagcccagcgcgtgaagctggcgcgcgaactctccaagcgcggtaccggccagacgctgtatatccttgatgaaccgaccaccggtctgcatttcgccgatattcagcagctgctggacgtgctgcatcagctacgcgatcagggcaataccatcgtggtcattgagcacaacctcgacgtgattaaaaccgccgactggattgtcgacctcggcccggaaggcggtagcggcggtggggaaattctcgtttccggcacgccggaaaccgttgccgaatgtgaagcctcacacacggcgcgcttcctgaagcccttgctgaagtaa

SEQ ID NO: 91028 - DNA, 525 bp, Enterobacter aerogenes
atggccagcagaggcgtaaacaaggtgattctcgtcggtaatctggggcaggacccggaagtacgctacatgccaagtggcggcgctgtcgccaacttcacgctggcaacttccgaatcctggcgcgataagcaaaccggcgaaatgaaagagcagactgaatggcaccgcgttgtgttgttcggcaaactagcggaagtcgctggcgaatacctgcgtaaaggttctcaggtttatatcgaaggccagctgcgcacccgtaaatggaccgatcagtccggtcaggacaagtacaccactgaaatcgtggtaaacgtcggcggcaccatgcagatgctgggcggccgtcagggcggcggcgcaccggcaggcggcggccagcagcagggcggttggggtcagcctcagcagccgcagggcggcaaccagttcagcggcggcgcgcagtctcgtccgcagcagcaggccccggcagcgccatctaacgaaccgccgatggacttcgacgacgatattccgttttaa

SEQ ID NO: 91029 - DNA, 177 bp, Enterobacter aerogenes
atgaagcgtgcgttcctgtggcttattcagtcatttttctacctaatacctgccgttcttattgtcgcggggatttatatttttgtgcgttttatcccaaattacgcggcaatactgagcgccctgtggatagtcattgtttctattgtctatataaaatacaacaaatggtattag

SEQ ID NO: 91030 - DNA, 633 bp, Enterobacter aerogenes
atgcacgccaactatatgtctaccatcgaaaaagtgaaactaggcgcagagcggctagtcaattatagcgcatgccttttgccagacgaatactatcgcagttcctgccgtgacacatggcgagaggacaaacgattggttatggccttaggtgaaatttatgacagaggcgatgtcactctggacatggttgaaatatattttcggaaaactcttaccaggctcggcgagcaaaaaagcaatagcctcgtagcccacattcaaaaattgttaggcaaagcagcagaacattcatcagttaaagccagcaagttagcgctgtcacttaccattgctaatttagtcattagcagcagggattttaaacagacccatatcaaactcgttaactccttttcggcatggtttgtgaacggaacaacgctctatgctaaagcacagatagccgcatccgcagctaatagactcaagtttcaggatcctgcttactatcaagcactgtataaagaaaatattgaaatgctttattttcttattgagccgcaaatgtcggagataatttatcaaataaactctggagataataacgaagaaaaaatcggtgatgctttgtatgagatcttgagaaaatga

SEQ ID NO: 91031 - DNA, 243 bp, Enterobacter aerogenes
atgagaaaaacaaaaaaactgctgatttatgttccaattgttattattttctttctcattataccggagatcattttacgtacattgtcatcggatcagctcgggcgggttagtgatttcactagtctgggggggctgcttaatcccctcctttccctgctcatttttcttggacttttttccatcattttagctgtaatcaccgtgtctgtagtgggtaagatcttccgttggctttgttga

SEQ ID NO: 91032 - DNA, 255 bp, Enterobacter aerogenes
atggaatggttgtcctcccccaaccgtatctccatcaccttctggctggacgatgaagtggttaaggcatggtacgaagctgcaacaccgtcatcacgggggcgacctcagcgctattctgatctcgccatcaccactgttctggtgattaaacgtgtattccggctgattctgcggactgtacagggatttatcgattccatttttgccctaatggacttttccctgcgctgcgcgattacgatgctcaggtag

SEQ ID NO: 91033 - DNA, 1626 bp, Enterobacter aerogenes
atgcattgtctaaaatataatcatctccctgcagagtgtcgcatcatgaacatcttcggttttcagcgtcgcctggcgacgctttccgcctgccttctcgccttactgtttgccgtctcagccccggtatcttcgacggaaaaaccgccgccgttgcaaaatgataaagctgaactggctatcaatatggatcacatcatgcagccgcaaaaaggcgatcttcccgacatgatcaaccgacgggcgatccgagtgctaacgacttacagcaagacattcttttttatcgacaaaggtacccaacgcggcgctacccacgatcttttcatcgctttagaaaaagatctcaataatcagctcgcaaaagagaagaagctgaagcagaaacacctcaaagtgcggatcgttttcatcccagtcacgcgggataacctgttcaaagcgctaaatgaaggcaagggggatatcgccgccgccaatctcacgatcacctcgtcgcgtcaggagcaggtcgcctttaccaccccgctctatagcgatgtcaaagaactgttggtatcggggccatcatcgcccgacgtgaaaaacctggagcagctttccggtaaaaccgtgtttgtccgccgctcctccagctattacgaaagcttgcagacgcttaacgcccgcttcgctaaagcgtcgctgccgccggttattctgcagaaagcgccagaggcgctcgaagatgaggatcttctcgaaatgctcaatgccggcctgattcccctgatcgtagtggatcgccataaggcgcttttctggaaacaggtgtttccaaaaattcaggtgcatgaaaacattgtgctgcgggatggcggcagcatcgcctgggctgtgcgcaaagataacccacagcttctcgcggaactgaataacttcgtgaagcacaatcgtcagggaagtacgttgggcaacaccattctgctgcgctacctgagaagcgcgacctacgttaaaaacgccgcagccaacagagagcgcgctaagtttttgcagatggtggaaatttttagaaaatatggcgaacgctatgatgtcgactggctgctgatggccgcccagggatatcaggaatcgcggctcaatcaatcggtacgcagccacgtcggcgcaatcggcgtaatgcaggtcatgcccgcgaccggcaaggaattgcaggttggcgatatcaaaaaaatcgaccccaacattcatgccggcgttaagtatatgcgctggatgatcgatcattactatggcgaccaaccgatgacgccgcttgataaagcgctgttttcgtttgcttcttacaatgccggcccggcacgcatcgcgcgtctacgcgcggaaacccaaaaacgcggctttgacccaaatatctggtttggcaacgtcgagaatctcgcagcagagaagatcggcgctgagacggtgacctacgtcagcaatatctataaatactacattgcctatcggctgattatggatgatatcgcccgtaaacaaaaagctaccgccgcgccgctacccgagcctggaacgggtaagccgcagccagacacagttccgccaaccgctcctgaagcttcggccccggcaacctga

SEQ ID NO: 91034 - DNA, 360 bp, Enterobacter aerogenes
atgaaatggactattcttaacacccttatctgcccgcataccggcgttgcgttctcgtcaatatcggggctgcggtttctgaagtttattatctggtatgaagccgatcttttattgcttcccggtgaaacaatgaaacttttttcctctaaagttttaattaatgatcaatatcattcattaaaaatttataacattacgcgttatgacgataaacagtgggaaacgttaagagagcggccaatctgcccgtacaattttgaagccgcggaaccagaatcttgtctttatcaatcatattgtgcagttaagcgctgcccaaacgagcgtctacggccgcagttatgcgaacaatattag

SEQ ID NO: 91035 - DNA, 282 bp, Enterobacter aerogenes
atggcttccattactaccagtgtcgttcttttgcgctggcccctggtgagcgcagtattgatgttcctggccagctcgctgaatattcaattacgtaaaagcgactatgccggtttagcgattatttgtagctgtctgggcctcgctgccgcctgttggtttgctaccggcttgttaggcatcaccatggtggatgtcgccaaaatctggggcaacattaaagacgtcatggttgaagtcatgagtcagacgccaccagaatggccaatgatgatgacctga

SEQ ID NO: 91036 - DNA, 1605 bp, Enterobacter aerogenes
atgagtcgtagcgcgccgcataaggcgttcaaaatattcttcaccatactggtggttgtgctgccggtggtgttggcgttgtggttcgcgcaaattagagcccgggaagaaatctccgatagattgcagtcgttttcgcagctggcgttgcaaaaaacggaaatggtcattcatgaatccgagcaggcgcgcgaaaaggccatgcagtttacaggggaattgtgttccccgcagcatcagcattacatgttgaatattgtccgcggattgctgtatgtcgatgacttgatttacgcgaacggtaacaaattcatctgttctactgcagttcatcccgaagaggggtggagaatagccgcggcgaattacacccgccagcccgacgtctctatttactactaccgcgatacgccgttttatccgggctatgatatgaattatatgcagcgcggccattatgccgtggtggttaatcctctctcttatagctcggttatttccagtgatagagacttagcctacggcgtcttcgataccaaaacgaatatgtttttctcagtgagtaaaaacgttgatgccagggaactacaccgccttatccgccacgaagatgctttttttaatcaggatggtcgggtttataccgtcgctcattcctcgattaggccgattgcggttatcatgtccacctcgcgcgccagctattatgccagcctgtacgatcaggtcaccttgaccctgccgttagggatcatctgcagcatattgattctgatggtatggtcgcgcagccgtcagcagtatcattcaccgcgtaataagctcttgcgggcgttaagccaccgccagctatgtctgcattatcaacccattatcgacattaagaataatcgctgcgtcggcgccgaggcgctgctacgctggccgggatttgatggtccggtcatgagtccggcggagtttattccattggcggaaaactcaggcatgattgctcaggtcacagattacgtagttgacgagttgttcaacgatcttggcgaatatttgtcccgacacccgcagctctatatcgcgattaatctttcggcctcggatttccactccgcgaggttgattgcacagatcactgagaaagcgcgcagctatgcagtttgcgtgaagcaaatcaaaattgaagtcaccgaaagggggtttatcgatgtgccgaaaaccacgccggtgatccaggctttccgcgaagcgggctatgagatagctattgatgatttcggtaccggttattccaacctgcacaatctctattcgctcaacgtcgatattctgaagattgataaatcttttatcgatacgctgacgactaatagcaccagccacctgattgccgagcatatcatcgacatggcgcgtagcctgcgtttaaaaaccatcgctgaaggggtagaaacgctggatcaggtggattggttgcttaagcgcggcgtgcagttttgtcagggttggcattttgccagggcaatgccgccacaggagtttatccagtggctggcgaaatccccgatcttactgcgtccgccgcacgacggtcgtcaggcggaaatctga

SEQ ID NO: 91037 - DNA, 207 bp, Enterobacter aerogenes
atgtcccatcaggatattatccaaacgcttattgaatggattgatgaacatatcgatcaaccacttaacattgatgtagtcgctaaaaaatcgggatactcgaaatggtatctacagcggatgttccgtaccgtcacccaccaaacgctgggtgattacattcgccagcgccggctactgctcgccgctgaggcgctaaggcgctaa

SEQ ID NO: 91038 - DNA, 459 bp, Enterobacter aerogenes
atggaaaagaaaccaacccgtatcaaaatgctgctctcccctggggaagtggcgaaacgaaccggcgtcgccgtctcggcgctgcacttttatgaaagcaaagggcttatccgcagccagcgcaacgcgggcaatcagcggcgatatcgccgcgatgtgctgcgtgcggtcgctatcatcaagattgcgcaacgtattggtattccgctggcgaccatcggcgaggcattcggcgtcctgccggaagggcataatctgagcgccaaagagtggaaacagctgtcgtcgcaatggcgggaggagctggaccggcgtattcacaccctgaccgcgttgcgcgaccagctcgacggctgcatcggttgcggctgtttatcgcgccgcgattgtccgttacgcaaccctggagataagttgggtgaagaggggaccggcgcacgcctgctggaagaggattaa

SEQ ID NO: 91039 - DNA, 669 bp, Enterobacter aerogenes
atgttgacggtccatcacctcaaccaatcccgctcgcagcgcgtgctgtgggcgttggaagaactgcaattgtcctatcaggtagtctgctaccagcgtgaaaaaaacatgcaggcgccagcggaactgaaaaaaattcacccgttgggtaaatcgccggtgcttgaggatcagggcgtggtgctggcggagtccggcgcgattctggaatatctgcaggagacctacgatagcgctcagcagctcagaccgctggggcgggaagagaaactgcaatatcgcttctggctccattatgccgagggatcgttaatgcctttgttgttgatgaagcttatcttcgccagcctcggcaagccgccggtgccgcttggcatgcgcacgctgggcggggcgttgggcaaaggggtgcaaaaagcgtggctggacaaacagctggcgacccacgcggcgtatatagaacagcatctggcccgtcagccgtggtttgccggtgacgcgttgagtatggcggatattcagatgagctttccggtaatggcgctactggcgcggggcggcattgaaggcttgcagcatacccggcgctggcagcagcaggttgagtcacgtccggcatggattagcgctattgagcgtggcgggccgtttaccctacctggcggttaa

SEQ ID NO: 91040 - DNA, 1350 bp, Enterobacter aerogenes
atgtctacgccttcagcgcgtaccggcggttctttagacgcctggtttaaaatttcagctcgcggcagttccgtacgtcaggaaatcgttgccgggttaacgaccttcctggcgatggtgtactcggtcattgtggtgccgggaatgctggggaaagcgggttttccgccggcagcggtgttcgtgtcgacctgcctggtggcgggcgtcggttcattagtcatgggcctgtgggccaacctgccgctggctatcggctgcgcgatttcgctgaccgcgtttaccgcttttagcctggtgctggggcagcacatcagcattccagtagcattaggcgccgttttcctgatgggggtgttgttcaccattatctccgctaccggtattcgtagctggatcctgcgcaacctgccgcagggtgtggcgcacggcaccggcatcggtatcggcctgttcctgctgctgattgccgccaacggcgtcggcctggtgattaaaaacccgctggacggcctgccggttgcgctgggcaacttcgacagtttcccggtgatgatgtcgctgattggcctggcggtcattatcggtctggaaaaactgaaagtgccgggcggcattctgctgacaatcatcggggtatcaattatcgggctgattttcgatccgaacgtccacttctccgggattttcgccatgccgtcgctgagcgatgacaaaggtaattcgcttattggcagccttgatatcatcggcgcgctgaacccggtggtgttaccaagcgtactggcgctggtcatgaccgcagtattcgatgccaccggcaccattcgcgcggttgccggccaggctaatctgctggataaagacgggcagatcatcaacggcggtaaagcgctgactaccgactccctgagcagcgtgttctccggcgtggtgggcgcggctcctgcggcggtgtatatcgaatcggcggccggtacggcggcgggcggtaaaaccggcctgacggccgtcaccgttggcgtgctgttcctgctgatcctgttcctttctccgctctcctatctggtgccggcctacgcgaccgcgccagcgctgatgtacgttggcctgctgatgctgagcaacgtggcgaaaatcgacttcaatgacttcgttgatgcgatggcggggctgattaccgcggtgttcatcgtgctgacctgcaacatcgtgaccggcatcatgatcggtttcgcatcgctggtgattggccgcgtggtatccggcgagtggcgtaaactcaatgcgggcaccgtgatcatcgcggcggcgctggttatcttctatgccggcggctgggcgatttaa

SEQ ID NO: 91041 - DNA, 1647 bp, Enterobacter aerogenes
atggaaatattcttcaccatactcatcatgacccttgtggtctcactctccggggtggttacacgcgtactgccctttcaggttccactaccgttaatgcaaatcgccatcggcgcgctgttagcctggccaacctttggtttgcacgtcgagttcgaccctgaactcttcctcgttctgtttattccgccgctgctatttgccgatggctggaaaacgccgacccgcgaatttatcgagcacgggcgggaaatcttcggcctggcgctggcgctggtggtggttaccgtggttggtatcggcttcctgatttactggattgtgccggggatcccgctggttccggcgttcgccctggcggcggtgctgtcgccgaccgatgccgtggcgctgtccggtattgttggcgaagggcggataccgaagaaaatcatgggcatcctgcagggcgaagcgctgatgaacgacgcctctggcctggtgtcgttaaaatttgccgttgccgtggcgatggggacgatggtgttcaccattggcggcgcaaccgttgagttcttgaaggtggcgattggcggcatcctggcaggttttgtggtcagctggttgtatggccgctcaatgcgtttcctcagccgctggggcggcgatgaaccggcaacgcaaattgtgctgctgttcctgctgccgttcgcttcctacctgattgccgaacatatcggtttctcggggatcctggcggcggtggccgcgggtatgactatcacccgttccggggtgatgcgtaccgcgccgctggctatgcgcctgcgcgccaacagcacctgggccatgctggagttcgtgtttaacggcatggtgttcctgctgttgggcctgcagctgccggatatcctgtcgagctcgctggtggcggcggaagccgatccgaacgttgaaacctggatgctgttcaccgatatcgtgctgatttacgccgcgctgatgctggtgcgtttcggctggctgtggacgatgcgtaagcttagccagcgcttcctgaagaagaaaccgatggagtttggctcctggaccacccgcgagctgctgatctcctccgtcgccggggtgcgcggggcgattaccctcgccggtgtgctatcgattccgctactgctgccggacggcaacgtcttcccggcgcgttacgagcttattttccttgccgccggggtgattcttttctccctgtttgtcggggtgatcgcgttgccgattctgctgcggcgtattgagtccaccgaccacgtacagcagcgcaaagaagagcgtctggcgcgtgccgcgacggcggatgtggcgattgtcgcgattcagaaaatggaagaacgcctggcggcggataccaaagagaatatcgacaatcagctgctgaccgaggtgagttcgcgtgtcatcggtaatttgcgtcgccgcgtagatgggcgtaacgatgtcgaaacctcgatgctggaagagagccttgagcgccgtttccgtctggcggcgctgcgttcggaacgcggcgagctgtaccacctgcgcgcgacgcggcaaatcagcaacgagacgttgcagaaactgctgcacgatctcgacctgttagaagcgctgttaatcgaagatcagtaa

SEQ ID NO: 91042 - DNA, 882 bp, Enterobacter aerogenes
atggatatacgtacgttgcggtattttgtcgaagtcgtccgccagcaaagctttacccgcgcggcggagaagctcttcgtcacgcagcccaccatcagcaagatgctcaaaaatctggaagacgagctcaattgcaccctgcttatccgtgatggccgtaagctcttattaaccgataccggccgggtagtgttcgaacgcggccaggctatcctcggcgaattcagccagttaaaagccgagctcagcgatatcaaccatctgaataaaggcgtgctgcgcctggggatcccgccgatggtcggcatgctgatggccgagcccatcagccgctttcgcctgcgttatcccggcgtggagctgaaaatttccgagttcggcgggttgacggtgcagcaggcggttagcaacggcgaactcgatctggcgatgaccgcgctaccggtcgatgaggccagcggtctgaccacgctgtcgctctttagccatccgctctgcgtcctcgtaccgaagacggcgcagtggcagggtatcacctcgatctcgccgcaaaagctggcgcagcatccgttggttatctacaacgaagatttcgcccttagccagcaactgatgcgactgtttgccgagcatgacgtgaagccgcgtatcgccgtgcgcagcggccagtgggattttctggcggcgatggtgcaggcgggcattggcgtggcgattttgccggagccgatttgccagcgtcttgacgccgaggatttttactggatcccgctggagagccaattacgttgggaattagggatgatctggcgggaaggggtgtatatgtcgcgcagcgcccaggcgtggctggagtgcagtaaaacgttctggctggagtaa

SEQ ID NO: 91043 - DNA, 411 bp, Enterobacter aerogenes
atggccttcgcgccagcacgtgttgcgcctttcgtgatgcaacgtcttcaggtaccggttcaggtactgctctatgccgggttgtttgtctgcgctgaatatctggttaattggctacatctcccgcttcctgccaatcttgtcggcatgttgatgctgctgatgcttatcgtctgccgggtgataccgctaaactgggtgcgtgcaggcgcgcgctggctactggcggagatgctgctgtttttcgtcccggcggtggttgccgtcgttaactatgcgcaactgctgatgatagacggctggcgcatcttcctcgtcatcgggctaagcaccaccatggtactgggcgccacggcctgggtagtggataaggtctatcgctacgaagtgagcaggttgaaagatgagtga

SEQ ID NO: 91044 - DNA, 690 bp, Enterobacter aerogenes
atgagtgattttaccctgagcgtgttgtgcctggcggtcaccctcgggctctatttcgccaataaacgcctctatcgccgcttccacaaactgccgttgatgccactggtgctcacaccggtactgttggtgctgatcctcgtctttggtcatatttcctaccagagctatatgggcgagtcgcactggctattgtggttattggggccggccaccatcgccttcgccgtaccggtctatgacaacatggcgattattaagcgtcactggatgtcgttgaccgccggtgtcgtgacggcttcggtggtggcggtgaccacttccgtctggctcgcgcgtctatttactctttctgatgagatccagcgaagcctggcggtacgctcggtgaccactccgtttgcgctggcggcagcgaaaccgctcggcggccaaccggatctggtggcgttatttgtggtggttaccggagtcttcggcatggcgattggcgacgtgctgttcttacgcctgtcgatcagcgccggaatggcgaaaggggctgggttcggcgcagcgtcgcacggcgccgggactgcccgctcctacgaacttggccagcaggagggcgtggtcgccagcctggtaatgatgctctccggagtggtaatggttctggcggcgccgctagtacgctgggcaatattttaa

SEQ ID NO: 91045 - DNA, 543 bp, Enterobacter aerogenes
atgaaaattagtaagaaatatgcgttaagcgcgctggcaatttctgcctcctgcatgctgtcgacttttacacaagctgcatcgaatactatcactttcaacggtaccgtttctgataccacctgtaccgcaacaattgatggtggagtgacatctatcgaaatgggtaccacttcagtggcggacttgaaagcgaatacctttggtgcggcgaagaatttttcattttcactcgctaactgtcctgctactgaagaagggggcaacgctgtcgcccgcatcaccttcggtggcgaggcagatgctgcgaacagtgattacttcaaaaaccaggccacgagttctgctgcttccggcgttgcggtcgccatttttgataacgcgggtaatctgctgaaaaataacgaagaaggtgccgatgttgatatttcatccggggcagcaactattccctttactgtgaaaatggtcaagtcaggcgcttctgatcctacgaaaggtacggtaaatacgacagtgacctataacgtgacttactattaa

SEQ ID NO: 91046 - DNA, 690 bp, Enterobacter aerogenes
atgagaaattgtttattctttattagcttattgctaactttttcgaatgcacaagcgagcgtggtggtgggcgcgactcgtgtgatatttgatggcgccaaagagagtacggtggtcggtgttgataataaagataatactactaatattgttcagtcctggctttctgtcgttgatacgtcatcgccagtaaaagacgcttttattatcacaccaccgctatttcgattaaattcgggagagaaaggatttgtccggatcgtgcgctcagggaaaccattgccaacagatcgcgagtctatgctctggttaaatgttaaaggcatacccgcgatggacaatgtgccagataaaaacacggtgcagtttgccattaactctaaaattaaacttatttatcgtccaaaagaactacagggccaaataccagaaaactatgcggataaattacaatggcgtcgcgatagcaatttttatagtgttataaatcattcaccattgtatatgaacttctcacaaataaagattagtggtcagaatatatctggaatatggttcgttgcaccattttctacgttaaagataccggcaaaagctgttttatcctctgcgggaagtaaagaaatcacatggagcgtgattaatgattatggcatggcagggaaaaaatattccgcaatcatacagtag

SEQ ID NO: 91047 - DNA, 2586 bp, Enterobacter aerogenes
atgattatggcatggcagggaaaaaatattccgcaatcatacagtagcattgctctgtttcagattccagggtatatcggagtagcatttttgctatacgttactaccctaagttctggcgcgcaagccggagaatacttcaaccctcatttactggaagtgactgaaagtagtgctaccgctgtggatttatcctggttatctcaggatgcgattcctcccggtagttataatctggatatttatattaatgataaatatatatcttccgaggttgttgaatttaaaaaaaacacggataaccagcagataaaggttcaaccctgcattggtgttgagctgttaagatcatggtcgattaataccgagcgttatccgcagttagcggatatggcaacgcattgtgcccgtctgtctgttattcctggtcttgaatactccgtatcgttatcgcagcagcgcctcacactttccgtgccgcaggcggcgttgcttaatcgccctggagactatgttccggaagaacagtggcagcaaggaataaacgcgggtttgcttaactacagtttgtcggggcaatggaatacaccgcggcacggcggtagcgccaccgaaagtcagtttgcgagtttgcagcctggcataaatctggggccgtggcgtcttcgcaactatagcacgtttgatcatggcgatgacggcagccactggcaatcggtgtatagctatctttctcgcgatattcataccttgagaagccaattcgttctgggtaatacgtatacctcatcaggtatatatgacagtatgaattttactggtctgcaactaagctctgataaggaaatgctgccggacagtctgcatggtttcgcgccaacgattaaaggtatcgcgcgtactaccgctgaggtcaccgtttatcagaatggttacagtatctataaaacaacggttgcccccggggccttcgagattaaggatctttattcaacggggagcgcaggcgatctcaacgttaatattaaagagtccgatggtagtgagcaaaattttatcgtgccttatgcgtcgcttgccattttgcagcgagagggacagttggactatgcctttagtagcggaaaaacgcgcgcgaccagttctggcgataaagaatataattttatccagtcgacagcggcatacggcgtttcaagcaatattacgttatatgctggattgcaacaggctgaagataaatatactaatatattaatgggttctggttttaacttaggcagtattggcgcgttgtcgtttgacgcttctcagtcattggcagatattaaacaaaacgaaaaccgttctacgttatcgcaaaaaaaaggacaatctttacgtctgcgctttagtaagagctttatacggacgggaactaatttttcggttgcgggttatcgctattctaccgcgggatattactcctttcaggattttatcgataatgcctcaaatgaccgcgattgttgtaccttaaatggtcggaaaaaagggcgctttgatgcctcaatatcgcaatcactatttggacacggttctctgtcgctgtctttagtcaatgaaacctactgggatagttcgcgaatggagtctctgggtattggctatagcgggtctgtgggaaaagtctcgtattttattaattactcatataaccgaaacgtgcaaagtagcgaaaatagtaccgagactaaacctgacagcgatacccttgtgtctttaacgctgtctctgccgctcggcgagagtctctcatctaactacagcatgagttctggccgtaccagcgacactacccacagcgtaggactgaacggcatgatgctggcggatcgatcgcttaactggaatattcagcaaggttataacgccagtaataaaagcacttccggaaatattggcgtggattatcagagttccagaggggatatttccggcggttacggctatgaccattatagcaaccattataactattcattacgcggtggcatgatcgcccacgccggtggactcacgctttcccgattcctcggcgagagttccgccctgattgccacgcccggggtgggtaatgtggcggtacgcggacaaaccaatgtcactaccgattccacaggttacgcaattgtgccatatattcggccgtaccatattaataacctgtcattggatgaacagcagattgcaggtgtggagatcgataatgtggtgaaaaacgtggtaccgacgcgcaacgcgatagtgagagtgcaatacgatacttatattggagcgaaagcgatggtcactttaaagacgcggaccggcgtcgcgccgttcggcgccattgtgactttagaaaaacagccgcaacggcgccaggatattcgcagcaatattgttggtgatgacgggcaggtttatatgacagggcttcagcaaaaaggaacaatgctggtgaaatggggtgagggagacaatgaacaatgccgcgcaaactatgatttgacgggtagagaaaaaagccaggagattattttttatcaaacactgtgtcattaa

SEQ ID NO: 91048 - DNA, 570 bp, Enterobacter aerogenes
atgggtgatgttaaaaatattggcggtatcttgatctgtttattaggttatttaatttgtgggttgtttgttatttcgccaccagttttcgcctatgaggattcaagtacgctcaattttaatgtttccggaaacattgaggagccatcctgtaacgttgaaataaaaccctctaccaccattgatctaggcacggtgtcgtatcaaacgcttaccggtaaagcgggttctagtggggaaagcacgccggttaagcttgagtttagtaactgctccgcgggaatctctacggtcaccttatccttcagtggctcctattttgatgatgcccatgcttcaatttataaaaactatcaaaccggtagtgatggggccagcggtgtcggaatgcaactgctaagccaggcggataaccagccattagggccgaacgatcggtatgtttatacgtttgatgatagtgctggctctcatacatttaacatgatcgccagaatgtattcaccctacggaaaaattagtgctggcattgtgggatttaccgcgacctttgatgtcacctataaataa

SEQ ID NO: 91049 - DNA, 1092 bp, Enterobacter aerogenes
atgaaaaaatttatctggctagctctgttcctgtttactgagtttagctgggggtgtggcggggcaaattacggtgatatatccatgactaatttacctgagaaaattttagttagtgccgggaattactcagccggaacagtattatatgactcaggaaaaataactcattcgtcaaccgctctaactaattgtgaaggaaatatctacgctctctttcagtgggcctcaaataatgcaggtagtttactcggggataatatctataccacctcgttacaaggcgttggattgagagtcaaagtctggctaaacattaccggggaatatgacggcgatagtggtgatttcagtagtgactatcagacgcattttattggtgatgctaattactatcttggtaaaccttccgggctactggattattatgcttcaaccagttattcacccgcttaccagctgcagttagtggcgacaggcggtccaatagcgacaaatagtaaactgtctttgaccgatccgatcgctacggtttctgcgaaagatagcacaggcactatcgtgatttcgcaactgcatattagcggcaccaccacgattcaactgaccccgatgggctgtgtaaccaatagctcggggctgaacttcgagatgggtacggtcagcgcttcggcgtttaattcagcgacgaaagtgggctcagctcggcagtcggtcacgctctcctgcgaaccgggcactaacgtctcgatgcgggtgacggcggcacaagcgggcggtgataatcctgataacacggtgatggcgctgacagcagatagcaatgtcgccaccggtgttggcgtccagctcaatctgaatggcgaggcgctaccgttgaatacggatatcagtttgtattcttcaagccgcacgacggtgaccaatagcgacgcggatgccggttataccgtctttaccaaccctgatagccccggcggtgctaccgctttgcagacattatcgttttccgccaactattataagacgggggctgaggtgacggcggggccggcaaatgcgagcggggtgataacctttacctataactaa

SEQ ID NO: 91050 - DNA, 1650 bp, Enterobacter aerogenes
atgaaaaaagtcctgacggcgcttgccgccacgctccctttcgccgctaacgccgccgatgccattaccggcgcggtgcagcgtcagccgaccaactggcaggcgattatcatgttcgtgattttcgtcgccctgacgctgtacatcacttactgggcgtcaaaacgcgtccgttcgcgcagcgattactacaccgctggcggcaatattaccggcttccagaacgggctggcgatttccggcgactttatgtccgcggcctcgttcctcggcatttcggcgctggtctacacctccggctacgatggactcatctattcgctcggcttccttgtcggctggccgattattctgtttctgatcgccgaacgcctgcgtaacctcggccgttacacctttgccgacgtagcatcttaccgcctgaagcaggggccgatccgcaccctctccgcctgcggttcgctggtggtggtggcgctatatctgattgcgcagatggttggcgccggtaagctcatccagttgctattcggcctcaactatcacgtggcggtggtgctggtcggcgtgctgatggtgctgtacgtgctgttcggcggcatgctcgccaccacctgggtacagattatcaaagcggtcctgctgctgttcggcgccagctttatggcctttatggtgatgaagcacgtcggcttcagcttcaataatctgttcgccgaagcgatggcggtgcatccgaaaggggcggcaatcatgagccccggcgggctggtgaaagacccgatatcggcgctgtcgctgggtcttggcttgatgttcggtaccgcgggtctgccgcatattctgatgcgtttcttcaccgtgagcgacgccaaagaagcgcgtaagagcgtgttctacgccaccggtttcatgggctacttttatattcttacctttatcatcggctttggcgccatcatgctggtgggagcgaatccggcgtttaaagacgccgctggacagcttatcggcggcaataatatggcggcggtacatctggcggatgccgtcggcggtaatctgttccttggctttatctcggcggtggctttcgccacgatactggcagtagtcgccgggctgacgctggcgggagcatcggcggtctctcatgacctgtatgccaacgtctttaagaaaggggcaaccgaacgtgaagaactgaaagtgtcgaaaattaccgtgctgatcctgggcgtggtggcgattctgctgggtattttgttcgaaaaccagaatatcgccttcatggtcggcctggcgttctctatcgccgccagctgtaacttcccgattatcctgctgtcgatgtactggtcgaagctgaccacccgcggcgcgatgatcggcggctggctcggcctgctgaccgcggtgattttaatgatccttggcccgaccatttgggtgcagatcctcggacacgagaaagccatcttcccatacgaatacccggcgctgttctccatcgccatcgctttcatcggcatctggctgttctcgattaccgataactccgccgaagggatgcgcgagcgcgagcagttccgcgctcagtttatccgttcgcaaaccggtatcggtatcgaacgcggtcaggcgcactaa

SEQ ID NO: 91051 - DNA, 315 bp, Enterobacter aerogenes
atgaatgaacaaatttgtcagcggatagaaaatagtgcgcatttcagggagttagttgcatcacggcaacggtttgccgccattctgtcagtcattatgttggtcatttacgtaggctttattttgcttatcgccttcgcgcccggctggctggggacgcctctgcatgaaggcaccagcgtgacccgcggcatccctattggtatcggcgtcattattgtgtccttcgtcctgaccgggatttacgtctggcgggcaaacggcgaatacgacaagttgaccaaaagcgtgatcagcgaggtgcaagcatcatga

SEQ ID NO: 91052 - DNA, 1959 bp, Enterobacter aerogenes
atgagccaaatacataaacaccctattcccgcagagattgcggaacattgcctgatgaatccgcaacagtaccaggtgaactaccaacaatccatcagcaaccccgatgccttctggggcgagcagggtaaaatcctcgattggatcaaaccttacacacaggtgaaaaatacctctttcgcgccgggaaacatctccatcaaatggtatgaagatggcaccctgaacctcgcggccaactgtctcgaccgtcatctgcacgagcgcggcgaccagaccgctatcatctgggaaggcgacgacgccagccagagcaaaaatatcacttatcgccagcttcatcgcgatgtttgccgttttgccaacgtattgctcgatctgggcattaaaaaaggcgatgtcgttgctatctatatgccgatggtgcctgaagccgccgtcgccatgctggcctgcgcgcgcatcggcgctatccattcggttatcttcggcggcttttcgccggaagcggttgccggacgcattatcgactccagcgctcgcctggtgatcacctctgacgaggggttacgcgccggtcgcgccatcccgctgaagaaaaacgtcgatgatgcgctgaaaaacccgcacgtcaccagcatcgagcacgtagtggtactcaaacgcaccggcggcaaaatcgactggcaggaaggtcgtgacctgtggtggagcgatctgattgaaaaagcggatgaccaacatgaagcggtggaaatgaacgccgaagacccgctgttcatcctctatacctccggctcgaccggcaagcctaaaggcgtgctgcacactaccggcggctacctggtgtatgcggcgactaccttcaaatacgtctttgattatcatccgggcgatatctactggtgcaccgccgatgtgggctgggtcaccggtcacagctacctgctgtacggcccgctggcctgcggcgccaccacgctgatgtttgaaggcgtgccaaactggccgaccccggcgcgcatgtgccaggtagtggataaacatcaggtcaatattctgtacaccgcgccgacggcgatccgcgcgctgatggcggagggcgacaaagctatcgaaggtaccgatcgttcctcactgcgcatcctcggctcggtcggcgagccgattaacccggaagcctgggagtggtactggaagaagatcggcaacgaaaaatgcccggtgatggacacctggtggcagaccgaaaccggcggcttcatgatcaccccgttgccgggcgccaccgaactgaaggccggttccgccacgcgtccgttcttcggcgtccagccggtactggtggacaacgaagggacgccgctggaaggcgcgaccgagggcaacctggcgatcgccgactcctggcctggccaggcgcgtaccctgtttggcgatcatgaacgcttcgagcagacctacttctcaacctttaaaaatatgtactttagcggcgacggcgcccgtcgcgacgaagatggttactactggatcaccggtcgcgtcgatgacgtactgaacgtctccggccaccgtctgggcaccgcggaaattgaatccgcgctggtttcgcatccgaaaatcgccgaagcggcggtggtcggtattccgcataacatcaaaggccaggccatctacgcctacgtgacgctgaatcacggcgaagagccgacgccggagctgtatgccgaagtacgtaactgggtacgcaaagagattggcccgctggcgacgccggatgtactgcactggactgactcgttgccgaaaacccgctccggcaaaatcatgcgccgtattctgcgtaagattgccgctggcgataccagtaatctcggggatacctcgacgctggccgatccgggcgtagtggacaaactgctcgaagagaagcaggccattgcgatgccgtcataa

SEQ ID NO: 91053 - DNA, 1311 bp, Enterobacter aerogenes
atgaaaaaaacaaaagtcagcctggcctggcagattttgctagccctggtgcttggcatacttctgggcagctacctgcattaccacgccgaaagccgtgattggttaatctcaaacctcctgaccccggcgggcgatatctttatccacctgattaaaatgattgtcgtcccgattgtcatctcgacgctggtggtgggcattgcgggtgtaggcgacgccaagcaactgggccgcatcggcgctaagaccatcatctattttgaagtgatcaccacggtggcgattgtgctggggatcaccctggcgaacgtcttccaaccgggcagcggcattgatatgtcgcagctggcggcggtcgatatctcgaaatatcagaacaccaccgcagaggtgcagagccacgctcatggcctgatggggactatcctgtcgctggtgccgaccaatatcgtcgcctcgatggcgaaaggcgatatgctgccgattatcttcttctcggtgctgttcggtctgggcctctcttcattgccggcgacccatcgcgaaccgctggtcaccgttttccgttctatctctgaaaccatgttcaaagtgacgcacatggtaatgcgctatgcgccggtcggggtctttgccctgatctcggtgaccgtcgccaccttcggcttcgcttcgctgtggccgctggctaagctggttatcctggtttacttcgcgattctgttcttcgcgctggtggtgctgggtatcgtggcgcgggtatgtgggctgagcatctggatcctgattcgtatccttaaagatgagctgattctggcttattccacggcgagctccgagagcgtgctgccgcgtatcattgagaaaatggaagcctacggcgcgccagcctcaatcaccagcttcgtggtgccgaccggctactcctttaacctcgatggttcgacgctatatcagagcatcgcggcgatcttcatcgcccaactgtacggtatcgacctctccctgtggcaggaaatcactctcgtgctgacgctgatggtgacctcgaaaggcatcgcgggtgtaccgggcgtctccttcgtggtgctgctggcgaccctgggtagcgtggggatcccgctggaagggctggcgtttattgccggcgtcgaccgtatcctcgatatggcgcgtaccgcgctgaacgtggtcggcaacgcgctggcggtgctggttatcgccaagtgggaacataagtttgatcgcaagaaagcgctggcgtatgaacgcgaagtgctgggcaagtttgataaaaccgcccaataa

SEQ ID NO: 91054 - DNA, 684 bp, Enterobacter aerogenes
atgaaatacctctatttactgctggcgctgacaagcttcgccgcagacgctgcggatccgggcagccaataccaacagcaggccgaagctggcgacccacgcgcgcaattttatctggcggatacctgggttagctccggcaactaccaacaggccgaatattgggcgcagaaagcggcggcgcagggcgatggcgacgcgatggcgctgctggctcagcttaaaatccgtaacccgcagcaggccgactatcaacaggcccgacagctagcggaaaaatccgtgcaggccggcagcaaggccggcgagattatcctcgcccgcgtactggtcaatcagcaggcaggccctaccgattatgcgcacgccatcaggttgctgcaggatgcggccaaagatgaagagagcgactcagccgtcgatgcgcagatgctgctggggcttatctacgccagcggcgtgctgccgccggaagatgacctcaaggccgcgcaatacttcaaaggcagctcggcgctttcacgcaccggctatgccgaatactgggcagggatgatgttccagcagggagagaaaggttttatcgaaccaaacccgcaaaaagcgctgcactggcttaacgtcagctgtcaggaggggtttgataccggatgtgaagagttcgacaggataaccaaaggctaa

SEQ ID NO: 91055 - DNA, 1182 bp, Enterobacter aerogenes; identical to SEQ ID NO: 8429

SEQ ID NO: 91056 - DNA, 357 bp, Enterobacter aerogenes; identical to SEQ ID NO: 6160

SEQ ID NO: 91057 - DNA, 405 bp, Enterobacter aerogenes; identical to SEQ ID NO: 6159

SEQ ID NO: 91058 - DNA, 348 bp, Enterobacter aerogenes; identical to SEQ ID NO: 8336

SEQ ID NO: 91059 - DNA, 258 bp, Enterobacter aerogenes; identical to SEQ ID NO: 29581

SEQ ID NO: 91060 - DNA, 759 bp, Enterobacter aerogenes; identical to SEQ ID NO: 6176

SEQ ID NO: 91061 - DNA, 1023 bp, Enterobacter aerogenes; identical to SEQ ID NO: 6152

SEQ ID NO: 91062 - DNA, 780 bp, Enterobacter aerogenes; identical to SEQ ID NO: 6153

SEQ ID NO: 91063 - DNA, 519 bp, Enterobacter aerogenes
gtgcacgttcgcaccccgtcagccctgacggaggaagcgctgaaacggatcggcgaactgtacgccatcgaggcagagataaggggaatgacggcggagcaacgccttgccgaacgtcagttgaaaacgaaaccgctgctgaaatccctggaaagctggctgcgtgaaaagatgaaaaccctgtcgcgacactcagaactggcgaaagcgttcgcatacgccctgaaccagtggccggcgctgacgtactatgcagatgatggctgggctgaggcggacaataacatcgctgaaaatgcgttgcggatggtcagtctgggccgcaaaaactacctgttcttcggttcggatcatggaggagagcggggagcgctgctgtacagcctgatcgggacgtgcaaactaaacggagtggagccagaaagctacctccgctatgtccttgacgtcatagccgactggccgataaaccgggtcggcgaattgctcccttggcgcgtagcactgccgactgaataa

SEQ ID NO: 91064 - DNA, 792 bp, Enterobacter aerogenes; identical to SEQ ID NO: 9265

SEQ ID NO: 91065 - DNA, 1971 bp, Enterobacter aerogenes; identical to SEQ ID NO: 9266

SEQ ID NO: 91066 - DNA, 366 bp, Enterobacter aerogenes; identical to SEQ ID NO: 5940

SEQ ID NO: 91067 - DNA, 1170 bp, Enterobacter aerogenes
atgaatcagaagtggaagacgctaatagtttcagtattaacaccatcaagtattatatcagggattgcgttgatagttctctggggatatttcagtcgtctggatcgacttgatattttctttgatgtgatgaatattaaaagcatcttggtattggtttgttgtacaactattctatcattgattatgatcatttttattttttttataacatctttttttataccaatagttattccttatgatataaaaaatcttcctgcttacaataagattcagggtaattttttatctgtaatgatgttatctggcctcttccccatggcctttatatacgtgttatactgtgcatttgattttgaccagagtgttaaagataactctggctggttatctattttaagtataggagtactaatagttgttatttcagccataataaacacgaggtatcttgaatatgacttatcgtttaaaaataatagaatgaaactgttgagacgtgttcagatctatcttatcattccgttgtctattgctttactggtgcatcttcaggtaattccactggagatggtttttaggaatattgaaacttcagataagagtattaatttcaaagtgatagctgaactggctttcatgtcatattttatttttattctgacaatacttcccggcctcatttatctaaaaatgaatccacagcataaactttctaaaagaattagttctgcatttgtcgcatccttgatgatattattagttatatcgactcaaataaccgtattaccagtaatttttacccattcagttattaagctctcaggtataagtgacttcaaaatacatagctacattattaaaacaagtgaatatccggaggagtttttttccaatgcagtatggggtaaaaaaaatataaaaccgggggaatattactctgtgcaggctgtttctatgtttacgacaaaccagtttattctcctttgtcccaaggatattataaggttttatcgggaaagctggaagttcgacctgcttaatgtagacttcgatacaaataccaggaagaaactccaggaagaagcagcatattgcgtaccaatttctgcaatatctgtaaaacgatgggatatgcctcttcagggctcgaaaccctcaaattag

SEQ ID NO: 91068 - DNA, 741 bp, Enterobacter aerogenes
atgaacaatgtcattcccctgcagaattcaccagaacgcgtctccctgttacccattgcgccgggggtggattttgcaacagcgctctccctgagaagaatggccacttccacgggggccacaccggcctacctgctggccccggaagtgagtgcccttctcttctatatgccggatcagcgtcaccatatgctgttcgccaccctctggaataccggaatgcgtattggcgaagcccggatgctgacgccggaatcatttgacctgaatggagtaagaccgtttgtgcggatcctgtccgaaaaagtgcgtgcgcgacgcggacgcccgccaaaagatgaagtgcgactggtgccgctgacagatataagctatgtcaggcagatggaaagctggatgatcaccacccggccccgtcgtcgtgaaccattatgggccgtgaccgacgaaaccatgcgcaactggctgaagcaggctgtcagacgggccgaagctgacggcgtgcatttttcgattccggtcacaccacataccttccggcacagctatatcatgcacatgctctatcaccgccagccccggaaagtcatccaggcactggctggtcacagggatccacgttcgatggaggtttataccagagtttttgcgctggatatggctgccacgctggcagtgcctttcacaggtgacgggcgcgatgctgcagagatcctgcgtacactgcctcccctgaagtga

SEQ ID NO: 91069 - DNA, 978 bp, Enterobacter aerogenes
gtggataagtcgtccggtgagctggtgacactgacaccaaacaataacaacaccgtacaacctgtggcgctgatgcgtctgggcgtctttgtacctacccttaagtcactgaagaacagtaaaaaaaatacactgtcacgcaccgatgccacggaagaactgacgcgtctttctctggcccgtgcagaaggattcgataaggttgagatcaccggcccccggctggatatggataacgatttcaagacctgggtggggatcattcattcctttgcccgccataacgtgattggtgacaaagttgaactgccttttgtcgagtttgcaaaactgtgtggtataccctcaagccagtcatcacgcaggctgcgtgagcgcatcagcccttccctgaaacgcattgccggtaccgtgatctccttttcccgcaccgatgagaagcacacccgggaatacatcacccatctggtacagtcagcctactacgatactgaacgggatattgttcagttacaggctgatccccgcctttttgaactgtaccagtttgacagaaaggtccttcttcagcttaaggcgattaatgccctgaagcgacgggagtccgcccaggcactttacacctttatagagagcctgccccgggatccggcaccgatatcgctggcgcggctgcgtgcacgcctcaatctgaagtctcctgtattttcccagaaccagacggtcagacgggcaatggagcagttgcgcgagattggatatcttgattacacggagatccagcgggggcggacaaaattcttctgtattcactaccggcgtccccggttaaaagcgccgaatgatgagagtaaggaaaatcagttgccaccttcacctgcggaaaaaatcagtccggagatggcggagaagcttgccctgcttgaaaaactgggcatcacgctggatgacctggaaaaactcttcaaatcccgctga

SEQ ID NO: 91070 - DNA, 321 bp, Enterobacter aerogenes; identical to SEQ ID NO: 5938

SEQ ID NO: 91071 - DNA, 642 bp, Enterobacter aerogenes; identical to SEQ ID NO: 5937

SEQ ID NO: 91072 - DNA, 168 bp, Enterobacter aerogenes; identical to SEQ ID NO: 5936

SEQ ID NO: 91073 - DNA, 219 bp, Enterobacter aerogenes
atgaagcagcgtattacagtgacagttgacagcgacagctatcaattgctcaaggcatatgatgtcaatatctccggtctggtaagcacaaccatgcagaatgaagcccgtcgtctgcgtgccgaacgctggaaagcggaaaatcaggaagggatggctgaggtcgcccggtttattgaaatgaacggctcttttgccgatgagaacagggactggtga

SEQ ID NO: 91074 - DNA, 306 bp, Enterobacter aerogenes
atgcagtttaaggtttacacctataaaagagagagccgttatcgtctgtttgtggatgttcagagtgacattattgacacgcccgggcgacggatggtgatccccctggccagtgcccgcctgctgtcagacaaagtctcccgtgagctttacccggtggtgcatgtcggggatgaaagctggcgcatgatgaccaccgatatggccagtgtgccggtctccgttatcggggaagaagtggctgatctcagtcaccgcgaaaatgacatcaaaaacgccattaacctgatgttctggggaatataa

SEQ ID NO: 91075 - DNA, 810 bp, Enterobacter aerogenes
atgtcaggctccgttatacacagccagtctgcagccagggtaccggcagtttattctgccggacagtctccacaacttcctgttgtcattgattatccggcagctctggcacttcgccagatgtcgatggttcatgatgaactgccgaaatatctgctggctccggaagtgagtgccctgctccattacgtcccggatctgcgccgcaagatgctgctggccacactgtggaacaccggtgcgcgcattaatgaagcactggcgctgacgcggggggatttttcgctcgcgcctccgtatccgtttgtgcagctggccactctgaagcagcggaccgaaaaagccgccaggacggcaggaagaacgcctgccggacagcagactcaccggctggttccgctctccgactcctggtacgtcagtcagctgcagacgatggtggcaacactgaaaattcctctggaacggcgtaataaacgaacaggcaggacagagaaagcgcggatctgggaagtgacggacagaacggtcaggacctggattggggaggcggttgccgccgctgctactgacggtgtgacgttctctgtcccggtcacgccacatacgttccgccattcctatgcgatgcacatgctgtatgccggtataccactgaaggtcctgcagagcctgatggggcataagtccatcagctcaacggaggtctacacgaaggtgtttgcgctggatgtggctgcacggcaccgggtgcagttttcgatgcctgagtccgatgcggtcacaatgctgaaaaacagacacgcataa

SEQ ID NO: 91076 - DNA, 276 bp, Enterobacter aerogenes; identical to SEQ ID NO: 5935

SEQ ID NO: 91077 - DNA, 645 bp, Enterobacter aerogenes; identical to SEQ ID NO: 5934

SEQ ID NO: 91078 - DNA, 972 bp, Enterobacter aerogenes; identical to SEQ ID NO: 5933

SEQ ID NO: 91079 - DNA, 393 bp, Enterobacter aerogenes; identical to SEQ ID NO: 5932

SEQ ID NO: 91080 - DNA, 234 bp, Enterobacter aerogenes; identical to SEQ ID NO: 5931

SEQ ID NO: 91081 - DNA, 798 bp, Enterobacter aerogenes; identical to SEQ ID NO: 8888

SEQ ID NO: 91082 - DNA, 1173 bp, Enterobacter aerogenes; identical to SEQ ID NO: 8889

SEQ ID NO: 91083 - DNA, 993 bp, Enterobacter aerogenes; identical to SEQ ID NO: 5753

SEQ ID NO: 91084 - DNA, 438 bp, Enterobacter aerogenes; identical to SEQ ID NO: 5754

SEQ ID NO: 91085 - DNA, 249 bp, Enterobacter aerogenes
atgatccgcattgaaattcttttcgaccgccagagcacaaaaaacctcaaatcaggcacacttcaggcgctacagaatgaaatcgaacaacgtctgaaaccacactacccggaaatctggctgcgtatagaccagggcagcgccccgtctgtatctgtcactggagcccgcaacgacaagggtaaagaacgtatccagtctctgctggaagaaatctggcaggacgacagctggctgcccgcagcatga

SEQ ID NO: 91086 - DNA, 519 bp, Enterobacter aerogenes; identical to SEQ ID NO: 5755

SEQ ID NO: 91087 - DNA, 1221 bp, Enterobacter aerogenes; identical to SEQ ID NO: 5756

SEQ ID NO: 91088 - DNA, 927 bp, Enterobacter aerogenes
atgccaaaatggtgctcgaatcgtatgtatttttctggtgaaccggcaaagattgctgagattaaacggctggccagcggtgcagtcacaccgttttatcgccgcgccacaaatgaaggtattcagctgtttctggccggaagtgccggacttctgcagaccactgaagatgtgcggtttgaaccatgccccggactgacggctgccggacgtggtgttttatcgccggagaatatcacgttcacccgctggctgaagcacctgcaggacggtgtactgctggatgagcaaaactgcctgatgctgcatgaactctggctgcagagcggtactggacagcgtcgctgggaagggttaccggatgatgtcagggaaactatcactgtgcatttcaccgcaaaaagaggtgactggtgtgacatctggggtaacgaggatgtatcggtgtggtggaaccgtctgtgtgacaacgtactgtcggaaaaaaccatgccgtttgacctgctgacggttttgccgacccgcctggatattgaagtgaatggctttaacggcggtgttctgaacggtgttccttctgcatatcactggtatacagaacggtatggcgtgaagtggccttgtgggtatgacctgaatatcagcagtcagggggaaaacttcattcaggtagatttcgacacgccgtggtgtcagccggaaagcgacgttgttgcagaattaagccgccgtttcggctgcacgctggagcactggtacgccgaacagggctgcaatttctgtggctggcagttgtatgagcgcggagagcttgttgatgtgctgtggggggaactggaatggtcttccccgacagatgacgatgagctgccggaagtcaccggacctgcgtggatagtcgacaatgtggcgcattatggcggatga

SEQ ID NO: 91089 - DNA, 684 bp, Enterobacter aerogenes; identical to SEQ ID NO: 5757

SEQ ID NO: 91090 - DNA, 222 bp, Enterobacter aerogenes; identical to SEQ ID NO: 5758

SEQ ID NO: 91091 - DNA, 435 bp, Enterobacter aerogenes; identical to SEQ ID NO: 5759

SEQ ID NO: 91092 - DNA, 771 bp, Enterobacter aerogenes; identical to SEQ ID NO: 5760

SEQ ID NO: 91093 - DNA, 426 bp, Enterobacter aerogenes; identical to SEQ ID NO: 5761

SEQ ID NO: 91094 - DNA, 423 bp, Enterobacter aerogenes; identical to SEQ ID NO: 5762

SEQ ID NO: 91095 - DNA, 192 bp, Enterobacter aerogenes; identical to SEQ ID NO: 5763

SEQ ID NO: 91096 - DNA, 231 bp, Enterobacter aerogenes; identical to SEQ ID NO: 11018

SEQ ID NO: 91097 - DNA, 1362 bp, Enterobacter aerogenes; identical to SEQ ID NO: 5764

SEQ ID NO: 91098 - DNA, 564 bp, Enterobacter aerogenes; identical to SEQ ID NO: 5765

SEQ ID NO: 91099 - DNA, 237 bp, Enterobacter aerogenes
atgacacagggctggcgggaggataaatgcccgtctgtccgcgccgggaaaaaaccgcgcgtcggtggcgctgaaaggggccgcgctcacgcgccgcccctttcattacgcggacgttctgatgggggcttctgtcttttcagacctgtcatttgtctgttactgatgatgttgttgttcctgctactgctactgctactgctactgctactgttcttcttttttctactgctctga

SEQ ID NO: 91100 - DNA, 288 bp, Enterobacter aerogenes; identical to SEQ ID NO: 5767

SEQ ID NO: 91101 - DNA, 822 bp, Enterobacter aerogenes; identical to SEQ ID NO: 5768

SEQ ID NO: 91102 - DNA, 510 bp, Enterobacter aerogenes; identical to SEQ ID NO: 5769

SEQ ID NO: 91103 - DNA, 384 bp, Enterobacter aerogenes; identical to SEQ ID NO: 5770

SEQ ID NO: 91104 - DNA, 687 bp, Enterobacter aerogenes; identical to SEQ ID NO: 5771

SEQ ID NO: 91105 - DNA, 360 bp, Enterobacter aerogenes; identical to SEQ ID NO: 5772

SEQ ID NO: 91106 - DNA, 312 bp, Enterobacter aerogenes; identical to SEQ ID NO: 18468

SEQ ID NO: 91107 - DNA, 567 bp, Enterobacter aerogenes
atggaacacggtgcccgtttaagtaccagtcgtgtaatggccatcgcctttatatttatgtcagtgcttattgttctcagcctctctgttaacctcattcagggggtgaataactaccgtcttcagaatgagcaacgcactgccgtgacgccaatggcatttaatgccccctttgccgtgtcacagaacagtgccgacgcctcttatttacagcagatggcgctgtcatttattgccctccgtctgaatgtttcatcagaaaccgtcgatgcctcacatcaggcgcttctgcaatatatccgcccgggcgcacagaaccagatgaaagttattctggctgaagaagcgaagcgtattaaaaacgataacgtgaactcagcctttttccagaccagtgttcgtgtctggcctcagtatggccgtgtggaaattcgtggtgtgcttaaaacctggataggtgattcaaaacctttcactgatatcaaacattacatccttattctgaagcgggaaaacggggtgacctggctggataatttcggggaaacagacgatgagaaaaaataa

SEQ ID NO: 91108 - DNA, 729 bp, Enterobacter aerogenes; identical to SEQ ID NO: 5773

SEQ ID NO: 91109 - DNA, 1428 bp, Enterobacter aerogenes
atggccagtatcaataccattgtgaaacgcaagcagtacctgtggctggggattgtggttgtcggtgcagcctccgcgattggtggggtactgtatctgtctgatgtggacatgtccggtaacggtgaggcggtggctgaacaggagcctgtgccggatatgacaggtgtggtggatacgacctttgatgacaaggtgcgtcagcatgccaccacagagatgcaggtgacggcagcgcagatgcagaagcagtatgaggaaatccgtcgtgaactggatgtcctgaacaaacagcgcggtgatgaccagcgtcgtattgaaaagctgggacaggacaatgccgccctggcagagcaggtaaaagccctgggtgctaatcccgtcacggcgaccggtgagcctgtacctcagatgcctgcctcaccgcccgggccggaaggcgaaccacagccaggaaacacccccgtatccttcccgccgcagggcagcgttgctgttccaccgccgacggcgttttatcccgggaatggtgtcacgccaccaccacaggtgacgtaccagtctgtgccggtgcctaaccggatacagcgtaaggtgtttacccgtaatgagggaaaacagggaacatcgctgccgtacattccgtcaggaagttttgcgaaagccatgctgattgaaggggcggatgccaatgcctcagtcaccggtaatgaatccacggtgccgatgcagttgcgtatcaccggcctggtggaaatgccgaacagcaagacgtatgacgcaacgggatgttttgtggggctggaagcctggggggatgtgtccagtgagcgtgccattgtacgcacccgcaatatcagttgcctgaaggacggcaaaactattgatatgccgattaaggggcatgtcagcttccggggtaaaaacggtatcaagggcgaagtggtgatgcgtaacggcaaaatcctcggctgggcatggggcgcgggatttgttgacggtatcggtcagggaatggagcgcgcctcccagccggctgtcgggctgggtgccacagccgcttacggggctggtgatgtcctgaaaatgggtatcggtggcggcgcatcgaaagccgcacagacgctcagtgactactacatcaaacgtgccgaacagtatcacccggtgataccgattggtgcgggcaacgaagtgaccgtggtgttccaggacggcttccagctgaaaaccgtggaagagatggcgctggagcgcacgcagaacagagcggaagaagataatccggaaagtccggttcctgttccgccatcagctgaaagtcatcttaacggctttaatactgaccagatgctgaagcagctgggcaacctgaatccgcagcagtttatgtccggcagccagggaggaggcaacgatggcaaataa

SEQ ID NO: 91110 - DNA, 591 bp, Enterobacter aerogenes; identical to SEQ ID NO: 5774

SEQ ID NO: 91111 - DNA, 321 bp, Enterobacter aerogenes
atgaacatgcgtaatattaatgctattacagccctttctgtaccgggtaaaactatgtcagatgattttatgcatgctgttctcagtaactgcaccacaagaatcgtccttcctgcaccgaaggaattcagttctgaatcattgccgcacaattttaatatggctgctgtcggtgtgatgaaggagggaatgtcgatgcgtttattttcttctcctgggcatattgtggttgccggacaatccggtggcggaaaatctgcttcggtgaaagaactaatcgacagaattattcagaaatataaggaacccttcgatgaataa

SEQ ID NO: 91112 - DNA, 516 bp, Enterobacter aerogenes
atgaaacagatttctttatttattcctctgctggggaccttattactttccggctgtgccggaaccagtacggaatttgagtgtaacgccaccacatccgatacctgtatgacgatggagcaggccaatgagaaggccaaaaagctggagcagcctgcagatgcaaagccggctgcggcatcactgccgcgcctggctgaagggaacttccggacaaccacggtgcgggccgtcaccgcggccagcccatctggccgcgggcctgtagtgactgcacttccggagcagaaactgctggcaccacgtccgttgtttacggctgcccgggaagtgaaaacgattattccggtcagttcagttgcgtcggtaacacctccccgcccgctaagaacgggtgagcagacggcagcattatggatagcgccttatattgataatcaggatgtttatcatcaaccatccagtgtgttttttgttattaaaccgtctgcgtggggaaaaccacgtattaattaa

SEQ ID NO: 91113 - DNA, 474 bp, Enterobacter aerogenes; identical to SEQ ID NO: 33477

SEQ ID NO: 91114 - DNA, 462 bp, Enterobacter aerogenes; identical to SEQ ID NO: 5776

SEQ ID NO: 91115 - DNA, 2631 bp, Enterobacter aerogenes; identical to SEQ ID NO: 5777

SEQ ID NO: 91116 - DNA, 387 bp, Enterobacter aerogenes
atgaccacaacgcaaaaaacgactgacgttacagccccccgacgcagccactggtggtggaccgtgccgggatgcctggcaatggtgttactgaacgcagccatcagttatggcattgtcagactgaacgcaccggtgactgccgccttcaacatgaaacagaccgtggatgcgttttttgacagcgccagtcagaaacaactgtcagaagcacagtcaaaagccctttcagcgcgttttaacacggcactggaagccagcctgcaggcatggcagcagaaacaccacgcggtcattctggtgtcgcctgccgtggtacagggggcaccggatatcacccgggaaatccagcaggatattgcccggcgaatgagggcggaaccatga

SEQ ID NO: 91117 - DNA, 633 bp, Enterobacter aerogenes
atgagatgccgggggctgattgccctgctgatatgggggcagagtgtggtcgccgccgatcttggcacctggggcgatctgtggccggtaaaggagccggacatgctgacggtgatcatgcagcgcctgacggcgctggagcagtccggtgagatgggccggaaaatggatgcctttaaggagcgggtgatccgtaacagtctgcggccccctgccgtgcccggtatcggacgcacggagaaatacagtagccggttgtttgacccgtccgtcagactggctgcggatatccgggataacgaagggcgggtgtttgcccgtcagggtgaagtgatgaatccgctgcagtatgtgccttttaaccaggcgctgtatttcatcaatggcgatgatccggcgcaggtggcctggatgaaacgccagacgccgcccacactggagagcaaaattatcctcgtgcagggcagtatcccggagatgcagaagtctctggacagccgtgtttactttgaccagaacggtgtgctctgccagcgcctcggcattgatcaggtcccggcacgggtgagcgccgttcccggcgatcgcttcctgaaggtggaatttattccggcagaggagggcagaaaatga

SEQ ID NO: 91118 - DNA, 993 bp, Enterobacter aerogenes; identical to SEQ ID NO: 5778

SEQ ID NO: 91119 - DNA, 306 bp, Enterobacter aerogenes; identical to SEQ ID NO: 5779

SEQ ID NO: 91120 - DNA, 639 bp, Enterobacter aerogenes; identical to SEQ ID NO: 12428

SEQ ID NO: 91121 - DNA, 1851 bp, Enterobacter aerogenes
atgaaacgtattttacctctgatactggctctggttgccggcatggcacaggctgacagcaacagtgattaccgggccggttctgattttgcccgtcagattcaggggcagggtacaggcagtattcagggctttaagccacaggagagtatccccagctataacgcgaatccggacgagacaaaatattacggtggcgtgactgccggcggggatggcggcctgaaaaatgacggcaccacggaatgggcgaccggtgaaaccggaaaaaccatcacagagtccttcatgaacaagccgaaagacattctgtcaccggatgcaccgttcattcagaccggcagggatgtggtgaaccgggctgacagcattgtgggaaacaccgggcagcagtgcagtgcgcagcagataaaccgcagtgagttcacaaactatacctgtgagcgggacacgatggtggaggagtactgcacacggactgccagtatcaccggggactggaaatacacggatgaatatcgtgaggtgacgataccgcactcacagttccggttcagtatgaacggtctgaaactggtgttcagtgtcacggctccggtaaccggtacagtggaaagtgcatcattgtctgtatacgccgcttttttcttcctgaactcccgttataccttcatgaatacaacctttaatgtcggcctggcaaacgggcagtcggatacttaccccctgtccggggcgacaggtttgcaggtgacacaggggcaggttctgaccggtagtggctgtactgctaacggtaattgcctcccgcacgggaatggtgacaggaaagtctatgaatcgcttgtcagtggtgcttccacctttacgctgaaactcaggatgaaggtccgtgataaagaatgggttccccgggtggagtgggtggagagttgtccgtttaataaagcggatggcgtgctgacaggcactgagtgttcagagccgggtggtacgaaaaccggagtgatggaaggtaaaccctggaacatcacacaggcatgctgggcataccgggataaatatgtcactcagtccgcagataacggcacctgtcagaaatatgtcgataatccggcctgtacgctggcctcacgtcagtgcgcgttttattccgatgagggaacctgtctgcatgagtacgccacgtactcctgcgagtcaaaaacatccgggaaagtgatggtctgtgggggagacgtcttctgtctcgatggcgaatgtgataaggctcagagcgggcagagtaatgattttgccgaagccgtttctcagctggcggcactggccgcagcaggtaaggatgttgcggcgctgaacggggtggatgtccgtgctttcaccggtcaggcgaaattttgtaagaaggctgcagccggatacagcaactgctgtaaggacagcggctggggacaggatatcgggctggccaaatgcagcagtgatgaaaaggccctggctaaagcaaaatcaaacaaactgaccgtcagtgtcggagagttctgttcgaagaaagtgctgggtgtctgtctgcagaaaaaacgcagctactgtcagtttgattcgaagctggcgcagatagtccagcagcaggggcgtaacgggcagttgcgtatcgggtttggcagtgcgaagcatcctgactgtcgggggattacggttgatgagctgcagaaaattcagttcgacagactggatttcactaacttctacgaagacctgatgaataaccagaaaatcccggacagtggcgttctgacgcagaaagtgaaagagcagattgctgaccagctgaaacaggcaggacagtaa

SEQ ID NO: 91122 - DNA, 258 bp, Enterobacter aerogenes
atgaaagtcatattcacgtcgaaccgttttattgattttcttatccggcttttgattacagcgattgtcatttccccggtaattatctggtcgtgggatacggtaaaagaaactacggcagacgggatacttgctgctgctttcgttatcctttactccggtgtgcttctgtttattctgtatttttgtttttctgccctgactgacctgcagaaacctgatgaaagaaaaagtgatgaaaggaatgaagatgaataa

SEQ ID NO: 91123 - DNA, 744 bp, Enterobacter aerogenes
atgaataaagcattactgccactgttactctgctgctttatttttccggcgtcaggaaaagatgcaggctggcagtggtataacgagaaaataaatccgaaggaaaaagaaaataaaccagtacctgcagccccccgtcaggagccggacattatgcagaaactgaccgcgctgcagacggcaacaaagcgggcgctgtacgaagctattctgtatcccggcgtggataattttgtgaaatatttccggctgcagaattactggactcagcaggccgggcttttcaccatgagcgccaaaaaagccatgctggcgcatcccgaactggactataacctgcagtacagccattacaacggcacggtccggaaccagctggcggcagaccaggcgcagcagcgacaggccattgcgaaactggctgaacactacggcatcatgttcttttaccgggggcaggaccccatcgacgggcagctggcgcaggtcattaatggcttcagggatacctatggtctgagtgttattcccgtttccgtggatggcgtgattaatccgctgttgccggattcccggactgaccaggggcaggcgcagcgcctcggtgtgaaatatttcccggccatgatgctggttgacccgaaacagggcagtgttcgcccgttatcatacggctttatttcacaggacgacctggcaaaacagttcctgaacgtttctgaagattttaaaccgaatttttaa

SEQ ID NO: 91124 - DNA, 342 bp, Enterobacter aerogenes
atgcatacaggggatttgtgtttttttacaggtgccagcctgtttatcgtgggggttgttggttatttctttacaggaccaaataataaaggagtttatctgctgagctcgtttatcttctttgtagtaaatgtcataagtgtatgtatgctgccagataatttcttgtttctttgtggtgcggttatgaatcagtgtgccgtaccggttgtttcaatggcagtcagtaccataccggttatcacgaagtttgacagtttcagaaggatgtttgtttgtattatgttgtcagccatatggtctggagtgatgtggttttttattatttcattagtgaaatga

SEQ ID NO: 91125 - DNA, 336 bp, Enterobacter aerogenes; identical to SEQ ID NO: 5780

SEQ ID NO: 91126 - DNA, 285 bp, Enterobacter aerogenes; identical to SEQ ID NO: 34796

SEQ ID NO: 91127 - DNA, 546 bp, Enterobacter aerogenes
atgtctctcactaaattactgccggtcattttgttgatgatggccacaggtgtgcaggcctccacccgggatgaaattgaacgactctggaatccgcagggtatggccgtgcagcctgcacaaccggcagcagacacatcagccagaacagaaaagccggctccccgctggttccgcctcagcaacggcaggcaggttaacctggccgactggaaggtggtgctgtttatgcaggggcattgcccttactgtcaccagtttgacccggtactgaaacagctggcacagcagtacggcttttccgtttttccctacaccctggatggtcagggggataccgcctttccggaagcattaccggtgccaccggacgtgatgcagaccttcttcccgaatattccggtggccacaccgaccaccttcctggtcaacgtcaacacacttgaggcattaccgcttttgcagggggcaacggatgccgccagttttatggcgcggatggataccgttctgcagatgtacggagaggaaaaaggtgcgaaataa

SEQ ID NO: 91128 - DNA, 288 bp, Enterobacter aerogenes; identical to SEQ ID NO: 5781

SEQ ID NO: 91129 - DNA, 393 bp, Enterobacter aerogenes; identical to SEQ ID NO: 15238

SEQ ID NO: 91130 - DNA, 1374 bp, Enterobacter aerogenes; identical to SEQ ID NO: 5782

SEQ ID NO: 91131 - DNA, 2823 bp, Enterobacter aerogenes
gtgaatgaagtctatgtgattgccggtggtgagtggttaagcaataacctgaacgccattgccgcctttatggggacccggacgtgggattccatcgaaaaaattgcgctcacattgtctgttctcgcggtggccgtgatgtgggtacagcggcacaacgtgatggatttgctgggctgggtggccgtgtttgtgcttatcagcctgctggttaatgtccgtacatcggtgcagattattgataacagtgacctggtcaaagttcaccgggtggataatgtgccggtcggactggcgatgccactttcactgacgacccgtatcgggcatgcaatggtggccagttacgagatgatattcacccagccggacagtgtcacctacagcaaaacggggatgctgttcggcgcagaactggtatcaaaaagcaccgactttttgtcccgcaatccggaaatcgccaatctttttcaggattatgtgcagaactgtgtgatgggggatatttacctgaaccacaaatacacgctggaggagctgatggcctccgctgatccctacacgctgattttttcccgccccagtccgctgcggggcgtttacgacagcaataataatttcgtgacctgtaaggacgcgtcggtttcgctgaaagacaagctgaatctggacacacagagtggcggaaaaacctggcattattatgcccagcagttatttggtggtcgccctgatccgaacctgttgttcagtacgctgattggcgacagttacagttacttctatggctcaagtaaatcagccagccagatcatccgccagaatgtcaccatcaatgcgctgaaggaggggatcaccagttatgccgcacgtaatggtgattcggccagcctggtgaatctggccaccacatcatcgatggagaagcaacgtctggcacatgtctccatcggtcatgtggcgatgcggacactgcccatgacgcagaccatcctgacggggatcgccatcggtattttcccgctcctggtactggcggctgtcttcaacaaactgacgctgtccgtcctgaaaggctatgtgtttgccctgatgtggttgcagtcatggccaatgttgtacgccattctgaacagtgccatgacattttatgcgaagcagaacggtgcaccggtggtgctctcagaaatttcacagatacagctgaaatactccgatctggcttccactgccgggtatctttccatgatgatcccgccattatcctggatgatggtcaggggactcggggccggattttccagtgtgtacagccatttcgcttcctctgctatcagcccgaccgccagtgcggcaggcagtgtggttgacggtaattactcctacggcaacatgcagacggaaaacgtgaacggcttcagctggagcaccaacagcaccacgtcgtttggtcagatgatgtaccagaccggcagtggcgcaactgccacacagacccgtgacggtaatatggtgatggatgcgagcggggcgatgtcccggttaccggttggtatcaatgcaacgcgtcagattgcagcggcacaacaggaaatggcccgggaggcgtcgaacagagcagaaagcgccctgcatgggttcagcagcagtattgccagtgcctggaactcgctcagccagtttggttctaaccgggggagcagtgattctgtcacaggtggtgctgacagcacgatgagcgcacaggactccatgatggccagccgtatgcgcagtgcagtggaaagctatgcgaaggcgcataatatcagtaatgagcaggcgactcaggaactggcatccagaagtacgagaacttctgccgggatgtatggagatgctcatgctgaatggggggttaaacctaaaattcttggtgttggtggaggattaggcgttagaggtggtggtcgggctggtattgattgggaagataatgatgcgcatacggcaagtagtaatactcagtcgagccataatgctcgtcatgatatcgatgccagagctacacaagactttaaagaggccagcgattactttaccagtcgcaaggtcagtgagtccggcagccatactgacaataatgctgattcccgtgtggatcagttgtctgcagccctgaattcagcgaagcagagttacgaccagtacacgacgaatatgacccgcagccatgaatatgctgaaatggcatcccgtactgaaagcatgagtgggcagatgagtgaagacctgtcgcaacagtttgcacagtatgtaatgaaacacgcgccacaggatgcagaagctattctgacaaacaccagttcaccggagattgcagaacgtcgtcgggcgatggcctggtcttttgtgcaggaacaggtacagcctggtgttgataatgcctggcgggaatcccgtggtgatattggtaaaggaatggagagcgtaccttcgggtggtggcagtcaggatattattgctgaccatcagggacatcaggccattattgagcaaagaacgcaggacagtaatatccgtaatgatgtaaaacatcaggttgataatatggtcacagaatataaagggaatataggtgatactcagaacagcgtacgtggcgaggaaaatattgtaagaggacagtattctgaactgcagaatcaccataaaacagaggcattatctcagaataataaatataatgaagaaaagtcggctcaggaaagaatgcccggggctgacagtccacaggaacttatgaaaagggcaaaggaatatcaggataagtataagcaataa

SEQ ID NO: 91132 - DNA, 480 bp, Enterobacter aerogenes
atgagatgtttaacccatattactctggtaacggtgatacagtttatcgcctgttatctggctggttgggggaatgccgaaacaatttttatgctgttcttcatagtactatggcagggactgtttatatggttgttctctcaaatacgaaaaaaacggaatgtgtcggatgagtttaagtttagtaaaggcgtttggtatataacgataccagtatcttccttactctctccattattaagcctgatggtttttatcattggtacactatacgaattaaggcgagttagtggttgtgtaagcgtaagagaatggatgcaatctcaggtaaatgaacaaactaatgaagatttgcatctggattttgataatatggattttcatcgtactaatcctgcaacagggttacctatgtcaggtattggtgtggatatcggtggtaattcatatggttatagttcaaaacgatatgatgagtga

SEQ ID NO: 91133 - DNA, 732 bp, Enterobacter aerogenes; identical to SEQ ID NO: 5108

SEQ ID NO: 91134 - DNA, 738 bp, Enterobacter aerogenes; identical to SEQ ID NO: 19417

SEQ ID NO: 91135 - DNA, 2280 bp, Enterobacter aerogenes
atgagttttaacgcaaaggatatgacccagggcggtcagattgcgtccatgcgtatccgcatgttcagccagatcgccaatatcatgctttactgcctgtttatttttttctggatactcgttggtctgattttatgggtaaaaataagctggcagacgtttgtgaacggctgtatttactggtggtgtaccacgctggaaggcatgcgggatttaatcaagtcccagccagtatatgagatccagtattacggcaaaaccttccggatgaacgctgcccaggtactgcatgataaatatatgatctggtgcggagagcagctatggtccgcattcgttctggccacagttgtggcactggttatttgcctgatcaccttctttgttgtctcctggattctggggcgtcagggtaaacaacagagcgaaaatgaagtcacaggtggtcgtcagctgacagacaatccgaaagacgttgcccggatgctgaaaaaagacggcaaggactccgatatccggattggcgacctgccgattatccgggattccgaaatccagaacttctgtctgcacggcacggtcggggccggtaagtcggaggttatccgtcgtctggccaactatgcccgtcagcgcggtgatatggtggtgatttatgaccgttcaggggaatttgttaaaagttactatgatccctccatcgataaaatcctgaatccgctggatgcccgctgtgccgcatgggatttgtggaaggagtgcctgacacagccggattttgataataccgcaaatactctgatccctatgggtacaaaagaggacccgttctggcagggttcaggacgtaccatttttgcggaagcggcgtacctgatgcgtaatgaccccaaccgcagctacagcaaactggtggacacactgctttccatcaaaattgaaaaactgcgtaccttcctgcgtaattcaccggcggccaacctggtggaagagaaaattgagaaaacggcgatttccatccgtgctgtgctgaccaactacgtgaaagccatccgttacctgcaggggattgagcataacggtgatcccttcaccatccgtgactggatgcgtggtgtccgggaagatcagaaaaacggctggctgtttatttcgtcgaacgccgacacccatgcctccctgaagcctgtgatctccatgtggctgtccattgccattcgtggtctgctggcaatgggagaaaaccgtaaccgtcgtgtgtggtttttctgtgatgagttacccacgttacacaaactgccggatctggtggagatcctgccggaagcccgtaagttcggtggctgttatgtgtttggtatccagtcctatgcccagctggaagatatctacggtgagaaagcggcggccacgctgtttgacgtcatgaacacccgtgcttttttccgttccccgagccataagattgcagagttcgctgccggtgagattggtgagaaagagcacctgaaagccagcgagcagtattcctacggtgctgacccggtacgtgacggggtatcgaccggtaaggatatggagcgtcagacgctggtcagttattccgacattcagtctctgccggatctgacctgctatgtcactctgcccggaccgtatccggcagtcaaactctctctgaaatatcaggcacgaccgaaggtcgctccggagtttattccgcgtgacatcaacccggaaatggagaaccgtctgagtgccgtacttgccgcaagggaagcagaaggtcgtcagatggccagcctctttgaaccggaggttgcctccggagaagatgtgactcaggctgaacagccacaacagccacaacagccacaacagccacaacagccacaacagccacaacagccacaacagccacaacagccacaacagccacaacagccacaacagccacaacagccacaacagccacaacagccacaacagccacaacagccagtgtcttctgtcatcaatgataagaagtcagatgcaggtgtgagtgttccggcaggggggatcgagcaggagctgaaaatgaaaccggaagaagagatggaacagcaactgccacccgggatcagtgaatccggtgaagtggtggatatggccgcttatgaggcatggcaacaggaaaatcatccggacatccagcagcatatgcagcgtcgtgaagaggtgaacattaatgtgcaccgggagcgcggggaggatgttgagccgggagatgatttctga

SEQ ID NO: 91136 - DNA, 5271 bp, Enterobacter aerogenes
atgttgagtttcagcgttgttaaatcggcaggcagtgccggaaactattacaccgacaaggataattactatgtgctgggcagcatgggagaacgctgggctggtcagggggctgaacagcttgggctgcagggcagcgtcgataaggatgtttttacccgtcttctggagggcaggctgccggacggggcggatttaagccgcatgcaggatggcagtaataagcatcgtcccggctacgacctgaccttctccgcccccaaaagtgtctccatgatggccatgctcgggggggataaacgtcttattgatgcacataaccaggccgtggattttgctgtccgtcaggtggaggcgctggcttccacacgggtgatgacggacggacagtcagaaacggtgctgaccggtaatctggtgatggcactgtttaaccatgacaccagtcgcgatcaggacccacagttacacacgcatgtagtggtggctaatgtcacgcagcataacggcgagtggaagacactgagcagtgacaaagtggggaaaaccggattttccgagaacgtgctagcgaaccggattgcgttcgggaaaatatatcagagtgagttacgtcagcgcgttgaggcgctgggttatgaaaccgaagtggtcggtaagcacggtatgtgggagatgccgggcgtaccggtggaggccttttccagtcgttcacaggctatcagggaggccgtcggtgaagacgcctcgctgaaatcccgggatgtggcggcactggatacgcgaaaatccaaacagcacgtcgatccggaaatcagaatggctgaatggatgcagacgctgaaggaaaccgggttcgacatccgggcatatcgtgacgcggcggatcagcgtgcggagatccgcacgcaggcgcccgggcctgcttcacaggacgggccggatgtgcagcaggcggtgacacaggcgattgccggattaagtgaacgaaaagtgcagttcacgtatacggacgtgctggccaggacggtcggcatactgccgccggaaaatggtgtgattgaacgggcacgcgccggtatcgatgaggccatcagccgtgagcagcttatccccctcgaccgtgagaaggggctgttcacatcaggaattcatgtgctcgatgagctgtccgtccgggcactcagtcgtgacatcatgaaacagaaccgggtgaccgtacatccggagaaaagtgtcccccggacggctggttacagcgatgcggtcagtgttctggcacaggaccgtccgtcgctggccattgtgtccgggcagggcggtgcagccgggcagcgtgagcgggtggctgaactggtcatgatggcccgggagcaggggcgggaggtgcagattatcgctgctgaccgtcgctcgcagatgaacctgaagcaggatgaacggctgtccggtgagctgataaccggacgtcgtcagctgcaggagggcatggtcttcacgccgggcagtactgttatcgtcgaccagggcgaaaaactctccctgaaagagacgttaaccctgctggacggtgccgcacgtcataacgtacaggtcctgataaccgacagcgggcagcgaaccggtacaggcagtgcgctgatggccatgaaggatgccggggtgaacacgtatcgctggcagggcggagaacagcgaccggcaaccatcatcagtgaaccggaccggaatgtccgctatgaccggctggccggagattttgcggccagcgtgaaagccggagaagagagcgtggcacaggtcagcggggtacgggaacaggccatactgacacaggccattcgcagtgagctgaaaacacagggcgtgctcggacacccggaggtgaccatgaccgccctgtcaccggtctggctggacagccggagccgttatctgcgggatatgtaccgaccggggatggtgatggagcagtggaacccggagacacgcagtcatgaccgctatgttatcgaccgggtgacggcgcagagtcacagcctgaccctgcgggatgcgcagggcgaaacgcaggtggtgcgtatttcctccctggacagcagctggtcgctgttccggccggaaaaaatgccggtggcagacggcgagcgactgagggtgacagggaaaattcccggactccgcgtctccggcggtgaccgcctgcaggtggcatccgtcagtgaagatgcgatgacggttgttgtgccggggcgggctgaaccggccaccctgcctgtggctgattcaccgttcacggcactgaagctggagaacggctgggtggaaacgcccgggcattccgtcagtgacagtgcgacggtgtttgcctccgtcacacagatggcaatggacaacgccaccctgaacggtctggcccgcagcggtcgtgatgtccggctgtattcctcactggatgaaacccgtactgcggaaaaacttgcccgccatccctcctttacggtggtttctgagcagataaaggcgcgggccggtgagacatcgctggaaaccgctatcagtctgcagaaaaccgggctgcacacgccggcacagcaggccattcatctggcccttcctgtgctggaaagtaaaaacctggccttcagcatggtggacctgctgacagaggcgaagtcgtttgctgcagaaggaaccggttttactgaactgggaggggaaatcaatgcgcagataaaacgcggtgacttactgtatgtggatgtggcaaaaggctatggcacaggcctgctggtttcccgtgcgtcgtatgaggcagaaaaaagtattcttcgccatattctcgaaggtaaggaggcggtcacgccgctgatggagagagtacccggcgaactcatggagacgttaacgtcgggacagcgtgccgccacccgtatgatactggaaacgtccgaccgtttcacggtggtacagggttatgccggtgtgggtaagaccacacagttccgggcggtgatgtcagccgtgaacatgctgccggcgagtgagcgtccccgagttgtggggctggggcccacgcaccgtgcggtcggtgagatgcgcagcgccggcgtggatgcacagacgctggcgtcctttctgcatgacacgcagctgcagcagcgcagcggagaaacgccggatttcagcaacacgctgttcctgctcgatgagagctcaatggtgggcaataccgacatggcacgggcatacgccctgattgcggccggtggcggtcgtgccgtggccagtggtgacacggaccagctgcaggccatcgcgcccggtcagcctttccgtctccagcagacgcgcagtgctgccgatgtggtcatcatgaaggagattgtgcgtcagacgccggaactgcgggaggcggtatacagcctgattaaccgggatgtggaaagggcactgtccgggcttgagagtgtgaaaccgtctcaggttccccgtcaggagggcgcatgggcaccggagcactccgtgacggagttcagtcacagccaggaagcgaaactggcagaagcgcagcagaaggcgatgctgaaaggtgagacttttccggatgtccccatgacactgtatgaagccattgtccgcgactataccggcaggacaccggaagcacgggagcagacgctgattgtcacgcacctgaatgaggaccggcgcgtactgaacagcatgattcatgatgcacgggaaaaggccggtgagctggggaaagagcaggtcatggagcctgtcctgaacacagcgaatatacgtgacggggagctgcgtcgtctctccacctgggagaataacccggatgcccttgccctggtggatagtgtgtatcaccggattgccggtatcagcaaggatgacgggctgataaccctggaggatgcggaaggtaacacgcggctgatttcgccccgggaggcggtggctgaaggtgtcacactgtacaccccggacaaaatccgggtggggaccggcgaccggatgcgcttcacgaagagtgaccgggagcgcggttatgtggccaacagcgtctggacggtgacagcggtttccggtgacagtgtcacgctgtcagacggacagcagacccgggtgattcgccccggccaggagcgggcagagcaacatattgacctggcttatgccatcaccgcccacggtgcgcagggggcgagtgaaacctttgccatcgcgcttgaaggcacggaaggtaaccggaaactgatggccggctttgagtcagcctacgtggccctgtcgcgtatgaagcagcatgtgcaggtgtacaccgataaccgtcagggctggacggatgccattaacaatgccgtacagaaaggaactgcccacgatgtgctggagccgaaaccggaccgggaggtcatgaatgcgcagcggctgttcagtacggcacgggaactgcgggacgtggcggcaggccgtgccgttctccgtcaggcagggctggccgggggagacagccctgcacggtttattgcaccgggacgtaaatatccgcagccgtatgtggcactgccggcgtttgaccgtaacggcaagtcagctggtatctggctgaacccactgaccacggatgacggaaacgggctgcggggattcagtggtgaaggacgggtgaaaggcagcggggatgcgcagttcgtggccctgcagggcagccgtaacggagagagcctgctggctgataatatgcaggatggcgtccggattgcccgtgataatcctgacagcggtgtggtggtgagaattgccggtgaaggtcgtccgtggaatcccggtgccatcaccggtggccgcgtgtggggggatatcccggataacagcgtccagccgggggccggaaatggcgaaccggtcacggcagaggtactggcacagcggcaggctgaagaggccatccgccgtgaaacggaacgccgcgcagatgaaattgtcaggaaaatggcagagaacaaacctgacctgccggatggcaaaacagagctggctgtcagggatattgccggacaggagcgtgaccggtctgccatatctgaacgggaaaccgcactgccggagagtgtgctgcgtgaatcacaacgggagcgggaagcggtccgggaggttgcccgggaaaatctgctgcaggagcgtctgcagcagatggagcgggatatggttcgtgacctgcagaaagagaaaaccctgggcggagactga

SEQ ID NO: 91137 - DNA, 747 bp, Enterobacter aerogenes; identical to SEQ ID NO: 5112

SEQ ID NO: 91138 - DNA, 861 bp, Enterobacter aerogenes; identical to SEQ ID NO: 5113

SEQ ID NO: 91139 - DNA, 561 bp, Enterobacter aerogenes; identical to SEQ ID NO: 5114

SEQ ID NO: 91140 - DNA, 525 bp, Enterobacter aerogenes
gtgtgctgcgatattcaggattacctgaaatacaggtgccatttatctgatatggagaataacatgaggaaatatattccactggtattatttatcttttcatggccggtattgtgtgcagatattcatggacgggttgttcgtgtactggacggtgataccatcgaggtcatggactcacggaaggcagtgcggatcaggctgataaatattgatgcaccggaaaagaaacaggattatggccggtggtcaacggacatgatgaaatcactggttgcaggaaaaacggttaccgtcacatattttcagcgagatcgttatggtcgtattctcgggcaggtttatgcaccagacggaatgaatgttaatcagtttatggtccgggccggggctgcctgggtatatgagcagtacaacacagatcccgtgctgcctgtccttcagaacgaagccagacaacaaaaacgtgggctctggtcagatgctgatccggttcccccctggatatggagacaccgtaaataa

SEQ ID NO: 91141 - DNA, 591 bp, Enterobacter aerogenes
atgaagctgattatttttattcttattgttctgattattgcagcgttacttatccggattatcctcagaagtgtaaatcagcattctcctttgctgatgcaattgcatgcggcaggtatacggaccggtgatgcagagcgaatactgtccggcggtgaatactggcaacgtcagaagacgctgctgacagaaagggaagtcagttttatgaaaggactgttcagaattgtggatatgaagcggtggtatctgtgtccgcaggtacgggtcgcggatatcgtccagctgaacgggaatatccggccacgatcacgccagtggtggcagttattcaggatggtgtctcagtggcatgttgatgtggttatcgttgagcggcgttcgttcagtattgttgcagcagtagagctggatgatgccagccatttacgaccggaacgcagacgccgggatattcttctggaagaggttctgaggcaggctggtattccgttgctcagaagccacgatgccagaaaactgctgcagatgaccggagaatggctgaatacaacaggggctgttcagcagtcaccggaacatcgtagctga

SEQ ID NO: 91142 - DNA, 261 bp, Enterobacter aerogenes; identical to SEQ ID NO: 12476

SEQ ID NO: 91143 - DNA, 858 bp, Enterobacter aerogenes
gtgactgatcttcaacaaacgtattaccgccaggtaaagaacccgaatccggtgtttacaccccgtaaaggtgccggaacgttgaagttctgcgaaaaactgatggaaaaggcggtgggcttcacctcccgttttgatttcgccattcatgtggcgcatgcccgttcccgtggtttgcgtcggcgcatgccaccggtgctgcgtcgacgggctattgatgcgctgctgcagggactctgttttcactatgatccgctggccaaccgcgtccagtgctccatcaccacgctggccattgagtgcggactggcgacagagtccggtgcaggaaaactctccatcacccgtgccacccgggccctgacgttcctgtcagagctgggactgattacctaccagacggaatatgacccgcttatcgggtgctacattccgagcgacatcacgttcacaccggctctgtttgctgcccttgatgtgtctgaggatgcagtggcagctgcgcgccgcagtcgtgttgaatgggaaaacaaacagcgcaaaaagcaggggctggataccctgggtatggatgagctgatagcgaaagcctggcgttttgtgcgtgagcgtttctgcagttaccagacagagcttaagtcccgtggaataaaacgtgcccgtgcgcgtcgtgatgcgaacagggaacgtcaggatatcgtcaccctggtgaaacggcagctgacgcgtgaaatctcggaagggcgcttctctgccagtcgtgaggcggtaaaacgtgaagtggagcgtcgtgtgaaggagcgcatgattctgtcacgtaaccgcaattacagccggctggccaccgcttccccctga

SEQ ID NO: 91144 - DNA, 654 bp, Enterobacter aerogenes; identical to SEQ ID NO: 7676

SEQ ID NO: 91145 - DNA, 258 bp, Enterobacter aerogenes; identical to SEQ ID NO: 5121

SEQ ID NO: 91146 - DNA, 333 bp, Enterobacter aerogenes; identical to SEQ ID NO: 5122

SEQ ID NO: 91147 - DNA, 312 bp, Enterobacter aerogenes
atgaacgttgacggatataaccgcgagtacgatattgcaagaaacaaagccgtaaccggcggttttgccatgtttacgctattttttggcatcacatgtttgccgctttttttcgagggcagcaaagaccttatgataacgggatatctctatccactacttttcggactggagttcctggcaattgcccccctttattatctctatttctacaaacgcgagggtatggggagaggaaattttcatttcggcatttttattatacttttcctgtgtattctgttgatccaatttctgttgccttttgggtga

SEQ ID NO: 91148 - DNA, 318 bp, Enterobacter aerogenes
atgaaagatctgacaaataaacagttggatatggtctccggtgcagggggggatattgggcgggaaattgctcagggaatcggcgctggagctggcacatttgtaggcggaactcctggtgccataaccggtgggatcgcagggggacaggtttatgactgggctgtaacaaaaacaccagacccagcgatgtccccatctggtctgggcggaacgctcaaacaaaaacccgctaaccttccatccgaagcgtggaatgcagcagcaggcagagaatgctactggagtccgaataacctcaacgatatttgttactga

SEQ ID NO: 91149 - DNA, 159 bp, Enterobacter aerogenes
atgcgggtgtttaaagatattatccttgccgggagcattctcttttctgtcttatattctgttttctcgttgtgcgatgttttgttgatgatgcagatattttattggcacccagagcactactgtctgtgtttgccattggatgtatatattttctga

SEQ ID NO: 91150 - DNA, 999 bp, Enterobacter aerogenes
atgagcaaacttgggattaatggatttggtcgtataggacgtttagtacttcgccgcctgttagaagtaaatagcccgctggaggtcgtggccatcaacgatctcacctcaccgaaagtcttagcctacctgcttaaacatgactctaactacggtcctttcccatggagcgttgattttacagaagatgcgctgatcgttaatggtaaaaaaatcaccgtttatgcggaaaaagaggctcagcatattccgtggaaagccgcaggcgctgaggtgattgttgaatgtaccggtttctatacgtcggcggaaaaatcgcaggcgcacctgaccgccggcgcgaagaaagtgctgatttccgcccctgccggcgagatgaaaaccatcgtttatcacgttaacgacgacaccatgagcccggatgacaccatcatttcggttgcatcctgcaccaccaactgtctggcgccaatggctaaagtgctcaacgatgctttcggcattaccgtgggcaccatgaccactattcacgcttataccggtacgcaatcgctggtggacgggccgcgtggcaaagacctgcgcgcctcgcgagcggcggcggaaaacattattccgcacaccaccggcgcggcaaaagccattggtctggtgattccggaactcagcgggaaactgaaaggtcacgcccagcgcgtgccgactaaaaccggctcagtgacggaactggtttccgtattggcgaagaaagtcaccgctgaagaggttaatcaggccatgaaaaatgcggcggcgaacaatgaatcttttggctacaccgaagaggaaattgtctcctccgacattattggcagccatttcggctcaatctatgatgcgactcaactggagatcatggaagctggcggcgtacagctcgtgaaaaccgtggcctggtacgataacgagtacggctttgttacccagcttgtccgcgtactggataaattcgcgaagtaa

SEQ ID NO: 91151 - DNA, 792 bp, Enterobacter aerogenes
atgacagagcatttcccggcgctttcacacgacacgttagcggcggcaaatctcatcggcgactggttgtcgcaggatgatttgccgcagaatgcgcagccgcagattgcggtgttggccggtaacgcggtgatcccgaccattgacgccgcctgtcggctcgcggctcagaggcagattccactattgataagcggcggtattggtcattcgacgacctttctttacgacgccgtacaaaagcatccgcactatcaggcgttgcgggtagaggggcgtccggaatcgcatatcctggcggatatcgccgaacgtttctggcaaattccgcgcgatcgcatcgtggtggaggaccgttcaaccaactgcggcgaaaacgcgtggtttacccgccggttactggaagagcgtgggctggatcattcctctggcgtggtgattcaggattcgacgatgcagcgtcggacgatggcgacgtttgcccgcgtctggcaggaggcaccggcgcagccgcagtggtggagctatcccggttgttcgccgcggcttgaaaacagcgctgctggcctgagattcagcggagacgatagtggattgtggccggtggggcgttatctggcgctgctgcttggcgagctgccgcgtctgctggataacgcgcagggttatggccccaacggtaaagggtttattacccacgtcgatttcccacgcgatgttagcgcggcgtggcaatgcttgcgtgaagatacgctattgagcgaggcgctaaacgccagaacgctggggtag

SEQ ID NO: 91152 - DNA, 1437 bp, Enterobacter aerogenes
atgactgaacatcaacgtgaggggcaggttcatcctgccaccgacggggagtgcccgtcgcagctcaaacgcggccttggcgcccggcacattcagatgattgcgctgggcggcgctatcggcaccggactgtttatgggggcgggcagaaacatcgccgtcgccggaacatccattctgcttatctatctactggtaggtttctttacctatatggtgatgcgggcgatgggggagctgttgctgacccgcctggattaccgttcgtttgcggatttcgtcggcgactatcttggcccgcaggccagtttctatctgggctggacctactggcttagctgggtggtgacctgtatcgccgacgtagtggtatgcggcagctatatgcagtactggtttccggagatgtcggcgtggatgcccgcgttgagtacgcttgggatcctgttcttgtttaatttgttgtcggtaaaaatgttcggcgaggccgaattctggtttgcgctgattaaggtcatcaccattatcgcgctgattttaaccggcgcgtggatgattgctatcggctggacttcgccggacggcgtgaaggcttcgttaggccatatcaccgacccgacggcctttatgccgcacggggtgaccggtttcttcgccggtttccagatagcgatcttctccttcaccggtattgagctgctcggcaccatgacggcggaaacgcgcgatcctgagcgcatcctgccgaaggcgattaacgcgctgccgctgcgcatcattattttctatctgctgtcgatggtggtgattattgccgtggcttcatggccgggtgtctcgccggatgccagtccgttcgtgaccctgttcgccaaggccgggctacctgccgccgccgcggtgataaactttgtcgccttgacgtcggcaatgtcgtcggcgaacagcggcgtttattccagtacccgcatgctgtacggcctgtcggtggaaaaacatgcgcactggcagttccgtatactatcgcgtaatacccgcattccggtacgtagcctgctgttctcctgcttctgcatgctaagcggtacgttattgctgttcctggtgccaaacgtgatgacgttgttcaccatcgtttcaacgctggcggcgatcatggtggttttcagctggggtatgatcctcgtggcgtacctggtgtatcgccataaacgcccggacctgcacgcgcggtcgaaattcaaaatgccggcgggagtggtgatgtgctggctgagcctgctgtttttcgccttctcaatcttcattatgattttcgacccggatacgctgctggcgctgatggcctcgccgctgtggtttatcgcgctatggtgcttctggaaagtgaaacagaagcgcgaagggcaactggcattggataacgccagcgcctga

SEQ ID NO: 91153 - DNA, 996 bp, Enterobacter aerogenes
atggaacaaaacgtcaacgatttactgcattgtaaactgcagacatggacctttccgccgactatcgaagccagttggttaggcgatggcattctgcaactgctgccaaaaacgccctggcgacaggcgacggtgctttccgccggggtgcacggtaacgaaaccgcaccgattgaaatgttgctgcagatcctgcaggggttaagcctgggcgagcagccgctgacccacgcgctactagtggtgttcggcaatctgcccgccattcgcgccggccgtcgttatctgcataacgatctcaatcggctgtttggcggccgccatctggcggcgatgccgggtaacgagtcgcgtcgcgcttttgaactggagatggccgtacaggccttcttccgtagcgccgatgcccacggcaaggtgccgcgcacgcatctcgatctgcataccgccattcgcgggtcaaaatatcggcagttcgcgctgctccccgctcatgatggcgactacagcgcggatttttatcagctgttgcaggccagcggtatggacgccatcgtgcgccataccgaaccgggcggcacctttacccacttcaccagcgagaagttcggcgcgcaaagcgccacgctggaactggggaaagtgatgccattcggtgaaaatgatttgcgcttgtttgccgccaccgaactggcgatcggcgcgctgatcgccgacggcatcatgccgccgcgcagcaaagcgccggtcgaatactttgtggtgcagcagagcatcatcaagagcgagaacggttttacccttaatctcgacccgaaaattgaaaactttaccgcgctgccggcaggctatgaaatcgcccgtcaggcacagaaaacctgggtggtcaatgccgacgccccctacatcctgtttccgaatgcgggcgtcgccgccggtcaacgcgccgggctgttgctgaccgctaccgcgccaagcctttccatgcctgcttga

SEQ ID NO: 91154 - DNA, 1341 bp, Enterobacter aerogenes
atgtctggatttgaagcgaattttgacggcctggtggggccaacgcaccactacgccgggttgtcggtaggcaacgaagcgtcacaaaacaaccgcgacggtttatctaacccgaagaaggcggcgctgcaagggctttataagatgaagaccctggccgatcgtggctttgttcagggcattctgccgccgcagccgcggccaaatatgacgatgctgcgtagtattggttttcagggtagcgacgagcaggttatccagcgtgcggctaaagaggccccgcagctattgtcggcctttagctccgcttcctcgatgtggaccgccaacgccgccaccgtgtcgccgtcggcggatagcgctgatgggaaagtgcactttacggtcgccaacctcaacaataagctgcaccgcatgcaggaagcgccgatcacctcggccatcctcagggcgaccttcgccgatgagcgttacttcgcgcatcacgcggcgctgccgcagcatggcgatttaggtgatgaaggggcggcgaaccataaccgtttctgtggggattatgatcgccagggcgtgcagttttttgtctacggtaagcgagccagcggcggcattgcgccagctaaataccccgcacgccagacgctggaggccagcgaagcggtggcgcgtctgcatcagctcgacccgcagtacaccgtattcgctcagcaaaatccgcaggctatcgaccatggcgtattccacaatgatgttatcgccgtcagcaaccgccacgtgctgttccatcatcagcacgccttcctgcagcagcgggaggtgctggcgacgctgaaggagagcagcgccaggctgaatattccattcaccagcgttgaagtccctgacgagcaggttagcctcgatgacgcggtggcctcttatctgttcaacagccagttactgagcaaaaccgatggcaaaatgctgatcgtggtgccggaagagtgtcgtcagcgtgaaaacgtctggcgttatctcaccgctcttgccgccgatagcgcatcgcctatcgatgaagtggcggcattcgatctacgtgaaagcatgcgcaacggcggcggcccggcctgtttacgtctgcgggtggtgcttaacgatgccgagcgcgcggcggtcaacgctcacagcctgatgaatgacgaacgctaccggcagctgaccgcgtgggttgaaaagcattatcgcgatcgcctgcatgccagcgatctcgccgacccgcagctgctgcgcgaagtttatcaggcgctggatgagctgacgcagattttacatctgggcgcgatttatgacttccagcgataa

SEQ ID NO: 91155 - DNA, 1467 bp, Enterobacter aerogenes
atggcggtaaacgcacagtttatagcaggtaagtggcagcagggcgcaggcgcgccgttaaccaagctggcgccggaagaccagtctattttatggcaggcgagcagcgccggcgcggccgacgtgcaggccgcctgtactgccgcgcgcgaggcgttttatggctggtcgcatcgcccattaagcgaacgcattgccgtggttcagcgtttcgcggcgctgctggaagagaataaagaggcgctggcgacgttaatttcccgtgaaaccagcaagccgctgtgggaaacccgcaccgaagtacaagcgatgatcggcaaagccgggatttccattgatgcctacgccgaacgtaccggttatcgcgagtccgctatgccggacggcaaagcgctgctgcgccataagccgcacggcgtgatggcggtgtttggcccttacaacttcccggggcatctgccgaatggccatattatcccggcgctgatcgccggtaacaccgtggtatttaaaccgagcgaattgacgcccgcgaccgcggaactcagcgttcagctatggcagcaggccgggattccggatggggtgctaaacctggtgcagggggcgaaagataccggccaggcgctgctggaaaaccgcgatatcgacggggtgctgtttaccgggagcgccgccgctggcttccatttccaccgctacctcggcggccagccggagaaaatgttggcgctggagatgggcggcaataactcgctgatcgtggccgacgttgtcgatagcgttgcggcgctgaacgtgattattcaatcggcctttatctccgccgggcagcgctgcacctgcgcgcgtcgtttactggtcccgcgcggccaacagggcgatgcgctacttgaacaactgattgctgccagccggcagatccgcgccggtaaatgggacgccgaaccgcagccgtttatgggcggggtaatttcgcaaaccgccgcgcagggcatgctggcggcgcagtcgaagctggaagcactaggcggcaaagtgctgctgcgcatgagccagcctgatccgcgctcaaccgtgctgacgccgggaattatcgatgttaccgggatcgcggtaccggatgaagagtacttcggcccgctgctgaccgtgattcgttatgaccagttcgatgaggcgatcgcgatcgccaataacacccgctacggcctggctgtggggctgatttccgccgacccggcgctgttcgacaagctggccgacgaagcgcgcgccgggattgttaactggaacaaaccgctcaccggggcctccagcaaagcgcctttcggcggtgtcggcgcctccggcaaccatcgcgcttcggcgtggtatgccgccgattattgcgcctggccgatggcttctctggtcagcgaaacgctgacgctgccggcgacgacgtcgccaggtctgccattctga

SEQ ID NO: 91156 - DNA, 1026 bp, Enterobacter aerogenes
atgatgttatttcgtcccgtacgggaaaacgacctcgatgatattgtccgcctggcctcccgggcgggcgtgggaatgacttcgctgccgaatgatgccgtgcgcctcgccgcacggatcaaacgcagcgtggagacctttgccggcaagctgacgcgcggcgaacaggggtttctgtttgttctggaagataccgaactgagccgggttgtcggcgtcagcgccattgaggtcgcggttgggctcgacgaaccgttctacaattttcgtattcagaagacggtacgggcatccaaagagcttggggtttacaagcatcaggaattgctcaatttaagctacgaccataccggccacagcgaactctgtaccctgtttcttgacccggagtaccagaagaaccgcaacggcctgttgctctccaaagcgcggtttgtctttattgccgcgttccgcgagtggttttcaccgcatctgttcgccgagctgcgcgggcgcagcgacgagcaggggaattcgccgttctgggatgcgttggggcaccactttttcgacattcctttcgccgatgccgaccgcctcaccggtacaggaatgaaaacctttatcgccgaactgatgccggcctacccgatttacatctcgctgctgccggatgatgcccgcgaggtgataggccaggttcatgctaacaccgcgccggcgcgggctattctcgaaaaagaagggtttagctggcgcgggtccgtcgacatcttcgatgccggcccggtactggaagctgaaaccgataatattcgtgctatcagagagagctattcgctgccggcgctgcaactcatgacgccgcaggcgacgccaaccatcgtcgccaacggacagtttgataatttccgcgcggtcctcatcgcgcaagagacgccgggagcactcgatcagcaggcgctggacgccctgcaggtcaatgccaccgaccgggttcacgcggtgacactcaatccagaggaaaacagatcatggcggtaa

SEQ ID NO: 91157 - DNA, 1206 bp, Enterobacter aerogenes
atgtcaggcagtatcactcgcgaagattttgatgcttatatggttccgtgtttcgctcccgcgccgtttatcccggtgaaagcggcgggctcccgcgtctgggaccagcagggtaaagagtacattgacgtggctggcggtattgcggttaacgcgctgggtcacgctaacccggccctgactgcggcgctgaaggcgcagctggataagctgtggcacatcggcaacggctataccaacgaaccggtgctgcagttggcgaaaaccctggtggagtcgaccttcgccgataaaattttcttctgtaactccggcgcagaagccaacgaagccgcgctgaagctggcgcgcaagtatgcgcacgacaaattcggcgccgacaagagcgaaattatcgccttcaaaaactctttccatggccgcactctgtttaccgtcaccgtgggaggacagccgaagtattccagcgactatgcgccgttaccgcaggacatcacccatctgccgtataacgacatcgacgcggtgaaagcggcgttctcttcccgcacctgcgcggtcatcgtcgagccgattatcggcgaaggtggcgtcatgccggcggatccgcaattcctgcaggcgctgcgcgagctgtgcgataagcatgaagcgacgctgatttttgatgaagttcagaccggcgccgggcgtaccggccaactgtatgcttaccagcactacaacgtggttccggatattctcaccagcgcgaaagggctgggcggcggcttcccaattggcgcgatgctggcgaaagaggcctgggcgcaggtgttccagcccggtacccacggtacgacgttcggcggcaacccgctggctgcgaccgtcgcaaatagcgtgctggcgcaaatagatagtgcgctgctggcgggcgtgggcgaacgccatacccttatcgtcgataaactcaatgcgctgaacgccaaatatgatgtctttagcgccgtgcgcggaatggggctgctgattggcgccgaactggcaagccatctgcgcggcaaagctaaagcgctgaccaatctggcggcggaagaggggctgatcgcgctgatagccgggccggacgtactgcgtttcgccccggcgctcaatattccactggcggatattgatgaagcctttgtgcgccttgagcgcgccgtcgcccgcttaaccagctaa

SEQ ID NO: 91158 - DNA, 1275 bp, Enterobacter aerogenes
atggaaaagttatcttacgcatctgaaagtagtacatctccatggaccacttacctgcgccagatcgaccgcgtcgcgccgtatctgggcgacctcgcctactgggtggaaactctgcgccacccgaaacgcgcgctaatcgttgatattccagtgcagatggatgatggcaccatccgccatttcgaaggctatcgcgtacagcacaatctatcgcgtggaccgggtaaaggtggtgttcgctaccatccggatgtcgatcttaacgaggtaatggcgctttctgcctggatgaccattaagtgcgccgcggtcaatattccttacggcggagccaaaggcggcatccgcgtcgacccgttctcactgtctgaaggcgagctggaacgtctgactcgtcgctataccagcgaaatcggcattatcattgggccacagaaagatatcccggcgccggacgttggcaccaacggtaaagtgatggcgtggatgatggacacctactccatgaatcacggcaccactatcaccggcgtggttaccggtaagccgattcatctcggcggttcgctgggccgtgaaaaagccaccggccgcggcgtcttcgtcaccggtcgtgaagtggctcgtcgcaacggtatcgaaatcgaaggcgcgaaagtggcgctgcaaggttttggtaacgtcggcagcgaagccgctcgtctgttcgccgacgttggcgcgcgcattgtcgtgatccaggaccataccgcgaccctgttcaacgaaggcggcatcgacatgcaggcgctgaccgcatggcaggccgagaacaagatgattgccggtttcccgggcgcgcgtgaaatcgccaaagaagatttctggaccaccgagatggatatcctgatcccggcggcgctggaaggccaaatcacccgtgaacgcgcggaaaaaatcagctgtaagctgatcctcgaaggcgccaacggcccgacctatccggacgccgacgacgtgctggccgaccgcggggtgatcgtggttccggacgttatctgtaacgccggcggcgtgaccgtcagctacttcgaatgggtgcaggacatggcaagcttcttctggagcgaagaagagatcaacgccaagatggaccgcatcatgacggatgctattgttcacgtctgcgataaagccgccgagaaagcgtgttctctgcgtaccgcggcctacatcgtcgcctgtgagcgtatcctgctggcgcgtaaagatcgcggcatttacccgggctaa

SEQ ID NO: 91159 - DNA, 432 bp, Enterobacter aerogenes
atggataaccgacagcttaacttttcccatctcttatacttaaccgcgcatcactggcggctggcggttaacaggcggttaaaaaatctaggcatgagccaggcgtcatgggtggcggtgtcagccattgcccgcaacgagcagcccctctcgcaaagcgaactggcgcaggaactgggtgtcgaaagcgccaccatcgtcccgctcattaaccgcctggtcgaacttgaactggtggagcgcgttaagcctgacagcgataaacgtaagcgtctgttggttgccaccgccaaagggatggcgctctttcatcaggtgaaagcggtcgccgacgacctgcgcgaggagatcctcaccgccattactccggaagagcgtgagcaaacccaccgggtactggaaaagctgctgcacgaggtggaaaagaaataa

SEQ ID NO: 91160 - DNA, 1653 bp, Enterobacter aerogenes
atgcctcgtcgcgaagctaatccttatgtgccccacgactgggcgccgcatgaaaaaccggcgatgctcggttcgccgtcgacgccgattcacagtacgccaaaacgcgtcgcttacggcatcgtcggactgctggtgtgcctgaccggcgcgctgggtaacgccgtcgttaccgccaacctgcagctgctgcagggcactttcgccgcctggtcgacggaaatcgcatggctgccggcggtctacgttatgactaacgtttccatcaacctgctgctggtgaaatttcgccaacagttcggcctgcgcgcctttaccgaaggcttcctggtactgtatgtactggtcacattcttccacctgttcgtcaacgacctcagctcggcaatgatggtgcgcgcggcgcacggcatggtggcagcggcgttgagttcactgggaatttactatcaggtgcaggcctggccggcgcgccaccgcctgaaggcgttgaccatcggtatcaccggatcgtcgctggcgatcccgctggcgcgtctgttctcgaccgaactgctgcagattgacgaatggcgcgggctctacttctttgagctcggcctggcgctggtgtcgctggcctgcgtcatcgcgctgaaactgccgccaagcgaccgcaaaaaggtgtttgagaagaaggactttattaccttcttcctgctggcgcccggtatggctttagtctgcgcggtcctgtcgctgggccgtctggactggtggtttgaggcgccgtggcttggctggtcgctggcgggagcggtggtgctgatcgtttcggctatcgccttcgagcataatcgcactaacccgctgcttaacaccaaatggctttccagcggcagtatccttcgtctgggactgattatgttgctgattcgcatcgtgctggcggaacagaataccggggtcatcggttggctgcagtacgtcggcttgcaaaacgagcagatgaccaacctggcatggtcgattttcgccggtatcgtctgcggtatcgtcgccagttgcctgacgcttaacccgcagcgcctctactggcccaccgcgaccgcgctggcgttgattatgattgcgtcattgcttgatagccagtccactgccctgacccgtccggaacagttgatgttcagccagtttttacttggcttcggcagtgccttcttcctcgcgccggccatgctggcgggaattggcggtgtgattgccgaccagcggaatctggtcagcttctcggttctgtttggcatgagccaaaatatcggcggcctgctcggatcagctatcctcggtacttttcagacctggcgtgaaaaatttcattccagccagttggccgatcagataaccacgttgaacccgttaatcgccgagcgactgcagcagtacagccagatgtatcaaagccagattggcgacagcacgctattgaacgtgcaggctaccacgttgctgcaaaacgcctcgacgctacaggccaatattctcgcctacaatgacacttatctcctgacggcggcgatctctgccgcaacgctggtgtggattttctggcgcttaatcagattgcgaatcaccgcccgtatcgcgttaaaacgcgcaaccggcaataaataa

SEQ ID NO: 91161 - DNA, 1086 bp, Enterobacter aerogenes
atgagtcagcaggacgcggccaggcaacaggccaatacccgaaacaacatccgcgtggtgtctatttttaccgccgcggcgatcggcatcgtcggcgtattggtgattctttacgcctggcagttgccccctttcacccggcatagtcagtttaccgataacgcttacgtgcgcggtcagacgacgtttatcagtccgcaggttaacgggtatatcaccgcggtgaacgtcaaagatttcgataccgttcagccgggacaggtgctgttccagattgacgatcgcatctataaacagcgggtgcaccaggcgcaggcaacgttggcgatgaaacaggcggcgctgaaaaacaatcagcagcagcggaaaagcgccgaagcgaccatcgtcaaaaacgaggccgccttgcaaaacgcccgcgcgcagaatcagaaaacccaggccgatttaaaacgcgtacaggaactcaccgcggacggttcgttatccattcgcgaacgcgactctgcgcgggccagcgcggctcaaggcgcagccgatatcgaacaggcgaaagccacactggagatgtcgcgccaggatctgcagtccactatcgtcaatcgcgattcgctggaggccgatgtggccagcgccaaagcggcgctggagcttgccgaaatcgacctgcagaatacgcggattatcgccccgacggccgggcaactggggcagatctccgtacgcctcggcgcctatgtcagcgccggtacgcatttgacctcgctggtaccgcctcagcactgggttatcgccaacctgaaagagacacagctcgccgaggtgcgcgtcggccagccggtcaccttctcggtcgatgcgttgaacagcgaaaccttccacggcaaagtacaaagtatttcgccagcgaccggcgtcgaattcagcgcgatctcgccggataacgcgaccggcaactttgtcaaaatcgcccagcggatccctgtccgtatcgcggtcgatgaggggcagaaaaacagctatcgtctgcgtccggggatgtcggtgcaggtgacgattgatacccgcgcggagaataaacaatga

SEQ ID NO: 91162 - DNA, 1386 bp, Enterobacter aerogenes
atgatccgcccgttaacccttgccgtggcgctggcgctggcgctggtcggttgtcagtctgccgatgtcccacgtgcggagcctacgctggcgatccctgccgcctggcgtgccgatgtgggtccttccagcccggtggaaggcgtgtggtggcgcaattttcacgatagcgcgcttaatcagtatgtcgatcgggcgttgcgctacaacagcgacgtcctgatcgcccgcgagcgagttaacgagtatcaggcgcgtgcctacgccgctgatagcagcttattcccctcgcttgatgccagcctgaccggtacccgcgctcgcgcacagtccgccgcgactggtctgcccatccacagcacgctgtacaaaggcggcctgaccgccagctatgacgtcgatatttggggggccaaccgcagcgccgccagcgcagccgaagccagccttgaagcgcagaaagccgctgccgccgccgctaatctgaccgtggcgacatcggtcgccgtcggctacgtcaccttgttgtcattagacgagcagttgcgggtcacccgccaaacgctgaaatcgcgagaagatgcgtggaatctggctaaacggcagtatgaaaccggctatacctcgcgcctggagctcatgcaggcggattccgaactgcgctcgacgcgggcgcagatcccgccattgcagcatcaaatcgcgcaacaagagaacgccctgagcgttctcttgggcgacaatcccggtgcggtaaaacgtaacgagttcgcacaacttagcccgctacgcctgccctcacagttaccctcgacgctaatgagccgccgtccggacattgtgcaggctcaacgccaactggtggccgctgatgccaccctcgcgtcgtcgcaggcgcagttgctgccttccatcaaccttaccgccaccggcagcctgcaggacagaacgctaccggatctgctcgacaacccgctgcgattatggagccttggcggcagtattctggcgccgttactcaaccgccaggcgctaaatgcgcaggttgatgtctcgatggcccagcgcaatcaggcgttatacggatatgagaaaaccgtacgcggcgcgttcaaagaggtgaacgatagcctggatgccatcagccgctacagcgaacagttaagcgagctccaggagcaggaatcggtcgccgcagagacgttgcgtatcgcgcagaaccgctatcgtaacggctactcttcctatctggacgtgttggatgcgcaacgtacgttattctccactcagttgagcgtggtgcaggtgaaaaataacctgctgctggcgcagattgatttgtaccgggcgctgggaggcggctggtctgactcatcagggagctaa

SEQ ID NO: 91163 - DNA, 660 bp, Enterobacter aerogenes
atgcaacaacagtggtcggcagtagacaattatttgcttgaggccttaatccccggcgatcctgtgctcgatcgggtactggaaaacaaccatcgagccgggctgccggcacacgatgtcgccgccaatcaggggcagtttctcgccctgctggtacggcttacccaggctaagcggatactggagatcggtactctcggcggctatagcaccatctggatggcgcgcgagcttcctgccgacggccaactactcacgctggaggccgacgcgcatcatgcccaggtggcgcgggagaatctgcagctggcgggcgttgaccagcgggtcacgctgcgagaggggccggcgctacattctctggaggcgcttggcgaatgtcccgctttcgacctgatcttcatcgatgccgataagccgaataatccccactatctgagctgggcgctacgttattcccgcccaggaaccttaattattggcgataacgtggtacgcgacggtgaagtggtcaacccacagagcgccgacgagcgcgttcagggcgtgcgtcaattcattgagatgatgggcgccgagccacggttgacggcaacggcgctgcagaccgtgggcactaaaggctgggacggctttactctggcgtgggtaaacgcttaa

SEQ ID NO: 91164 - DNA, 3942 bp, Enterobacter aerogenes
atgagagatttttccggcagagcgctgcccgataacgttatgacagaacaacaaaaaatcactttctcgcagctctatgaacggctcgatggtctgatgctgcgtgataaatcgcgctatagccgccgcctgcatggcgcaaagaaggttaaaaatcctgatgcccagcaggccattctgcacgagatggcgcgggagatagagcaggcagcagggaaagtcctgctacgcgaagccgcgcgtccggcaatcacctatccggaaaacctgccggttagccagaaaaaacaagagattctcgaagcggtgcgcgatcaccaggtggtgatcgtcgccggtgagaccggttctggtaaaaccactcagctacccaaaatctgcatggagctggggcgcggcctgaaaggcctgattggccacacccagccgcgtcgactggcggcgcgcaccgtcgctaaccgtattgccgaagagctgcagagcgagccgggtggctgtatcggttataaagtccgcttcagcgaccacgtcagcgaaaacaccatggttaagctgatgaccgacggtatcctgctggcggaaatccagcaggatcgcctgctgatgcagtatgacaccatcattattgatgaggcgcacgagcgcagtctgaacattgattttctgctgggctatctgaaagagctcctgccgcgccgcccggacctgaaaattatcattacctcggcgaccatcgacccggaacgtttctcaaagcatttcaataatgcgccgattatcgaagtctccgggcggacttacccggtggaagtgcgctatcggccgatagtggaagaggcggacgataccgagcgcgatcagctacaggcgatttttgatgcggttgacgaactggggcgcgaagggcccggcgatatcctgatctttatgagcggcgagcgggaaatccgcgataccgccgaggcgttgaataagctcaatctgcgtcacaccgaagtgctgccgctgtatgctcgtttatccaatagtgagcaaaaccgggtcttccagtcccatagcgggcggcgtattgtcctggcaaccaacgttgccgaaacctcgttgacggttccgggcatcaaatacgttatcgatccgggtaccgctcgcatcagtcgctacagctaccgtacaaaagtgcagcgcctgcctatcgagccagtatcacaggcctccgctaatcagcgtaaaggccgttgcggacgtgtgtctgaaggcatctgtattcgtctttactcggaagacgatttcctgtcgcggccggaatttaccgacccggaaattctgcgtaccaacctggcctcggtcattctgcaaatgaccgctctggggctgggcgatatcgccgcgtttccgtttgtcgaagcgccggataagcgcaacatccaggatggcgttcgtctgctggaagagctcggcgccatcaccaccgatgagcaggcaacggcctataagctgaccccgctgggccgccagctcagccagctaccggtggatccgcgtctggcgcggatggtgctggaagcgcagaaacatggctgcgtgcgtgaagcgatgatcatcacttccgcgctgtcgattcaggatccgcgcgagcgccccatggacaagcagcaggcatccgatgaaaagcatcgtcgcttccacgataaagagtctgatttccttgcgtttgtcaatttgtggaactatctcggcgaacaacaaaaggcgctctcctcgaatcagttccgccgccagtgccgggtggatttcctcaactatttacgcgtgcgtgaatggcaggatatttacacccaactgcgccaggtagtgaaagaactcggcctgccgatcaacagcgagccagcggagtaccgtgaaattcataccgcgctgctgaccggtttattgtcgcatatcgggatgaaggactccgataaacaggagtataccggcgcccgtaatgcgcggttctctatcttccccggctctggtctattcaagaagccgccgaagtggacgatggttgcggaactggtggagaccagccgcctgtgggggcgcattgccgcccgcattgagccggagtgggtcgagccggtggcccagcatctgattaaacgttcatatagtgaaccgcactgggagcggtcgcagggcgcggtaatggcgacagaaaaggtcaccgtctacggtctgccaatcgtcgccgcgcgtaaggtcaactatagccagattgacccggcgctgtgtcgtgagctgttcatccgccacgcgctggtagagggcgactggcagacgcggcatgccttcttccgcgataacctgaagctgcgcgctgaaatcgaagagctggagcataagtcgcgccgtcgcgacatcctggtggatgacgagacgatgttcgagttttacgaccagcgcattagccacgatgtcatctccgctcgccactttgataagtggtggaagcaggccagccgtgaaacgccagacttgctcaattttgaaaagagcatgctgattaaagagggggcggagcaggtcagtaaactggactacccgaatttctggcatcagggcaatcttaaactgcgtcttagctatcagtttgaacccggcgcggatgccgatggcgtaacggttcatattccgctgccgctgctcaaccaggtagaggaagccgggtttgaatggcagatccctggcctgcgtcgcgagctggtcatcgcattaatcaaatcgttgccgaaacccgttcggcgtaatttcgtcccggcgcctaattacgccgaggcgtttttaggccgcgcgacgccgctggcgttgccgctactggattcgctggagcgtgagctgcgtaaaatgaccggcgtgaccatcgaccgcgaatcctggcagtgggatcaggtgcccgatcacctgaaaatcactttccgggtggtggatgacaaaaataagaaactgctggaaggacgctctctgcaggtcttaaaagacgcgcttaaaggtaaagttcaggagacgttatcggcggtggccgacgatggtattgaacagagcgggctgcatatctggagtttcggcaccctggcggagagttacgaacagaagcgcggtaattataaggtgaaagcctggccggcgctggtggacgagcgtgacagcgtcgccatcaaactgtttgataatccacaggaacagcagcaggcgatgtggcgtggtctgcgccgtttactgttgctcaatattccgtcgccgattaagtatctgcacgagaaactgcccaacaaagccaaactgggactctatttcaacccttatggcaaggtgctggatttgattgacgactgcatctcctgtggtgttgacaagcttattgatgaagcaggcggcccggtgtggaccgaagagggctttagtaaactgcacgataaagtgcgcgccgaactgaacgacacggtggtcgatatcgcgaagcaggtcgagcagatcctgacggcggtatttaacatcaataagcgtctgaaagggcgggtagatatgacgatggccctggggctgtcggatattaaagcgcagatggcgggtctggtttatcgcggctttgttaccggcaacggtttccgccgcctcggcgatacgctgcgttatctgcaggcaattgaaaaacgtcttgagaagctggcaatcgacccgcatcgtgaccgcgcgcagatgctaaaagtcgagagcgtgcaacaggcgtggcagcagtggttgaataagctgccgccgaatcgccgcgatgacgacgacgtacaggagatccgctggatgatcgaagagctgcgcgtcagcttctttgctcagcagttgggtaccccgtatccgatctcggacaaacgcgtgttgcaggcgatggagcaaattacgccgtag

SEQ ID NO: 91165 - DNA, 606 bp, Enterobacter aerogenes
atgagcaaagtattagttctgaagtccagtattcttgcagggtactcgcaatccggccaactgtccgactattttgttgaacaatggcgtgaaaaacacgcaggcgacgttatcaccgtgcgcgatctggcggcaaacccgattccggttctggatggtgaactggttggcgcgctgcgtccgagtgatgcacagttgaccgcacgtcaacaggaagcgctggcgctgtccgatgaactgatcgctgaactgaaagctaacgatgtgattgttatcgccgcgccgatgtataacttcaacatcccgactcagctgaaaaactatttcgacctggttgcccgcgcaggcgtcaccttccgttacaccgagaaaggtccggaaggcctggtcaccggtaaacgtgcggtagtactgaccagccgcggtggtattcataaagatacgccgaccgatctggttacgccgtatctgaccaccttccttggctttatcggcatcaccgacgtgaatttcgtatttgctgaaggtattgcttatggtccagaagttgcggccaaagcgcagtccgatgccaaagcggctatcgacagcgtagttgcagcctaa

SEQ ID NO: 91166 - DNA, 408 bp, Enterobacter aerogenes
atggcagagaaattatccgctcattgtcactgcggtgcggtggcatttaccgttgagctcagcgatggcttcaacaccgttcgtcgctgtaactgttcatattgtcgaatgcgtggggcggtcgcggtctcttcgccgcgttcaggaatagaggtggtacgcggaagggataagctcacagagtatcgctttaatacgggggaagccgtgcacttcttctgctcggtatgcgggatctacacctttcatcaacggcgatcaaacccgcagcagtatggggtaaatgtggcctgcattgatggcgtttcgcctttcgattttccttgcgtggaggtcaacgacggcgtgaatcatccaaaagatggcggcggaggcgtggtggggtatttgcgctacgagaaaaagtaa

SEQ ID NO: 91167 - DNA, 591 bp, Enterobacter aerogenes
atgacgatttatcagattgatgggctgacgccagtggtgccggatgagagctacgtccacccaaccgccgtgttgattggcgacgtgatcctgggtaagggggtctatgttgggccaaatgccagcctgcgcggcgacttcggccgtattgtagttaaagacggagccaatattcaggataactgcgtcatgcacggcttccccggccaggataccgtggtggaagaggacggtcacatcggccacggcgcaatcctgcacggctgtgtgattggccgcaacgcgctggtgggaatgagcgcggtgattatcgacggggcagtaattggcgaaaatagtattgtcggcgcttccgccttcgtaaaagcgaaagcggaaatgcctgctaaccatttgatcatcggcagcccggcaaaagcgattcgtacgctgagcgaacaggagctggagtggaaaaaacacggtacccgtgaataccaggtgctggtcgaacgttgtaagcagacgctgcatcaggtggagccattaaaagagatggaggccgggcgcaagcgtctggaatttgacgaaaacctgcggccaaaatcctaa

SEQ ID NO: 91168 - DNA, 936 bp, Enterobacter aerogenes
atgaatcagatgagtaaactcgacgcctttattcaacaagcggtgacggcgatgccgatcagcggtacgtcattgattgcctcgctgtatggcgacgctttattacaacgcggtggggaagtgtggctgggtagcgtcgcggcgctgctggaaggattaggatttggcgagcgctttgtccgcactgcgctattccgtctcaataaagaagagtggctcgatgtcgtgcgtatcggccgacgcagcttttatcgcctgagcgataaagggctacgtctgacccggcgcgcggaacataaaatttatcgggcgaatgccccggaatgggacggaacctggctgctgctattgtcggaagggttagaaaaaacggttctggcggaagtcaaaaagcaactgttatggcagggatttggcgcgctggcgccgagcctgctggcctcgccgtcgcaaaaactggccgatgtccaatcgctgctacatgaagcgggcgttgccgaaaacgtcatctgctttgaagcccattcgccgctggcgctctcaagggcggcgctacgcgaccgcgtagaggagtgctggcatctcaccgaacaaaatgagatgtacgaggcgtttatcgcattgttccgaccattactgccgctgctgcgcgacagcgagccgtcagagttgacaccggagcgctgtttccagatccaactgctccttatccatttctatcgccgtgtggtgcttaaagacccgctgctgccggaagaactcctgccggcgcattgggccgggcaaaccgcgcggcagctgtgcatcaatatttatcaacgcgtgacgccaggcgcgctggcctttgtcggcgaaaaaggcgaaagctcagttggcgagcttcccgcgccgggtccgctttattttcaacgctttggcggtttgccgggcgtctaa

SEQ ID NO: 91169 - DNA, 1317 bp, Enterobacter aerogenes
atgataactactacaaaattagatccgattgaaaccgcatcgcgtgatgaactgcaggctctgcaaacccagcgcctgaaatggacgctgaagcatgcgtatgaaaatgtgccgatgtatcgccgcaaattcgacgccgccggcgtacaccctgacgactttcgggaattaaacgatctgaaaaaattcccctgtaccactaaacaagatctgcgcgacaactatcccttcgatacctttgcggtgccgatggagcaggtggtgcgcattcacgcctcttccggcaccaccggcaaaccgacggtggtgggatatacgcaaaacgatattgataactgggccaatattgtcgcccgttcgctgcgtgcggccggtggttcagcaaaagataaaattcacgtcgcctacggctacggcctgtttaccggcggccttggcgcgcactacggcgcggagcgtttaggggcgacggtgatcccgatgtccggcggacagaccgaaaaacaggcgcagctgatccgcgacttccagccggatatgatcatggtgacgccgtcttattgtctgaatctgattgaagagctggagcgccagatgggcggcgatgcccgcggctgttcattgcgggtcggcgtctttggcgccgagccgtggacgctggcgatgcgcgcggaaatcgagcgccgcctgggtatcaccgcactggatatttacggtctgtcagaggtgatggggcctggggtggcaatggagtgcctggaaaccgttgacggcccgaccatctgggaagaccacttcttcccggaaatcgtcaacccggacgacggtacgccgctggaagatggcgagcatggcgaactgctgtttaccacgttgaccaaagaggcgctgccggtgatccgctatcgtacccgcgatctgactcgcttgctgccgggaaccgcgcggaccatgcgccgcatggatcgcatcagtggacgcagcgacgatatgctgattatccgcggggttaacgtcttcccatcgcagttggaagaggagatcctcaagtttgaacacctggcgccgcactatcagttagaggtcaatcgccgcggtcatcttgattcgctggcggtacgcgttgagctgaaagagagcgggctggcgttaagtcatgaacaacgctgccagatttgccatcagttgcgtcaccgcattaagtcgatggtcgggatctccaccgatattactatcgtcaactgcggcagcattcctcgctctgaagggaaagcctgtcgggtattcgacctgcgtaaagcggtggtcagcggttaa

SEQ ID NO: 91170 - DNA, 1206 bp, Enterobacter aerogenes
atgcgcgacgcctttatttgtgacgggatccgcacgccgattggccgctacggcggagcgctggccggcgtccgcgccgacgatctggcggcgatcccgctacgtgagctgctgagccgtaaccccgggctcgacccggcagcgattgatgatgtgattttcggctgtgcgaaccaggccggtgaggataaccgcaacgtggcgcacatggcgacgctgttggcaggttacccgcataccgtgccgggcaccacgattaaccgcttgtgcggatcgggtctggatgcgatcggttttgccgccagggcgatcaaagcaggcgatgccgatctgctgattgccggcggcgtggaatcgatgtcgcgcgcgccgttcgtgatgggaaaagccagcacgccgtatcagcgtcaggcggaactcttcgataccacgattggctggcgttttgtgaacccgctcatggcgcaacaattcggaactgacagcatgccggaaacggcagagaatgtagctgaattgttaaatatcagtcgggccgatcaggacgctttcgcctggcgcagccagcagcgcacggcgcaggcccagcgcgacggcattctggcgcaggaaatcgtgccggtgcagatcatcggcaagaaaggggcggtcagcgcggtacgcgatgatgagcatccccgcccggaaaccacgcttgagcaactcgcgctattaaaagcgccgttccgtaaaggtggagtcattacggctggaaatgcttctggcgttaacgatggcgcagcggcgctgattatcgccagtgaacagcaggccagcgtacaggggctcacgccgcgcgcgcgtatcgtggcgatggcgacggcgggtgttgaaccgcgcctgatggggctggggccggtaccggcagtgcgtaaagtgctggagcgagccggactcaatattaacgatatggatctgatagagctgaatgaggccttcgccgcgcaggcgctgggggtgctcagacaactcggcgtgccggatgatgcggcgcacgtgaatcccaacggcggcgccatcgcgttaggtcatccgctgggcatgagcggcgcgcgactggcgctgagcgccagccttgagctgcaacgtcggggcgggcgttatgcgctgtgtacgatgtgtattggcgtgggtcagggcattgccatgatcctcgagcgagtgtga

SEQ ID NO: 91171 - DNA, 423 bp, Enterobacter aerogenes
atgagcaatgatccgtggcgcaacgcgcgcgtgatgtacgaaaaagatacctgcgccagaaagatggggattgaacttatcgaaatggacgacggttttgcgcagatgagcatgaccgtctcggcggacatgcttaacggccatcagacctgtcacggcggccagctatttacgctcgctgataccgctttcgcatacgcctgtaacagccaggggctggcggcggtagcttcggcggcaagcattgattttcttcgtccggcgtttgccggcgacagactggtcgccaccgccagagtcaaacagcagggcaagctgaccggcgtctacgacatcgaaattgttaatcaacagcaaaagattgtggccctgttccgcggcaaatcgcaccgtatcggcggcacaatcacgggagaagtgtaa

SEQ ID NO: 91172 - DNA, 1422 bp, Enterobacter aerogenes
atgacaacatcctttgccaccgtggcggtgattggcagcggcaccatgggagccggtattgccgaagtagccgccgcagccggacacccggtgcgtattttcgatattaatcaaaccgcgattgcccaggcgatcgacggcattgctatgcgtctggcatcacgggtcgagcgcggcaaactggcgtcagagcaggccgacgcgctgctggcgcgcctgcatccggcccacgatttaaccgcgcttgccgacgcggatttagtaattgaagcggcctctgaacggttggaggtcaaaacggcgctgttcgcgcagctggcggagatctgcgcgccgtcaacgttgttgaccagtaacacttcgtctatttcgattaccgccatcgccgccggggtcaaaaacccggagcgggtggccgggctgcacttttttaatccggcgccggtgatgaagctggtcgaggtggtgagtggcctggagacatctgctgaggtggtagagcagctgtgccagtgcgtaagcggctgggggaaacagccggtacgctgccgctcaacgcccggttttatcgttaaccgcgtagcgcgtccgttctacgctgaggcctggcgcgcgctggaagaacaggttgccgctcctgaggttatcgatgccgctttgcgtgacggcggcggttttccgatgggaccgttggcgttgactgacctgattggccaggacgtcaacttcgctgtgacctgttcggtgtttaacgccttctggcaggaccgccgctacctaccatcgctactccagcaagagctggcgctggccgggcggctgggtaaaaagagcggccacggcgtctatcgctggcccgcggagacgcagccggacgcggcgctgccgccggtatctattggcgctcaatccattacagctataagtgacagcgtcacagaactcgatgagctcttgttgctggagaccgaaggcgagaccgcgctggcgttaagcgttaagcatcaccgcccggtggtggtgtatgacctgtgcgccagcgaaacggtgatactggccgcagcggccaccaacgcgcctgcggccactgaaaaggccgtgcattacttccaacagcagggcaagaaagttctgcgtattgccgattatcccggcctgctggtgtggcgtacggtggcgatgctgattaacgaagcgctggatgcggtgcaaaaagggatcgccagcccgcatgatatcgataccgcgatgcgccttggcgtcaattatccgcacggcccgctggcgtggggagaacgccttggctggcggcgggtgctgcaactgctggagaacttgcaacaccattatggcgaggagcgctatcgccccagttccctgttgcgccagaaggcgctgatggagaagcaccatgagcaatga

SEQ ID NO: 91173 - DNA, 789 bp, Enterobacter aerogenes
gtggaagctttcattctcagcgcagtggaacagggcgtcatgaccattaccctcaatcgcccggaccgtctcaacagttttaacgatctgatgcatcaacagctggcggaatgtctgaagcaggccgagcgcgatgatggcgtacgctgcctgctgatcaccggcgccggccgcggcttttgcgccggccaggatttgaacgaccgcaatgtcgaccccagcggcccgcagccggatctcggcatgtcggtagaacgcttttacaacccgttagtgcgccgtctggcggcgctgccgaagccggttatctgcgcggtcaacggcgttgccgccggcgctggcgccaccctggcgctgggctgcgatatcgtgctggccgcgcgttcggccaaatttgtgatggcgttcagcaagctcggcctggtgccggactgcggcggtagctggttcctgccgcgggtggccggccgcgctcgcgcgatggggctggcgctgctgggcgatagcctcagcgcggaacaggccgcgcagtgggggattatctggcaactggtggacgattcagaactggcggataccagtctgcaactggcgcgccatctggcggcgcaaccgacgtttggtcttgggctgattaaaaaggcgctgctggcttctgaaaccaacagtctcgatgcgcagctggatctggagcgcgattatcagcgcctggccgggcgcagcgatgattaccgcgaaggggtcagcgcgtttctggccaaacggccaccacagttcagcgggaaatag

SEQ ID NO: 91174 - DNA, 768 bp, Enterobacter aerogenes
atgagcgaactgctgatccaccgtcatggccgggcgcttcagttgacgctgaaccgcccgcaggcccgcaacgcgctgaacaatgccttattaacccagattgccgaggtgctggaggccgcggcagttgatgacagcgtcggcgtctgcgttatcagcggtaacgcgcgttttttcgccgccggggctgacctcaatgaaatggcggataaagatctgcctgccacccttgatgatattcgcccacggttatgggcgcgaatcgatgcctttactaaaccgctcatcgcttcggtcaacggctacgcgctcggcgccggctgcgagctggctctgctgtgcgacctgattgtcgccggcgacaacgcccgctttggcctgccggaaattaccctcggcattatgccgggtgctggcggcacccagcggctgatccgcagcgttggcaaggcgctggccagccggatggtgctgagcggcgagagtattgacgcccgccaggcgcaacaggccgggctggttagcgatatccatccggcggctttaaccgatgagtatgccctgaaactggcaaccaccattgcccgccattcgccgctggcgctacgggcggcaaaacagtcgctgcgcctgtcgcaggaagtcagcctgcaggccggtctgcaacaggagcgccagctgtttagcctgctgagcgccaccgaggaccgccgcgaaggcatcgacgccttcttacaaaaacgtacaccggaatttaaaggacgctaa

SEQ ID NO: 91175 - DNA, 1071 bp, Enterobacter aerogenes
atgacgacgttccattcgcttaaggtggcgagagtcgagccggaaacccgcgatgcggtgaccatcacttttgcgattccgcaagccctgcaggcggaatactgttttcgcccgggccagcatctgacgctaaaagcccgtctgggcggcgaagaactgcgccgctgttactccatttgtcgcagccgcacgccaggcgaaattagcgtcgcggtcaaagccatcgacggcgggcgcttctcgcgctacgcccagcacgatatccagcagggtatggagctggaagtgatggtgccgcaggggcatttcggttatcaaccgcaggccgaacggcagggtgagtatctggcgattgccgccggttccgggatcacgccgatgatggcgatcattagcgcgacgctgacgaccgagccggaaagccgctttacgctgatctacggcaaccgcagcagccatagcatgatgttccgccaggcgctggccgatttaaaagaccgctatccgcagcgcctgcaggtgatacacctgtttagccaggagtcgatggacagcgatctgctacaggggcgcattgacggcgacaaactgcgccagctcgctgaccatctgctggatttcagccgtttcgacgaggcctttatctgcgggccggctgtgatgatggacgaggcggaagcgacgttacgtgaacttggcgtagcggagaaatcgattcatctcgaacgctttaataccccaggcggcaatgtgaagcgggccgctggagtgcaggcggaagggcgcacggtgaccatccgtcaggacgggcgcgatcggcttatcgccctcagcgccgaagacgacagcatcctggatgccgcattgcgtcagggcgccgatctgccgttcgcctgtaagggcggggtatgcgccacctgtaaatgcaaagtgctacgcggtgaagtggcgatggccgccaattacagcctggaagcggatgagctggcggcgggctacgtgctgagctgccagtcgttgccgaccagcggcgatgtggtggtcgactttgacgcgcgggggatggcatga

SEQ ID NO: 91176 - DNA, 498 bp, Enterobacter aerogenes
atgcaacgtcttgccgatgtcgctcctgcagaggttcgcaccatctgggggttattaagcgcgatcccggatccggaagtgccggtactcaccatcaccgacctcggtatggtacgcagcgtcgcgcgccatggcgacggctgggtgattggctttaccccgacctattcgggctgtccggcgacggagcatctgctgggcgagatccgtacggtcatgagcgagcatggctttctgccggtgcatatcgtcctgcagctggatccgccgtggaccaccgactggatgagtcaggatgctcgcgagcgcctgcgccagtacggcatcagcccgccccaggggcacgcctgccatgcggatatgcccgctgaggtgagctgtccgcgctgcggcagcacccatacttcgctgattagcgaattcggttccacggcctgcaaagcgctctatcgctgcgacagctgccgggaaccttttgattactttaaatgtatttga

SEQ ID NO: 91177 - DNA, 756 bp, Enterobacter aerogenes
atgaataaccctaaccccgtagccacctacgccctgcgtcttggcgacaatggtctgattctggcccagcgtttaggcgcctggtgcggccatgctcccgagctcgagatcgatcttgcgctggccaacatcggcctcgacctgctcggccaggcgcgcaattttttaagctatgccgccgagcttaacggctgcggcgacgaagatacgctggcctttggccgcgatgagcgccagttcagcaacctgctgctggtggagcagccaaacggcaattttgccgacactatcgcccgccagttctttatcgatgtctggcacgtcgctctgttcagccgcctggtgaacagccgcgacacgcaactggcggccattgccgctaaagggctgaaagaggtgcgttaccaccagcgctttagccgcggctggctggagcgtctgggtaacggcaccgacttatcaaatcgcaaaatgcagcaggcggtcgacaatctttggcgcttcaccggcgaactgttccttgccgatgaagtggagctcagcctggttgagcagggcattgcggttgatccgcgcgagcttcaggccgaatggcaaagcgcggtacacacggcgctgctcgactccggcttacaaatcccgcaggaagcggccttccgcagcggcggcaaacaggggctgcacagtgaacatctcggcccgctgctggcggagatgcaatatctgcagcgttcgcatcccggactgcagtggtaa

SEQ ID NO: 91178 - DNA, 288 bp, Enterobacter aerogenes
atgagcaaagtttactggccgttatatgaagtgttcgttcgcagcaaacaggggttatcccatcgtcacgtcggcagtctgcacgctgccgatgatcaaatggcgttggagaatgcccgcgatgcctacacccgccgcagcgaaggctgctcaatttgggtggtgaaggcctgcgaaatcgttgcttcgcagccggaagatcgcggcgaattcttcgacccggcggaaagcaaagtctaccgtcatccgactttctataccgtgccagacggcatggaacatatgtga

SEQ ID NO: 91179 - DNA, 930 bp, Enterobacter aerogenes
gtgacagaagaacaacgctttgaccagcgcatcgcgcaggaaacggccatcgaaccgcgggactggatgccggatgcctaccgtaagaccttgattcgtcagataggtcagcacgcgcactcggaaattgtcggcatgctgccggaaggcaactggatcacccgcgcgccgacgctgcgccgtaaagcgattctgttggctaaggtacaggatgaggccggacacgggctgtatctctatagcgccgcggaaacgctgggctgcgcccgggaagacctgtatcagaaaatgctcgacgggcagatgaagtactcctccatttttaactacccgaccctgagctgggccgatatcggcgtgatcggctggctggtcgatggcgcggccatcgtcaaccaggtggcgctgtgccggacctcttacggcccctatgcccgggcgatggtcaaaatctgcaaagaagagagttttcaccagcgccagggatttgaagcctgcatggcgctggcgcagggcaatgacgcgcagcggcagatgctgcaggacgctattaaccgcttctggtggccggcgctgatgatgtttggccccaacgatgacaactcgccgaacagcgcccgcagcatggcgtggaaaatcaaactgcactccaacgacgagctacgtcagcgcttcgtcgataacaccgtgccgcaggtagagatcctcggtatgaccgtaccggacccggatttgcagtttgatgaagccagcggccactaccgcttcggcgaaatcgactggcaggaatttaacgaggtgattagcggccgtggcatttgcaatcacgagcggctggccgccaagcgtaaggcctgggaagagggcgaatgggtgcgcgaagccgcgctggcccatgcgcaaaaacagcaggcccgcagcgcggcatga

SEQ ID NO: 91180 - DNA, 2046 bp, Enterobacter aerogenes
atgcagcagttagccagttacttatccggcgcctggcagaccggccggggccgcgcccgtactatccatcacgccatcaccggcgcggcgctttgggaggtgaccagtgaaggcctggatatggcgcaggcgcgtcgtttcgcgattgaacgcggtggcaaagccctgcaggcgatgacctttattgaacgcagcgcgatgctgaaagcggtagcaaaacggttgctggagcagaaagacgagttctacgccatctccgcgcaaaccggcgccactagcgccgacagttgggtggatattgaaggcggtatcggtactttgttcacttatgccgggctcggtagccgcgaactgccggacgatattctgtggccggaagacgagctgatcccgctctccaaacagggcggttttgccgcgcgtcatgtgctgacatcaaaatcaggcgtcgccgtccatatcaacgccttcaacttcccctgctggggaatgctggaaaaactggcgccgacctggcttgccggcatgccggcgatcattaaaccggcaaccgctaccgcccagctcacccaggcaatggtgaaagcgattgtcgacagcggcctggtgccggaaggcgccatcagcctgatttgcggcggcgcgagcgatcttctcgaccatctcgatagccaggatgtggtgacctttaccggctcagccgccaccggccagcagctacggacgcaccctaacctggtggccaaatctattccctttaccatggaagcagattcgctcaactgctgcgtattaggtgaagacgtcacgccggagcaaccggaattcgcgctgtttattcgggaagtggtccgcgagatgacggcgaaagccgggcaaaaatgtaccgctatccgcagaatcatcgtgccactggctcagattaatgcggttagcgatgcactgatctcccgcctgcataaagtaaccgtcggtgaccctgctcaggagggcattaagatgggggccctggttaatcgcgaacagcgtcaggatgtgcaggataacgtcaataaactgattgccgccggctgtgaagcgctgctcggcggacaggcagatcttaatgctgatggcgcgttcttcccgccgaccctgctgtactgcccgcagccggatgaaacgccagaggttcacgccattgaagcctttggcccggtagcgacgctgatgccgtatcgcgacggccagcatgcgctcacgctggcacgcgccggcggcggtagcctggctggtacgctggtcaccgccagcggcgagctggcgcgcgagtttatccttggcgccgcgcgcgcgcatggccgtattcagatactgaatgaagcatcctccgcagaatcaaccggccacggttcgccgctgccgcagctggtacacggcggccccggccgtgctggcggcggagaagaactcggcggactgcgttcggtgaaacactatatgcagcgtaccgcgattcagggcagcccaacgatgctggcgaccataagccagcagtgggtgcgcggcgctcaggtgaatgaagaccgcattcacccgttccgtaaatacttcgaagagatccagcctggcgatagcttattaaccccgcgccgaacgctgaccgaagcggatatcgttaatttcgcctgcctgagaggcgatcatttctacgcgcacatggacaaaatcgccgccgccgagtcgattttcggcgagcgggtggtccacggttatttcctgatctccgctgcggccgggctgttcgtcgatgccggcgtcgggccggttatcgccaactacggcatggaaaacctgcgctttattgagccggtcaaaccgggagacaccattcaggttcgcctgacctgtaagcggaaaacggtcaaacgtcagcgcagcgccgatgagaaagccaccggcgtggtggaatgggctgtcgagattttcaaccagcaccagcaggcggtggcgctgtattccattctaaccctggtggcgcgccagcagggagacttcccggtgtag

SEQ ID NO: 91181 - DNA, 1605 bp, Enterobacter aerogenes
atggcaaacggcttgatgttttcccctcgtaaaaccgcgctggcgctggctgtcgcggtggtttgcgcctggcaatcaccggtcttcgctcacggtagcgaagcgcacatggtgccgttggataaaacgctgcaggcgttcggcgccgatgtgcagtgggatgactacgcgcaaatgtttaccctgataaaagacggcgcttacgtcaaagtaaaacccggcgccaaaacggcgatcgtcaacggtaaaccccttgatctacaggtgccggtagtaatgaaggaaggtaaagcctgggtctccgatacctttatcaacgatgtattccagtccggtctcgatcagaccttccaggtagaaaaacgccctcacccgctaaactccctctcggcggcggaaatcggtgaagcggtgaccattgttaaagccgcgccggagttccagccgaatacccgttttactgagatttccttacacgagccggataaagcggcggtatgggcctttgccctgcagggaacgcccgttgattccccccgcaccgccgatgtggtgatgcttgatggcaaacatgtcattgaagccgtcgtcgatctgcaaaacaaaaaaatcctctcatggacgccgattaaaggcgcccacgggatggtgctgctcgatgacttcgtcagcgtgcagaacattatcaatgccagcagcgagttcgctgaggtgctgaaaaagcacggtattaccgatcccagtaaagtggtcaccaccccgctcaccgtcggctactttgatggcaaagatggcctgcaacaggatgcgcgtctgctgaaagtcgtcagttatctggataccggcgacggcaactactgggcgcacccgattgaaaacctggtggcggtggtcgaccttgaagcgaagaaaatcatcaaaatcgaagaaggcccggtgatcccggtaccgatggaaccccgttcttacgatggtcgcgaccgcaacgccccggcggtgaaaccactggagataaccgaaccggaaggcaaaaactacacgatcaccggcgataccattcactggcggaactgggattttcatctgcgcctgaactcgcgcgtcgggcccattctctcgacggtgacttacaacgacaacggcacaaaacgccaggtaatgtatgaaggttccctcggcgggatgatcgtcccctacggcgaccctgacgtcggctggtatttcaaagcctatctggattccggcgattacggcatgggcaccctaacatcgccgattgttcgcggtaaagatgcgccgtcaaatgcggtactgctggacgaaactatcgccgattacaccggcaaaccgaccactattccaggtgcggtggccatattcgaacgctatgccgggcctgagtataagcacctggaaatgggcaaacccaacgtcagcaccgaacgccgggaactggtggtacgctggatcagtaccgtcgggaactatgattatatctttgactgggtgttccatgacaacggcaccatcggtatcgatgccggcgccaccggcattgaagccgttaccccagcgccaaagaggatacccgctacgggacgctga

SEQ ID NO: 91182 - DNA, 573 bp, Enterobacter aerogenes
gtggacggcgaaaacaacaccctggtggcgatggatcctgaagtgaagccaaacaccgccggcggcccgcgcaccagcaccatgcaggtgaatcagtacacaatcgatagcgagcagaaagctgcgcagaaattcgaccctggcactatccgcctgctgagcaacaccagcaaagagaaccgcatgggtaacccggtctcttaccagattatcccttatgccggcggcacgcatccggcggcgaccggcgccaagttcgccccggacgagtggatatatcatcgcctgagctttatggataaacagctgtgggtgacgcgttaccacccgacagagcgttatccggaagggaaatatcccaaccgttccgcccaggataccggcttaggccagtacgcgaaggatgatgagtcgctgacaaaccacgacgacgtcgtgtggatcaccaccggcaccacccacgtcgcgcgcgccgaagagtggccaattatgccgaccgagtgggcgcacgcgctgctcaagccgtggaacttctttgacgaaaccccaacgcttggcgagaagaaaaagtaa

SEQ ID NO: 91183 - DNA, 951 bp, Enterobacter aerogenes
atgtggaatgatgcgctttgctatcagcagtacggcgcgccggaaacggtgctcgcgctgcatcacctgtcgttgccgctgctggcgcccggacttgttcgggtacaaatgcgctatgcgccagtcaacccttccgatctgattcccattaccggcgcttaccgccatcgtacgacgctgccatcggtggcgggctatgaaggtgttggggtggtagttgaagactcgacaaacggtcgcccacttctggggcaacgggttctgccgctacgcggcgccggaacctggcagcgttatctcgatattgacccgcgctggctggtgccggtcgctgaagatatcgatgacatcctggccgcgcgcggctatatcaatccgctgaccgcgatgctgatgctgacgcgctggccggtagcggggaaacaggtgcttttgaccgccgcttcatcgtcctgcgccagcctgctgggacagtgggcgctcgccatgggcgcgcgttcggtcagcggtattattcgttcgccgcagcacatcgcgcgcctacagcaatatggcgtctacccgctacttgaaggcgatagcgcgctgattgaacaagtaagccagtacagcgatctggtgtttgatgcggtgggcggtgagctggcgaattttctgctggcggtactgccgcagacgtcaacgctggtctcttacgggttattatccggtaaaccgctcacccagacgcgaggctgcgcagcggtacgcaaatttcatctgcgggaggccttaccgacactcagcgttgatgcgtggcaggcggcgtttgccgggatctggcgacagctgccgaccacggcgcagcccgccgcgcaggtgataaagctgtgcgactggcgtgaggcgattgccgccgcaggccagccgggaagaggcggtaaaatcctgctcgatttcaccgcgggctaa

SEQ ID NO: 91184 - DNA, 1500 bp, Enterobacter aerogenes
atgtccacatcacaggtcgcgctgctcgccagcgtacagcagtttctcgacagacagcatggcttatatattgatggcaaccagcaggcggcgcagagtgaaaaacgcttaaccgtctgggacccggccaccggccaggcgattgccactacggcagatgctaatgccgccgacgttgaccgcgcggtgatgtccgcctggcgcgcttttgttgcccggagctgggccgggcgcacgccggccgaccgcgagcggattctgctgcgtttcgccgatctggtggaacagcatggtgaagagctggcgcagctcgaaacccttgaacaggggaagtcgatcaatatttcgcgcgcgtttgaagtcggttgcaccctcaactggatgcgctacaccgccgggctgaccaccaaaatcagcggccgtacgctggacgtttccattccattcccggaaggcgcgcgctatcaggcgtggacccgtaaagagccggttggggtggtggcggggattgttccgtggaacttcccgctgatgatcggcatgtggaaggtgatgccggcgctggcttccggctgttcaattgtgattaaaccctccgagacgacgccgttaacgttgctacgggtagcagagctggcaacggaagccgggatcccggatggcgtctttaacgtcgtcaccggcagcggcggcgagtgcggcgccgccttaaccacccatccgcaggtggcgaaagtgagtttcaccggttcgaccgccaccggcaagcatattgcccgcgcggcagctgaccgtctgacccgcgtaacccttgaactcggcggcaaaaacccggccatcgtgctgaaagatgccgatccgcagtgggtgattgaagggttgatgaccggaagtttcctcaatcaggggcaggtatgcgccgccagttcgcggatctatatcgaagcgccgctgtttgataacctggtggcaggctttgagcaggcggttaagtcgctgcaggtggggccgggaatggttgaaacgacgcagattaacccggtggtgtcgcaggcgcactgcgccaaagtggccgcttatctggatgaagcgcgtcaacaaaacgccgagctgattagcggtaacgttgggccaaatggcaacggtttttatattgcgccgacgctggtgattaatccggatgccgggctgcgcctgaatcgcgaagaggtgttcggcccggtggtaaacctggtgcgcgtcgccgatggcgaagaggcgctacgtttagccaacgacagtgattttggcctcaccgccagcgtctggacccgcgacctgacccaggcgctgaactataccgatcgcctgcaggccggtacggtatgggttaacagccatacgcttatcgatgccaacctgccgttcggcggaatgaagcagtccgggaccggacgcgacttcggcccggactggctggacgactggtgcgaaaccaaatcggtgtgcgtgcgctactga

SEQ ID NO: 91185 - DNA, 909 bp, Enterobacter aerogenes
atggcgacggtagaaagcgggcaggactatcagcgttggttagcgaagattaatcaggtatgcggccattttgccgcccgtccgctgggcgacgaattccatggcgagattgatgcaagctataccggtagtctcaaagtcagtaccgtcaccgcccgcggcgtcaatctttaccgcacccgtaacgaaatcaaacgcgacaacgacgcctggttctataccgtttttcagctcgaaggccaggcggctatcgagcaggacgagcgccaggtggcgctcgaagccggcgatatcacgctcattgatgcctcgcgcccctgttctatcttctggcaacacacgtcaaaacaggcttcgctgctgctgccccgccagctcgtggaaagccagctgcacggcggcgacatcagcatcgccacccggctgaataaaacgctgccgatggtccagctcagccagcggttgctgcaagaaagtttacgcagcccggcgctctcagaaagcgaaggcgaagcggcgctggaggctatcatctgcctgttacgcccaatgctgctgcaacaggacgcgccgccgacgcgccgcgacaagcaatttcaaaagatcatggcgttgatagatgagtcgatacagtcggaacagctgcgtccggagtggctggccggggaaaccggcatgtcggtacgcagcctgtaccgcctgtttgccgataagggtctggtggtcgcgcagtatattaaaaaccggcgtcttgacctgtgcgcccgggcgttacaaaacgcgcacgacgaagagaaactggcgggaattggctacagttggggctttagcgaccatagccatttttcaacggcgtttaagcagcgcttcggcgtgtcgcctggcgaataccgcaagcgctatcgttaa

SEQ ID NO: 91186 - DNA, 324 bp, Enterobacter aerogenes
atgagaaaacgactgctgactgccaccctggcgttaatgctgttgagtagcccggcgctggcgctgaccttgaatgaggcgcgggcgcagggtcgagtgggggagacgctgaacggctatctggcgccgctgaaacaggatgcgcagacgttggcgctagttaaacagattaatgccgcgcgcagcgaaagctaccagcaactggcggacgacaataatctgccggtggatgaggtggcgaaaatggccggacagaaactggtcgcccgcgcgcagccgggagaatatgtgcaggggattaacggtaaatggttgcgcaaatag

SEQ ID NO: 91187 - DNA, 186 bp, Enterobacter aerogenes
atgataaaactgttcgccgcggcgctggcgaccctgctgctggcaggctgtacgccgcgtattgaaatcgccgcgtccaaggagccgatcaccatcaatatgaatgtcaaaattgagcatgagattcatattaaggtggataaggatgtcgaaaatttgctgaagtcacgtagcgatctgttctga

SEQ ID NO: 91188 - DNA, 2634 bp, Enterobacter aerogenes
atgaagggtaaatataaagccgctcttgcgctgttattagctctaattttgctgccgttggccctgctggccacattaacgcattgggttccgacgctggcgggtatctggctgccggtcggcacgcgtatctcgcttggcgaaagtccgcgcctgacgcgctcctcgttgattatccccgatttacgctacctggtgggcgattgtgaaattgctcgtgtcagcaacgcgcgccttacccgtcccagccgctggcggctacacctgagtgaactggatatcaatagcgcctgcctggctaagatccccgccagcgagccgctctccggcgcgccgcgaactctcgccgagtggcaatcgatgctgccttatagttggttaactatcgacaatctgcgcctgtcgccgtgggaaaaatggcaggggaaactggtgatgtcgttgacgcctgggcagcaggatatcggttattcaggcaaagaggtcacgttacaggcgaaactgcgcggccagaccttaacggtcagcaatttcagcgcgcggctggtggacgatcaggcgccggttaagctggtcggtgaattcgaaatgccgctggtgccggatggtctaccggtcgatggccatctggtcagcaccttcgagttcccacaaacgccgggtctggtggatgcggaactggaatggcagaaaaaccgcggccagctgctggtcacgccgcgcggtgaggtcgagccgatgctcgacctgccgtgggagatcacccctgaacgtatcaccatcagcgatgggcgctggaacacggtgtatgccggctatccgcttagtgggcgggtggcgctatcgtttggtgactggcagaaaggcaccgaggagatggaaatcagcggccggctcaacgtgttaacgcacggcgaagcgggtaaaggcaacgccgtgctgaatattggcccaggtaagctaagcatggaccacagcgacatgccgctcagcctgaccggcgaagccaagctcgacgatatgattttttatgccgtgctgcccgcaaaactcagcggcccgctgatgacgccagagctggctttccatcccggcgcgctgctgcgttcacgcgggcgggtgattgactcgctgaacatcgatgagatccgtctgccgttggcgggggtgaaagtgacgcagcagggggtggatggccgcctgcaggcgatactgcgcgcccatgaacaggaaatgggcgattttaccctgcatctggatgggcaggccgacaattttatgcccgaccgcggtcgctggtcgtggcgttattggggcgatggtcacttttcgccgatgcaggcgcgctgggatgtgaaaggcgccggtgagtggcgggatagcgccattattcttaacagcctgtcgaccgggttcgataagctacagtacggcaccatgctggtcagcacgccgcgcctgaccctcgataaacccattcactggctgcgcaatgaacagcatccaaaattcagcggcacgttgtcgctggatgccggtaaaaccaccttcagcggcggcagcgttctgccgccgtcaacgctcaaattcaatattgatggccgcgatccgacctggttcctgtttaacggctcattgcacgcggagaaaatcggcccgattcgtctgaccggccgttgggacggcgaacgcttgcgtggccaggcatggtggccgaaacaggcgctaagcgtattccagccgctgattccgccggactggaaaatgaccctgcgtgaaggtgatatgtatgcgcaggtggcgttctccgcggcagccgggcagggctttgaggccgggggccatggcgtcttaaaaggcggtagcgcctggatgccggacaaccagatcaacggcgtcgactttgttctgccattccgtttcagcggcgggagctggcagctcggtacccgccgtccggtttcactgcgtattggcgaaatcgtcaaccagttcaccgccaaaaacctgagtgccgatctccagggaacatggccctggagcgagcaggatccgctggaattgagcaacgttaatgttgatatccttggcggcaagctgtccatgcagcagctaaggatgccgcagcatcaaccggcgctgctgcgtctgcagaatatctccagcagtgagttgataagcgccatcaaagtaaaacaatttgcggtctctggcgcgtttaacggcgcgttaccgttatggctgaacaacgataaatggatcattaaagacggctggtttagcaaccccggcccgatgaccctgcggctggataaagacaccgccgatgcgttggtggccgataacgtctccgccggcgcggcaattaactggctacgctacatggaagtctcgaaatcatggacgcgcatcaaccttgataatctcggcaagctgacgatgagcgcggcgattagcggcaccagccgggtggacggaaaaagcagcaccgtgcatttaaactatacccatgaagagaatattttcgatctgtggcgcagcttgcgcttcggcgataatttgcaggcatggcttgagcagaatgcaaaactgcccgccccgcgctgtacggatacatgtaaggaaccaaaatga

SEQ ID NO: 91189 - DNA, 501 bp, Enterobacter aerogenes
gtggagctcattatctcgctgatcgaacgcgcccagagccattattcattggtattactgattgtttttctgctgaccttcagtaaatcctgcgccctcatctcttttgtgatccccggtacctcgggtttgctggtgctcggagcccttgcctcaaccagcatcggtcatttcctgttaatgtggctaagcgccagcctgggcgcaatcggcggattctggctctcatggcaaattggccggcgctatcagcatcatctgcaacgcctgcgctggctcagcgccgaacgcgtgctgcgtagccagctattcctgcgccgtcacggcggttgggcggtgttcttcggccgttttctgtcgccgctgcgcgcaacgttaccgctggtcaccggcgccagcggtacaccgctatggcgtttccaggtagccaatgtggcatcgggtttactctggccatttatcctgctggcgccgggggcattcagcctcagtttttggtga

SEQ ID NO: 91190 - DNA, 990 bp, Enterobacter aerogenes
atgaaaatcgctgtttatagtaccaagcagtacgataaaaagtatctgcagcatgttaacgacgcatacggctttgaactggaatttttcgacttcctgctgaccgaaaagaccgcgaaaacggccaacggctgtgaagcggtatgtatcttcgttaacgacgacggcagccgcccggtgctggaagagctaaaagcccacggcgtgaaatacatcgcactacgctgcgccggctttaacaacgtcgatcttgatgcggctaaagagctgggcctgcgcgtcgtgcgcgtcccggcctactcgccggaagccgttgctgaacacgccatcggtatgatgatgtcgttgaaccgtcgcattcaccgcgcctatcagcgtacccgcgatgccaacttctcgctggaagggctgaccggcttcacgatgtacggcaaaaccgcaggggtgatcggcaccggtaaaatcggcgtcgcgacgctgcggatcctcaaaggtttcggtatgcgcctgctggcgtttgatccctatccgagcgcggcggcgctggatctcggcgttgaatatgtcgacctgccgacgctgtacgcgcagtccgacgtcatctccctgcactgcccgcttaccaacgaaaactatcacctgctcaaccaggcggcattcgatcagatgaaagacggcgtgatggtcattaataccagccgcggcgcgcttatcgattcacaagcggctatcgacgcgctgaagcaccagaaaatcggcgcgctgggaatggacgtgtatgaaaatgaacgcgatctgttctttgaagataaatcgaatgatgtcatccaggatgacgtgttccgccggctctccgcctgccacaacgtcctgtttaccgggcaccaggcattcctgacggctgaggcgctgatcggtatttccgagacaacgcttggcaatctgcagcaggtagctaagggcgaaacctgcccgaacgcgctggtctaa

SEQ ID NO: 91191 - DNA, 423 bp, Enterobacter aerogenes
atgaataagtttgctgcactgctggcggcgggcatgctgctatcgggctgcgtatacaacagcaaagtttctaccaacgccgaacaactacaacatcaccgttttgtgctgaccagcgttaacggccaggcgctaccggcaagccagacgccgccgccggaaattagcttcggcgaaaaaatgtatgtgtcaggcacgatgtgcaacggcttcagcggcgagggcaagctgtcagacggcgagctaaaagttgaacagctggcgatgacgcgtaagctgtgcgcggatccacagcggaacgcgctggataataccctcagcaaaatgctgcgcgatggcgcgcaggtcgatctgacggagaatcagctcacgctggcgaccgccgaccaatcgctggtatataaactcgccgatttaatgtaa

SEQ ID NO: 91192 - DNA, 267 bp, Enterobacter aerogenes
atgcgagctgcgtttttagtgggatgtgcggcgttattactgtcggcttgtagtaacgagccggtgcaacaagccaccgcggcacacgtaccgcccggcatgcgcgcggcgatgagcgacagcggccaggcgaattgcgcgatggttggcggttcattatcggttgcccgccagcttgatggcaccgctattggcatgtgcgcgctaccgaacggtaaacgctgcagtgagcaggccttagcgggcggaagctgcggaaactactaa

SEQ ID NO: 91193 - DNA, 3528 bp, Enterobacter aerogenes
atgattacgattgacggtaatggcgcggtcgcttcagtcgcgtttcgcacgagtgaagttatcgccatctacccgattacgcccagttcaacgatggcggagcaggctgacgcctggtctggcgatgggctgaaaaacgtgtggggcgatgtcccccgcgtggtcgaaatgcagtcggaagccggggctatcggcgccgtgcacggcgcgctgcagaccggcgccctttccacttcctttacgtcatcgcagggcctgctgctgatgatcccgacgctgtataaattggccggccagttgatgccatttgtcctgcacgtcgccgcccgcaccgtcgccacccacgcgctatcaattttcggcgatcattccgacgtgatggccgtgcgccagaccggctgcgcgatgctgtgtgccagcagcgtccaggaagcgcaagacttcgcgctgatctcccatatcgccacgctgcaaagccgggtgccgtttatccatttttttgatggtttccgcacctcgcacgaaatcaacaaaatcgcgccgctggcggatgacaccattcgttccctgctgccgcagaataaaatcgccgagcatcgccaacgcgcccttaacccggagcatccggtcattcgcggcacctccgccaatccggacacttatttccagtcccgtgaagcgaccaacccgtggtacgacgcggtatacgaacacgttgaaacggcgatgaatgatttcgccgccgccaccggtcgccagtacaaaccgttcgaattttatggtcacccgcaggcggaacgggtaattgtcatcatggggtccgctatcggcacctgtgaagaggtcgtggatgaactgctgagccgtggggaaaaagtcggcgtgctgaaagttcgcctctatcgcccgttctccgccacgcatctgctgcaggcgctaccggagagcgcccgcgcggttgccgtactggatcgcaccaaagaacctggcgcgcttgccgaaccgttgtatctcgacgtgatgaccgcgctggcggaagccttcaaccgcggcgagcgcgaaacgctaccacgtactatcggcggccgctatggtctctcgtccaaagagtttggcccggaatgcgtgctggccatctttaatgaattacaggccgcacagccaaaaccccgctttaccgtgggcatttatgatgatgtgactaacctttcgctgccgctggcggaaaatacgctaccggcggaagcgaagctggaagcgctgttttacggcctcggtagcgacggtagcgtctcggcgaccaagaacaatatcaagattattggcaactccacgccgtggttctcacaaggctattttgtctatgattcgaagaaggccggcggcctgaccgtctcgcacctacgcgtcagcgaaaaaccgatccgctcgtcgtatctgatctcgcaggccgatttcgtcggctgccaccaactgcagtttatcgataaatatcagatggtagagcggttgaagcccggcggcattttcctgctcaataccccctacagcgctgatgaggtatggtcccgcctgccccaggaagtacaggccgcgctgaatcaaaagcaggcgcgcttttatgtggttaacgcggcgaaaatcgcccgtgagtgcagccttggcgcgcgcatcaacaccgttatgcagatggcctttttccatttaacccaaatcctgccgggcgacagcgcgctggccgaactacagggtgcgattgccaaaagctacagcagcaaaggccaggagctggtggaacgcaactggcaggcgctggcgctggcccgcgaatcgctggcggaagtgccgctgcagccggttaacgccagcagccccaaccgtccgccagtggtctccgatgccgcgccggactttgtcaaaaccgtcaccgcggcgatgcttgccggccttggcgatgcgctgccggtctccgcgctgccgccagatggtacctggcccatgggcaccacccgttgggaaaaacgcaacattgccgaagagatcccgatctggaaggaagagctgtgtacccagtgcaaccactgcgtcgccgcctgtccgcattcggcgatccgcgccaaagtggtcgctccgcaagagatggaaaacgcgccagccagcctgcactcgctggatgtgaaatcccgcgatatgcgcgggcagaaatacgttctgcaggtcgcgccggaagattgcaccggctgcaacctgtgcgtcgaagtgtgcccggcgaaagatcgccagaatccggacatcaaggccatcaatatgatgtcgcgccttgagcacgttgaagaagagaaagtcaattacgactacttcctcaacctgccggaaatcgatcgcaccaaacttgagcgcattgatattcgcacctcgcagctaattagcccgctgtttgaatactctggcgcctgctcgggctgcggcgaaacgccgtatatcaaactgttgacccagttgtatggcgatcggatgttgattgccaacgccaccggctgttcgtccatttacggcggcaacctcccctcaacgccttataccactgacgctaacggccgtggtccggcgtgggccaactcgttgtttgaagataacgccgaattcggcctgggcttccgcttaaccgtcgaccaacaccgccagcgcgtgatgcggttgttgagcgaatttgccgataaacttccagccgaattgaacgccgcgctgcatacggaagcgtcgccggaagcgcgccgccaacaggtcgccgagctgcgtcaggcgctgacgggggtcgaaggggccgaagagctgctcaccgatgcggatgcgttagtcgagaaatcagtctggcttatcggcggtgatggctgggcctatgatattggctttggcggtcttgaccatgtgctgagcctgaccgaaaacgtcaatatcctggtgctcgatacgcaatgttactccaataccggtggtcaggcatcgaaggcgacgccgctcggcgcagtcaccaagtttggcgagcacggcaaacgtaaggcgcgcaaggatctcggcgtaagcatgatgatgtacggtcatgtttatgtggcgcagatttcactcggcgcacagcttaaccagacggtgaaggcgattcaggaggcggaagcctatccgggcccatcgttgattatcgcctatagcccatgcgaggagcacggctacgacctggcgctgagccacgaccagatgcgccagttgacggcaaccggcttctggccgctgtaccgcttcgacccgcgtcgcgccgatgaaggcaagctgccgctggcgctggactcgcgcccgccgtcggatgcgctggcggaaacgctgctcaacgagcaacgcttccgtcgtctgaacgcccagcagccggaagtggccgagcagttgtggaaggacgcggccgccgacctgcaaaaacgctatgacttcctggcccaactggcaggtaaagcggagaaaccgaccaccgaaagttaa

SEQ ID NO: 91194 - DNA, 1143 bp, Enterobacter aerogenes
atgaaaagaaaagcactggcattggttatcccggcattattggctgccggcgctgctcacgcggcagaaatttataataaagatggcaacaaattagatctctacggcaaggtagacggtttacattacttctccagcgactccagcaaggacggcgaccagacctacctgcgcttcggctttaaaggtgaaacgcaaattaacgatacgctgaccggttatggccagtgggaatataacgttcaggctaacaatactgaaagctcaagcgatcaggcgtggacccgtctggcgttcgccgggatcaaagcaggcgactacggttcattcgactatggccgtaactacggcgtcctgtacgacgtcgaagcctggaccgatatgctgccagagttcggcggcgactcttacacctacgccgacaactttatgaccggccgcgccaacggcgttgcaacctatcgtaacagcgatttcttcggcctggttaacggcctgaacttcgcgctccagtatcagggtaaaaacgaaaaccaagccagccatgaatataacccttccgccagccaggaaggtaccgccaatggcgacggccgcgatgttaaaaactccaacggtgatggcttcggtatctcctctacctatgatttaggtatgggcgtcagcgtaggcgcggcctacagctcttctgaccgtaccaacgagcagacccatcagtctaccgcgggcggtgataaagccgatgcctggaccgcaggcgttaaatacgatgcgaacaacatctatctggcgaccatgtattctgaaactcgtaacatgacgccgtacggcaatcagaatggcaccatcgccaacaaaacccagaactttgaagttactgcacagtatcagttcgatttcggtctgcgtccggcaatttcctacctgcagtccaaaggtaaagatctggtttacggcggtcagtactccgataaagacctggttaaatatatggatgtcggcacgacctattacttcaaccgtaatatgtccacctacgttgattacaaaatcaacctgctcgacggcaatgacgacttctataaagacaatggtatttctaccgacaatatcgtagcgctgggtctggtatatcagttctaa

SEQ ID NO: 91195 - DNA, 435 bp, Enterobacter aerogenes
atgagtagaatgattctggtacccatcgatatttctgataaagaatttacgcaacgtgtgatccgccatgttgaatccgaagctcgcgtcgatgacgcgcaggtgcatttcctcaccgttatcccttcgctaccctactacgcctccctgggcatggcctataccgctgaactgccggctatggatgacctacgtgccgaatcggaaacgcagttgcgtgagctggcaaaaggcttcgccattccagaagacagaatgcatttccacgttgccgagggctcgccaaaagataagattctggcgctggctaaatcgctgcccgccgacctggtcattatcgcctcgcatcgcccggacattactacctatctgctcggctctaacgccgcggcggtggtgcgccatgccgagtgctcggttctggtcgtcaggtaa

SEQ ID NO: 91196 - DNA, 936 bp, Enterobacter aerogenes
atgctgcaaaatcaagaaattagtaaaaaagaaaaatacaacatcgacaaactgcagaaacgactgcgtcgcaatgtcggtgaggcgatcgccgacttcaacatgattgaagatggcgaccgtattatggtctgtctttccggcggtaaagacagctataccatgctggaaattctgcgcagcctgcaaaaaagcgcgcctatttctttctcgctggtggccgttaacctcgatcagaaacagccgggcttcccggaacacattctgccggcgtatctggaacagttgggcgttgagtataagattgtcgaagagaacacttacggcatcgttaaagagaaaatcccggaaggcaaaaccacttgctcactgtgttctcgtctgcgtcgcggcattctctaccgtacggcgaccgaactgggcgcgaccaaaatcgcgctcggccatcaccgcgacgatatcctgcagacgctgttcctcaacatgttctacggcggcaaaatgaaaggtatgccgccgaagctgatgagcgatgacggcaaacatatcgttatccgcccgctcgcctactgccgcgaaaaagatatcgaacgcttctcgcaggccaaaggcttcccgatcattccttgtaacctgtgcggctcccagcctaacctgcagcgtcaggtgatcgccgatatgctgcgcgattgggataaacgctatcctggccgtatcgaaaccatgtttagcgcaatgcagaacgtggtgccgtcgcacctgagcgacgtcaatctgtttgattttaaatccatcacacacggttctgcggtggttgacggcggcgatctggcctttgaccgcgaagaaatcccgctgcagcctgcgggctggcagccggaagaagaagacgctcagttagatgaactgcgtctgaatgtggttgaagtaaaataa

SEQ ID NO: 91197 - DNA, 1389 bp, Enterobacter aerogenes
atgcgagaaaacattgtgaccgctttttcaacactgaaccttttgcccgaagctcaactgaacaaccttaacgaactgggatatcacgcaatgacgccagtgcaggctgccgcattgcctgcgatcctgggcggaaaggatgtgcgcgtacaggcgaaaaccggcagcggtaaaacggcggcctttggtctgggattgctacagcacgttgatgccggtctgttccagacccaatcactggtgctgtgcccgacccgcgaactggcggatcaggttgctggcgaactgcgtcgcctggcgcgctttttgccaaatattaaagtattaaccctctgcggcggccagcctttcggcgcccagcgcgattccttacagcatgcgccgcatattattgtcgccacgcctggccgcctgcttgaccacctgcagaaggggaccgtatcgctggacgcgttgcagacgctggttatggatgaagccgatcgcatgctcgatatgggctttagcgacgccatcgatgaattgattcgttatgcgccagcttcgcgccagaccttactgttctccgcgacctggccggaagctatcgccgtaatcagcgggcgggtgcagcgggatccgcagacgattgaaatcgatagcgttgatgcgctgccgtctattgaacagcagtttttcgacgtttcgcaaagcggtaaaatcaagctgctgcaaaaattgctcagccagcatcagccggcttcctgcgtggtattttgtaatactaagcgtgattgtcaggcggtgtgcgatgcattaaacgctgccggccagagcgcgctgtcgctgcatggcgacctggagcagcgcgatcgcgatcagacgctggtgcgttttgccaacggtagcgcccgcgtgctggtcgccaccgacgtggcggcgcgcgggctggatatcaaatcgctggagctggtggttaactttgaactggcgtgggatcctgaagttcacgttcaccgtatcgggcgtaccgcgcgcgcaggcgaaagcggcctggcgattagtttctgcgcgccggaagaggcgcagcgcgctaacattcttgccgaaatgttgcagatcaaactcaactgggttaacgcgccggcgggtaatcatattgcgccgctgcaggcggaaatggcgaccctgtgtattgatggcggcaaaaaggcgaagatgcgtccgggcgatgtgctgggggcgttaactggcgatatggggtttgatggcgcggatatcggtaagatcaatgttcatcccgcgcatgtttatgtcgctatccgtcagggcgtggcgcagaaggcgtataagcagctgcaaaacggcaagatcaaaggcaagtcctgccgcgtacgtttgctgaagtaa

SEQ ID NO: 91198 - DNA, 192 bp, Enterobacter aerogenes
atgcgtaacatggcgctgtccttgcagtcgatacccatcggccctgagcccaatgacccggtgccggtgcccgatccgcggcctcgcccgcacccgcttcccgacccgccgccggacgatgacccgattaaattgtcgcatcaagagcggagatctgcgaggatacgcgcctgcagattgtccgccctttaa

SEQ ID NO: 91199 - DNA, 984 bp, Enterobacter aerogenes
gtggacgcgattaagggctcggagctgaaagtgccggacgccatctttgcatgggtgctcgacgggcagggcggcgtaaagccgctggctgatgacgatattatcgataagagcagtccctgctggctacatcttaattatacccataccgatagcgccgactggttagccgctacgccgttgttaccgaataatgttcgcgacgcgctggccggtgaaagcacgcgcccgcgcgtgacgcgcatcggcgatggcgcgctgattaccttgcgttgtatcaacggcagcaccgatgaacgccccgatcaactggtggcgatgcgactgtatatggacgagcggctaatcgtttccactcgtcagcgtaaggtgctggcgttggatgatgtgctgggggatctgcaggaaggcaatgggccgacggattgcggcagctggctggtggaaatttgcgatgcgttgaccgatcacgccagcgagtttattgaacagctgcacgaccggattatcgaccttgaagatgacctgcttgatcaacaggtgccgccgcgcggttttctggcgctactgcgaaagcagcttatcgtcatgcgccgctatatggctccgcagcgcgatgtctacgcccgtcttgccagtgagcgtctgccgtggatgagtgacgatcaccgtcggcggatgcaggatattgccgaccgtcttggccgcggtcttgacgagattgacagctgcattgcccgcacggcaatcatgagcgatgaaatcgcgcagatcatgcaggagtcgctgtcgcggcggacttacacgatgtcattgatggcgatggtttttttgcccagcaccttcctgaccggtctgtttggcgtcaaccttggcggtattcctggcaacagctggcatcttggcttttcgatattttgcgtaatgttagttgttctaatcggtggtgttacctggtggttacatcgtagtaaatggttgtaa

SEQ ID NO: 91200 - DNA, 444 bp, Enterobacter aerogenes
atgaatatttatcaagcccagccccaggatgtcgataccatcctgccgctgtatctcgcctatcgacgtttctatcaggtcgaagaaaatctcggccaggcgcgggagttcatccttaagcgcctgcagctgaatgaatcggtcattttcttcgcagaagtggacggcaaagcggtgggctttacccagctctatcccctgttctgctcgctggaaatgaagcgcatctggttgctttacgatctgtacgttgatgagtctgcccgccagcacggtgtggcgcagcagctgattgcccgtgccgaacaactggcaaaagagagtgattccgcatttattatgctcagcacggcaaccgataatactaaagcgcaggcgttatacgagcgtagcggcttcgtacgcgatacggatttttacgtctataacaaaatgctcaagtaa

SEQ ID NO: 91201 - DNA, 918 bp, Enterobacter aerogenes
atgagtaacagcgtgctttgtctggatattggcggctcctttattaaaagcgcggtttctccggcgctggggcaacttgttatgccgcgccagcgggcgatgccgctaagctcctggcccgccttcgtctacgctgtgcaggagattatcgcgcaatatggcgatgcgattagcgaacagagtccactggcgctctcctgcgccggagtggtggatgttgccaacgatcgtattctgtcgagcaacattccgccgttcgccggtattgatattacccgttcgctgcaggctgagctcgggcgcccggtggcgatggctaatgatgctgactgttttaccttagccgaggcgcgtttcggcgcggcaaaagatctgccggtggtgttgggggtgatactcggcagcgggatcggcggggggattgccatcaacggcaacattctctacggcaatcaggggatcggcgccgagtgggggcacggacccattacgcgcactcatctgcggggaattgagttgccgcggctggcctgcggctgcggacagcagggctgcctcgatacgctcggcggtgcaaaagggatgcagcggctgcatcaactgctcagcggtcaggcgttaagcagtgtcgagatcgtgaagcagggtatggccggagaagagacagcggcgttgacccttgaagtatggcttgagctggtgagcgaaccgttggctcatgcggtaaatatcctcgggccgcataaaatcgtcgctggcggcgggctggcgggcgaaacggcgttgctggcgcgtcttgatgaggcgctacgggcgaaaaccctgctgaaaacttcagcacctttgcttatcgccggagaatttagccatgaagggggattattgggagcatcggtgctgggctgggataaattttaa

SEQ ID NO: 91202 - DNA, 861 bp, Enterobacter aerogenes
atgtcggaaatttcactcgccaaatcgcgcagcggtgtgctcagcggcctgcgctgggggatggagcatccctcgctgaccctcggcggcatcatcgtcgccttaatcgtggtatgtgccctcttcgcgccgtggttaagccactacgatccctatgcgcaggacctgctgaatattctctccgcaccgtcggccgaccactggctgggcaccgatgactatggccgcgatattttttcccgcaccatttacggcgccaggatctcgctgattgaagtggtggtcagcgtggcgctgtcgctactgatggggctacctctgggcattatcgccgccctgtgcggtaaaagtgtcgaccacctgattatgtgggtgatggatgtcattttcgcttttcccggtatcgtgctggccatcctgctggtcagcgtcctcggcgcagggttgatgaatatgctgctggcgatcgctatcttctcggtgccggtttacgcgcgcctcagccgtaacctgacgttgggcatcaagaatatggagtacatggaagcggcacgggcactgggaattggctatcgccggcagataatccactacatcctgcgaaataccctggggccgattaccgtgcaggcgacattgaccggcggctcggtgatcctcgccgcggcttcgctctccttcctcggcatgggcgtgcaaccgccgatgccggagtgggggacaatgatgagcgatgggcgtaacttcctgggtatcagcctggggatttcgctatggccggggctggctattgtcttttcggtattaggcttcaacctgctgggcgatggcctgcgtgatttaatggattcgcgcctatga

SEQ ID NO: 91203 - DNA, 921 bp, Enterobacter aerogenes
atgaaagcttatgtgattaaaaaactgctttctttgccgctgatcctactgggggcatcgctgattgtctttctggcgatcaggatgctccccggtgacccggcccgcctgatggccgggccgcaggccacccaggatgatgtcagccgtatgcatacgcgcctcggtctggacgatccgctggcggtgcagtatggccatttcgttagcggaatgctgaagggggattttggcacttcgctgaagtccggtcagccggtctccgccgaaatgagcgaacgggttccttatactttaggcctggcgctgctggcgtggatgatggcggtgatcctcggtattcccatggggatgtgcgcggccatttaccgcaaccatgtagccgaccatgtgctgatgctggtagcgattgccggcgcgtcgatagccaatttctggctggcgctgatcgccatggataccttttcggtgaagctgggctggctaccgctactgggcgccgaaggctggaaaagctatatcctgccgtcggtttgcctggggattttcccgatggcggtgatgtcgcggatgacccgctccagtatggttgatgtgttaggcgaggattacatccgcaccgcgagggccaaagggctggcaccgtttcaggtctatttcaagcatgcgctgcgcaatgcgctgatccccatcgtgacgattatcgcactgaacttcggcagcctgatcggcggcgcggtggtgaccgagtcggtgtttaactggccggggataggccgctatctggtggattcggtacgctatcgcgattatcccgtcattcagggagtgacgatgattacggtggcaagcgtggtggtgatgaacctggttggcgagatgattatcgccagaatcaacccgaaaataaggtttgactga

SEQ ID NO: 91204 - DNA, 1533 bp, Enterobacter aerogenes
atgaaggcaattatgaataaatatcgacttgccattctggcaggcttactggcggctggcggggcgacggcgctgcaggcggcaacgctgaacgtgatgcaaaacgaacctccgcggagcatggatccgggcgaccaaaccgcgacctttaccgataccgttttaaaaccgatgtatgaaggtctggtggatttgtcgccggatttcaaaatcgccccggcgctggccaccgcctggaaggtgagcgatgacggtaaagtctggacgtttaccctgcgtaagaacgtcacttttcatgatggctcgccgtttaatgccgatgcggtggtcgccaatatcgaacgacatatcgacccaaaaggcggcctggccgcgagttcgcggatgcgcaacgttatcgcctcagtgaagaagatcgatgataacaacgtcgagattacgctgaaaaaggtctatccctctttcctcaatctgttgaccggcggctcggcgaagatggtgagcccggcggcagcgaaagccggcaccattggccgtaaagcggacggtaccggcccgtacatgctgcaggagtataaaaccggtgaatatgtgctggagaagaaaaacccgaaatactggggcgagaatcacggcccggatgagattaagtggacctggagcgcggagccgtcggtaatgaacatggcgctgctttccggccaggtcgatgtgattaacccggtaccgccgcagtttggtcggcagttgaaaagcaacccgcaggtgaaactggagcaggggcagggggcgtcggtattctgggtggcgctcaacgttgagcaaaaaccgctgaacgatgtccgcgtgcgtcaggccctgaacctggcgaccgacaaagaagcgctgctgaaggcggtgatgtttggtttcgcttctgccgccaactcgccgctggcaccggtgaacgaaggatatgataaaaccctcaacgactatccgtgggatctcgataaagcgaaagcgttattaaaagaggccggttacccgcagggctttgagatgaacatcgccgtgcagggaccggatgcgcgtaccgcgcaaatcctgcaggcgatgtggggcaaagttggcgtcaggcttaatatccagcagatggagagcggcgtctggagcaaagcggcgtttgcgccggcggcggaaaagttggccaaccgcaccgatgcggtgctggcctcctggtcttccgggctgaatgggtctgatttgcagctgcgcccgctgtactattcgcagagcgccgcgccggccggggctaaccttggcttctatcgcaacccgcaggtggatgagctgttagacaaagcggcgaccaccatggatgacaacgcgcgtattgccgaatatgtggcggcgcaaaaggccattatgcaggacgcgccgcatgtgatgctctacttccaggacgatctgtacgccacccgcgccaccattaaaggagtgcggatggagccgggcggcgaaattatcgttaccgaagcgcaaaaaccgtaa

SEQ ID NO: 91205 - DNA, 1134 bp, Enterobacter aerogenes
atgctgaacaaactccaccaacaattgattcatttggtctgtagcgaggaaggcgccagccgcgctgacctcgcccgcctgacgggtatgagtaaagcggccattggtgcgctggtaaaagagatgctggctgatggtctgctacaggagagcgatatggccgcttccggcggtcagggacgcccctccgtcaccctgtccctggcgccggacgctgcttacgccatcggcatctcactgattgataatcagcttgtgttggtgctgatgaatgccagcggcgagaaaattgccgagcgcctgctcacgccacagcttgaaatccccgacgtaatccagcaactggcgggtgaaatccgcagtttattaaacgatacgctcatcgagcgccaacggctcgtcggcatcggttttgccctgtctgcctttgtagacgccgcgcaagcggtctgcgtacagtcggcgctgctgggctggcatcaggtgccgctagctgaattgttaagccacgcgatcggcgggatcccggtatttattgaaaacgacacccgggcactggcgaactgggagaaaacgtttggccatctgcgcaagctggagagcgcagtggtgatttcccacggcagcggcatcggcagcgcggcggtcatctatgaccgaatctggcgcggcgcccacggcggcgcaggcgaaatagcccattgcaccattgtgccggcgggcacgccttgtcgctgcgggaagcgcggctgtctcgacaccattgcgtctctcaccgctatctttgaacaggcgcgcatggccggtatcaacaccgaccaactggatgaactggaggccatggcgcgcaagggccacactgccgccatccagatcttgcatcgggccggtgacgccttagggttggctatttcacatcagatccagacccacgatccggcggcgatcatgcttgcccatcagccggaaagctttaacggtttactgaataccgtgatgcaacaagctatagaaaccaacctgctgccggggatggcgggaaacacaccgcttatctatcgcccgctgacgcaggacagttgggcgctcgccgcggcgagcgtcgcgctgactcacgttctcttcccagcctaa

SEQ ID NO: 91206 - DNA, 1452 bp, Enterobacter aerogenes
atgcgcattgccgttggcggaatacatattgaatgcagcacgtttaacccagtactgactcatgaagcggagtttcgcaccgtcaagggcgatgccctgctggaggcgccccactttcagtttttacgtgattatccggcgacgtttctgccgacgctgcacaccagggcgattcccggcggcccggtggcgcgagagacctatgaacagttcaaagccgaattcttaagccgtctacaggcgcaactgccgatcgacggcctgtacctggcgatgcacggcgcaatgttcgttgaaggtatggaagatgccgaaggagactggatcgccgccgcccgcgcctgcgttggcgatgactgcccgattgccgtcagctacgatctacacggtaacgtgacccagcgcatcatcgacgccatcgacatctactcaacctatcgcaccgcgccgcatatcgatatcgaagagaccatgcgccgttcggtcagtatgctggtgaatagtctgcaaagcggcgtgcgcccgggcatagtgtgggcccccatcccggtattactccctggcgagcgaaccagtacagaagatgaaccggcgaaaagcctctacgccatgctgccgcacagcgaccagatagacggcgtactcgatagctcattaatggtcggctacgtgtgggccgatgaaccgcgcgccaccgccgcggccatttttaccggcaccgatcgcgcggtactggagcaacaggccgcaaaactggctcaggcatattgggacgcgcgggaagattttgttttcggctgcaggacgggcagcgtcgccgaatgcgtcgctcaggctatctccagcgccatgggcccggtgatcctggcggattcaggtgataatccaaccggcggcggcgtcggcgatcgcagcgatgtgctcgccgaactgctacgccaacaggcgcaaaatactctggttgccggcattaccgacgcgccggcaacgcgtgcggcctttgaagccggtattggcgctgaactacagctaacactcggcgctaacctcgatccggcgggcgtcagcgcgagcgcgcgttttaccgtgacaggtttgctggcggcaggcccgcagcgcccggccaatcaggcgattttgcagaccggcggtattaccgtggtggtggctgaccgtcgtcgtccgtatcacgacattgctgactttagcgcgctggggttagacccgcggcaggtgaaaattctggtggtcaaatccggctatttatcgccggaactggcgccgctggctaatccgaacctgatggcgctctcggaaggggtcgtcgatcaggatattgaacgggtggcccgccggcgaatgctgaccccgacctggccgtttacgcgtgacctcgaattcaccccacaggtgcggatttccgcccgcgcgccctttgccagggagtcctga

SEQ ID NO: 91207 - DNA, 1818 bp, Enterobacter aerogenes
atgaaccgggaaatgcctgcgccagtactggccgtcaacaatctgagcatctcattccgccacggcgatagctggcagaaagtggtgcgtaatatcagttttagcctttatccaggtaagacgctggcgattgtcggcgaatcgggctcaggcaaaagcgtgacggcgatggccatcatgcgcctgctttctgcccgccatagccgtaccgagggacaggtgttgctcggcggccaatccctgctcgagcttcctgaagaggagatgcgtcgtgtacgcggcgccgaggtagcgatgatttttcaggagccgatgaccagtcttaatccggcatttaccatcggcaatcagatagcggaagtttttatccgccatcagaggttatcggcgcgccaggcgaagcaggaggccatcgccctgctggaaaaagtccgcattccgcatgccgcacagcgtttcgatgaatatccgcatcagttttccggcggtatgcgccagcgcgcgatgatcgcgatggcgctggccctgaagcctaaactgctgatcgccgatgaacctactaccgcgctggacgtcactatccaggggcaaatcctcgatctgattaaaactctgcaggcagaaaacaataccgcagtgctgtttattactcatgatatgggcgtggtcgcggaaaccgccgacgatacgctggtgatgttccgcggcgacgccatcgaatgcgagcgcacgccgacgctattcgccgcacctcaacagccctatacccgcgcgctgctggcctcggtacctgcggcaggtgaaatggatgtaagctcgaccccttgtaaatttccatcggtgaacctgcaaaccggagaaattcatcgttatccgccagaagcggagctcagtctgaccagcaacgaacctgtgctgtcggtcaaaaacctggtcacccgttttcccgtcaaaaaaggcttttttaatcagttagccgggcatatacacgccgtagaaaacgtcagctttgatttatggcccggcgaaacgctatcgctggtgggcgaatcaggctgcggtaaatcgaccaccggtcgcagtcttatccgcctggtccaggcacaatccggtcatgttcgtctccatggttatgacgtcctgcaagccgggcgccagcagcaaaagcggatgcgtcaggatatccagatgatatttcaggatccgttcgccagtctgaatccgcggctgaaaatccaggaaacgctgattgaaccgctgctggaaaatggccttgccacccgccagcaggcgctggcgcgcgcccatgaattaattgaaaaagtggggctcaacgtcgcggtacttaaccgctatccgcacgaattttccggtggtcagcgccagcgcatctgcattgcccgcgcgctggcgatgaatcccaaggtgattatcgccgacgagtcggtgtcggcgctggatgtgtcggtcaaggcgcaggtggtcaacctgattatcgaactgcaacgaacgatgaaaatcgcctttctgttcatctcgcatgatatggcggtgattgaacggatcagccaccgggtggcggtgatgtatctcggtgaaatcgtcgaaattggcccgcggcaggccattttcgccaatccgcagcacccgtatacgcaaaagctgattgcggcgatcccaaagaccgatccgtctcgtcgccatctgttgcgtgaagccaataacgatgaactgccgtcgccgtttcgcgataaagactggcagccgccgacccgtcgctacgaacaagtcggtaatcagcactgggtaatgcgctga

SEQ ID NO: 91208 - DNA, 747 bp, Enterobacter aerogenes
atgcataaaaccgcccgacaacagtttttgctcgaactactgagcgaaaacggtcaaattagcatcagcgaactggttgaacgattgcaggtctcgcccgataccgttcgccgcgatctaagtgacctggaaaaacgcggactggtacagaaaaaccatggcggcgctatcgccctcgatcttccggccatgaatcgccaggggcgcaatgcgctgctgcccgagactaagcaacgccttggcgcgctggtcgcccgtgaggttcctccgggtgcaacgctatttttagacgccggcagcacggtactcgccgtcgccgcgcatctaaaaggaccgctgacggtcatcaccccttcgctggatattgcccaactatttagcgaacggcccgatatcgagttggttttacttggcgggaaatgggatatgcggcagcggctgtttgccggtagcgccacgctggcgctgctttctcgttaccgcgcggatatcgccattctcggcgcctgcgcgatccattcgcaacaagggcttagcgccagccaggaagcggatgcggaagtgaaacgcgccatgctggctgccagcgtcgagcactggctggtggctgatcatctgaaacttaatcgctgcgagccttacctggtcgccgaactgaaacacatcgatcgtctattcctcgacaagccgtggcacgcgcttggcgaagacaattcaatgcaggtcagcattgctgacgctgaataa

SEQ ID NO: 91209 - DNA, 1083 bp, Enterobacter aerogenes
atgcataaagttatcaacggcgcaggtaagcacattaatattgcgctgatcggctacggatttgtcggcaaaacgtttcacgcgccgctcattaattcggtcgaagggttaaagcttgccgtcgtcgcctcccgcgacgaagctaaagtgaagcaggatctgccggatgtcgcggtcatcgcttcgccggaagaggccattcagcatccggacgtcgatctggtggtacttgcctcgccgaatgccacccacgccccgctggctcgcctggcgctcaatgccggtaagcacgtagtggtagataaaccttttactctcgatatgcaggaagcgcgcgagttgatcgcgctggcggaagaaaagcaacggttgctttctgtcttccataaccgccgttgggatagcgattatctcggcattaagcaggccatcgagcaggggctgatcggcaaggttaagcatttcgagtcgcatatcgaccgcttccgcccgcaggttcgcgtccgctggcgcgaacagaacgtaccgggtagtggcctgtggtttgatattggcccgcacctgatcgaccagacgctgcaacttttcggcctgccgcaaactgtacagggtaatattgccaccctgcgccagggcgcagagattaacgactgggcacatgtggtactgaactatccacagcacaaagtgattttgcactgtagcatgctggtggccggcggcgtctcgcgtttcacggtccacggagatagcggcagcgtcgtgaaactgaaagcagaccagcaggagagccagctgctggcaggcgtcatcccagggagtgaaagctggggccaggatgacgacagcatgacgttgttcgacgccagcctgcaggcgcacacgctcgccacgccgaaaggcgatcagcgccagtactatattcaggttcgcgatgccctgctgggcaaaatcgccaacccggtgcctccgctacaggcgctggcagtgatggcggtgctggaagctgccgttgcctcgtcagaaagcggcagcgtgcagaagctggcgttaaccgccaacgaactggccgggcttcagtaa

SEQ ID NO: 91210 - DNA, 195 bp, Enterobacter aerogenes
atgtattacacgttaggagaaaagaccctccacttttatcgctatcagtgccgttactacgtcgcccactgggacggcggccacgtgatgaccgagcagttcaagccgtttatcgccgggatcagcgaaaagaccggcctggaagcgaagcgtgtagaagcggttgctcgcgactacttcactaacgtggattaa

SEQ ID NO: 91211 - DNA, 567 bp, Enterobacter aerogenes
atgggcaagaaaattttaatgctggtgggtgattacgctgaagattacgagaccatggtaccgtttcaggcattacagatgatcggccatcaggttgatgccgtctgtccggataagagcaaaggcgactatattatgacggcgattcatgattttgacggtgctcagacctacagcgaaaaacccggtcaccgcttcgtactgaacgccgattttgccagtgccagagaacaggactacgacgccctgctgatccccggcggccgcgcgccagaatatctgcgcctgaatgagcaggtgattaaactggtccaggctttcgacgccgcgcataaaccgattgccgccgtttgccatggcccgcagcttctggccgccgcgggtattcttaaaggccgtacctgtagcgcttacccggcttgcgctcccgaagtgcgactcagcggcgggcattatgcggatattggcatcgaccaggcgcacgttgacggcaatctggtcaccgcccccgcctggcccgcccatccgcaatggcttgctaaatttgccgaggtgctgcagcggtaa

SEQ ID NO: 91212 - DNA, 1341 bp, Enterobacter aerogenes
atgacaacttatcctaagcgtcacctgactactggcggcgatccgcgcacgctggcagactacgcaaagctgcgtgaagaaatgcataaactcagccacccggcacgccccgacgttgactggctatacgcagaacggctttgcctgacattgtttgaccgtaacggcgtagagctgcagactgcggcctggtatacgcttgcccgtacgcagttaaccggcttatccgggctgaatgaaggcctggctatcctggaaacgctgattacccgtcagtgggggagcctttggccacagccggtacacgcgcggatggaaatcctcagcggtttgggtaaacggctgcagcaagcgctgcgtacgctgacgctgacctatgccgatcttagtttgatttatgaggcggaagcgcatctgaaagcgctggatgctgcgctacagcgtctggaattaaagcatgccagtcagtttgatgcgttgctcaatttgatgcataacgcggcggtacggctggagaacagcgatggcgtaactagcgctgataccctaccgcacatagtcgcgatggagaatgcttccacccatttggatgagcgggttgagcgaacgaagtgggtttatattgcgccgccggaaacgctaccacacgagcaagccggcaatgagcgtcagaattctgaaaaacgatggcgaccttttgtggccggtatgctgacgatgctggcgctggccgctgcggcgggatgggggtggcaggcgatggctaaaccagagccggaacagcggcaattcgctctcagtctggcgccattgccgacggtactttcgccagatcagttacgctccttttctcagcacgcaccgccggcagacggtgggataaagcagacccggcagcagctgtcagatctggcccaactcaagccgaattgggccatcgactatagcgagcaactggtacaacaggcacaagtgctatggccggagcaggcgaaaacattgtcctcgcagtggcggcagcagatcatagccgccgcgctgccggcggaaaatctcaccgggtggtatcagggaatgcagcaactgcagcaattaactcagcgtctggatgcccttgatgaacagaagggcaaatacatgacggttagtgaactgaaatccgcggtgttcgccattactcagtcttttaatcgaaccgtcccggctgaagaacagttacgccaactgtcagcgatgacagaaggacaaatcagccgcgccgcgcagcaacaacaggcggaacaacacctgcagcagctgatagtctcttatgcgctactgaaaagtaaaacgccggaatag

SEQ ID NO: 91213 - DNA, 444 bp, Enterobacter aerogenes
atgccgcgcccttcactttacgacaccctgtttggtaatttctccggcggtctcgagctgcatcagatcggtgaagaaaatcaggtcattttatcggtgcttgataatatgcagcgtatcctcaactgccgggcgggcacgctggcgcatcttccggattacggtctgccggatatgacaaaaattctccaggggatgccgggtagcgcgcaccagttaatgactacgctgtccgcggtactgctcaaatacgaaccgcggctgaatagcctccgtgtggagatgctcgaacagacacagccgggcgaactgcgttatgccatcgacgcggaactgaaagaaattggtctggtacgctatggcacggaatttatgcctgaaggcagggttctccttcgccatctgaaacagcaacagtatctgaatgcccgcaccgctatttag

SEQ ID NO: 91214 - DNA, 1587 bp, Enterobacter aerogenes
atggcgtccattgaaaccctgatttctgcctgccagctgcaggttaatgagctggaaaggctggcacagacacatattatcctgtgggaacgctggctgcagccgattgcagatggtgagcccgttggagaggagccgggttacgatgatgacttccagcaaatacgcgaggaagtgaataaactatctggcgcggataccgaacgcattctgctgctggcggaaaaactgctgaccgccaccgctaaggatattcgtgtcgccacctactacgtttgggcgagactacattgcgatggcgaagcagggcttgcggaggggctggcgttactggctggattactacagcgtttcggcatgaaacttcatccccagcgggagcgcagtagaatcgcggcgctggagtggctgtgcagcggtcgtatgctggacagcctgtcactctatccggaagtgacaaaagaggggactggccgtattgccgcggcgttatgggagatagaaaagcgcctggcagacagtgaaagtaaagaacgggcccagcttaatagtctctatgccgcactggagtcgcgggttttgaaatctggcggtatggatgccctggtgccacagagcatcggtgaatcctcaggccaaacgtcggtatcgggggatgtacccacactgaaaggtattgcctcgggccaggagcttctcgctcaggcacgcaccctggcgcagtacctgagaaaccaatcagatggttggctcgccgctcaccgactgataaaaaatcttcgtcacgacaccctgcaccagctaccgttgttgacggtcgagggtaagacccgcattgaaccacctaaaccagaacagcgggcgcaactcaagcggctctatctgcagcagagctggcgggagctgctggaggaggcggacagcctgttggcgcgcgggtcaaatcatctgtggctggacgtgcaatggtatctgcatcaggcgttgatgaaatccgggcaggaagccgaggcggccattattcaggacgatctgaaagggctgctttcacggctaagagggttggaaacactggcctttaacgatggtacgccattcgctgatgaagtgacgcttaactggatacaactgcaggtcatggatgaaccgggcaactggcaggacgagcctgccaccacggcgtccggtgagaacgatatcctgcaactggagccggaggcgctcgccctggccgaccgtgaggggaccgaagcagcgcttacgtggctgcaaaatcgtcctgatgctaacactccccgccattgttggctgctgcgcttgctgatggcgcgtattgcagaacaaaacggtaaaaatgagcttgcgctgcacctgctgggggagctggacaggaacgccgcctgcgttacgctctcgcaatgggagccggatttgctgttcgaggttaaagcgcggcgattaaaactattacgcatgaaggccggacgtagcgaagcagaaaaaaaacgcctgcaagcggaaatggaacaactgctcgcggggcttattgccattgagcctgcgcgagcggtggtgctgtgcgattag

SEQ ID NO: 91215 - DNA, 2670 bp, Enterobacter aerogenes
atggaaaacccagccatcctgttacgccgtttaaatccttactgcgcccgcgccctggaaggcgccgcttcgctgtgtcaggcccgcgcgcatgcgcaaatccttccagaacactggctgctaaaactactggagcagggcgagggggacctgaccgttttagcgcggcgttatgagtgggatatggacgctatctggcaggatctgctctcttttctggaaacgcttccgcgttcggtacacagccggccgcagctgtctggcagcatccagagcctgatgcaggaggcgtggttaagggcttcactggcgggggagacctctctacgcagtgttcatctactgatggcgttagtcagcaacccaacgcgggtgcgctgtgacagtctgtggccgctgttaacgttgggacaagcgcagcttgaacacctgcgaccattattagatatgcagtctgatgagcgcccggaattacagccagatgagcctggccacgctggcgatgtggattttgtcggtcgccccgtggaatcggccgtgaagtccgctgagatgaaccctgcgttacagaacgcgctggataaatttacccttgatatcactgctcgtgcccgtgaaggcaaaatcgacccggtttttggtcgcgataacgaaattcgtcaaatggtggatatcctgtcgcgcaggagaaaaaacaacccaatcctggttggcgaacccggtgtcggcaaaaccgcgctggtcgaagggctggcgttgcgtatcgcggagggcaacgtgccggacagtctgaagccggtttcattgcgtacgttggatctcggcttactgcaggccggcgcaggcgtcaaaggggaattcgaacagcggcttaagaacattatcgaagcggtacagcagtcgcctgtcccggtgctgctgtttatcgatgaagctcatactatcatcggcgcaggcaaccaggccggtggcgcggatgccgctaatttgctcaaaccggccttggcgcgcggcgaactgcgaactatcgccgccacgacctggagtgagtataagcagtacttcgagcgtgatgccgcgctggagcgccgcttccagatggtcaaagtcgacgaaccggacgatgacaccgcctgtctgatgctgcgcgggctaaaatctcgctatgctcagcatcacggggtacatatcaccgatgaagccattcgcgccgccgtgacactttcccgacgctatctcaccggccgccagttgccagataaagcggtggacctcctggataccgcatcggcccgcattcgcatgggaatcgatacggcgccggaatcgttgacgcgtatgaaagcgcaaatcacggcgctcgaaatggaaaaacaggcgctgcttgaagatgccatggtcggtagcggtagcgacgaagcgcggttggcggcaattgagctggaagaatcgcgtattattttacagcttgacgatctggaaacgcagtacggcctggaactgaagctgaccgagcaactgctgagctgccgagcggatccttcccgccgcaaggagatcggcgcattacagagccaacttgccagcgtccagaataaccatccgctgctggggctggatgtcgatttacgtaccgtagcaacggtgattgccgactggaccggggtaccgctctcttcattgctgaaggacgagcagacggaactgctgggtctcgaatttcatttggataaacgagtggtggggcagaatatggcgctaaacgccattgcccagagactgcgggcgaccaaaaccgggcttgcaccggataacggcccgcagggcgtatttctgcttgtcggtccgagcggcactggaaaaacggaaaccgcgctggcgctggctgatgagctgttcggtggtgagagatcgctgattaccatcaatctttccgaatatcaggagccgcatacggtgtctcaactgaaaggttcgcctcccggttatgtcggctacggtcaagggggtattctcaccgaagcggtacgcaaacgcccgtacagcgtggtcctgcttgatgaagtggaaaaagcgcatcgtgatgtgatgaatgtgttctaccaggtgtttgaccgtggctttatgcgcgatggcgaaggacgcgaaatcgacttccgtaatacggtgatcctgatgacctcaaacctcggcagcgatcggctgatgcagatgctggaggagcggccggaagcgacagaatctgatttacatgacctgttgcgcccggtgctgcgagaacattttcaaccagcgctgctcgcgcgtttccagaccattatttaccggccgctcagccatccggcgatgcgcaaaattgttaacatgaaactcaaccaggtcagccagcgtttgtatcgtcattacggtatgacaaccgatattgccgaaggcctgtacgacgcgttgacggacgcctgcctgctgccggataccggcgcgcgtaacattgacagcctgcttaatcaacaaattctaccagtgctgagtcagcaactgttgagccatctggcggcagggttgaaaccactacatctggctctggattgggatgaagaagaggggatttcactggtttttaaaacggaagaaaacgcgccaggcttagatattccggaaggatgcgagtaa

SEQ ID NO: 91216 - DNA, 492 bp, Enterobacter aerogenes
atggcaataccagtctatttgtggttgaaagacgacggcggggcggacattaaaggttccgtggatgtgaaagatcgtgaaggcagcatcgaagtggtggcgcagaagcataacctgtacatcccgaccgacaacaacaccggaaagctaaccggcacgcgtatccacacgccgtttttgtttaccaaggaaatcgactcctcaagcccctatctctacaaggcggtgactaccggtcagacgctgaagtctgccgagttcaagtggtacaaaatcaatgatgctggtcaggaagtggaatacttcaacaccaaactggaaaacgtgaaagtggtgaaggtcaatccgctgatgcacgacatcaagaacccagcctacgagaagcacagccatcttgagcagattgaactgcgctacgaaaaaatcacctggacctataaagacggcaacatcattcattccgattcatggaatgaacgaacgacagcctga

SEQ ID NO: 91217 - DNA, 1536 bp, Enterobacter aerogenes
atgtctgtaaatactgaaacgaaccccgcgcaggggcaaaccgccgtaataaacaaagaaagcgtttacgcttctctgtttgaaaaaatcaatctgagcccggcatcaagccttggcgatattaatgtctttctggacgatgcggcgctatcagaggccacggcgggggaacgcctgaccgcggcgatgcaggtttttatggactgcattcgtcaatccggtcagcaggtggagaaactcgataaaacgcttattgaccaccacatcgcggagctggattttcgtataagccgtcaactcgatgctgttatgcatcacccggagttccagaaggtggaatctctgtggcgcggcctgaagcaactggtagataacaccgactatcgccagaacgtgaaaaccgaaatcctcgatgtgtccaaagacgatttacgtcaggattttgaagatgcgccagagctgatacagagcggcctgtactggcatacttacaccgccgaatacgacacccccggcggcgagccgataggctcggtaatttcagcgtacgagtttgacgccagcccgcaggacatggcgctgttgcgtaatatttcgaaagtctccgctgcggcgcatatgccatttatcggcgccgtagggccgaaatttttcctcaaggattcaatggaggaagtcgcggcgattaaagatatcggcatctatttcgatcgcgctgagtacattaaatggaaatcgttccgcgataccgatgactcgcgctatatcggcctggtcatgccgcgggtattgggccgtctgccgtatgggccggacacggttccggtgcgcagctttaactacattgagcaggtaaaggggccggatcacgaaaagtatctgtggaccagcgcgtcattcgccttcgcctcgaacatggtacgcagctttattcaaaatggctggtgcgtgcaaatccgcggcccgcaggcgggcggcgcggtgaaagatcttcccattcacctctatgatctcggcaccggaaatcaggtgaaaatcccttccgaggtgatgatcccggaaacccgtgagttcgaattcgccaatctgggcttcattccgctgtcttattataagaaccgtgactacgcctgcttcttctcggctaactcaactcagaaacccgcgctgtacgacaccgcggatgcgacagccaatagccgtatcaacgcccgcctgccatacatcttcctgctgtcgcgcatcgcccactacctgaaactgatccaacgcgagaacatcggcaccaccaaagatcgtcgcctacttgagctggagctcaatacctgggttcgtggcctggttacggaaatgaccgatccgggtgacgagctgcaggcctcacatccgctgcgtgatgcgaaagtggtagtggaagatatcgaggataatccaggcttcttccgcgtcaagctgtacgcggtgccgcacttccaggtggaaggcatggacgtcaatttgtctctggttagccagatgccgaaggcgaaagggtaa

SEQ ID NO: 91218 - DNA, 492 bp, Enterobacter aerogenes
atggctgattcattccagaatgaggtgccgaaggcacgtattaatttaaaattatccttacataccgggggggcgcagaagaaggttgaactaccgcttaaattgctcaccgttggtgatttcagtaatggaaaagatcatcgaccattggccgagcgccagaaaatagatatcaataagaataattttaatagtgtgctttctgaatttaacccagagatcaatctcaccgttgagaatacgctggcaggtgataactcagaagacaatgttaaactgcgtttttccgatataaaagactttgagcccgaacaggttgcccggcaaatccctcaactccgcgccatgctggcgatgcgtaatttattacgcgatctcaaatcgaacctgctagataacgctactttcagaaaagagcttgagagaatccttaaagatccagctctgtccagcgaattacgcgccgaaatgagtgcccttgccgggaagtaa

SEQ ID NO: 91219 - DNA, 123 bp, Enterobacter aerogenes
atgctgcgcttctatgttaccggcggccaggtggataacgagcacaccgcgaaagtagacggcaccagcgacgagcggctggattcgctgaacatcggcggcatgtttgaggcctggttctga

SEQ ID NO: 91220 - DNA, 858 bp, Enterobacter aerogenes
atgggaaatggatggcatgaatggccgctggttctgtttacggtactggggcaatgcgtagctggcgcggttattgtcagcggcctgggctgggtgtcgctctgcggtcagcgcgaagcgcgacagcggctggtgcgcagcatgttctttatctggctattgatgggaataggttttctcgcttctgtcatgcatctcggctcgccgctacgggcatttaactcattgaaccgcgttggcgcttcagcgctcagtaatgaaatcgccagcggcgccctcttcttcatcgtcggcggattctggtggctattggcggcggtgggaaaaatgccctcggcacctggcaaaatctggttgtttctcaccatgttgctggggttgctatttgtgatggcgatgacccgggtctaccaaattgacaccgtgccaacatggtacaatggctacaccaccggcgcgttcttcctgacggtactgctcgccggtccgctgttcgctgccctgctgctaaagctggcgaaagtcgatttcaacggctggttttttgccgctattagcgtggccgcactcatcatcagcgtggccgttgttgtcttgcaaagcgcggatctcggcacgatccacagttcagtacaacaggcgaacgccctgctaccggattacggcagactacaggttctacggctgatcctgctggcgctcggtctcggctgctggctgtgtccgctgatccgccgccagccgccgcgcgccgccgggttattgatcgggctgataatggttttagtcgcggagtgtataggccgcggcctgttttatggcctgcatatgaccgtgggtatggcggttgcgggttaa

SEQ ID NO: 91221 - DNA, 609 bp, Enterobacter aerogenes
atgatgcagatcccaaatcgcgacgccgtcgcactaagcgcccgcacgttgggcgcgctgttctcttatgcgccgaatagcgagcaaaacgcgccgctggtcgccgcttttctcgatggtagctggcagccgcagtggccgttcccggtctccgattcactggcaatggaattcgccgccagcagcgacgaggcgctgccgcaagcctggcagcgtctgtttatcggtccatgggcgcttcccgctccgccgtggggttcggtgtggctggataaagagtcggtgttattcggcgactcaacgcttgcgctgcgcgagtggatgcgcaccagcggtattgcgctggatcttgagcgcaacgaacccgaagaccacttcggaacactgctgctgctggccgcatggctgtgtgaaacaaatcaggatgagttgtttgcgcaactgctggcctggcatctactgccgtggtccgggcgttttctgagcgtctttatggaaaacgccgggcatccgttctatcgggcgctgggccaactggcgcagtcgacgctggctaactggcaggaatatttgcccatcgcggtggcggaaaagcagctgtatcgttaa

SEQ ID NO: 91222 - DNA, 1296 bp, Enterobacter aerogenes
atgcatcgtcttcataactaccctgatgtgcaggtgatgttccgtcgcctgatcatcgccacgctcgtcggcatctttgcggcgctggccgtggcgctgtttcgccactcgatggtggcactggaaactttatttctcggtaatgatagcggcagtctggtgaacgccgcgcagtcgctaccgtggtggcgtcggctgctgacgccggcgcttggcggaatcgcggcggggacattactctggttatggcaacggcgcaacgtgtcgcgtccgcacgccccgaccgattacatggaagcgctggaaaccggcgatggctgtttcgatacgccggcaagcctcgtcaaatcgctggcatcgctgctggtggtcgtgaccggcagcgccattggccgcgaaggggccatgatcctgctggccgcgctggccgcctcgctgtttgcccgccgttttaccccgcgcgctgaatggaagctgtgggtcgcctgcggcgccgccgccgggatggccagcgcctatcatgcgccgctggcggggagcctgtttatcgccgaaatcctcttcggcaccctgatgctggcctcgctcgggccggtggtcatttcagcggtgatcgccctgctgctgaccaatttactcaatggcggcgccgcgccgctgtaccacgtcgtcttgcaacaaaacctgaccgcgctgcattacggtttaatgctggcaaccggcctgctggccgggctgtgcgggccgctgttcatctggctgatggactacagccaccgtggtttcgtccggctgaaactgtcgccgccgtggcagctggcgctggggggactcatcgtcggcatgttatcgcttattaccccggcggtgtggggcaatggttatagcgtggtgcaaagctatctgctatcgccgccgctatttagcgtcattatcatcgtctttgtctgtaaactgttggcggtgctggccagcagcggctccggcgcgccgggcggcgtctttaccccgacgctattcgtcgggctggcaataggaatgctattcgccacttttagcgggctgtggttagataacgatcagaacatagcgattatgattggtttaaccggaatggcggcgtttctcgccgcgacaacgcatgcgccgatgatgtcgacgctgatgatttgtgagatgaccgggcagtatgtgctgctgcccggtttattgatcgcctgcgtactggcttcggtagtgtcgcgaacgttacgccgggattcgatctatcgccatcacgttgccgagcacgtctaa

SEQ ID NO: 91223 - DNA, 696 bp, Enterobacter aerogenes
atgtttaagcgtttctttataacaggtactgacactgctgtcgggaagacggtagtatcccgcgcgctgctgcaggcacttgctgccagcggtaaaagcgtcgccgggtataagcctgtggcgaagggcagcaaagagacgccggaaggactgcgtaacaaagatgcgctggtattacagagcgtgtcgacgctgtcgctgccgtatgatgctgtcaatcccatcgcgttaagcgaagaagaaagcagcgtggcgcacagctgcccgatcaactacggcttactcagtgacggcctgcagcagctcagcggcagagtggatcatgtcgtagtggaaggtaccggcggctggcgcagcctgatgaacgacttacgcccgctctccgagtgggtagtgcaggaacaactgccggtcgtgttggtggtgggcattcaggaagggtgtatcaaccatgcactgttgaccgctcaggcgatcgccaacgacggtctgccgttaatcggctgggtcgccaaccgcattaaccctggccttgcgcactacgctgaaatcatcgatgtgttgagcaaaaagctgcctgcgccgctgattggcgagctgccttatctgccgcgcgccgaacagcgcgaactcagccagtatgttgacttagacgtgctcggcaacgtgatggcgatagatcgaatcccggcgtaa

SEQ ID NO: 91224 - DNA, 1221 bp, Enterobacter aerogenes
gtggtagcggacagtcaaccaggccatatcgatcaaataaagcagactaatgctggcgcggtatatcgcctgattgatcagcttggcccggtgtcgcgtatcgacctttcccgatttgcgcaactggcgccggccagcattaccaaaattgttcgcgagatgctggaagcgcacctggtgcaggagaccgaaatccaggagccggggagccgcggccgcccggcggtcgggctgatggttgaaacggaagcctggcattatttgtcgttgcgcatcagccggggggaaatccacctggcgctgcgcgatctgagcagcaagctggtggtggaagaacaactggaactgccgctgcagcatgcgcaaccgctgctgacgcggatcatcgagcatatcgaccagttttttattcgccatcagcacaagctcgaacgacttaccgcaatcgccatcaccttgccggggatcattgatactgaaaacggtatcatccaccggatgccgttttatgatgacgtgaaagatatgccgctcggtgaggctctggctaatcacaccggagtgtcggtctatatacagcacgatattagcgcctggactatggccgaatcgttgtttggcgcctcgcggggggcgcgcgacgtcatccaggtggtaatcgaccacaacgtcggcgcgggagtgatcaccgatggccgcctgttgcacgccggcagcagcagcctggtggagatcggccacacccaggttgacccttatggtaaacgctgctattgcggcaatcacggctgcctggaaaccatcgccagcgtcgaaagcgtgctggaactggcgcagatgcgcatggcaaaatccatgagctctatgctgcatcaacagcagttgagcgttgaatggttatgtcaggcggcgcagcagggtgatttactggcgcgggatatcattaccggcgttggcgctcatgtagggcgtattctggctatcatggtcaatctgtttaacccgcaaaaaatccttattggttcgccgttcaatcaggcgtctgatattttgtttccggcaatttctgactgtattcggcaacaggcgctaccggcatatagtcgtcatatcgcggttgagagtacccagttctcaaaccgcggaacgatggctggcgcggctttggtgaaagacgccctctataacggatcgctccttatccgactgttacagggttaa

SEQ ID NO: 91225 - DNA, 903 bp, Enterobacter aerogenes
atgaatatcgagctgcgtcatctgcgttactttgtcgccgtggcggaagagctgcattttggccgcgcggcggcgcgcctgaatatctctcagccgccattaagccagcaaattcagattctcgaacaacagattggcgcgcggctgtttgcccgcactaatcgcagcgtcagcctgacggcggcgggagtgcagttcctcgccgatagccgacaaatactgacgcaggttgaagatgccgccgctcgcgccgggcgcctgcaccacggcgaaaccggtgaactgcgtatcggcttcacctcgtcggcgccatttatcaaagcggtttccgatacgctttccacttttcgtcgccgctttcccgatgtccatatccagacccgcgaaaccaacacccgcgaacagatcgtgccgctgaatgaaggggcgcttgaccttggcctgatgcgcaacacgcatctgccggataccttgtgctgggaaagggtgctgcgcgaaccgctactggcgatggtgcccagcgatcatcccctggcccgtcagcaatcggtcagtctgcttgagctggcgcgcgagccgtttgtctttttcgatccgcacgttggtaccggcctgtatgacgatattctcgggttgatgcgccgctacggtaccacgcccgttatcacccaggaggtcggcgaggcaatgaccatcattggccttgtggcttcaggtcttggggtatcgatcctaccagcctcgtttaagcgggtgcagttaaatgaaatgcgctggctgccgattagtgaacccgatgcggtgtcggaaatgtggctggtgtgggccaaacaccgtgaacagggtctggcggcgcagcgctttcgcgattatcttctcgctgccgccgccctggcgaattaa

SEQ ID NO: 91226 - DNA, 1251 bp, Enterobacter aerogenes
gtgagtaacacaacaaccgctgacaccgcgccggcgagcgatgtcagggataaggtcgcttcccagccaaatcaatttattaaacgcggcaccccggcgtttatccgcgtcaccctggcgctattttccgccggactggccaccttcgccctgctctattgcgtgcagcccattctgccggtgctgtcaggcgagttcggcgtaagcccggccagcagcagtatttcgttatcgatttccaccgcgatgctcgccatcggcctgctatttaccggcccgctgtcggatgccattggccgtaaaccggtaatggtcaccgccttactgttggcggcgtgttgctcattattatcaacgatgatgaccagctggcacggtattctgatcatgcgcgcgttgatcggcctgtcgctcagcggcgtagccgccgtagggatgacttatctcagcgaggagatccacccaagcgtggtggcgttttcaatggggctttatatcagcggtaactcgataggcggcatgagcggccgcctgctcaccggggtctttaccgatttcttcggctggcgcgtggcgctggcggtgataagcgccttcgccctcgctgcggcaatcatgttctggcgtattcttcccgagtcgcgccacttccgccctatttcgttgaaaccgaaaacgctgctgattaacttccatctgcactggcgcgatcgcggcctgccgctgttgttcctcgaaggcttcctgctgatgggcgcatttgtgaccctgtttaactatattggctaccgtttgatgatgtcgccatggtcgctgaatcaggcggtggttggcctgctgtcggttgcttacctgaccgggacctggagttcgccaaaagccggcgcgctgacggtgcgttatggccgcggtccagtaatgttgttctttattgcggtgatgctgtttggcctgctgatgacgctattctcgccgctgtggctgattttcatcggcatgctgctgttctccgccggcttttttgccgcgcactcggtcgccagcagttggatcggaccacgggcgcgtcgcgcgcgcggccaggcatcttcgttatacctgttcagctactatcttggctcaagtattgcggggacgctcggtggggtcttctggcatcattacggctggaatggcgtcggcggctttatcgccctgctgttaatggccgcgctgctgaccggcgcctgtttgcacaaccgcctgaaataa

SEQ ID NO: 91227 - DNA, 1488 bp, Enterobacter aerogenes
atgactgacaacaacaactatcagcagctcacccgcactttccaacggctctcccgcttctctcaccttgccgccatcgccggctgggatatgttcgccatgatgccgcccggcggcagccgcgcgcgcggcgaagcgctggcggagctcggggtgctgcagcaccaaattttgaccgataagaaggttggtgaatggctggaaaacgccctgcaggaagatcttaacgatctggaacaggctaacctgcgcgaaatgacccgccagtaccagcaagcggcgctactgcccgaaagcctggtggaagcgaaatcgctggctggcagccgctgcgaacacgcctggcgcagccagcgcccggctaacgactggcaggggtttgccgaaaacctgcgcgaggtcgttaagctcagccgcgaagaggcgcagatccgtgccgatgcgaaaggctcttcacgttatgatgccctgctggatattttcgaacccgatatgaccagcgcgcgtcttgacgtgctattcgccaatctgaaatcctggctgccgtcgctgctggcaaacgtcgtcgataagcaagcgcagaagacgctgctcgagccacaggggcccttcgccatcaacgaccagcgcgagctggggctggaagcaatgcgggttttaggctttgattttgatggcggccgcctggatattagcgcacaccccttctgcggcggcgtgcctgaggacgttcgtattaccacccgttataacgaaaacgatctactcagcgcgctatttggcgtgatccacgaaaccggccacgcgcgctatgaacagaacctcccgcgtaactggctcgatcagccggttgggctggctcgttcaacggcgattcacgaatctcaaagtctgttcttcgaaatgcagcttggccgcagcgaagccttcctcaaccgcctgctgcccgccgtgcgtcagcgctttggcgaccagccggcgttcagcgcggaaaactttatcgcctggaaccagcgcgtgaagccgggcttcattcgcgtcgatgccgacgaagtcagctacccggcgcacgtcattctgcgctatgaaatcgagcgggcgctgatcgacggcgatattgaagtagacgatattcccgccctgtgggacgagaaaatgcagagctggctgggcatttcgaccctcggcaactatcgtgacggctgtatgcaggatattcactggaccgatggcggtttcggctatttcccttcctatacgctgggggcgatgtacgccgcacagttaatggcggccgccagacgcgcgttaccgaatctcgcacaggatatcgccggcggcgattttaacgctttgttcgactggttgcggcaaaatatctggcagcacggcagccgctttaccacttcgcagctgattaagaatgccaccggcgaagatctcaacggtgagtatttccgccagcatcttaccgcgcgttatctctaa

SEQ ID NO: 91228 - DNA, 372 bp, Enterobacter aerogenes
gtgtttagtggttttgtggtgttttttcgcagcctgagctttctgcgctactggtttagcggcagttttgtggtgctttttggcagcctgggctttctgtgcagccggtttagtggcggctttgtggtgttttttcgcagcctgagctttttgctctacagcgggtttcgccgcggcttttttgtgtttcttggcagcctgggctttctgttctgcagccggtttggcggcagctttgtgatgttttttatggtgagttgtcttggcagtggtgctgtgagttgcagcagcaggtgcctgagtggtgcttgctgcatcagcagcgaaagcagcggaagacagacccatagcagcggcaacgaccagagctaa

SEQ ID NO: 91229 - DNA, 300 bp, Enterobacter aerogenes
ttggctataatatctgtcaatgaatgcaaactggcggatatgatgactatcgatgagaagcaattgcgggcgatcattacgggggaaaaaaccgaagtgtcgcccccagaactggcgaaggaattgctggcggcgcgggtaaaaattggcgagctggaacgtcaactggcgacgccgattcgcttacctttctccagtgcgagcccggtatgcgaaattgaagcgggatatgctgcgggcgtcagcgattgccgtcaggcaattcgtgaagccggttttcctattgagggggatgattag

SEQ ID NO: 91230 - DNA, 813 bp, Enterobacter aerogenes
atgcgtagagacgtactgttattactgtgttcgttttgtgtatttcccctgtttgctcacgccgatgatgacggcatgagcgcgaaagatatcaaaacgctttttttcggccatgacgatcgtaaagcggtcagcgatccggccagttccccctgggatgccatcggccagttagaaaccgccagtggtaatctgtgtaccgcaacgctgatttcgccgcatctggccctcaccgccggtcactgtttgctgcagccgccgaaaggaaagccggacaaggccgttgcgttgcgttttatctcgcgtaagggcagttgggtctatgaaattcacgggattgacggccgtaccgacccatcgctaggcaaacggcttaaagcggacggcgatggctggattgtcccctcttccgcagccccctgggactttggcctgatcgtcctgcgctacgcgcccggcggcattacgcctgttcctgtgtttcgcggtgataaagaagcgctgaccgcggcgctgaaagcaacggaccgcaaagtgacgcaatccggctacccggaagatcatctggatagcctctatagccaccaggattgtctggtgacgggatgggcgcaagcctcagttctatcacatcaatgcgatacgctaccgggcgacagcggttctccgctgctgttaaaaacggacaacggctggcaggtcattgcagtgcaaagctcggcgccgggaccgaaagatcgctatcgcgccgataaccgggctattgccgtgaccggttttctcgacaagctggaagcgctggctaacgagtga

SEQ ID NO: 91231 - DNA, 2157 bp, Enterobacter aerogenes
atgattcctttgcctggctggcggaatattccctctgccaaaatcctttccattctggtatttcttgccggcctgggcctggtcgtctctgtgatttctcttttctatttgtcgcaacatctggtcagtattaaaactaatgaaatagataaacaccgttcgatgctttcggtagaaggcgccgtgcagacatcggtgaaccgggtgctgtcattggtactggataattcgatttgggatgatgcggttaaacaaacctatacgccccatcttgatgcacactggctgtatgattcgtggggatcgggttttaagattaataatctctacgacggcacttttatcctggatgaaaactatcgcatcttgtggggggcttttcgcagcgagccatttaccgaatccgatattggttttttcggcagcgggttacaaacccttatcgagcagcacgcggatgcgctgagacgcggtaaaaatgcctttgccggaatcacccgtacccgggcgggcattgcgtttgtcggtatcggcttgattcgcccgacaatcggccgcttaccgatttatgataaaacccgtcgctatctggttattacccgccacattaatccaaccatgctggaaaccctggggaacactttccagattaatcgtctgcatacgacgcagtttgccggcgaatacagcgtaccattacgcacagagggcggggagacgctggcctatctgagctggcaaccgcgccttcctggtgcggaagcggcgcgcgccgcgtcaaacagcatcaggctcatcgccattctggcggcaagtttaattttgctgtttatcatgctgagtagcctggggctttacaagctggcgcgcggcgaacagcaggcgcgaaaaaatgcgcttatcgattggctgagccttttgccgaaccgtcgggcattgattgaacgtttaaatgcgatgggcgaatgcggtaagaatgaaatgcagagcgtggtatttatcgatctcgatggttttaaagacgtcaacgataactacggccatgatactggcgacgcgctgattgcccatatcgcccgcgaattacgcgatcgggttccggcgggggcgatgctggcgcggatgggcggggatgaattcgccatgaccatgagcggcgaacatgcggttaatcaggcctcagcattcgccctggcggtgctcgaattattaaaaactcccgttgcgctcagcgcccggaaaatatatatcagcgccagtattggtattgccagcggggtgccgacgcagtgttccagtactgagttgtttcgccgtgcggacatggccatgtaccacgcgaagaaaagcggtaagggaagagcggcctggtatgatgacacccttaacgaaacgcgtcagcaccagctgcacattgaaaatggtatccgcgaaggtctcgaaaaaggcgaatttgatgtctggtatcagccgatcgtcaatgccgaaacgctggtgatggaaggcgtagaggccttgctgcgctggccgcgacgtcctgaaggcccgctggcgccggatgctttcatccccattgctgaaagcagtggattgatttatgccttgggccagtttgcgctgtcgcaagcctgttacgatctccagacgatgggggatttactcctttccgtcaatatatccccggcgcagttccgcgacccggaattcgaaactcgggtgatccaaaccctgggacgctgtcagtttcctgcccgccgcctgcagcttgaggtaaccgaaagctacgtactggaaaacccggagcgcgctcgcgtggctatcgagaacctgaaatcgttaggtatcgccgtcgcgctggatgattttggcattggctattccagtattggttatctacgcagctgtcgttttgatagcctcaagattgataagtcgttagccggggtggtggatgtcgacccgcaggcggcagaactggtgcgcggcacggtacgtatcgctaatgcgctggggatcaccgtggttgctgaaggggtagaaactcagcagcaactggcgctgctgcggcgggcgggatgcgatcgacttcagggatattatttcagccaaccgatgccgatcgattcattgcttcaactgcgccagcagcagggataa

SEQ ID NO: 91232 - DNA, 330 bp, Enterobacter aerogenes
atgcaacagtttgagtggattcacggcgcctggctggcgctggctatcgtactggaaataaccgcgaacgtattgctgaaattttccgacggcttccgtcgtaagatctacggtattctgtcgctggcggcggtgttaggggcctttagcgccctgtcgcaggcggtaaaaggtatcgacctgtccgtcgcttatgcgctgtggggcggattcgggattgcggccaccattgccgctggctggatcctctttggtcagcgtctgaaccataaaggttgggttggcgtcgtgctgctggtggccggtatggtattgataaaactggcctga

SEQ ID NO: 91233 - DNA, 363 bp, Enterobacter aerogenes
atgttttattggattttattagccttagctatcgtcgctgaaataaccggcacgttgtctatgaaatgggcaagcgtcagcggcggtcatacaggttatattttaatgctggcaatgattgcgctttcctatattttcctggccttcgccgttaaaaaaattgctctcggtgtggcgtatgcgctatgggaaggtatcggtattttattgattaccgtattcagcgtgctgctgttcgatgaaagcctgtcagtcattaaactcgccgggctggcaacgctggtcgccgggatcatactgattaagtccggcacaaaaaaggcggtgaaacagcgtgaggagacagctcatgcaacagtttga

SEQ ID NO: 91234 - DNA, 1035 bp, Enterobacter aerogenes
atggccaaacccatcatcaccctaaatggactcaagatcgtcatcatgctgggcatgttggttatcatccttaccggcatccgttttgccgccgacattatcgtcccctttatcttagcgctattccttgcggtggtgatcaatccgctggtccaactgatggtacgctgtcgggtgccgcgagtgctggcgatttcgctactggtgggcgctatagtgctgctggcggtggtactgctggcgtcgcttggcacctcgcttaacgaattggcgcgcaccctgccgcaataccgcacgtcgctggccgaaccgctaaagaccgtcaccccatggctacagcgctttggttttaccgtctccgccattgagctgaataagtatatcgatcccaacgcggtgatgaccctggttaccagcttgttgacccagttgtcgaatgcgatgtcgtccatttttctgttgcttctcaccgtggtatttatgctgttggaagtgccgcagctgcccgccaagcttcagcagctaatgtcgcggccggttgagggaatgggcgccattcagcgggcgatagatagcgtctcacattacctggtactgaaaaccgcgattagcctggtcaccgggctggtggtctggggtatgctggcgctgctggacgtccgcttcgcctttatgtgggggctactggcctttgcgctgaactatattcccaatatcggttcggtactggcggccatcccgccgattctgcaggtgatggtatttggcggcctgtatgaggcgctgatcgtcactgccggttacctgattatcaacctggtgttcggcaatattctcgagccacgtatcatgggccgtgggctggggctctccacgctggtggtattcctgtcgttaatattctggggctggctgctgggcccggtcggtatgctgctgtcggtgccgttgaccatcatcgtgaaaatcgcccttgagcaaaccaacggtgggcaaagtattgccttcttactcagtgacttaagtaaagaataa

SEQ ID NO: 91235 - DNA, 1656 bp, Enterobacter aerogenes
atgaatgctgaacaaacgacgggacgggtctggaaccgtcgccggacggaaaaacagcggcggctggccgaaacgaagattgccggcaaagtcatccccactgaccaactggtcagcgtactggaaaatctgctcgcccctggcgaccgggtagtactggaaggtaacaaccagaagcaggctgatttcctctcccgcatgctcgccgaggttaatccgcagaaaatccacgacctgcatatgattatgccaagcgtcgggcgcagtgagcatctggacctgtttgaaaaaggcattgcccgtaaactggatttctctttctccggcacgcaaagcctgcgcatctcgcagctgctggaagatggcctgctcgaaatcggcgccatccatacctatattgaactctactcccgcctgtacgtcgatctgtcgccaaacgtcgcgctgatcgccggctataaagcggaccgtaaaggcaacctgtataccggaccgagtactgaagatacgccagcgctggtggaagccgccgccttccacgacggcattgtgatagcccaggtcaacgaactggtggacgacgaatgcgacctgccgcgcgtcgatattcccggctcgtggattgattacgtggtggtcgccgacaaaccgttcttcattgaaccgctcttcacccgcgaccctcgtctgattaagcaagaacacattctgatggcgatgatggcgatcaaaggcatctacgcggaacatcaggtgcagtcgcttaaccacggcatcggctttaataccgccgccatcgagctgttgctgcctacctacggcgaacagctcggactgaaaggcaaaatctgtaaacactggacgctgaacccgcatccgaccttaatcccggccatcgaaagcggctgggtggagagcgtgcactgcttcggcggcgaactgggcatggaagagtatatccgcgcccgcccggatatcttctttaccggcccggatggctcaatgcgttccaaccgtgccttctgccagctggcaggtcaatacgcggtagatatgtttatcggttcgaccctgcaggttgatggtctggctaactcctcaaccgtcacccgcggtcgtctttccggcttcggcggcgcgccgaacatgggccatgacccccacggtcgccgccacgccaccccggcctggctcaatatgatcaccgaaccagacccgatgcagcgcggtaaaaaactggtggtgcagatggtcgaaaccttccaggccggcgtaaaaccgacttttgttgaaacgctcgacgcggtcgacgtcgccaaaacctccggcatgccgctggcgccggtgatgatttatggcgatgacgtgacccacgtgctgaccgaagagggtatcgcctacctgtaccgggcggagagccttgaagagcgccgggcgatggtcgccgcggtggccgggatcaccgatattggtctcggtgtggacgccaaacgcgtcgccgcgctgcgccagagcggcaaagtggtctacccggaagatatcggcattcgccgcagcgatgccacccgctcgctactggccgccggcagcgtcgccgagctggtggagtggtccgacggactgtacaacccaccggcaaaattccggagctggtaa

SEQ ID NO: 91236 - DNA, 843 bp, Enterobacter aerogenes
atgaaaaatctctcccccctacacgcagaaagccgcgtcagctggctggcgcataccgccagcgcctgtctgattgacgaagcccgtctgagtccgaaaccgggtctggtcgatagtcgcggcaacggcgcgcatcaggatctcaatctggacctgatggaacgctccgcccgcagcctccagccaacctttcacgcactggcgcagcaaagctggcagcgtccggctgatatcgccctgcgcgaaaccgtcggacgcctcggtcgcgaaggtgaagcgcagatgatgatggcgacaggtggagttaacacccaccgcggcgccatttgggcgctgggcctgctggtcagcgcggtggcgatgttgggtggagagggtcaatcacaggcgatcgccgggaccgccgccgcccttgcccgcctgcctgacggtttcgcgccgaaaagctttagtaaggggctgcgcgccagccgccgttggcaggtgccgggggcacgcgaggaagcgcagcgcggatttccgcatgttaccgccctggcgctgccgcaactgcaacaaagccgggcgcgaggcgccagcgagcagcaggcgcgccttgatgcgctgatggccatcatgacctcgctaagcgatacctgcgtgctgtcgcgcgccggcatgaacggcctgcacgccatgcagcaaggcgcccgcgaggttctggcggcgggcggttgcgccagcgtcgccggtcgcgccgcgctgacgcgccttgatgcgcagatgctggcgcaaaacgcctcgccgggtggcgcggccgatctccttgccgccaccctgtttctcgaccgggtttccggctaa

SEQ ID NO: 91237 - DNA, 300 bp, Enterobacter aerogenes
atggaacagattacattgtcatttcctgccaaccgcgccctcagcggcaaagcattggcaggagtcgtaggttcaggcgatatggaagtgctttataccgccgcacagggcgccacactcaacgtacagatcaccacctcagtggataacagccaggcgcgctggcaggcgctgttcgacaggctgaacctgatcaacggtctgcccgccgggcagttgattatccacgacttcggcgccacgccgggcgtcgctcgtattcgtattgaacaagtatttgaggaggccgctcatgcgtaa

SEQ ID NO: 91238 - DNA, 834 bp, Enterobacter aerogenes
atgcgtaacgatcgcagctttatcgaactgcgcgctcgcgaacgcgcccacgccctgctggacgacggcagctaccgcgaactgctggatccgtttgaaggcattatgtcgccgtggctcggcgcgcagggcatcgtcccacagtccgacgacggtatggtggtcgccaaaggcacgatcaacggccaacctgcggtggtgattgccatcgaaggcaccttccagggcggcagtatgggcgaagtctccggcgccaaaatggccgccgcgctggagctggcggcggaagataaccgcaacggtatcccgacccaggcggtgctgtgcctcgaaaccggcggcgtacgtctgcaggaggccaacctcggtctggccgccatcgccgatattcatgccgcgattgtcgacctgcgccgctacaccccggtggtcggaattattaccggtaccgtcggctgcttcggcggtatgtccatcgccgcggcgctgtgcagctaccttatcgtcacccgtgaagcccgtctcggcctcaacggcccgcaggttatcgagcaggaagccggcattgaagagtacgactcccgcaaccgtccgtttatctggagcatgaccggcggcgaaattcgcgccgccagcgggctggtcgacgcgctggttaacgatggcgttaacgccgttaaaaccgcaatgaacgaggcgatcgccaaaggcgtaccggcacagcaccgcagcgacaactatgacgattatctgcgtcgcttgagccaattcgatacccgccagcaggcggataccgcgcagattaaacagctttttgcccgggaggataaataa

SEQ ID NO: 91239 - DNA, 801 bp, Enterobacter aerogenes
atgagtcagttcccaaaccgcgccgcgctgtggctgaataaactggcgcccgacgcgccgctgatgagtggtctgtgcccttcggtgcaggtcgcagatggccagattgatggcgaaaacgtccgctttatcgccgtggtgcctgacgctaacaaccactacccgcgcgccgccggcggcgaagtcggcctgctggaaggctggacgctggcgaaagtggtcaacgaaaccatcgccgccgacgccgatcggcctgtcaaacggccgatcgtcgcggtaattgatgtcccgagccaggcctatggccgccgcgaagaagcctttggcatccaccaggccctggccggggcggcaggcgcctacgccaaagcccgtcttgccggccacccggtgattggcctgattgtcggaaaagcgatgtccggggcgtttttggcccacggctatcaggccaaccgcctgatcgcctttaacgatagcggcgtgctggttcacgcgatgggtaaagaatcggcagcgcgcattacgctgcgtaccgtagaggcgctggagaaactggcggcgacgatcccgccgatggcctacgacgtcagcaactacgctacgctcggcctgctctccgccctgctcgatatcaaccatccggatgcgccagacgaaggcgatctgtcactggtcagccgtaccctgcgcgacgccatcgctgacgcgcgcaccgatacctcactgaagtgccgtctgggcgcggaaaaccgccgcagctcgcaactggttcgcgatcgcatgcgcgccagctggtaa

SEQ ID NO: 91240 - DNA, 960 bp, Enterobacter aerogenes
atgacttatgtgattattcatgctcttgccccgattttcgtcattatgctgctgggcttctgggccggtaaggccgggatggtagataacaaaaacgtctcgctgcttaatatttttgtaatggattttgccttacccgccacgctgtttagcgcgacggtacaaacgccgtgggccggtatcgtcgcccagtcgccgctggtgctggtgctgaccggggcgatgtggatcacctatgccgcgatctacttcctcgccaccagcgtgttcaaacgcacgccgcaggatgccgcggtgctgaccctcaccgtcgccctgccaaactatgccgcgttaggtctgccgatcctcggcagcgtgctgggtgaaggcgcgtcaacctcgctgtcggtggcggtctctatcgcctgcggctcggtactgatgaccccgttctgcctgctgattctggagcgtgaaaaagcccgcgccgcgggtgaaaacagcggttctacgctggcgatgctgccggtgctgatgtggcgttcagtgaaaaaaccgatcgtctggggcccgctgcttggggtggtgctttccgcgatcggcattaaaatgccggacctgctgctggcgtcaatcaaaccgctgggcctggccgccaccgccgccgcgctgttcctcaccggggtgatcctgtcggcacgtaaactgcagctcaatgcgctgatcgctacatcaaccatcgtaaaactgctggtgcagccgtttattgcctggggtctggtgatgttacttggtctgcacggttctatcgccattaccgcgatcctgatgattgcgctggccgccggcttcttcggcgtggtcttcggcaaccgcttcggcgtgcagtctccggatgctgaagccgtgctgctgttaagctcggttctgtgtatcctgtcgctaccgctgtttatcgctttgacttcaggactgtaa

SEQ ID NO: 91241 - DNA, 618 bp, Enterobacter aerogenes
atgtcatcaacgccgcgtccccacgatttagtttggttaaaccacgccagcgccctggaagacattgccgagccatgggtggctcaacagtggcgagccgcgctgccggtggtggtgaggcgcgacgttgacggccaggcccgcatcccggttggggtgcggggcatgaagcgcgaacagcgcgccgccggctgggttcagccgcgcaatatcgtgcgcagcgtcaccccggagatgcttgtcgagcgcgaagcattaatctgctcaccctttgtctcgcagccgccggttcaggcggctatcgccctcaccttacaccgctggccctggggctggggcgtcaccggcagtaccggctacgcgctggcaaccgaaatcccggtgctgcatgcggcaagcgatctggatctgctgatccgcgcgccgcagccgctggaccgcgaggcattgctggaatggcaggcccgggtggcccaactaccgtgccgcgccgatacccagatagaaacaccgtacggcgccttcgcccttaatgagtggctgcgcgatggccgcgcgctgctgaaaacatcccgcggcgcgcgcttaaccgcgacgccgtggcacagggaggaatga

SEQ ID NO: 91242 - DNA, 903 bp, Enterobacter aerogenes
atgaagattatatttacttttcccggtcagggcggccagcgccccgcaatgctggcggcaatccccgatcgcgaggctatcctcacccaggcgcgcgccgtgctgggggatgaagtcgatactctcgatagcgccgacgcgctaaagcatacccgtgcagtacaactctgtctgctgatcgccggggtagcctgggcgcgcgaactacagcgccagggcgtggatccgcagatggtcagcgggctctctatcggcgcgtttccggcagcggtgattgccggcgcgctcgatttcgccagcgcgctgcggctggtggcgctacgcggcgatttaatggagcgggcttatcccgaaggttacgggctgacggcgattatggggctgacccgcccgcgggttgaggcgctgatgcagggccacgaggtttatctcgccaacctgaacgccgaaacgcaaatcgtgatcgccgggcgcgatgaagccatggccgaggtggcgcagctggcgctgcaggctggcgccagtaaagcccaacggctggcggtcagcgtgccgtcgcactgcgcgctgttggataaacctgccgcagccctggcaaaagcctttgccgacgtcaccttaacgcgccctcagcgcgcctatttaagcggctcgacggcgcgcgtgctgtgggatccgcagcggatcgccgacgatctggcaatgaacatggcgcgcaccgtgcattggcaggaggcgatgatcgccgctgatgaacgcgacgcaaggctggcaatcgagatgccgcccggcggcgtgctcacctgcctgacccgccaggcgggctggcgcggcgagacaatttcgctggagcgcagcggcgtagacgtcgcccgccatctggcgcagcggcttagcgattaa

SEQ ID NO: 91243 - DNA, 927 bp, Enterobacter aerogenes
atgaaagacgatatcaaccaggagatcaccttccgcaagctatcggtctttatgatgtttatggcgaagggcaatatcgccagaaccgccgaagccatgaagctcagcagcgttagcgttcaccgcgcgctgcatacgctcgaagagggagtcggctgcccgctgtttgttcacaaagggcgcaacctgctgccgctgcaggcggcgtggacgctgctcgagtactgccaggatgtgatgagtctgatgagccgcgggcttgaggcgacgcgtaaagtcgccggcgtcggtcagggacggttgcgcatcggtaccctctattctctgacgctggaaaccgttccgcgcatcatcatggggatgaagctgcgtcgcccggagcttgaactggatctgacgatgggctccaatcagatgctgctggatatgctggaagacgatgcccttgacgctatcttaatcgccaccaatgaaggcgaatacaataattcggctttcgacgtggtgccgctatttgaagatgatatcttcctcgccgcgccggcgacggaacagctcgataccactcagctcgccgacctgcgcgattacgccgatcgtaaatttgtctcgctggcggaagggtttgcgacgtatgccggatttcaggaggcctttcatgtagccggttttgagccggaaatcgtgaccagggtgaatgatatcttttcgatgataagcctggtgcaggcaggcgtcgggtttgcgctgctgccggggcgcatgaagaaggtttacgaaaacgatgtgcagctgttaaagctggcggaaccctatcagatgcgccagctgatctctatcgtctattcacaccatcgcgagcgcgatgccgacctgctggcgttggcggcggaagggcgcatgtacgcccgcagtattaatcgctaa

SEQ ID NO: 91244 - DNA, 1698 bp, Enterobacter aerogenes
atgacggctcttattacacttttgctacgcgatatttctattatgcctgcaattaaaaaaacgattatatctatgaccgcattagcgatgttcgtcagtacggcgacctacgcaaatggcgatacctcgaaaaaaactgactttctgctgatcggcggcggcatcatgagcgcctcgctgggcacctggctgcaggagttgcagccggagtggaaacaggtgatggtggagaaactcgacggcgtcgcgctggagtcctccaacggctggaataacgccggtaccggtcactcggcgaatatggaactgaactacacgccgcagcgtgcagacggttctattgatgtcagcaaagcgctggatatcaacgaacagtttatgatttcgcgccagttctggtcggcgcaggtcaaacgcggtattttgcacgacccgcactcgtttattaattccacgccgcatatgagtttcgtgtggggcgataatgtggattatctgcaaaagcgttataacgcgctgcagcagaccaccttattccagggaatgaaattctccaccgatcacgcgcaaattaaacagtgggcgccgttggtgatggaaggacgcgatccgcagcaaaaagtggccgcgacctggacgccggtcggtaccgatgtgaactacggtgaaattacccgtcagctgatcggtagcctgaaaaagagcagcaacttctcgctgcagacctcttctgaagtcaccgattttaaacgcaatgccgacaactcctggcacgtgacgattaagaacgtgcagagcggtgaagagcaggctatcgacgccaaatatgtcttcatcggcgccggcggcggcgcgttgaagctgctgcagaaaaccggtattccggaagcggacaactatgcgggcttcccggtaggcggctcattcctgatgaccgagaacccggagctgactaaactgcaccagcagaaagtttatggtcaggcttcagttggcgcgccgccgatgtcggtaccgcacctggatgctcgttacctcgatggtaagcgcgtggtgctgttcgggccatttgccaccttctccactaagttcctgaaaaacggttcgttcttcgatctgctgagcacgaccaccaccagcaacgtgctgccgatgactcacgttggcctcgataacttcgatctggtgaagtacctggttagccaggttatgctcagcgatgatgaccgctttgcggcgctgaaagagtactacccgaacgcgcgtaaagaagactggaaactgattcaggccggtcagcgcgtgcagatcatcaaaaaagacgcggagaagggcggcgtgctgaagctcggtaccgaagtggtggtcgatcagcagaaaacgatttctgcgctgctcggcgcatcgccaggtgcttccaccgccgcgccgatcaccctgaacgttctcaagcagatgttcccgcagcagtttaactcgccggaatggcagagccgcattcgcgctatcgtaccgagctacggcgagaagttaaacggcaacgtggccctgacccagcaggtttgggatgacaccgccgcggcgctgcaactgaccaaacctccggtcattcagatgccagagaaggcgccgaccgcgaccgccaaaccggcagagacgccgcgcgaagcctcgccgcagcacgatatggcgctgtaa

SEQ ID NO: 91245 - DNA, 921 bp, Enterobacter aerogenes
atgagcagtaagccaaccgcatcaatgctggaacgacgccacccgcaaacgcgccatatcgatacgctcgccaccctcgatatgctgaccctgctgcagcaggataacaaacagatagccgttgccatcgatgcctgcctgccgcagattacccggctggtggataacgccgcggcgaccctgagccggggaggacggctggtgatcgttggcgccggggcatccgggcaggcggcgttgcaaacggttaatgactattcccctgaagccaatcactcactggtggcgatgatcgccggtggcgaagggagcgcgctgcaggccgccgagcgggcggctaacgattatgacgcgggcttacgggatatgcagctattgtccctgagtgctaacgatatgctgctggcgctcaccgtcagcggcaaaacgccgtgggtgtggggagccatgcgtcacgcctggtcgctggggacgccgattgcgatcctgacgcagcagcctgatagcgaagccgcgcagctggcggatattatgattgcgccgcagaccgggccggaagcggtggcgggttatggcaatccgaaagcgcaaatggcgcagcggcagatcctcaccctgttaaccaccggccttgcggtacgcagcggcaaagtgttcggcaacctgcgcgttgatctacaggcaaccagcccgcgctgggaggagcggcaaatcgccatggtgatggccgccgcagagtgtacgcgcgcgcaagctaaagccgcgttggccagttgcaatcagcattgtcggacggcgattctgatgctaatgacggggctcgatgcctggcaggcgcgggatctgctcagcgaaaacaacaaccatttgcgtgtcgccctggctgaagcgcaagagaaaacgctcagtaacgttaattaa

SEQ ID NO: 91246 - DNA, 1617 bp, Enterobacter aerogenes
atgaaggaagccgagctacagccgcccgcccgcaagcgcgcccgcagcctgaaattaagtaccgccgtcacgctgatgattggcagcgttatcggcgcggtgctgctgctggtctacgcgctatggtttatgcaaatcagtaacgccactcgcgacggcttaaaagagacggcgctggcggtggcgcgcaccatggccgatatgccgcaggtgaagcgcggtctcggcgagccgccgcagagcaatattattcagccgctggcgcagtccattacccggcgtaacgacctgctttacgcgattgtgaccgacatgcgcggcattcgctattcgcatccggatagcgccatcatcggtaaaccctttatcggcgaggatatccgcccgaccctcgccgggcgggaaaacgtggcgattaaccacggcgtcctggcgccggcgctgcgcgtgtttaccccggtattcaatgaacagcatcagcagataggcgtggtagtggtaggtatttcgctgagtaaagtcgacgaacagatcgccaatagccgctgggacgttctgctgaccattctgttcagcgcgctggtctgcgctatcggcacctggagcctggtgcgcggcttaaaacgtattctgctggggctggagccgcaggatatctccacccagttccagcagcgacaagcgatgctgcactcgctgaaagaaggcgtgatcgccgtggatagcagcggccaggtcacgctgattaacccggccgcccgcggcatgttacttagcgggccggataaaagcatcgatcgcaccccgctgcttgcggacctgcaggaagttctgcgcagcggcgagcctatctatgaccgagcgctcggctgtaatggcttattgctgatcagcaataccgtcccggtgcgcagccagaacgccatcgtcggcgcgatcagcaccttccgcgataagaccgagatgagtcaactggtgcagcggctggacggcatgatgagctacgtcgatgccctgcgcaccacttcgcacgagtttatgaacaagctgcacgtgatcctcggcctgctgaatatgaaaagctatgacaagctggaagaatatgtgctgcaaaccgcccatgcctatcaggccgatatcggtgaaattcagcaccggataaaatcgccggtggtcgccggcttcctgattggtaaaatccagcgcgccaaagagcgaggcttcacgttgaacctcgccgaagagagcctggtgccggattgccccaatgaaaaacaggtcaccgtactggtgacggtgttaggcaatctgattgaaaatgcgctggacgcgatgagcggccaggaggaaggcgaagtgagcctgctcttgcactatcaggatggctggctaagcggtgaagtgagcgacgatggcccggggatcccggcggccaatatcgacgccatctttaataagggcttctccaccaaaggcgaaaatcgcggcgtcggcctgtttctcgccaaccagcagctccacgaactcggcggcacgttatccgtcgagtccgagcctggcgtatttacccaattttttgttcacctgccctgggatagtaaaaggaaaaaagcgtga

SEQ ID NO: 91247 - DNA, 720 bp, Enterobacter aerogenes
gtgataaatgtattaattgttgacgacgatgcgatggttgccgagctgaaccgcctgtacgtggcgcgcatccccggtttcagctgctgcggcaccgcgtcgacgctcggcaaagcccaggagatgattaacgacccgcagatggcgatcgatttggtgctgctggacgtttacatgcagcaggatagcggactcgatctgctgccgaccattcgcgccagcggccgcgccatcgacgtgattatgattacgtccgccgccgatgccgccaccgttcaaaccgctatgcactatggcgtggtggattatctgattaagcccttccagttcccgcgctttgaagaagcgctgaccgcatggcgtgaaaaacgcaaactgatgaccggccagccctattacgagcaggcggatgtcgatcgcctgttgcacggcggcacgccggaagcggctgacgcgcgtaagctaccgaaaggcttaacggcgcaaactctacgcacgctgtgccagtggattgatagccaccctgatgtggaattctctaccgatgagctggcggcggcggtgaatatctcgcgcgtctcatgccgcaagtatctgatctggctcgcgcagatcaatattctctataccaccatccattacggcgcgaccggccgaccggtgtatcgctatcggctggtcgccgagcagtacggcctgctcaagcagtacagtcagtaa

SEQ ID NO: 91248 - DNA, 951 bp, Enterobacter aerogenes
atgtccgataaccgcgtctatagctactccgccgtgttgatgggatcgcccatcctgctcaaactctattcccacgatgaggcgctggcctcccgcgtatttcagttaattaaacgctacgaagatctgctcaccgtgaaccgggcgcagtcgcaggtgatggatatcaaccatgccgccgggcgtcatcccgttaccgttagccgtccggtgtaccaactgattaagtgcgctaaagccgccagtatggtgcgcgacagcgcctttaatctggctatcggcccgctggttaaactgtggcgcattggctttcaggggcatagcgtgccgtcggcggcggatatagcggcccggctgccattaacccgcccgcaggatgtcattctcgatgacgaaaagcagagcgtgtggctggcgcaggccggaatggaaatcgaccttggcgcaatcgctaaaggatatatcgctgaccaggtacgcgattacctgggccagcaggggatcgaacaggcgctgattaatctcggcggcaatgtacatacgttaggggaatgggcgattgggctgaaaaaaccctttgccgcggcgcaggaacttattggctctattgccgttagcgggcagtcggttgtcacttcaggcacctatgaacgctatttcgagcaggatggcaaacgctggcaccatatcctcgatccgcgcagcggctatccgctggataacgaactcgatagcgtaacggtcatttccgcggattcactggacggcgatatctggaccacgctgctgtatggccttggcgtggagaagggctgcgcggcgttgcgccagcgggacgacattgaagcgatttttgtcaccaaaaaccgcgacgtgattctgtcgtcaccgcagcgcatccgctttcaactgctcgacagcggctaccagattactgactgtactgcttga

SEQ ID NO: 91249 - DNA, 2778 bp, Enterobacter aerogenes
atgaccagtaacgaacgaattctgcagccatttactttaccgaatgggactgaactgaaaaaccgtttgctaatggcgccaatgaccacctgcaccggttatttcgatggtaccgtcaccagcgagctcgttgaatactatcgcgcccgcgccggcagcatcgggactatcatcgttgaatgctgctttattgatgattatggtctggccttcccgggcgctattggcattgataacgatgaaaaaatcgccgggctggcgaaaatcgccgaagcgataaaagcggaaggctcgaaagcgattctgcagatttaccacggcggccgcatggttgacccacagttgattggtggtcgccagccggtggcgccgagcgccattgccgcgccgcgcgacggcgccgccatgccgcgcgccctcagtggtgaagaagtcgaaggcatgattgccaaatttggcgacggcgtacgccgcgccattctcgccggtttcgacggcgtcgaaatccatggcgccaacacctatcttattcaacagttctattcgccgaactccaaccagcgtgacgatgagtggggcggcagccgcgacaaccgcgccagattcccactggcggtgctggacatcacgcataaaatggcccgccagtacgctgacgatgcctttattatcggctatcgcttctcgccggaagagatggaagtcccggggatccgcttcgatgacaccatgtatctgctggagaaactggccgcccgcggcgtcgattacctgcacttctcggttggcgcgacgctgcgcccgtctatcgtagataccagcgatccgacgccgctgattgaaaaatactgcgccatgcgttctgaaacgctggcgcaggtgccggtgatgggcgtcggcggggtggttaacgccgctgatgccgaacagggcctcgatcacggttatgatctgatggccgtcggccgcgcctgcatcgcctatccggactgggcttcacgtatcgccgccggcgaagagctggaactctttatcgacagcacccagcgcgaggcgctgcatattccggaaccgctgtggcgtttctcgctggtcgaagcgatgatccgcgacatgagcatgggcgacgcgaaatttaaaccggggatgtttgtcgaaaccgttcaggacgatgccaacgaactggtcattaacgtcagcctcgaaaacgatcgcattgcggatattgagctggccgcaagcccggtgcagagcgttgaatttaccaccagcttcgaagagatccgcgaacgtattctgaccgccaacacgccgcacgtcgacgctatctccggcgcgaccagccagagcgaagcggtgaaaaaagcggtgtccaaagcgatgctgaaatccagcaaagcgctggcagcggaagagggcggcaacgatgccgcgccgaaaagctatgacgttgtggtggtggggagcggcggcgccggtctggcggcggcgattcaggcccacgacgaaggcgccagcgtgctgatcgtcgaaaaaatgccgactattggcggcaacaccatcaaagcttccgccgggatgaacgccgcagaaacccgcttccagcgcgtcaaaggtattcaggacagtaaagagttgttctatcaggaaaccctgaagggcggccacaacaaaaacaacccgcagctgctgcgccgtttcgttgaaaacgcgccgcaagccattgaatggctggcggaccgtgggattatgcttaacgatatcaccaccaccggcgggatgagtatcgaccgtacccaccgtccgcgcgacggatcggcggttggcggctacctgattagcggtctggtgcgtaatatcaccaaacgcggtattgatgtgctgctggatacctcggtagaagagatcctgatgcgccacgacgaagtgagcggcgtgcgtcttatcaacgatgaacaagagatcatcgacgtgcagaccaaaagtatcatcgtggcgaccggcggcttcagcgccaacagcgcgatggtggtgaaatatcgtcctgacctcgaaggcttcgtgaccaccaaccataaaggggcgaccggtagcggtatcgcgctgctggagcgcattggcgccggcaccgtggacatgggcgaaattcaaattcacccgaccgtcgagcagcagacctcgtacctgatttccgaatcgattcgcggcggcggcgctattctcgttaaccagcaggggaaccgcttcttcaacgaaatggagacccgcgataaagtctctgcggcgattatcgcgctgccggaacactatgcttacatcgtcttcgacgagcatgtgcgggcgaaaaacaaagccgccgacgagtatatcgccaaaggcttcgtcaccagcgccagctcgccgcgtgaactggcggagaaactgggaatggattaccatgcgttcctcgctacgctggaatgctacaacggcgcggtggaaaaacagcacgatgaagcgtttggccgcacaaccgcgctgcgcgcgccgattaacgaaggcccgttccacgccattcgtattgccccaggggtgcaccacactatgggcggcgtgaccattaataccgatggcgaagtgctgaatgtggcgcagcagccgattcgcggcgcctacgccgcgggtgaagtggttggtggtatccatggcggtaaccgcatcggcggtaacgcggtcgcggatatcatcatcttcggtaccctcgcgggccatcaggcggcgaaacgtgccagaggataa

SEQ ID NO: 91250 - DNA, 1506 bp, Enterobacter aerogenes
atgaaagagaaaaagacaaccataccgcctgccggtgccgcgtctaacgcggcgtataaacgtctgatcatgatggcgttgcccattatcgtcgccgtactgctgttgttcgtcccggtgcctgacggcttaccgcctttcgcctggcactattttgctatcttcgtcggcgtcatcgtcggccttatcttcgaaccgctgccgggcgccgttatcggtatcaccggggtggtggtgattgctttatgtagccagtggctgctgttcagcccggaacagatggcggcgccaagctttaagctggccggcgcgtcatttaaatgggcggtcagcggctttggcaactctaccgtgtggctcatcttcggcgcgttcatgttcgccgcgggttatgacaaaacccagttcggccgccgtctggcgctgattctggtaaaatatcttggccgccgcagcctgacgctgggctacgccattaccttcgctgacctgctgctggcgccgtttaccccgtccaataccgcacgtagcggcgggaccatctacccgattattgctaacctgccgccgctgtacggttctaaacctaacgatccgagcgctcgccgtattggttcttatctgatgtgggtagccatcaccgccgcctgtatcaccagttccatgttcctgtcggcgctggcgccgaacctgctggcgctggcgctggtaaaaagcatcgtcggtatcaacatctcctggggtacctggtttatcgccttcctgccgctcggtatcctgctgatcctggccatgccgctgctggcgtactggttctacccgccagaagtaaaaatcaataacgaagtgccgctgtgggccgctcgtgaactggaaaaactgggcaaactgtcgcgcaatgaaatcctgctgctggtgtttgtttgcttcgcgctgatgatgtggatcttcgccgccgactggattgaaccggcgctggctgccctgctggttatcgtgctgatgctgtggaccggcgtgctgtcctggagcgatatcaccaacaacaaagcggcgtggaatacctttgtctggttcgccacgctggtcgcgctggctgacggtctctcttccactggcttcatcgcctggttgggtaaagaaggcggcgcgctgatgagcggtatttctccgggcgttgcgaccatcgtcctgctgctagcgttctatctgctgcactacctgttcgccagtaccaccgcgcacactaccgcgctgctgccggccatgctgaccatcgcttcgactatcccgggcatgaatatggaagtcttcgtcctgctgatggtgacctcgctgggcgtgatgggcatcatcaccccgtacggtaccggtccgagcccgatttactacggcagcggctacctgccaaccaaagactactggcgcctcggcaccatcttcggcgccatcttcctggccgccctgctgctgattggctatccgtggatgtccatgatgttctga

SEQ ID NO: 91251 - DNA, 1653 bp, Enterobacter aerogenes
atgtcgacgaaaccctttgtttatcaagacccgttcccgatggcgcatgacgataccgaatactatttgctcagcaaagagcacgtctccgtcgccgaattcgcgggccaggaagtattgaaggttgaaccgcaggcgttaactctgctggcgcagcaggccttccacgatgccgcttttatgctgcgcgtctctcatcagcagcaggtcgcggccattctgctcgacccgcaggccagcgaaaacgacaaatacgtcgcactgcagttcctgcgtaattccgaaatcgccgccaaaggtgtgctgcccacctgccaggataccggcaccgccatcatcatgggtaaaaaaggccagcgcgtttggaccggcggcggcgatgaagccgcgctggcgcagggcgtctataacacctataccgaagacaacctgcgttactcgcagaatgcgccgctggatatgtataaagaggtcaacaccggcaccaacctgccggcgcagatcgatctctacagcgtcgacggcgacgaatataaattcctgtgcatggcgaaaggcggcggttccgccaacaaaacctatctgtaccaggaaaccaaagcgttaatcaccccggcgaagctgaaaaactacctcgtcgagaagatgcgtaccctcggtaccgcggcctgcccgccctaccacatcgcctttgtgattggcggcacctcagcggaagcgacgctgaagaccgttaagctggcttccgcccgctactatgacgacctgccgaccgcgggtaacgagcacggtcaggcgttccgcgatgtgcagctggagcaagagctgctgcaggaagcgcaaaatctcggcctcggcgcgcagtttggcgggaaatattttgcccacgatatccgcgttatccgtctgccgcgccacggcgcgtcctgtcctatcggtatgggcgtctcctgctccgccgaccgcaacatcaaagctaaaatcaaccgcgacggcatctggatcgaaaaactggagagcaacccggggaaatatatccctgaacacctgcgccaacagggtgaaggcaatgtggttagcatcaacctgaatcagtcgatgagcgagatcctgacgcagctgtcggcgcacccggtctcaacgcgtctgagccttaacggcaccattatcgtggcccgcgacattgcccacgctaagctgaaagagcttatcgataacggcgaagcgctgccgcagtacgtgaaagatcacccgatctactacgccggcccggcaaaaacacccgccggttacgcctcaggttctctcggcccgaccaccgcaggacgaatggattcctacgtcgatctgctgcaatcgcacggcgccagcatggtgatgctggccaaaggtaaccgcagccagcaggtgactgacgcctgccataaacacggcggtttctacctcggcagcattggcggcccggcggcagtactcgcccagcagagcattaagagcctcgagtgcgtggcttatccggagctgggaatggaagctatctggaaaatcgaagtggaagatttcccggcctttatcctcgttgatgataaaggtaacgacttcttccagcagatccaaaatcagcagtgcgccggttgtaaacaacacggctaa

SEQ ID NO: 91252 - DNA, 1617 bp, Enterobacter aerogenes
atgaacaggatccaggcgttgttaacgacgtgttttctgctatggttggccttcccgctttccgcggcagaacctcgtcagcagcccaccgctcgcgagcaggcgcgaaccgtcgctattttccatcaaccgatcgtcatgctacaggcgacattcggccagaccacgccggaagaacgggttctgcgcatccgcaatacgctacgcgcctttaccgaggccgatatcagccagccgctgcaggtggtgccagtcacccgctacaaccagccggggcggctgtttctgatgaatggcaaacctattatgttgctaagccaggccgacctcgatgaaggcgacgatcttaccctcgatcaggcggcgcagcgcgttcttgcccgtatggaagcgcagcggacgtcgctacgcgaacagtacaatacccgctatctgctgctggcggcgctaaaatccgccgccggcgcgttgctcctcgccctggcctgctatctcgctttccgttcgtggcggcgagtgaggcgctttttccatctgcggatcctcgaaaagcgcagcctgatcccgcataactggcggcgttttctcggcaacattgaaagccggttatacgcgctgctggtcatactgcttggggtactggcgggttatgtctggctgagttgggtattcagcctgtttccgtggacccgagtatggggagagtcgctcggtgagtggtcggtaggggtgattcgcgatatttcgctgtctatcgtgtcggcgctgccgggactgatgatcgtactgcttatctttctgattacgtggtttatcatccgcctgctgaaggtggtgttggatcaggtcgccgccggacgtctgcagatccccggtctgcatccggaaaccgtcggcgccacgcgaaagcttatcgccgtggttatctggctctttgcgctctccgccgcctatcctttcttgcctggggcaaactctctggccttcaagggaattagcgtgttcttcggcctgatgttgacgctgggctcagcgggggtgatgaatcacgccatgagcggactggtgctgatttatacccgcgcgctgcataaaggcgactggatccgcatcgccgataacgaaggccaggtcagcgaaatcggcatgctggcgaccaaaatcctgacccgcgaaaactatattgtcaccctgccgaacgcggtggtggtcagcggtaaaatcaccaatctcagcgccagtgacccgcaacagggaatcaacctcaccaccggtgtgaccattggttacgacacgccgtggcggcaggtacaggcgatgctggaactggcggcccaccgcgcccagggagtggatcatcaggtggcgccggtggttcgcaaactgggattgcttgactggtatacgtcgtatgaactgcaggtgcggctgttaccggaaacgacgctgccggaggggcgcaacgcgctgcacagcagcattatcgatgtatttaacgaatttggcgtgcagattatgtcgcccaattttgtcatgcaaccgaaaagcgcggtggtggtcgccaaagaggattggtataccgccccggccgtcgcgccgcaggaaggcgacagataa

SEQ ID NO: 91253 - DNA, 390 bp, Enterobacter aerogenes
atggaagataaacaacgttatcagcagggaatggaggttcgccgcaaggtattaggcgatgctcacgttgaccgtacgctgcagaacctcacgccgctgaatgaggagtttcaggatttcatcacccgttacgcctggggagaaacctggacgcgtccggggctcgatcaccatacccgcagcatgatcactattgcgatgctgattgcgctcaaccgcgaggcggaacttaagatgcatctgcgcgccgcctttaataacggcgtgacccgtgatgagctgaaagagttgattatgcattcggcgctgtactgcggcttaccggcggcaaacgccacgttgcaccttgcgcagcaggtgtttgccgagatcgacgccgcgcaggcgtag

SEQ ID NO: 91254 - DNA, 768 bp, Enterobacter aerogenes
atgaatcttgattatcaactcgacgggccggaaggcgcgccggttatcgtgctgtcgaactcgcttggcaccacgcgcgccatgtggcagccgcaaatggaggccctgacggcgaattttcgcgtactgcgttatgacacccatggccatggtaaaacgacgaaaaacggcaaggtgaccctggcgcaactgggcgaagacgtacttgcgctgctcgatcaccttaatatcggtaaggcactgttttgcggtatttcgatgggcgggctgacgggattatggctggcgcgctttgcgccggaacgtttttacgcggtggcggtggctaataccgcagcgcggatcggcgatcagtcgggctggctttcccgcgcccgcgcggtgcgtcaggagggaatggatgtggttgccgcgggggcggcggaccgctggtttagtgataatttccgccagcgcgcgccggaggtggtcgaggcgttatgtcaccagttgacccatagcgacgctgaaggctacgccgcctgctgcgaagcgctggcggcggcagacctgcggggggaggtcgggcaaattgcgattccggtgctgattattgctggagaaagtgaccctgtcaccactgtcgccgacgctaactttctgcatcagcagattgccgattcccaggtggtggtgctgagcgcgtcgcatctgtcgaatatcgaagcgccagccgcctttaacgccgcgctgaacggctttttgctgggggagcaaaatggaagataa

SEQ ID NO: 91255 - DNA, 1353 bp, Enterobacter aerogenes
atgagtttgttgacgcccatgttgcgtagcagtccgctaaccgactggttcagcgatgcgcagcgggtacagggtatgctggatttcgaagccgcgctggcgcaggcgcaggccgactgcgggctggtgccgcaggcggcagtctcgccgatagtcaacgcctgccggcatgcgcttatcgatttcgacgcgcttggacaggctgcggccagcgccggcaatctggctattccgctggtcaaacagctgactgcgcgggtgaaagcgcaggatccggacgccgcgcgctatgtccattggggcgccaccagccaggatgctatcgataccggctttgttctgcaactgcggggcgcgctggcggcgacggatagcctgctacaaagcctgattgacgcgttcgccgaacaggcgcagcgctatcaacatacggtgatgccggggcgcacctggatgcagcatgcgctaccggtcacctttggccttaaactggcggggacgctggatacgctgctgcgctggcaacagcggttgattgagatgcgcccacgggtgctggcgctgcagtttggcggcgcggcgggcacgcttgattcattgaaacagcaggcgtcacaggtggcgcaggcgttggcgcaaaccctcgacctgcagttgccggatacgccatggcatagccagcgcgaccgtttcctcgaagtcggcgcctggttcgccggcgtttgcggcactctgggaaaattcgccaatgatttttcgctgctgatgcaaaccgaggttgcggaagtcggcgagccgctggcggaagggcgcgggggctcctcgaccatgccgcacaaacgtaacccggtctcctgcgcggcgattctaaccgcggcgcagcgcacgccggggctggtcgccaccctttacgccggtcaaatccaacagcatgagcgcgcgctcggcggctggcaggccgaatgggaaacgctaccggaactgatcatgctggtgggcggggcgctggcgcaaactgacatgctggtgcgcgagatgcaggttttcgtgcataagatgcgtgccgaccttgatatcactcacgggctgattatggcggaagcggtgaccctggcgctggcggagtttattggcaaagccgaggcgcaccatcgtgtagaagcgctgtgtcgtcaggcgttggatcgcaatggcttgcttgtcgatctgctggcggccgacccgctggtcagtcagtatctctcccgcgaacgtttaaacgcgctactggatccggcaacggctaccggtagcgccgaacgctttgtgcgccaggtgttggcgcgttatcaggagcaacatcatgaatcttga

SEQ ID NO: 91256 - DNA, 1203 bp, Enterobacter aerogenes
atgaatcaggcatttatctgtgatgcggtgcgtacgccgtttggccgttttggcggcgcattatccagtatgcgcgccgacgatttggcggcgctgccgctgaaagcgctgctggagcgtaacccgggactcgatccggcgctgatcgacgatgtgatctacggctgcgccaaccaggccggagaagataaccgtaacgtggcgcgcatggcgctgttgctggccgggctgccgcagagcgttcccggcagcacgattaaccgcctctgtggttccagtctcgatgcgatcggcgtcgcggcgcgggcgattaaaagcggcgaaactcaactgatgatcgccggtggggtggagagtatgtcgcgcgcgccgtttgtgatgggcaaagccgagagcgcctttagccgctcgatgcagatggaagataccaccatcggctggcgctttattaacccgcagatgaaagcgctgtacggcgtgcactcgatgccggaaactgcggaaaacgtcgccgatgagtttgccatttctcgcgccgaccaggacgcttttgcgctacgcagtcagttacgtaccgcggcggcgcaggaagcggggcgtttcgccgatgaactgatcgccgtatcggtgccgcagcgcaaaggtgagccgctgcgtttcagccgcgatgaacatccgcgcagcacctcgctggaggcgctggctaaactgcgcggcgtggtccgcgccgacggcagcgttaccgccggtaacgcctccggcgtcaacgacggcgcctgtgcgctgttgttggccagtgaacaggcgatgtcggcgaatgatttacagccgctggcgcgggttgtcggcgtggcgacggcaggggtggcgccgcggattatgggcttcggcccggcaccggcggtgcgcaaagtgttagcgcaaaccgggctgacgctggcgcagatggatgtcatcgaactgaatgaggcttttgccgcgcaggcgctggcggttacccgtgatttaggcctgccggatgatgctgcccacgttaaccccaacggcggggccattgcgctgggtcatccgctgggggcttccggcggacgtctggcgatgaccgccgcttatcagttgaagcgtaccggcggccgctatgcgctgtgcaccatgtgtatcggcgtgggccaggggattgcgctgattattgaacgcgtttaa

SEQ ID NO: 91257 - DNA, 657 bp, Enterobacter aerogenes
atgcaaaaattgactcgtgacgaaatggcccagcgcgtcgcccgcgatattccagaaggcgcttacgtcaacctcggtattggcctgccgacccgtatcgccaactatctacctgccgataaagaggtgttcctgcacagtgaaaacgggctactgggaatggggccgaagccgcagcccggcgaagaggacccggaacttatcaacgcgggtaaagagtatgtcaccctgctgcagggcggctgttttttccaccatggcgactccttcgccatgatgcgcggcgggcatctcgatatctgcgtgctgggcgcctatcaggtttccgccagcggcgatctcgctaactggagcaccggcgcgccggattcgatcccggcggttggaggggcgatggatttggctatcggcgcccgccaggtgtttgtgatgatggaccatctgacccgcgatggcgaatgcaaactggtcgaacagtgcagctacccgctgaccggcgtcggttgcgtcagccgtatctataccgatctggcggtcatcgatattaccgaccgcggcccggtggtgcgcgaaatctttaatggcctctcctttgaagagctacagcgcatcactccggtggcgctgacttttgaacaactggcggaaagtgcgtaa

SEQ ID NO: 91258 - DNA, 687 bp, Enterobacter aerogenes
atgattgataaaagcgtgtcgacgctgagtgaggccattgccgggatccacgacggcgcgaccatcatgattggcgggtttggccccgccgggcagccgacgtacctgattgatgctctgattgaacagggcgcccgcgacctaaccattattaataacaacgcgggcaatggcgaagtggggctggcggcgctgctcaaagccggacgggtgcgcaaaatgatctgctcattcccgcgtcaggtggattcacaaattttcgatgacctctatcgccgcggcaaggttgagctggaactggtgccgcagggcaatctggcggcgcggatccaggccgctggcgcggggctcggcgcggtctttaccccaaccggctacggcacgccgctggcggaaggcaaagaaacccgggaaatagatggccgccattatgtgcttgagtatccgattaaagctgacttcgccttgattaaggcccaccagggagaccgctggggcaacctggtctaccgtaaagcggcgcgcaacttcggcccgatcatggcgaccgccgccaaaaccaccattgttgaagtctcgcagctggtcgcccttggcgaactcgacccggaaaacatcatcaccccggggattttcgtccagcgtgtattctcgctggaaaatctgtccgtcgcgcaaagcgcctga

SEQ ID NO: 91259 - DNA, 138 bp, Enterobacter aerogenes
atggacaagcatccagatgatgtagtggcgggcgacggcgatccgtttaagggcgacccgaactttatggcgtcgctggcgcgggggctggaagtgattcaggcttttaccccgcagcgcccggtgctgtcgatttag

SEQ ID NO: 91260 - DNA, 471 bp, Enterobacter aerogenes
atgctcaatgaatcctgctcaatcgccaccctcgatggcgacgatatcctgtatatcgcccgcgcctccagttcgcgaattatgacgatcgatcttgatatcggcagccgcctgccggcgtgggcgacctccatgggccgcgtgctgttaagccatcagccggaagaacggctgaacgacatgctgggccgggtgacgatgattcgctacaccccgcaaacggtagattcggtgaataagctgcgcgcggagctaaaacgcgtgcatcagcagggatatgcgttgaacgatcaggaactggaaatggggctgcgttcgctggcggtgccgctatataacccgcaaggacaggtggaagcggcgctaaacgtcggggttcacgcgggccagatgtcgacccgcgaaatgctggatcgggtgctgccggaattacaaaaagccgcccgcgagctaacgctgctgctgcgctag

SEQ ID NO: 91261 - DNA, 564 bp, Enterobacter aerogenes
atgaaccttgacgacaaatccctgtttcttgacgccatggaggatgtccagcctctgaaacgcaataatgacgtacactggcaccgtgagcgcaacgtgcgcgctccgcagcgtatcgataccctgcagctcgataattatctgaccaccggctacctcgatattgtgccgctcgccgtgccgctggagttcaaacgggaagggctgcaaagcggagtgctggaaaagctgcggcgcggaaaatacagccagcaggcaagcctgtcgctcctgcgccagccggtcgaacagtgtcggcaaatgctgttcgccttcgtgatacaggcgcaaaaagaggggctgcgtaatttacttatcatccacggcaaaggccgtgatgaccaggcccacgccaatattattcgcagctacctggcgcgctggctgccagagctgcccgaggtacaggcgttttgcgccgcgctaccgcaccacggcggcagcggcgcttgttacgtggcgctgcgtaaatccgaacaggctaagcaggagaactgggagctgcacgccaaacgcagccgctag

SEQ ID NO: 91262 - DNA, 909 bp, Enterobacter aerogenes
atgtcatttcagattaaatttcatcaaattcgcgctttcgttgaggttgcccgcgaggggagtattcgcggcgccagccgggcgctggcgctctcgcagcctgcgttgaccaaagcgattaaagagctggaagaagggctttccgcccaactgtttgtccgccgcagccagggggtggcgctgacggaaaacggcgaaagtttttatcaacatgcgagcctgatccttgaagagctgcgggcggcgcaggatgaactcctgcagcgtcagggggagcaggccgggcagattaatattggtctcggcgccagcgtcgcccgttcgctaatgccatcggtgatctgccgctttcatcagcagcatccgctggtgaaggtgcggatcatggaagggcaactcctggcgatgattaatgaactgcgtcagggtgagcttgatttcactatcaacacctactatcccggcccgtacgatcatgaattcagctttgaaaaactgtttgagaaaccgttcgcggtattcgcccgcgcagggcatccggcggcgcgcgccacttccctgactgaattgctcgatcaccactggacgatgccaacgccgcgcggtagctacttcaaacagttgcaggagatgtttaatcaggccgggctggcgcccaaggtcgatatcgtgtgtgaaaccttctcttcgtgcatcagtctggtggtgaagagcgatttcctcagcattctgccggtagagctcggaaacgatccgatgatggcggataaactggtgatgatcccgatacgtgaaacgttgcccagggcaacctactacctgatccagcggcgcgatacgcgaccaacgccgttaacggcttcgttaatcaccttgtttcgtcgtcaaagccgtcaattgtttccttaa

SEQ ID NO: 91263 - DNA, 1311 bp, Enterobacter aerogenes
atgccgcaacttcatgaattcatcagccaactggcgccggaaatgacgcaatggcgtcgtgattttcacctgcacgcggagtccggctggctggaatttcgcaccgccagcaaggttgccgagatcttagacggcctcggttatcaacttgcgctgggtcgcgacgttatcgatgccgacagccgaatggggctgcccgacgacgccaccctggcacaggcattccagcgagcccgcgaacagggagcgccggaacgttggctaacggcttttgaaggcggattcgccggcgtcgtcgccaccctggacaccggccgccccggcccgacgctggcgtttcgcgtcgatatggacgcgctcgatcttaacgaacaacacgacgattgccatcgcccgcatcgcgcgggtttcgcctcctgcaacgccgggatgatgcacgcctgcggccatgacggccataccgccattgggctgggtttagcgcatgtgctacagcagtatgccgatcggctcaacgggatcatcaagctgattttccagcctgccgaagaaggcacccgcggcgcgcgcgcgatggtggcggcaggcgtgctcgataacgtggactacttcaccgccattcatatcggcaccggcgtccccagcggcaccgtggtctgcggcggtgacaactttatggcgaccaccaaattcgacgtgcaattcgagggcgtcgccgctcacgccggcggcaaaccggaagatgggcgcaacgcgctactggccgccgcgcaggccgccctcgccctgcacgccatcgcgccgcacagcgccggcgcctcacgggttaacgtcggtgttatgcaggccggcaccgggcgcaacgtggtcccttcttccgcgctgataaaagtggaaacccgcggcgagacggaagctatcaaccagtatgtgtttgagcgggcgcaaaacgtgattgccggcgccgcagcgatgtatgaagcccgctatgaactacggctcatgggtgcggcgacctccagcgccccctctccggcgtgggtgcaatacctgcgtgagcaggcagcacaggtgccaggtgtgatagaggcggtggatcatattgctgcgccggcgggatccgaagatgccactttgatgatggcgcgggtacaggagcgcggcggactggcttcatacatgattttcggtactgaactgagcgccggacatcacaatgagaaatttgatttcgacgaaggggtcatgaccatcgcggtcgagacgctggcgcgcatcgcgctcaactttccctggcagcgaggtgtgtga

SEQ ID NO: 91264 - DNA, 1446 bp, Enterobacter aerogenes
atggaaaagatctatcaatttgttgatgacatcattgaatcgcgacgcgacgatttttgcgctattgccgatgatatctgggatcatccggaaacccgattccaggaattctggtccgccgcgcggttggccgacgcgctggaagcggaaggttttcaactaagccgtcacgctggtggaatccccaatgcgtttatcgccagctttggcgagggtaaaccagtcatcgccctgctcggcgagtttgatgcgctggcaggactcagccaacaggcgcacagtgctgaaccaacttacgcgacgccgggggaaaatggccacggctgtgggcataatctacttggcaccgcagcgttcgccgctgctgtcgctgcgaaacagtggctgcagcagcatggcggctcgggcaccctgcgcttttatggctgcccgggtgaagaaggcggctcgggtaaaacctttatggtgcgcgaggggctattcgatgatatcgacgccgccctcacctggcatccggaagcctgggccgggatgttcagcaccagcacgctggccaatattcaggcggcgtggcgctttaccggaaccgccgcccacgcggcaaactcaccgcatcttgggcgtagcgcgttggacgccgtcacgctgatgaccaccggcagtaacttcctcaatgagcatattatcgagaaagcgcgtgtgcactacgccattacggataccggcggcgtgtcgcccaacgtggtgcaggcgcaggctgaagtgctgtatttgattcgcgctccggaaatggccgacgtgcagcaaatctttgcccgtattgagaaaattgctcagggtgccgcgctgatgaccgaaaccagcgtcagctgtcgttttgaaaaagcctgttccagctatctccccaatcgcacgctggaagcggcaatgtatcaggccgtatgtcattacggtacgccgcaatggagtaacgaagagcgcgctttcgcagcggatattcgcgccacgctcggcgtgaacgatatacagaacagcctgaagaatattgccggcaccagcggtgaagaaggaaaagcgtttgcccgccgccatcacgacacggtgctgattgatgaagtcgcgccgtgggcggcaacggaaaacgtgctggcgggatctaccgacgtcggcgacgtgagctggaaagcgccggtggcccagtgttttagcccctgtttcgccatcggtacgccgctgcatagctggcaactggtgagccagggaagaacctccattgcccataaagggatgctgctggcgggtaagatactgggagcaacggcaattcgtttgttcagcgacaggccgttgcttgaagcaagccagcaggaactggctcaggtactggcggttagcccatatcagtgcccgatcccgcgtgacgtcgtaccatcaattttaaaataa

SEQ ID NO: 91265 - DNA, 1527 bp, Enterobacter aerogenes
atgagtatgtcatccataccgtcgcattcccccaccggtaagctgtatggctgggttgaaaaaataggtaataaggttccgcatccatttttgctgtttatctatctgatagtggcgctgatggccgctaccgccatcttgtcggcgctaaacgtcggcgtacagaaccccaccgacggttcgcgagtggtggtaaagaatctgctcagcgtggaagggctgcactggtttctgccaaacgtgattaaaaactttagcggcttcgcgccgctgggggcgattctggcgctggtgctcggcgccggttttgccgaacgcgtcggcctgctgccatcgctgatggtcaagatgtcatcgcacgttagcgcgcgttacgccagttatatggtgctatttatcgcctttttcagccatatctcttccgacgcggcgctggtcattatgccgccgctaggggcgttgatgtttctcgccgtcggtcgtcatccagtggcggggttactggcggcaatcgccggcgttggctgcggattcacggcaaatttactcattgtcaccaccgacgtattgctctccggtatcagtaccgaagcggcgaaaacgctcgatgcctcgctgcatgttagcgtcatcgacaactggtacttcatggctacctcagtcatcgtacttactctggtcggcggattgattaccgataaactggtcgagccgcggttaggaaagtggcagggtaagagcgatgaaaccctacagacgctgacggcggaacaacgcttcgggctgcgcattgccggtatcgcggcgctgttgtttgtggcggttatcgcactgatggtggtgccggacaacggcattctgcgcgatcccatcaagcataccgtgatgccctcgccctttattaaaggcatagtgccgctgattatcttttttttctttgtcgtatctttagcttacggcatcgccaccggcaaaattcgccgtcaggctgacctgccgcagttaatgatcgagccgatgaaggagatggccggatttatcgtgatggtcttcccgctggcccagtttgtcgccatgtttaactggagcaatatggggaaattcatggccgttggtctgaccaatgtgctggagagcgccgggatgaatggggtgccggcatttgtcggcctggcgctactgtcggcgtttttatgtatgtttatcgccagcggttcggctatctggtcgattctggcgcccatttttgtaccaatgtttatgctgctgggctttcacccggcgtttgcgcagatcctgttccgaatcgctgactcttccgtgctgccgctcgcgccggtatcgccgtttgtgccgctgtttctcggctttttacagcgctaccggcccgatgccagactgggcacctactattcgctggtattaccctacccactcattttcttagccgtctggctactgctgctggtgggctggtatcttgtcgggctgccgataggtcccggcatctatccgcgtttgccctaa

SEQ ID NO: 91266 - DNA, 516 bp, Enterobacter aerogenes
atgctgacgctactgcaagataaaatcgataccccgctggggccgttgtgggtcatttgcgatgaacaatttaacctgcgcgccgtggagtgggatcagcaccgtgaccgtatggagcaactgctcgacatccactaccgccatgagggttatgaacgtcttgatgcgcgcgatccgggcgggctgagcacgaagctgcggcaatacttcgacggcgatctcgcgattatcgataccctgccgaccgccaccggcgggacgccgtttcaacgtcaggtctggcaagcgctgcgcacgattccctgcgggcaagtcatgcactacggtcagttagccgaggctctcggccgcccaggcgcggcccgtgcggtcggcgcggcaaacggttccaatccggtcagcattgtggttccctgccatcgggtgattggccgtaacggcaccatgaccggctacgccgggggcgtacagcgcaaagagtggttattgcgccatgaaggctatttgctgctttaa

SEQ ID NO: 91267 - DNA, 753 bp, Enterobacter aerogenes
atgatcccggaaaagcgaattatacgacgcattcagtctggtggttgtgcaatccattgtcaggattgcagcattagccagctctgcatcccctttactttgaacgaacatgagctggatcagcttgataatatcatcgagcgtaagaagcctattcagaaagggcaaaccctgttcaaagcgggtgatgagctgaagtcgctgtacgctatccgttcagggaccatcaaaagctacaccatcaccgaacaaggcgatgagcagattaccggcttccacctggcgggtgatttggtcggttttgacgccattggcaccgccctgcacccaagctttgcgcaggcgctggaaacctcaatggtttgcgaaattccgttcgaaacgctggatgatctttccggtaaaatgccgaacctgcgtcagcagatgatgcgcctgatgagcggcgagatcaaaggcgatcaggacatgatcctgctgctttccaaaaagaacgcagaagaacggctggcggcctttatctacaacctgtcccgccgtttcgcgcagcgcggcttctcaccgcgtgagttccgtctgaccatgacccgtggcgacatcggcaactatctgggcctgacggtagaaaccattagccgcctgctcggtcgtttccagaaaagcggtatgctggcggtgaaagggaaatatatcaccatcgaaaacagcgatctgctggcgcaactggcaggccaggcgcgcaacgtcgcctga

SEQ ID NO: 91268 - DNA, 951 bp, Enterobacter aerogenes
atggcgaagtatcagaacatgctggtagtaatcgaccctaaccaggacgaccagcctgcattacggcgcgcggtgtatctgcaccaacggattggtggacgcatcaaagcctttttgccgatctatgatttttcctatgaaatgaccaccctgctgtcgcccgacgagcggacggcgatgcgccagggcgtgattagccaacgcagcgcctggatccgtgaacaggccaagttttacattgaatccggggtgccaatcgatatcaaagtggtgtggcacaaccgcccctttgaagccatcattcaggaaatcatcagcgataaacacgacctgctgctgaaaatggcccatcagcacgacaaactcgaagcagtcatcttcaccccgaccgactggcacctgctgcgcaaatgtccatgcccggtatggatggttaaagatcaaccgtggccggaaggcggtaaagcgctggtagcggttaatctggccagtgaagagaactatcacaacgccctcaatgaaaaactggtgcgggagaccatcgccctcgccgatcaggttaaccataccgaagtacatctggttggcgcctatccggtgacgcctatcaacatcgccattgaattacctgattttgacccgagcatctataacgatgcgattcgcggccagcatctgctggctatgaaagcgctgcgccagaaattcagcatcgatgaaaaccgcacccacgtagagaaagggctgccggaagaggttatccctgatttagctgaacatctgcaggccgggattgtggtgctgggcaccgttggccgcaccggtatttctgccgcgtttctcggcaataccgcggaacaggttatcgaccacctgcgctgcgacctgctggtactgaaaccggaagcttatcaaaccccggttgaactggacgatgaagacgacgactaa

SEQ ID NO: 91269 - DNA, 189 bp, Enterobacter aerogenes
atggataccgagttaacccccacgcagatggccatcgagtacctgcgccgcgataccgctgttatgacccccgcgcagtacctgaagaagctcaaactcctcgagctcgagtttgccgatctgatgtcgctttcgtcgatggaactaaaagaagagatcgacctggcctggcgtttaggtatccactaa

SEQ ID NO: 91270 - DNA, 1389 bp, Enterobacter aerogenes
atgtctggaggattagttacagctgcatacattgttgccgctattctgtttatctttagccttgcggggctgtcaaagcacgaaacgtcgaagcaggggaacctgtacggcatcgccgggatggcgattgcgctgattgccaccatttttgggccggacagcggtaacgtcggctggatcatcgtggcgatggttatcggcggggcgattggtatccgtctggcgaagaaagtcgaaatgaccgagatgccggagctggtggcggtgctgcatagcttcgttggtctggcggcggtgctggttggcttcaacagctatctcgaccacggaccgggcctcgatcaggtgctggcgaatattcacctgaccgaagtattcctcggtatctttatcggcgccgtaaccttcacgggctcgatcgttgcctttggtaagctgcgcggcaaaatttcgtcaaaaccgctgatgttgccgaatcgccacaagctgaacctggcggcgctggtcatttccttcctgctgctggtggccttcgtgcgtaccgatagcaccggaacccaggtactgtgcctgctggtgatgaccattatcgccctggcgttcggctggcacctggtggcgtctatcggcggcgcggatatgccggtggtggtatcgatgctgaactcctactccggttgggcggcggcggcggcgggcttcatgctcagcaatgaccttctgatcgtgaccggcgcgctggtcggttcttccggtgccatcctctcctacattatgtgtaaggcgatgaaccgttcgtttatcagcgttatcgccggcggtttcggcaccgatggcggcagttccagcggcgatgaagaagttggcgagcatcgtgaaatcagcgccgaagagacggcggaaatgctgaaaaactcgcattccgtgatcatcacgccgggctacgggatggcggtggcgcaggcgcagtatccggtggcggaaatcactgagaagctgcgtgcgcgcggtatcaaggtgcgcttcggtatccacccggtcgccggacgactgccggggcacatgaacgtgctgctggcggaagcgaaggttccgtacgatgtggtgctggaaatggatgaaattaacgatgatttcgccgataccgatactgtactggtgattggcgcgaacgacacggtgaacccggcggcgcaggacgatccgaagagcccgatcgccggtatgccggtgctggaagtgtggaaggcgcaaaacgtggtggtctttaaacggtcgatgaacaccggctatgcaggcgtgcagaacccgctgttcttcaaagagaacacccacatgctgtttggcgacgctaaagccagcgtggatgccattctgaaagcgctgtaa

SEQ ID NO: 91271 - DNA, 1530 bp, Enterobacter aerogenes
atgcgaattgggataccaaaagagagcttagctcaggaaacccgggccgctgcgacgccgaagacggtcgagcagctgctaaagctcgggtttagcgtggcggtcgagagcggggccgggaaactggcgagcttcgacgatgaagccttcgaacaggcgggcgcggaaatcgtcagcgcggataacgtctggcactccgacgttatcctcaaggttaacgcgccgaacgatgcggagattgcgaagctcaatccgggcaccacgctggtgagtttcatctggccggcgcagaatccggatctcatggaaaagctggccgctcgcggtatcaacgtcatggcaatggactcggtgccgcgtatttcccgcgcccagtcgttagatgccctgagttcgatggccaacatcgccggttatcgcgcgattgtcgaagcggcgcacgaattcggccgcttctttaccggccagatcaccgcggcgggtaaagtaccgccagcgaaggtgatggtaatcggcgcaggcgtcgccggccttgcggcgattggtgcggcgaacagcctcggcgccatcgtccgcgccttcgatacccgtccggaagtgaaagaacaggtgcagagtatgggcgccgagttccttgaactggacttcaaagaagaagcgggcagcggcgacggttatgccaaagtcatgtctgaagcctttatcaaagccgagatggcgctgttcgccgcgcaggcgaaagatgtcgatatcattgtcaccacggctttaatcccgggtaaaccggcgccgaagctgattacccgcgaaatggttgacgccatgaagccaggcagcgtggtggtcgatctggcgtcgcaaaacggcggcaactgtgaatacaccgtgccgggtgaagtcgtgaccaccgccaacggcgtgaaaattatcggctataccgacctgccgggtcgtctgccgacgcaatcttctcagctctacggcaccaacctggtaaacctgctgaagctgctgtgcaaggaaaaagacggcaatatcaccatcgatttcgacgatgtagtggtgcgcggcgtcacggtggtccgcgagggcgaaattacctggccggcgccgccgattcaggtctccgcgcagccgcaggcggcgacgaaaaccgtcgaagcgccaaaagaagaggctaaaccagcttcgccgtggcgtaaatacgcgctgatggcgctggcgattatcctctttggctggctggcgaacgtcgcgccgaaagagtttctgggtcactttaccgtcttcgcgctctcctgcgtagtcggttactacgtggtgtggaacgtgtcgcacgcgctgcacacgccgctcatgtcggtaaccaacgccatttcagggattattgtcgttggggcattgctgcagatagggcatggcggctgggtcagcttcttaagctttatcgcggtgttgatcgccagcattaatatttttggtggtttcaccgtcactcagcgcatgctgaaaatgttccgcaaaaactaa

SEQ ID NO: 91272 - DNA, 951 bp, Enterobacter aerogenes
atgaagcttaagaacacactcctggcgtctgctcttctggctaccaccgcgttgtctgcccatgcagcgaccgagctgactccggagcaagcggcagcgctgaagccctatgaccgcgtcgtcgtcactggccgttttaacgcgattggcgatgccgtacaggcggtttcccgcaaggcggataaagatggcgcagcttccttttatgttgtcgacacctcagatttcggcaacggcggcaactggcgcgtaacggcggatttctataaagaaaacgccccgcaggcggataccccgaaaaaccgtatcattaacggcgtgatggaactgccgaaagatcaggccgtcgcgctgatgccgtatgacactgtgaccgtacagggcttctaccgcagccagccggaagtcaacgacgccatcgccaaagcggcaaaagccaaaggcgcgtatgccttcttcatcgtccgtcaggttgacgccaaccagggcggcaaccagcgcatcaccgcttatatctataaaaaggatgcgcagaagcgcgtactgcagagccctgatgcgattccagcggattccgaagccggtcgcgccgctctggcgaaaggcggcgaagcggctaaaaatgtcgagatcccaggcgtggcctcctctgccgccgtcggcgccggcacaggcgtaggcctgttctacgaaacccaatcgtcgaaaggtggacgttacactgtcaccctgccgaatggtactaaagtcgaagaggtgaacaaaatcaccgccgcgcagatggtgccgtttgatagcatcaaattcaccggtaactacggcaacatgacggaaatctcctatcagaccgcgaaacgcgcggcgaagaaaggggcaaaatactaccacatcacccgccagtggcaggaacgtggcggtaacatcaccattagcgccgacctgtataagtaa

SEQ ID NO: 91273 - DNA, 1383 bp, Enterobacter aerogenes
atggaaaaaaaactgggccttagcgccctgaccgcactggtactcagctccatgctgggcgcgggcgttttcagtttgccgcaaaacatggctgccgtcgccagcccatcagctctgcttatcggctgggccatcaccggcgtcgggattttattcctcgctttcgccatgctattgctgacccgaatccgcccggaactggacggcggcatctttacctatgcccgcgaaggttttggcgagctgatcggtttctgttccgcctggggctactggctgtgcgcggtgattgccaacgtctcctatctggttatcgtcttctccgccctcagtttcttcaccgatacgccggagatgcgtatttttggcgacggtaacacctggcaggcgatcgtcggcgcgtccgtgctgctctgggtggtgcattttctggtgctgcgtggggtccagactgcggcaggcattaacctggtagcgacgctggcgaagctgttgccgctcggcgcgtttgtggcgctggccgctatcgcgttccggctagatactttccgcctcgacttcagcggtatagcgctcggcgtaccggtatgggaacaggtgaaaaacaccatgctgatcaccctgtgggtatttatcggcgtggagggcgcagtagtagtctctgctcgcgcgcgccacaagcgcgacgttggccgcgcgacgctgctggcggtggtctcggcattggcggtttatctgctggtcaccctgctgtcgctgggcgttgtcgcccgcccggaactggctgaaatgcgcaacccgtcgatggctggcctgatggtcaaaatgatggggtcatggggcgaagtagtaatcgccgcgggattaattatctccgtctgcggcgcctatttaagctggaccattatggccgccgaagtgccgtatctggcggcgacgcataaagcgttcccgcgcctgttcgccaaaaccaataagaataatgcgccttcttcctcgctgtggttgaccaacatcagcgtgcagatttgtctggtgctgatttggcttaccggatccgactacggtaccctgctaaccatcgcctcagaaatgattctggtgccctatttcctcgttggcgctttcctgcttaagattgccgtacgtccgttacataaagccgtgggtgtcggcgcgtgcgtttatggcttatggttattgtatgcgtccggtcctgtgcatttgttattgtcggtggtactttacgctccgggtcttctggttttcctgtacgcccgccgtacgcaccagcacgatcgcatgctcaaacgccgtgaaatggcattaattggttttttgctggttgccgccgttccggcaacgtggatgctggtggggtaa

SEQ ID NO: 91274 - DNA, 723 bp, Enterobacter aerogenes
atggctgaaccacagcctcgtccggtcctgatcacaggagcaggccgccgtatcggcctcgctctggcacaccattttttaaaccagcagcaaccggtgatcgtcagctatcgccagcattatccttcgattgacaccctgcgcgaagccggcgcggtgtgtctgcaggccgatttcagcagcgacgacggtattcttaccttcgcggaagcggtgaaggcgcagaccagcgggctgcgtgcgattattcataacgccagtgattggatggcggaaaaacccggtgtgccgttatccacggtgatatcgcggatgatgcagattcacgtccacgcgccctatctgcttaaccatgcgctggagagcctgctgcgtggttttggtcacgccgccagcgatattattcacattaccgactacgtggtggaacgcggcagcgataagcatatcgcctatgccgccagtaaagcggcacttgataatatgacccgctctttcgcccgtaagctggccccggaagtgaaggtcaacgccatcgcgccatcgctaattatgtttaacgagcatgatgacgctgaatatcgtaaacaggcgttggataaatcgctgatgaaaatcgcgccgggtgaaaaagagataatcgacctcatcgattatctgttcaccagttgctacgtgaccggccgctctttcgctgtcgacggcggccgaccgctgcgctag

SEQ ID NO: 91275 - DNA, 336 bp, Enterobacter aerogenes
atggggctgttgattaaagcgctgctgggagcgctggtggtggtactgataggcgttctgtcaaaaaccaaaaattactatattgccggtttaattccgttatttccgaccttcgcgctgattgcccattatatcgtcgccagcgagcgcggcattgaagcgctgcgcacgactattgtcttcggcatgtggtcaatcatcccgtattttatctacttactttcattatggtacttcactggcgtaatgcgcctgccttacgcgctggcaggcgcggtgatctgctggagtctggcggcctggttgctgatcctcggctggagccgtttccactag

SEQ ID NO: 91276 - DNA, 717 bp, Enterobacter aerogenes
atgaataagatcgtttttgttgaggatgagcccgaagttggcgcgcttatcgccgcctatctgggaaagcatgatatggacgtggtcgttgagccgcgcggcgaccgggccgaagaggttattgctcgtgaacaacccgatctggtactgctggatatcatgctgcctggcaaagacgggatgacgctgtgccgcgacctgcgcagccagtggcagggtccgatcgtgttgctgacctcgctcgatagcgatatgaaccatattctgtcgctggagatgggcgccagtgattatatcctcaaaaccaccccgcctgcggtgctgctggcccgcttacgtttgcatctgcgccagcacgtggcttcgccgtcgatgcccgctcccgcaaccctgacgccgcataaagccattgtttttggttcgctgtcgatcgacccggttaaccgtcaggtattgctcggcggcgacaacgttgctttgtccaccgctgatttcgacctgctgtgggagctggcgacccatgccgggcagattatggatcgcgatgcgctgttgaaaaatctccgcggcgtcagctacgacggcatggatcgcagcgtcgatgtcgcgatttcacgcctgcgtaaaaagctgctcgacaacgccaccgagccctaccgcatcaagacggtgcgcaacaaaggctatttgttcgccccgcacgcctgggataattaa

SEQ ID NO: 91277 - DNA, 582 bp, Enterobacter aerogenes
atgactaagcccgtgtatttgcatactgataatgatgttgagattttaaaaaccttcgatatggttctgagccatatgcaggcgatcgccgacccttatcagtggaagtgggtgattaccggctggcacagcattctgcagaacgcgatggtgttggcgttatgtcagggcaatgactttctggtctacctgttcgacggtaaagcgtcgactcgcgcgatctacgagcaaatttataacgacgatttttccaacatcgacaagctgcagctaccgtcctttatgacgctataccgtgcgacaagggagaacagcggattcgcacccagcgaagactgtacggtggcggtggacaagcttcaccagctgcgcaatgatttcattcactatcatccgcgaggttggagtctacaggtcgatggtttaccgcagtggattctggcgagcggtgaattactggatcatttccttgccagcggtgaggtcgtacgctggtatggcgaagacgatgaaatggctttcagagagaaatacgctgaatttcaagaccgactacacggcgtgatgtcggtctattcctga

SEQ ID NO: 91278 - DNA, 327 bp, Enterobacter aerogenes
atgggatttccgtcaccggccaacgattattttgaggggccattgaccatagataagatctgtggagtggggccagaaactcaaatactgaagacaaaaacggggtttgcattaatcgatattgggcgaaaacctcggcaaaataacctggtgctgattaattacgacgggctgactgattttgccaggattatgggccgagcgtttattaccagggatggagaagctatcgaaggggaagcgcttgatgatgtgaccgtggcgggagtggtgacattcatcattgatgccgcggattctgatgaaggggatttcgtgccgttctga

SEQ ID NO: 91279 - DNA, 237 bp, Enterobacter aerogenes
atgccgatccgctttaacgcgggctcgaccgtgacaatcagtaataacgacgctgacgccaccacgactcaggtcactactcagaccatggtcgatcgcggcatcctgctgggcggccaggcgctcgctgtcggtcagtacacctgcgcagcaatggcaaaaggtacagtcattcagttgatctcactgcaagcaggctaccgcatttccaccgttctggtttataccgatagctga

SEQ ID NO: 91280 - DNA, 894 bp, Enterobacter aerogenes
atgaccacagttacctcagcccaggcgaataaggtcctgcaggcggcgttgtttgttgccgccaaccgcaaccgctcgttcgtcaacatgctgaccgaaaacgccccgaaaaatgccgcggcggataacggcaagaaagaagtagagcagtccagcccacacgcaccagtagttcgcgtgaccgatctgactcgccaggctggcgacgaagttgagatggatatcgtcttcaagctgaataagcgtccgaccatgggcgataagaagttggaaggccgtggtgagaacctcgaacaggccagttttaagctgaagatcaaccaggcgcgccatatggtgaacgccggcgggcgaatgagccagaagcgcactaagcataatctggctcgcactgggcgcacgctgctggggacgtattacaacgacctttcagaccagatcgctaccgtgcagctgatgggcgcgcgtggtgacgtgaccgccgacgatatcatcgtcccactggacagcgatagcgagtttgccgacatcatggtgaacgacgtcactccgccgacctatggccgtcagttttatggcggcgacgccaccagcctggaatctatcgactctgccgacctgttcaccctcgatgtagtggacaacctatcgctgtatatcagtgagatggcgcacccactggcaccggtcaagctggccgcggatgagatgtccggcgattcgccgtactacgtcatgtttatcacgcctcgccagtggaacgactggtacacgtccaccagcggaaaagactggcaggcgatggcggcggcggcaatccagcgttctcgcggtttcaatcatccgatctttaaaggtgactgcgcgatgtggcgcaacattctggtacgctag

SEQ ID NO: 91281 - DNA, 210 bp, Enterobacter aerogenes
atgagcgttgaaattttaggtacagagtcttttgaagagctggaagcgaaactgcttcaactggagacggaggaggatggcgaggtaatcgatgaccccgccagcgcttctaccatccagacagatgcggttatcgccgctacagaaaccaaaacgggcgacactgcgcagcaggtcactacggtaactacgcccgaggttgtaccttag

SEQ ID NO: 91282 - DNA, 942 bp, Enterobacter aerogenes
atgtctactgctattcctgaccacctttataaatataaatcgttcaactccgacagcctagaactgatcatcgctgacaaacttttcttttctcatccatctaaatttaacgatcctcttgattgtcagacgcaagtcattgatgacattgaggatgaagaagaacttaaggagattttgtttaagctgcatcaaaacaatgcaagggagaaattattgagtgcggcgaaaaaactacgatacaagggccaaaaaacgcttgaaaaaatagagtttcttagcactaaagagggaatagatgctatagctgatatctatcttggagttaactttcatggtgactcatttgatattcgtaaggcattgacttttgcaattggcgaagtgatccgttctggttacaacaacggtgttttatctttagctgaaaaaaatgattgccctttaatgtggtcgcattatgccgataaccatcaaggtatctgcctgggctattcaattccagaagccagaaaacatctagttaacaaaatcaactatgatggtgaaacaagaaccatttcgacaagccaagtcaggagaatgctaaacaatgactccgctgcaaaaaaggaaatggatgatgctattttcttaagaaaagcatctcaatggggttatgaaaatgagtggcgagtcatttcccaagtaggcctgcaggactcttattttgttctcactgacattacctttggcatgcgttgcaaggatacaacacgtttcacgttgatgaaggcgcttgaaaacagagagtatccagtccatttttatcaaatggaagagatagaaaacaaatttgaactaaaaaggacgtcgatttctttgcaagacgaggaagttaggtttttcccaacttgcaataagtacgaaaccgaccttcttttagacggtttggacgattaa

SEQ ID NO: 91283 - DNA, 1155 bp, Enterobacter aerogenes
gtgccgttctggggtttccgcaaagacaagaacgggatcccgtatggtctggtatcacggatgatcagtgcgcagaactcatataatttccgtcatctcaaaatcacctggctgatgcaggctaagcagatagtgatggatgatgacgccaccaacatgagtcgggagcaggtacgcgaggaagccaaccgtcctgacggcgtaatagtcctcaacgccgaccgtaagaacaagaccaaagcctcagatgcactgcagataaactctgatagctcagtcagcgcacagcaaatgcaggtcatggagtatgaccggcagaatatccaggactgcgcggggatttactccagctatatggggcaggacagcaacgctatttccggtatagccgtgtctaacctggtagagcagagctccaccacgctcgcggaaatcaacgataactacacaatggcgtgtaatgcgcttggcgagcttatccttaactacctgctcgaggacctcaaaaaacggacggattacagcatcgtcatcaaccgcaaggataagcgccgccggaaaatcgtcacgattaatgttaaaggcgacgacggtgcaattactaacaacatttcccgcctggatgcgcggattgtactggcgcctattgattctacgccagcgtaccgcgcgcaactggctgaccgtctgatcggcatcatccagaaactgccggcacaggcacagaccgccgttatcgatctggtactcgaactggttgagataccgaacaaagatgaattcgtcgaccgtgtcagtagggccatgggcacgcaggatccggagtatatgacggacgaagagaaacaggccgcccagcagcaggccaaaatcaatgagtttgcacaggcgctgcagttcaaggcccagattgctgaaatccagaataaggacgcggacaccgccaacaagcaggcgagcgccaataagtcgcaggcaacggcagacgggcagaaatacagtgacggtctgacgatggcgcagactggccagattatgcagcagatgcagatcaatcagcagcaaataaccgagatgggacagcagatgatgcagatgcagcagctaatcgcccaactggttagcagcggggcgcggctggagctggggggctaa

SEQ ID NO: 91284 - DNA, 225 bp, Enterobacter aerogenes
atgggtgatgtttccgagcatttcagccgccacgagctggcgtgcaagtgtgggtgcggatttgaccaagttaacgccgctttggtgccggtattggaaagtgtccgccagcatttcagcgcgccggtagttattgactgcgcctgtcgttgtcagacacacaacgcggcggtcggcggcgccagtcatagccagcacctgctggggcaacgcggcagatattaa

SEQ ID NO: 91285 - DNA, 348 bp, Enterobacter aerogenes
atgcctcataaattatcgatctggcagtggatcgccttggttatgtcagcgcctaacgaggcgctgaaggtgggcgcagcgctggccgccggagagctgtccaggtggcttctaggtgagcggacccgctttcgctacgtcctgggtgatttcatcgcatgcgtacttatttattgcgcgctgcgtccgtatatcccggcactaccgcctatctatggattcaagatatcgcccgatctggttgtgttggtgatagcgctgcttggcgcgcacggaatcaaagaagtcgttgtagcagtcgcgaaaaaattcggtatccaactgaatggagaatcaaaaaatgggtga

SEQ ID NO: 91286 - DNA, 456 bp, Enterobacter aerogenes
atgctcgcgaccacggttagcgagaacgaaaagatgagtatcgaagcagcaatcaagatttttgacccgcgcacggcgacgctgggaccacgtggcggctgcgccaccctgcattgggacaatatcgcggcaatgctgggcactattgagcgagaaaactcggttgggtaccagctgatcatggtggcttatcgcggagacaggcagcaagaggctgcgctacgtaaaaatgtcggcacgtgggctaccgatttttgccagaaatcgcgtattgccgaccacaccctggcatcagggttgcagagaccgcgcttgatatcctatttcaccgcccacttgagccacaaatgcgctcgctccagcacctacacgactatacgggccttatgcccagcgggaagcacagcggataaagtcactgaagaaaacgttatccaaaacaaaactaaagcctga

SEQ ID NO: 91287 - DNA, 939 bp, Enterobacter aerogenes
atggcaattcacgacatttactcaaaacgacaaagaagaatcagaggtgaagtaagtgatgtctacatatatgacaatatccctcaaaaatttaaaattcagttcatacacataatcgaagaggctattggtatatgtaccactcatacaagaatgagtttcagtagttatcaacacaacaccaaggataatgtgtataaaagaatacttaaaaccctcctcgctgagtatggtaggttcaaacttaaaaatgatgccacatcatattccgatgaaatattcagttactttcttacaacaagtgttaccgaccacagtttagatattatcgaattattttgtattgagcttctctctatattcaaaaaccctccatcgatagccagcagggatagagcggttgatgctctttctggcatcaataccagatttaaggaaaacaatatcggatatcaatttgaaaatgaagaaataatcagagtcgactcgcaatttattcactcagaagtagttaagccaaccctctcacttttgagctctaatgacgaatatgatggcgtaatggatgagtttcttgcggcacatgagcattacagactggacaatttcaaagaatgtttgaatgagtgccttaaatcttacgaaagcatcatgaaagcaattcatgacaaacgaaaatggcaatataataaaaccgataccgcttcaaagttaattaacagctgtcttgagcatgaactaataccttcttacctacaaggtcaattcactagtctcaaaacaatgctcgagagtggaataccaacaataagaaataaaaattctggccatggacaagggacaggcgttactactgtcccaagagagttagtgagctatatgcttcatttaaccgctacaaatttacttttcttagcccaatccgaacagtctctgtaa

SEQ ID NO: 91288 - DNA, 147 bp, Enterobacter aerogenes
atgaaagcgaaaggcggcaaaccgacgactacgcaactggagtggatcgaacgtctgcgcggcgtggggtatcgtgctgagatttgctacggatttgaagccgcgaggctgtgtatcttaggatatttcaggggaagtcccccctga

SEQ ID NO: 91289 - DNA, 279 bp, Enterobacter aerogenes
atgagcggtaaacgttatcccgaagagtttaaaattgaagcagtcaaacaggttattgatcgcggtcattctgtttccagcgttgcaacacgtctcgatatcaccacccacagcctttacgcctggataaagaagttcggtccggactcatccactaataaagaacagtcagatactcgggccgagatccgccgactccagaaggagttgaagcgggttactgacgaacgggacatattaaaaaaagccgcggcgtacttctcaatgctgtccgactga

SEQ ID NO: 91290 - DNA, 825 bp, Enterobacter aerogenes
atgctctgtcgggtgctggatgttcatcccagtggtttttatgcctggcttaagcagccgcattcacaacgccatcagacagacctgagactgacaggacagattaaacagttctggctggagtcgggatgcgtctatggttatcgcaagatccatctggatctgcgggataccggacaacagtgcggagtcaacagagtctggcgactgatgaaacgtgccggaataaagtctcaggtcggataccggagcccgcgggcacgtaaaggcgaggccagtatcgtgtcacccagcaggctccagcgacagttcaatccggatgctccggatgagcgttgggtaacggatataacctacatcagaacccgcgaaggctggctgtatcttgccgtagttgtcgatctgttctcacgcaaaattatcgggtggtcaatgcaatcccggatgacaaaagacattgtcctgaatgcattgctgatgtctgtatggcggcgtaatccccaaaaacaggtgctggttcactcggatcagggcagtcagtacacaagccatgagtggcagtcgttcctgaaatcacacggcctggagggcagtatgagccgtcgcggtaactgccatgataatgcggttgcagaaagctttttccagttgctgaagcgtgagcggataaagaaaaagatctacggaacgcgggaagaagcccgcagcgatatttttgattacatcgaaatgttttataacagtaagcgtcggcatggttctagcgatcaaatgtcaccggcagaatatgaaaaccagtattatcaacggctcggaagtgtctag

SEQ ID NO: 91291 - DNA, 564 bp, Enterobacter aerogenes
atgaaaaccagtattatcaacggctcggaagtgtctagattatccgtggcgattcagcaaggtatttttggaccaaccaaaacacgtgcaggcgagcggaccataaagttgcttgcgcctgcccttgaggcgcttaaagcacagcatgtactaaccagccatttccccaaagttccaatagagatacgtcagcgagaatttggtaaagcggagatacataaccttcatttcgtattcatgccacgtcaggaaaaaggtgaacaggccagtcactactcagtgaactcaataagttctctatggaatacaaccatacgcctttctggcgtgcgccggcggcggccttatcagactcgacacacctacgcctgctggatgctatcagcaggggcaaacccggcattcattgccagtcaactgggccatgagaatgcagaaatggtttatacagtgtactctgcctggataaacgcgctggatggtgatcagattgcatttcttaaccagcgtatcggtggatacaacaatgtcccccagatgcccccaaagggaacagcggaataa

SEQ ID NO: 91292 - DNA, 1302 bp, Enterobacter aerogenes
atgaagaagctgtttgtgcagttttaccttttgctgttcgtctgcttcctggtcatgaccatgctggtcggcctggtgtataaattcaccgccgagcgcgccggacgccagtcgctggacgatctgatgaaaagctcgctgtatctgatgcgcagcgaactgcgcgagatcccgccgcgcgactggagcaacacgctgaaagagttggatcttaatctctctttcgatctgcacattgaaccgttaagcaaattcaagctctcggaaagctcgatgcagcatctgcgcgcgggcgatatcgtggcgctggacgatcagtacacctttattcaacgcatcccgcgcagccattacgtattgtcagtcggcccggtgccctatctctattttttgcatgagatgcgcctgctggacgtcgcgctgatggcgtttatcgctatttcactggcgttcccggtgtttatctggatgcgtccgcactggcaggatatgttgcgaatcgaaaccgccgcacagcgcttcggcgaaggtcattttagcgagcgcattcatttcgatagcatgtcgagcttcgagcgactcggcgtggcctttaaccagatggccgataatatcaacgccctgatagccagtaaaaaacagcttattgacggtatcgcccatgaattgcgcacgccgctggtgcgcctgcgctatcgcctggagatgagcgaaaatctgaccgaggcggagtcgcaggctctcaatcgcgatatcgggcaactggaagctctgattgaagaactgctcacctacgcgcgcctcgatcgcccgcagaacgaactcaacctgaccaccccggatttcccggcctggatccgcgcgcacgtcgaggatattcagctggtcaatccgcagcgtgaagtcgcgttgcgccagcttacggcgggcgactacggtgcgctggatatgcgtttaatggagcgcgtgctggataatctggtcaataatgccctgcgctacagccatcaacatattcatatcagcctgtcgctggccggttcacgggcgacgctgcgcgtggaagatgatggcccgggtatcgcccttgaggaacgcgaacgggtattcgagccgtttgtccgtctcgatcccagtcgagatcgcgccaccggcggctgcggcctggggctggccatcgtacacagtattgctcaggcgatggccggtgaagtccgctgcgacgaaagttcgcttggcggcgcggcattcattttcagctggcctatttaccaccagcttcccgcttttacttctgcttag

SEQ ID NO: 91293 - DNA, 933 bp, Enterobacter aerogenes
atggcaagctacgacctcgttgcgcgcttaaatgacacctttcgtgagcttgagcgcgagctacaaaccttcaaagcatcgctgagccgctgccgcctgctggcggcgcgggttttcgaattgccggcggtgagcaaagaggcggagcacgcgccgctggataccattcaggtcacgcagcacgtcggccaaagcgcgctggagatggcgctcaggcactacagccatctgtttattcagcagcaatcggaaaaccgcagcagcaaggcggcggtacgcctccccggggcgatttgcctggcggttgatacgcaacagcaggcagagctgctggagaaaatcagcgccattaacgcgctgaaagcggcgtttgagagaatcgtcaccgtcgattccggattgccggccgccgcgcgtttcgaatgggttcaccgccacctgcccggtctgattaccctcagcgcctatcgtacgctgacgccgctgtgcgaccccagcaccatccgcttcggctgggccaataagcatgtgattaaaaatctgacccgcgatgaagtattaatgcagctagagaagagcctgcaatcgccgcgcgcggtgccgccctggacccgcgaacagtggcaaagcaagctggaacgggaatttcaggatatcgccgccctgccgcagcgggcaaaattgaaaatcaaacgcccggtcaaggtacagccgattgccagagtgtggtatgccggcgagcagaagcaggtgcagtacgcctgtcccggcccgctgattgcgcttatctccggcacgcgtggggtaagcgtgccggatcttggcgaactcttgaattacgatgctgataacgtgcagtatcgccacaaaccgcaggcgcagtcgttacgattactgatcccgcgtctgcatttatggctggctagcgagtag

SEQ ID NO: 91294 - DNA, 1401 bp, Enterobacter aerogenes
atgacaacgcatcgcagtgaaaaagactcgatgggcgcaatcgacgtcccggccgataaactttggggcgcgcagacccagcgctcgcttgagcatttccgtatctcaacggagaaaatgcctgatgaattgatctatgcgctggcgctgaccaagcgagcggcggcgaaggttaaccaggacctgggcttgctggcggcggacaaagcggacgccatcatcgctgccgcagatgaagtcctcgccggcaagcatgcgcaggagtttccgttagctatctggcaaaccggctccggtacccaaagcaacatgaatatgaacgaagtgctggcaaaccgtgcgagcgagttgcttggcggcgagcgcggcatggcgcgcaaaattcatcccaatgatgacgtcaataaaagccagagctcgaatgatgtttttccaacagccatgcacgtcgcggcgctaatcgcgctgcgcgaaaagctgatcccgcagctacaggcgctgcgcgccacgctacaggaaaagtcgctggccttcggtgacatcgttaaaattggccgcacgcacctacaggacgctacgccgctgacgttagggcaggagatctccggttgggtcgcgatgctggaacataatctccgccatattgaacacagccagccgcatctcgctgagctggcgctgggcggtacggcggttggcaccggcttgaatacgcacccggaatatgcggtgcgggtggcggcggaactggcgtcgcttagcgggctgccgttcgtcaccgcgccaaacaaatttgaagcgctggccaccgtggatgcgctggttcatgcccacggcgcgctgaaagggctggcggcttcgctgatgaaaatcgccaatgatgtgcgctggctggcctccgggccgcgctgcggcatcggtgagatcgccattccggagaacgaaccaggatcctccattatgcccggcaaggtcaacccgacgcagtgcgaagcgttgaccatgctgtgctgccaggtgatgggtaacgacgtggcggtgaatatcggcggtgcgtcagggaactttgagcttaacgtctatcggccaatggtcatccacaatttcctgcagtcggtacgcctgctggcggacggcatggagagctttaatgagcactgcgcggtgggtattgagccgaaccgcgagcggatagaccagttgcttaatgagtcgctgatgctggtgaccgcgctcaatacccatatcggctacgataaagcggcggagatcgccaaaaaagcgcaccatgaagggctgacgctgaaagccgcggcactatcgcttggttacctgacggaagcggaattcgatagctgggtgcgcccgcaggatatggttggcagcctcgctactcgctag

SEQ ID NO: 91295 - DNA, 288 bp, Enterobacter aerogenes
atgccacctgagtacgttgattacctgatcctcggcgacgagcaccatggcgaaacttacagcgatattaaatctacccgcctggccgtacgttcaaagtatgcctcagatgctaaacgcaccgttgatgatgagccgatggttgcgccgaaaatggtgaactatcatgttcacgaatatccagcgcaggatggccgtttctacctggtggccagcaactatcctttaagccatttcgatgttgaggacgcgttgatcaaatcccgcgtccatccgctgcgcgcgtag

SEQ ID NO: 91296 - DNA, 1629 bp, Enterobacter aerogenes
atgccttcgccgatgatttatcagcacttaactacctcagcgctactcgaacacgcggcgcagtatcatcgcgagacggaaatcgtctcggtgagtactgccggagaaatagaacgtagctgttggggagaagtggcccgcaacgcccgacggctggcctcggcgctggcaacgctgggcctgcccgctggcgcccgctgcggtacgttagcgtggaataaccgtcgtcatctcgaaatctatttcgccgtcgcgtctggcggttgggtgacgcacacgatcaatccgcggctgtcggtcgaacatctgttgtatatcatcaatgatgccgccgatgaggtgctgtttattgaccagactttcctgccattaatacggcaactgcagccacaactactgacggttaaacatattgtattgatggagccgcatagtgaagacgcgcaggatttgctgccgtcattacgcttttttgaccagctgttacagcagggggatgccgactattgctggcctgggttgaatgagctgacgcctgcttcgctttgttatacctcagggaccaccggcaggccgaaaggcgtactgaatacccatcgctcgctggtgctgcatgcgctaagcggcaaccagccggacggtgcaggcatttcagcgcaagattcgctgttgccggtagtgccgatgttccacgtcaacgcctggggaacgccgtttattgccgcgatggtcggcgcgcggttggtgttgccggggccgcacctggatggcgatagcctgttgcgtctgctgagcgccgagaaggtcagcgtggcttttggtgtgccggtgatttgggccggactgctggcggcgctgcgtaaatcggatcttcgcctgccttatttcaagcgctccttcgtcggtggctcggcgttaccgccatcgatgagagaagcgtttaagcgcgattatgatattgagctgatccatgcctgggggatgacggaaacgtcgcccatcggcacgatcaatacgctgctcagtaagcacgccgcactcccggcggagcagcagcgtcagcagagtgatgggcagggacggccgattttcggcatcgttctacgggtggtggatatcgacgggaaaccgctgccctgtgatggcaaaagtcagggatatttgcaggttcgcggccactgggtggtcgatcactattttggtcgcgatgagagtgcgctgaccgctgatggctggtttgataccggcgatatcggcaccctcgacgttaacggctatctggttatccacgatcgggcgaaagatattattaaatctggtggggagtggatctcgaccgtcgagctggagaatatcgccatcgcccatccagcggtgcgcagcgccgcagcgattgccgcacgtcatccgcgttgggatgaacgcccggtgttgctatgcgtctgcgttgaagggggcgaagtcgaagaggccgatctgctggcctggtatcaggagtgggtgccgaaatggcagatccccgaccgcataatttttatcgatgcgttgccggttagcgccaccggtaaggtgctgaaaaatcgccttcgtgacgagtacggccagattttaatgcgcgaggaaagatga

SEQ ID NO: 91297 - DNA, 1047 bp, Enterobacter aerogenes
atgaaaaaatggtcacgccacctgctcgctgcgggcgctctggctttgggcatgggcgccgcgcaggcggacgatagcaaaacgctctacttctataactggaccgaatacgtgccgccaggcctgctggaacagttcaccaaagagaccggcatcaaggtgatctattcgacctacgagtcgaatgaaaccatgtacgccaagctcaaaacctataaagacggcgcttacgatctggtggtgccatcaacctatttcgtcgacaaaatgcgcaaagaaggcatgctgcaaaagattgataagagcaagctgagtaacttcagcaacctcgatccgcagatgctgaacaaacctttcgacccgaataacgactactcgattccctacatctggggcgcgacggcaatcggcgtcaatagcgatgctatcgacccgaaaaccgtaaccagttgggccgacctgtggaaaccggaatataaaagcagcctgctgctgaccgatgacgcccgcgaggtgttccagatggcgctgcgcaaactgggctattccggcaacaccaccgatccaaaagagattgaagcggcttataacgagctgagaaagctgatgccaaacgtcgcggcgttcaactccgataacccggcaaacccgtatatggaaggcgaagtgaaccttggcatggtctggaacggttccgcttatgtcgcgcgtcaggcaggtaccccgctggaagtgatttggccaaaagaaggcggcattttctggatggatagcctgtcgattccggcgaatgccaaaaacgttgacggcgcgctgaagttgattaacttcctgctgcgccctgatgtcgcgaaacaggtagccgaaactatcggctatccgacgccaaacctggccgcgcgcaaaatgctcagcccggaagtcgccaacgataaatcgctgtatccggatgccgccactatcgaaaaaggcgaatggcaaaatgacgtcggcagcgccagcgccatttatgaagagtattaccagaaactgaaagccgggcgctaa

SEQ ID NO: 91298 - DNA, 786 bp, Enterobacter aerogenes
atgatcggtcgactgctgcgcggcggctttatgaccgccatttacgcgtatctctacatccctattattattctgatcgttaactcgtttaaccgttcacgctttggtattaactggcaaggcttcaccaccgactggtatagcctgctgatgaataacgatagcctgctgcaggccgcccagcactcgctgaccatggcggtgctgtcggcaaccttcgccacgcttatcggctcgctcaccgccgtggcgctgtatcgctaccgttttcgcggtaagccgttcgtcagcggaatgctattcgtcgtgatgatgtccccggatatcgtgatggctatctccctgctggtgctgtttatgctgatcggtattcaattgggtttctggtcgctgctgttttcgcatatcaccttctgcctgccattcgtggtggtgaccgtgttctctcgcctgaaaggctttgatgtgcgcatgctggaagcggcgaaagatctcggcgccagcgagatgaccatcctgcgcaaaatcatcctgccgctggcgctgccggcggtagcggccgggtggctattgagctttaccttgtcgatggatgacgtggtggtctcttcgtttgtcaccggtccgggttatgaaatcctgccgctgaagatctactccatggtgaaggtcggcgtttcgccagaagtgaacgcgctggcgacgattctgttggttctttcgctggtgatggttatcgccagtcagttaattgcacgtgataaaactcaggggacgttaaaatga

SEQ ID NO: 91299 - DNA, 858 bp, Enterobacter aerogenes
atgaagaacaccagtaaattccagaatgtggtgatcgccaccatcgtgggttggcttgtgctgttcgtttttttgcccaacctgatgatcatcgccaccagcttcctgacccgcgacgatgcgaacttcgtcaaaatggtcttcacgctggataactactcgcggctgctggatccgctctattacgatgtgctgctgcattcgttgaatatggcgctgatggcgaccctcgccagcctggcgttgggctatccgttcgcgtggttcctggcgcgcttgccgcaaaagatacgcccgctgctgctgttcctgctgatcgtcccgttctggacgaactcgctaatccgtatctatgggctgaagattttcctcagtaccaaaggctatctgaacgagttcctgctgtggttgggggttatcgatacgccggtacgcattatgtacacgccgtcagcggtgatcatcggcctggtctatattttgctgccgtttatggtgatgccgctctactccagcattgagaaactggatcgcccgctgctggaggcggcaaaagatctcggcgccagcaagctgcagacttttatccgcatcattattccactgaccatgccgggaattatcgccggctgtctgctggtgatgctgccggcaatggggctcttttacgtctcagacctgatgggcggcgccaaaaacctgctgatcggcaacgttatcaagagtcagttccttaatatccgtgactggccgttcggcgcggcgaccagtattaccttaacgctggtgatggggctgatgttgttgatttattggcgcgcggcgcgtctgctgaataaaaaggtggagctggaatga

SEQ ID NO: 91300 - DNA, 1137 bp, Enterobacter aerogenes
atgggacagagtcaaaaattgaatatacaaccgcgttcgctttctccgctggtacaactggcgggaattcgcaaaagctttgatggtaagaccgttatctccgatctcaacttaaccatcaataatggtgaatttctcaccctgcttggcccctctggctgcggtaaaacaaccgttcttcgtctaatcgctggtctggaaagcgtcgatgtcggacgtatccaccttgaagaccaggatatcacccatgttccggcggaaaaccgccacgtcaataccgtattccaaagctatgcgcttttcccgcacatgaccgtgtttgaaaacgtcgccttcggcctgcggatgcagaaaaccccggcggcagaaatcaccccgcgggtgatggacgctttgaaaatggtacagctggaggcgtttgcccagcgtaagccccaccaactctccggcggccagcagcagcgtgtcgccatcgcccgggcggtggtcaacaaaccgcgtctgctgctgcttgatgaatccctctcggcgctcgactacaagctgcgtaagcagatgcagaacgaactcaaagcgctacagcgcaagctcggcatcacttttgttttcgtcacccatgaccaggaagaagccctgacgatgtccgaccgcattgtggtgatgcgcgatggcaaaatcgagcaggacggcactccgcgtgaaatctacgaagagccgaagaatctgttcgtcgccagttttattggcgaaatcaacatcttcaacgcgaccgtcattgaacgtctggatgaacagcgcgtgcgcgcctgcgtcgaaggccgcgagtgcaatatctacgtcaacttcgccgttgaaaaagggcaacagctgaacgtactgctgcggccagaagatctccgcgtggatgaaattcatcacggcagcgaagctgacggccttatcggctacgtgcgcgagcgcaactacaaggggatgacccttgagtcagttgttgagctggaaaacggcaagatggttatggtcagcgaattcttcaatgaagacgatccggactttgaccactcgctcgaccagaaaatggcgattaactgggtagaaagctgggaggttgtgctggccgatgaagaacaccagtaa

SEQ ID NO: 91301 - DNA, 1224 bp, Enterobacter aerogenes
atggataaattgcttgagcgttttctgcagtatgtttctttagatacgcaatcgaagcctggcgtgcgtcaggttcccagtaccgaagggcagtggaagctgctgcgtttgctgcagagccagttggaagagatggggctggtcaacgtgacgctaagtgaaaagggcacggtgatggggacgctgccggccaacgtcgcaggcgaaatcccggccatcggttttatttcccacgttgatacctcgccggatttcagcggcaagaacgtgaatccgcaaattgtcgaaaactaccgcggcggcgatatcgccctcggcatcggcgatgaagtgttgtcgccggtgatgttcccggtcctgcatcagctgttaggccagaccctgattaccaccgatggtaaaacgctgctcggcgccgacgataaagcgggcatcgcagagatcatgacggcgctggcgacgctgcaggcgaaaaagatccctcacggcgatattcgcgttgcctttacgccggatgaagaagtcggcaaaggcgcgaagcactttgacgtcgccgcgtttgatgcccgctgggcgtacaccgtggatggcggcggggtcggcgaactggagtttgaaaatttcaatgccgcctcggtgaccatcaaaattgttggcaataatgtgcatcccggcacggcgaaaggggtgatggttaacgctttatcgctggcggcgcgtattcacgccgaagtgccggccagtgaggccccggaaaccaccgacggttatgagggtttttatcacctgaccagcatcaagggcagcgtcgaccgggcggagatgcactacattttgcgcgatttcgatcgcaagcagtttgaagcgcgcaaacgcaaaatgatggagatcgccaaaaaggtcggtaaagggctacatccggattgctacatcgaactggtgatcgaagatagttattacaacatgcatgagaaggtgattgcccatccgcatgtagtggacatcgcgcgtcaggcgatggtggactgcgatatcgagccgcagataaagccaatccgtggcggtacggacggcgcccagctctctttcatgggcttaccgtgcccgaacctatttaccggcggctacaactatcacggtaagcacgagtttgtcactctggagggcatggagaaagccgtgcaggtgattgtgcggattgcggagctgacggcaaaacgttaa

SEQ ID NO: 91302 - DNA, 492 bp, Enterobacter aerogenes
atgtcaaattatcgccgtagttatatccccggcggctgctggttcttcaccgtaaacctgcaaaatcgccacagcgatctgctgacacgacatattgatcatcttcgtgccgcgatagcctgtgctaaacgtaaaagacctttccagattaacagttgggttgtgttacctgaacatattcactgtatctggacgttgccggaaggcgattctgattattctggtcgttggcgggaaattaaaaagtcttttacgcgtgcgttagcgcaaaaccagatctggcagccgcgtttttgggaacatgccatccgtaatgatgaagattatcggcgccatatggattacgtttatatcaatccagtgaaatatcggcttgttggatgcgtgagggattggccatattcaacgttccaccgcgatgtgaggaaagggttatatcctgaagattgggctggggatacggtcgaaatagatgccggagagcggcggtaa

SEQ ID NO: 91303 - DNA, 1122 bp, Enterobacter aerogenes
atggactatcaattaacgcttaactggcccgacttcatcgaacgctactggcaaaaacgcccggtagtgttaaagcgcggcttcgccaatttcatcgacccaatcagcccggatgaactggccggcctggccatggagagtgaggtcgacagccgcctggtgagccatcaggacggaaaatggcaggtcagccatggtccatttgaaagctacgatcatcttagcgagaacaactggtcgctgctggtgcaagcagtaaacaactggcacgagccgacggcggcattgatgcatcccttccgcgccctgccggactggcgtatcgatgacctgatgatctctttctccgttcccggcggcggcgtgggtccacaccttgatcaatacgacgtgtttattattcagggcaccgggcgccggcgctggcgcgtgggcgaaaaggtgccgatgaagcagcactgcccgcatcccgatctgctacaggttgatccattcgaggccatcatcgatgaagagatggaacctggcgatattctctacattccgccaggattcccacatgaaggctattctctggaaaattcgcttaactattcggtcggctatcgtgcgccgaatgcccgcgagctgttcagcggttttgctgactatattttgcaacgagagttgggcagccagcgctatgccgatccggacgtgccatcccgcgaccatccggccgatattctgccggttgaactggatcgcctgcgtgagatgatgctggggctgattaaccaacctgaacactttaagcagtggtttggcgagttcattacccaatcccgccacgagcttgacgtagcgccgccggagccgccataccagccggatgaaatttacgatgcgctgcagcagggcgataagctcgcccgccttggcggcctgcgcgtgctgcggatcgatggcgaagtgttcgttaacggcgagaaaatcgactctccgcatcgcccggcgcttgacgccctggcaacgcatctgtcgctacgcgccgaacatttcggcgatgcgctggaagacccatctttcctcgccatgctggcggcgctggtcaacagcggatactggttcttcgaggactga

SEQ ID NO: 91304 - DNA, 1467 bp, Enterobacter aerogenes
atgaaaagcgtgttacgacatattcttccgctttctctgcgcgtccgctttctgctggcgaccgccgccgtggtactgatcctgtcgttggcgtacggcatggttgcgctggtaggctacagcgtgagctttgataaaaccaccttccgcctgctgcgcggcgagagcaacctgttctacatgctggcgaagtgggaaaataaccacatcgatgtcgatatccccgaacacctgaacatgcagagcccgacggtgacgctgatttacgacgccaaaggtaaactgctgtgggcgcagcatgacgtcccgtggctggtgaagcggatccaacctgaatggctgaaaagcaacggctttcatgaaatagaagccgatgttggcagcagtagtctgctgctgcgcaataatgatgaaatgcgcgaacagcttgacgccatccgcgaggaagacgactcctcggagatgacgcactcggtggcgattaatctctatccagccaccgcgacgatgccgcaattgagtattgtggtggtcgacaccattccggtggagctaaaacgctcttatatggtgtggagctggtttatttacgtgctggcggccaacctgttgctggtcattccgctgctgtggcttgccgcctggtggagtttacgccctatcgaatccctggcgaaagaggtccgcgagctggaagaacatcatcgcgagaggctcgattctcacaccactcgtgaacttaccggcctggtcagtaacctcaatcgcctgctgaaaagcgagcgtgaccgctatgacaaataccgaaccaccctcactgacttaacccacagcctgaaaacgccgctggcggtgctgcaaagtaccctgcgctcgttgcgcggcgagaaaatcagcgtcagcgaagctgagccggtaatgctggagcagattagccgcatctcgcagcaaatcggctactatctccaccgcgccagcatgcgcagcggcaatgcgcttctcagccgggaactgcaccccatcgccccgctgctggatagcctgacctctgctttaaataaggtctaccagcgtaaaggggtcaacatcacgctggatatttcgccggagataagctttgtcggcgagcagaacgactttatggaagtgatgggcaacgttctcgataacgcctgcaagtactgtctggagtttgtcgaagtctcggtacgccagaccaacgacaaccagttgcatattctggtggaggacgacggccccggtatcccccgcaaccaacgcacggcggtgttcgatcgcggccagcgcgccgatacgttgcgtccgggtcagggggtaggcctgtctgtcgcccgcgatatcgtcgaacagtacgacggcgatatcctgaccggcgacagcctgctcggcggcgcctgcatggaagttatctttggccgccagcttcctgatgataaagagagctaa

SEQ ID NO: 91305 - DNA, 675 bp, Enterobacter aerogenes
atgcgcgtactcgtcgttgaggataatgctctgctgcgccatcacctcaaggtccagctacaggaattggggcatcaggtggatgctgcggaagatgcaaaggaagcagactactacctgggcgagcacatcccggatgtcgccatcgttgacctcggcctaccggatgaagacggtctgtcgctaatccgccgctggcgcagtcacgacgtatcggtaccggtactggtgctgaccgcccgtgaaggctggcaggataaagttgaggtgctgagcgctggcgccgatgattacgtcaccaaacccttccatatcgaagaggtcgccgcccgcatgcaggcgttgctgcgtcgcaatagcggtctggcctcgcaggttatctcgatcccgccgttccaggtggatttatcgcgccgcgagttatcggtcaatgaacagccgatcaagctcaccgcctttgagtacaccatcatggaaacgctgatccgtaaccgcggcaaagtggtgagcaaagattcgctaatgctgcagctctacccggatgccgaactccgcgaaagccacaccatcgatgtgttgatggggcggctgcgtaagaaaatccaggcgcaatatccgcaggacgtgatcaccaccgtgcgcggccagggctacttattcgaactgcgcggatga

SEQ ID NO: 91306 - DNA, 1371 bp, Enterobacter aerogenes
atggaattatcctcactgaccgccgtttcccccgtagacggccgctacggcgataaagtcagcgcgctgcgcggtatcttcagcgaattcggtttgctgaaattccgtgtacaggtagaagtccgctggctgcaaaaactggccgcgcacgcagcgatcaaggaagttcctgcttttgctgccgacgcaaacggtttccttgataaaatcgttgccgacttcagcgtagaggacgcggagcgtatcaaaaccatcgaacgcaccaccaaccacgacgtgaaagcggtagaatatttcctcaaggaaaaagtcgccgatatcgccgagctgcacgcggtgtcagaattcattcacttcgcctgtacttctgaagacatcaacaacctgtcgcacgcgctgatgctgaaaaccgcacgtgacgaagtggtgctgccgtactggcgcaagctgattgacgcgattaaagatctggcgacccaataccgtgacgtgccgctgctttctcgtacccacggtcaaccggctaccccgtccaccatgggcaaagagatggccaacgtcgcctaccgtatggagcgccagtaccgtcagctgaatcaggtggaaatcctcggtaaaatcaacggcgcggtcggtaactacaacgcccacatcgctgcctatccggaagttgactggcaccagttcagtgaagagttcgttacttcgcttggcattcaatggaacccgtacaccacccagatcgagccgcacgactacattgccgaactgttcgattgcatggcgcgcttcaacaccatcctgatcgatttcgatcgcgatgtgtggggctacattgcgctcaaccacttcaaacagaaaaccatcgccggcgaaatcggctcttcgaccatgccgcataaagtgaacccgattgacttcgaaaactccgaaggcaacctcggcctggcgaacgccgtgatgcagcatctggccagcaaactgccggtttcccgctggcagcgcgacctgactgactccaccgtgctgcgtaacctcggcgtaggtatcggttatgcgctgatcgcgtaccaatccacgctgaaaggcgtgagcaaactggagctgaaccaggatcgtctgctggacgaactggaccacaactgggaagtgctggctgagccgatccagaccgtcatgcgccgctacggtatcgaaaaaccgtacgagaagctgaaagagctgacccgcggtaagcgcgttgatgccgaaggcatgcagcagttcatcgacggcctgccgctgccggaagcagaaaaaatccgcctgaaggcgatgaccccggctaactacatcggccgcgcgaccaccatggtcgacgagctgaagtaa

SEQ ID NO: 91307 - DNA, 642 bp, Enterobacter aerogenes
gtggcgaagaattattatgacatcactctggcgttggcgggcgtatgccaggcggcgcggctggttcagcaactggcgcatcaggggcattgcgacagcgacgccctgcacgtttcgctgaacagcatcatcgatctcgacccggattcaacgctggcggtattcggtgggagtgaagccaatcttcgtctcgggcttgagactctgctcggcgtgctgaataccagcagccgtcagggcctcaacgcggagctcacccgctacacattaagcctgatggtgctggaacgtaaactcgccgccagcaaaggggcgatggataccctcggcaaccgcatcggcggcctgcgccgtcagttagaacattttgatctacaatctgaaacgctgctcagcgcgatggccggcatttacgttgacgtcatcagcccactggggccgcgcattcaggtcacaggttcccctgccgtgctgcaaagcccgcaggttcaggcgaaagtccgttctaccctgctcgccggcattcgttccgccgtgctatggcatcaggttggcggcggacgtctgcagctcatgttttctcgcaatcgtctggttaaccaggcaaaacaaattcttgctcatttaaccccggagttatga

SEQ ID NO: 91308 - DNA, 1107 bp, Enterobacter aerogenes
atgtcagaaagtccaaaaaaagtgatcgtcggcatgtccggcggcgtcgattcctctgtttccgcctaccttctgcaacagcaagggtataaggtggaaggcctgttcatgaagaactgggaggaagacgacggtgaggaatactgcaccgccgctgccgacctcgccgacgcgcaagccgtctgcgataagctcggtattgaactgcataccgtcaactttgccgcagaatactgggataacgtcttcgagctgttcctcgaagagtataaagcaggccgtacgccgaacccggatatcctgtgcaacaaagagatcaaattcaaagccttccttgagttcgccgcagaagacctcggcgctgactacatcgccaccggtcactacgtgcgccgcgccgatgtcaacggcaaaagccaactgttgcgcgggctcgacggcaataaagaccagagctatttcctctacaccctcagccacgaacaaatcgcgcaaagtctgttcccggtcggtgagctggaaaaaccgcaggtgcgtaaaatcgccgaagagctggatcttatcaccgcgaagaaaaaagactctaccggcatctgctttatcggcgagcgtaagttccgcgacttcctgggccgctatctgcctgcgcagccgggcaaaatcatcaccgtcgacggcgatgagatcggcgaacaccaggggctgatgtatcacaccctcggccagcgtaaagggctcggcatcggcggcaccaaagaaggtagcgaagatccgtggtacgtggtcgataaagacgtggaaaacaacgtgctgatcgtcgcccagggtcacgatcacccgcgtctgatgtccgtcggcctgattgcccagcagttacactgggtcgatcgtcagccgctgcagggcacccttcgctgcacggtgaaaacccgctaccgccagaccgacatcccctgcaccgtgaaggcgctggatgacgaccgcatcgaggttatctttgatgaacccgtcgccgccgtgacgccgggacagtcggctgttttctatagcggcgaagtgtgtctcggcggcggaattatcgaacagcgtctgccgctggcgtcttga

SEQ ID NO: 91309 - DNA, 459 bp, Enterobacter aerogenes
atgtttaaaccgcacgtcaccgtcgcctgcgtggtacacgccaaaggcaaattcctgattgttgaagagacgattaacggcaaagcgctatggaaccagccagccggtcatcttgaggccaatgagaccctggcgcaggccgccgagcgcgaactgtgggaagagaccggtattcgcgccgcgccgcagcacttcatccgcatgcaccagtggcaggccccggataatacgccattcctgcgcttcctgtttgccattgagcttaacgatacgtgcgctactgaaccgcacgacagcgacatcgatcgctgtctgtggctcagcgctgaggaaattcttaacgctaaaaacctgcgctcgccgctggtggcggaaagcattcgcagctatcagcaggatccgcggcatccgctgtcgctgattgcggaatttaactggccgttcacagggggtgcctga

SEQ ID NO: 91310 - DNA, 651 bp, Enterobacter aerogenes
atgcggcaattgagagagcctgaaaataccatgcagaaaacttcatttagaaaacatcgcgttgagcgattcagcacacaacaagtgaccagacaacgtaaagaacgccagcttaaaactgtgatcttgttcaataaaccctacgatgtgttgccgcagtttaccgacgagtccgggcgtcgcacgctgaaggattttatccctgtcgccggcgtttacgctgccggtcgccttgaccgcgacagcgaaggtctgctggtgctgaccaacgacggcgcgctacaggcaaaactgacccagcccggcaagcgcaccggcaagatttatttcgttcaggtggaaggcgaacctacagaagaagcgatccgcgcgctgcgcgacggagtgacgctaaacgatggacccaccctacccgccggcgtggagctggtggatgaacccgcctggctttggccgcgcaatccgccgattcgcgagcgtaaatcgattcccactcgctggctaaaaatcaccctctatgagggacgcaaccgtcaggttcgccggatgaccgcccacgtcggttttccgacgctaaggctaattcgctacgccatgggcggctatacgcttgatggtttagccaacggcgagtggcgtcaaaccgaataa

SEQ ID NO: 91311 - DNA, 1251 bp, Enterobacter aerogenes
atggaaagcaaagtagtagttccggcggaaggtcagaaaatcaccctgcaaaacggcaaactgaacgtccctcataacccgattatcccgttcattgaaggcgacggtatcggtgttgacgttaccccagcgatgctgaaagtggttgatgccgccgttgagaaagcctataaaggcgagcgtaaaatttcctggatggaagtttacaccggtgaaaaatctacccacgtttacggccaggatgtctggctgcctgctgaaaccctcgatctgattcgtgattaccgtgttgctattaaaggtcctctgacgacgccagttggcggcggcatccgttctctgaacgtggcgctgcgtcaggagctggatctctacgtttgcctgcgtccggtacgttactatcagggcaccccgagcccggttaaacacccggagctgaccgatatggttatcttccgtgaaaactccgaagatatttatgcgggtatcgagtggaaagcagactctgccgaagctgacaaagttatcaaattcctgcgcgatgagatgggtgtgaagaaaattcgcttcccggaacattgcggtatcggcatcaagccgtgctctgaagaagggaccaaacgcctggtacgcgccgctatcgaatatgcgatcactaacgatcgtgattccgtgaccctggtgcacaaaggcaacatcatgaagttcaccgaaggcgcgttcaaagactggggttaccagctggctcgcgaagagttcggcggtgagctgatcgacggcggcccgtgggtgaaaatcaagaacccgaagaccggcaaagagatcgtggttaaagacgtgatcgccgatgcgttcctgcagcaaatcctgctgcgtccggctgaatacgatgttatcgcctgtatgaacctgaacggcgactatatctctgacgcccttgcggcgcaggttggcggtatcggtatcgcgccgggcgccaacattggcgacgagtgcgcgctgttcgaagccacccacggtaccgcgccgaagtatgccggccaggataaagtgaacccaggttccatcatcctgtctgcagaaatgatgctgcgtcacatgcagtggttcgaagccgcagacctgattgttaaaggcatggaaggcgccatcgccgccaagaccgtgacctatgacttcgaacgtctgatggaaggcgctaagctgctgaaatgctctgagttcggcgacgcgatcatcaaaaacatgtaa

SEQ ID NO: 91312 - DNA, 300 bp, Enterobacter aerogenes
atgaaaaagattattctgaccctggtattagcatcagcaagtatttctgccttcgcgggttaccatccggtcgcaaggaccgcagctgtagcctcagccgatcatccggtggcggtcgcggcggcaaccagcgataatggcaaccatccggtggcgcgtactacggctgtcgccacagcggaccatccggtggcggtggcggcggcaaccagcgataacggtcgccatcctgtagcgcgtaccacggttgtcgcttcagcggatcatccggtcgcggcggcggcagtgaccagccattaa

SEQ ID NO: 91313 - DNA, 348 bp, Enterobacter aerogenes
atggctttgatccccaaaaactacgcccgcctggaaagtggctatcgcgagaaggcgcttaaaatttatccatgggtatgcggacgctgctcgcgcgaatttgtctactccaacctgcgtgaactgacggtacatcacatcgatcacgatcataccaataacccggaagatggcagaaactgggagctattgtgcctctattgccacgatcatgagcactccaagtacactgaggccgaccagtacggtaccagagtggtggccggtgaagatgcgcaaaaggatgtcggtgaagccacctacaatccttttgccgatttaaaagccatgatgaacaagaagaagtag

SEQ ID NO: 91314 - DNA, 960 bp, Enterobacter aerogenes
atgaataagcaacctgtcattggcatcagcggctgtttaaccggctcgtccgtgcgctttgatggcggacataaacgattgccatttgcgatggatgaactggcgccgtgggtaaccttcaaacccatttgtccggaaatggccatcggtcttagctctcctcgtccggctctgcgcctggtgcggaccgacgaaggtgagattcagatgcgttttagcagcgagccgcatgacgatgtcacgggcaaaatggcggactttaccgccggttacctgcctgggcttggcgaattagcaggttttatcgtctgcgccaaatcaccgagctgcggcatggaacgcgtgcgcctgtatgatgaaaaaggcaaccgcgggcgcaaagaaggaaccggcctgtttacccacgcgttgatggaagcctatccgtggttgccggtagaagaggatggacgactgcacgacccgcagttaagagagaattttgtcgagcgtcttttcgccctgcatgaactgaatacgctgcggggcaatggcctgacccgtcgggcgttaatggattttcatagccgctataaactgcagctactggcgcatcatcaggccggctatcgagaaattggccctttcgtcgcgtcgatgcatcaatggcaagacctggatgcctttttcgtcgcctaccgcgataagctgatggcgatcctgaaaaacaccgcctccaggaaaaaccacaccaatgtgctgatgcatattcagggctatttccgcgaacggttgaatagccgccagcgcggcgagctgcgtgacgtgatactgcattatcgcgcggggctgctcccaatcctggcgccccttacgctgcttaagcattacctggccgagtatcctgatcgctatctgcagacgcaaaactattttgatccctacccgcaggctttagccctgcgcctgggtgttaattaa

SEQ ID NO: 91315 - DNA, 729 bp, Enterobacter aerogenes
atgtcctactccatcggcgaattttcccgtctttgcggcatcaatgcgaccacgctgcgggcctggcaacgccggtacggcctgctaaaacccgagcgtaccgatggaggccaccgcctctataacgatgatgatgtccaactggcgctaaaaattctcgactgggtaaaaaaaggcgtgcctgtaagccaggttaaaccgctgttgacccgtcctgacgccggccctggtgataactggcttgtcctgcaggacaatatgctgcagcggctgaaagagggaaaaatcgaatccctgcgccagctgatctacgatgccggtcgggaaaatccccgccctgagctagtttccaacgtattgcgcccgttacgcagtaaagtatcggctaatgtgccggcgatgcagaccctgcgtgagatcctcgacggcatcattatctcctacacctctttttgtcttgaaggcgataaacgcgcgccgggcgataactctctgattaccggctggcacctgagcgacccatgtgaaatctggctggaagcgctcatgcgtaccggacaaggtcatcgcattgatgtgctgccgatgccggccaccgcgctggccccggaaatatttcctcaacgccactggttgctggtgaccacgggccagctcaccgccgcacgccagagacagatagatctctggcgccagcacgttgtctcgctggacgttatctccctctaa

SEQ ID NO: 91316 - DNA, 405 bp, Enterobacter aerogenes
atgctgaacaaatcgccgttggtgttgttattgttccctttactgctggcaggttgtcaccatcatcagcccacgccgcgcacggcggcgagcgccactgaagtagacgatctgttcgccagcctcccttcgtcgaaaccatcaagtcgggctacctacgcccgacagataatgaccgccatcagggcaaaaatgcctgattccgtggagtatcccgggcaaacctgtcggattcgtttgtcgctgcagcgtgatggcaccgtaaattccgctaccgtggaaaagggtgatgaagaactatgcaacactgttgtagccgcatttatgcaagcagacattcccgccgcgccggatgatgacgcttatcagacgtttaaaaataccagtatcgattttaaagcataa

SEQ ID NO: 91317 - DNA, 351 bp, Enterobacter aerogenes
atgaacactgctgcggttattcacgatctactcgattggatcgacaacaatctcgagagccgtctggatattgagaccgttgccaggcgtgcgggctattcgaaatggcacctgcagcggctcttcaaggagcacaccggttaccctctcgctgaatatattcgcatgcataagctacaaagatcggtcgaacgcttagccaacagcgacgagcctattttaaacgtggcgatcgcactgggtttcgactcccagcaatcctttaaccgcagcttcaagcgccagtatggtcaggcgcccggcgcctggcgacgcagtatctgcggcgcagaaacacagcatttacgctaa

SEQ ID NO: 91318 - DNA, 1176 bp, Enterobacter aerogenes
atgagcctgcaaaaaacctggggaaaacgtcatctgactgcagtaggtatggtgctactctcggccctgctcgccggctgcgatgaaggcgtcgcgcaaaacgccgcgccgcaagcgcctgccgtcagcgccgctgaggtggtagtgaaatccattagtcagtgggatagctttaatggccggattgaggcggtggaaagcgtgcagctacgtccccgcgtttctggttatattgataaagtgaattacaccgacggtcaggaggtgaagaagggggaggtgttattcaccattgacgatcgaacctatcgcgcggcgctggaacaggcgcaggcaaccctggcaagagcgaaaacgcaagccagcctggcgcgcagtgaagcaaaccgtaccgataaattaatcaataccaatctggtttcccgtgaagagtgggagcagcgccgctccgcagcggtccaggcgcaagcggatattcgcgccgcgcaggcggcggttgatgccgcgcagcttaatctggatttcaccaaagtgaccgcgcccatcgacggccgcgccagccgcgcgttaatcaccagcggtaatctggtcaccgctggcgataccgccagcgtccttaccacgctggtgtcgcagaaaacggtttatgtctactttgacgtggatgagtcgacctatcttcactaccaaaatcttgcccgcagggggcagggggcctccagcagccaccaggcattgccggttgagatcggccttgtgggcgaagagggctaccctcatcagggcaaagtggattttctggataatcagttaacgccgagcaccggtacgatccgcatgcgcgcgctgctggacaattcgcagcgtctgttcacgccgggactctttgcccgcgtccgcttgccaggcagcgctgaattcaaagccacgcttatcgacgacaaagcggtactgaccgatcaggaccgtaaatatgtctatatcgttgataaagagggtaaagcccagcgtcgcgatattgcgccggggcggttggctgccggtttacgtatcgtcaagcaggggctgaaccctggggataaagtcatcgtcgatggtttgcaaaaagtgtttatgccgggaatgccggttaacgcgaagaccgttgccatgaccaccagcgccgccctcaactga

SEQ ID NO: 91319 - DNA, 3153 bp, Enterobacter aerogenes
atggacttttcccgcttttttatcgacaggccgatttttgccgccgtgctgtcgattctgatttttatcaccggcttgatcgccattccgctgttgccggtcagcgaatatcctgatgttgtaccgcctagcgtgcaggtgcgggcggaatatcccggcgccaacccgaaagtgatcgccgaaaccgtggcgacgccattggaagaagccatcaacggcgtcgaaaatatgatgtacatgaagtccgtcgcaggctctgacggcgtactggtcactaccgtcactttccgtccgggaaccgaccccgatcaggcgcaggttcaggtgcaaaaccgggtctcgcaggccgaggcgcgtctcccggaagatgtgcgccgtttaggcatcaccacccagaagcaatcgccaacgctgacgctggtggtgcatctgttttcacccggcggtaagtacgattcactgtatatgcgtaactacgccacgttgaaagtaaaagatgaactcgcgcgtttgcccggcgttgggcagatccagatttttggctcgggtgaatatgcgatgcgcatctggctggatccaaataaggttgcggcgcgcgggttaaccgcatcggatgtggtgacggcgatgcaggagcaaaacgttcaggtttccgccggacagctgggcgccgagccgctgccgaaagagagcgattttttgatctctattaacgcccaggggcgtctgcatacggaagaagagtttggcaatattattctgaaaacggcgcaagacggttcgctggtgcgcctgcgcgacgtggcgcgtatcgaaatgggctcgggtagctatgcgttacgttcccagcttaacaataaagacgcggtcgggattggtattttccagtcgccgggggcgaatgctatcgatttgtctaacgccgtacgcgcgaaaatgaacgaactctccacccgtttcccggaagatatgaaatgggcggcgccgtacgatccgaccgtgtttgtgcgcgattcgattcgcgcggtggtgcaaacgctgctggaagcggtagtgttggtggtgctggtggtaattttgttcctgcagacgtggcgtgcgtcgattattccgcttatcgcggtgccggtatcggtggtgggcaccttcagcattctttatctgctgggcttttcgctgaataccctgagtctgttcgggttggtactggcgatcggtatcgtcgtggatgatgccatcgtggtggtggaaaacgtcgaacgaaacatcgaagaggggctggcgccactagcggcggcgcatcaggcgatgcgcgaagtctccgggccgattatcgctatcgcgctggtgttgtgcgcggtgtttgtgccgatggcgttcctctccggggtaacggggcagttttataagcagtttgcggtgacgattgcgatatcgacggtgatctccgccatcaactccctgacgctctcgccagcgctggctgcgctgctgttaaaaccgcacggcgcggcgaaagacttcccgacccggcttatcgatcgcttgttcggctggattttccgtccgtttaaccgttttttccatcgtagctcaaacggctatcaggggctggtaggcaaaacgctcgggcgacgcggcgcggtgtttgtggtctacgtcctgctgctctgcgccgctggcgtgatgtttaaagtcgtacccggcgggtttattccgacgcaggataaactgtatttaattggcggagtgaaaatgcccgaaggctcttcactggcgcgcaccgacgccgtgatccgcaaaatgagcgaaatcggtatgaataccgaaggcgtggattatgcggtggcttttccggggcttaatgcgctgcagttcaccaatacgccgaacaccgggacggtcttttttggtctgaaaccgttcgatcagcgaaaacacaccgcagcggaaattaatgccgagattaatgccaaaatcgcgcaaattcagcagggctttggtttctcgattctgccgccgccgattttagggctgggtcagggttccggctattcactgtatattcaggatcgcgccggtctgggttatggcgcgttgcaaaacgcggtgaacgcgatgtcgggttcgattatgcagacgccggggatgcatttcccgatatcgacctatcaggcgaacgtgccgcagctggatgtgcaggtcgatcgagataaagcgaaagcgcagggcgtgtcgttgaccgaccttttcgggacgctgcaaacttatctggggtcatcgtatgtgaatgactttaaccagtttgggcgtacctggcgcgtaatggcgcaggctgacgggccgttccgcgacagcgtggaagatattgctaatttacgcacccgcaataatcagggcgaaatggtgccgattggcagtatggtgaatattaataccacctacggaccggatccggtgattcgctacaatggttatccggcggcggatttgattggcgatgccgatccccgcgtgctctcgtccacccaggcgatgacgcagctggcaggcatgtctaagcagatactgccgaatgggatgaatattgagtggacggatctcagcttccagcaggctacgcagggcaatacggcgctgatcgtcttcccggtcgcggtcctgctggcattcctggtgctggcggcgctatatgaaagctggacgctaccgctggcggtgatccttatcgtcccgatgaccatgctctccgcgctgtttggcgtctggctgaccggcggcgacaataacgtatttgtgcaggtagggctggtggtgctgatggggctggcgtgtaaaaacgcgattctgattgtcgagtttgcccgcgaactggaaattcagggcaaagggattatggaagcggcgctggaagcctgtcgtctgcgtttacgtccgattatcatgacctcgattgcctttattgccgggacgattccgctgattcttggccatggcgcgggggcggaagtgcgcggcgtcaccgggatcacggtgttctccggtatgctcggcgtgacgctgtttgggctgttcctgacgccggtgttttacgtgacgctgcgaaaactggtgacgcgcggcgaaccggttagggacgtcctgcctgagtag

SEQ ID NO: 91320 - DNA, 480 bp, Enterobacter aerogenes
atgttagattaccgcttcccgacagctttgcagatggttctcagcgtagcgatggcggagcaattgggtgaacgttcgacgagtgcgatcctggcctacggcctggaagccaacccgagctttatccgtaaactcatggttccgctcacccgcgacggcatcatcgtctccacgcttggccgcaacggctctattcatcttggccgtcctgccgatcaaatcacgctgcgtgatatctatctttccgttattgaagataaaaaactgtgggcgtcccgccctgatgtcccggctcgctgcgtgatcagcgccaactcctgctggtactttaagtccgtagccgatgaagccgagcaggcgtcgctcgcggtgttagctcgccataccgtggcaagcgccctggaagaggtcaaaaaagccgataccagcggctgcgatccgctgcctgagctgactgcccgctataaagaagcgcattaa

SEQ ID NO: 91321 - DNA, 891 bp, Enterobacter aerogenes
atgcctaatctaccctccattgcgttgctaggtcctggcgctatcggcacgaccatcgccgccgtactgcatgaagcgggccgcaaaccggtgctctgcgggcgcaccgcgcatcaacggttggttttgcgccacgaagacggcgaaacgatcattccaggaccagtattgaccgatccacatacgctggaacacccgattgagctgctgtttgtggcggtgaaaaccacccaggtagcggattgcgcgggctggcttaacgcgctgtgcgatgaaaacacggtggtctgcgcactacagaacggtgtcgaacaggaaagcctgcttaacccctatgttaacggcgcaaaggtattgccttcggttgtctggtttccggcacaacgagaggcggatgcttcggtatggttacgcgccaaaccgcgcctgacgctacccgatacgccgcaagggaagaagatagccgaggttctcgacggtacccgctgcgcggttgagttgacggctgatttcacatcggtcgcctggcggaaactgctgcaaaatgccgtcgctggcctgatggtgctggcgaatcgccgcgccgggatgttttcgcgccaggacatcaccgggctggcgctggcctatctacacgagtgtctggcggtggcccgcgcagcaggggcggtactcgccgatagcgtgccgcaggaaattgttgatgggtttcatcaggcgccggcggatttaagcacctcgatacttgccgaccgtcaggccaatcgtccgctggaatgggacattcgcaacggagttgtacagcgctatggccgaacgctgggcgttgccacccccatcagcgatgtcgtcgtgccgctgctggcggctggaagcgaggggcctggctaa

SEQ ID NO: 91322 - DNA, 483 bp, Enterobacter aerogenes
atggcgatgaacggtacgatcacaacgtggtttaaagataaaggtttcggatttatcaaagatgaaaatggtgataaccgctattttcacgtgattaaggtcgccaatccggagctgattaagaaagatgcggcggtcacgtttgaacctacgaccaataataaaggtctatcggcttacgcggtgaaggtcatcccggaaagcaaacatctgtatattgccggtgagcgcctgaagctgacatcgatcaagtcttacctggtctacagtgaggaagtgccagcagatacgcatatcgacaaggaaaatgcggtgctctccgtggggctgctgatgaacagtatcaagcccaaagcgagcgtgaagccgggtgaaatgcgtacgctgaaaaagctggcgatcactacctttcagggcaccacgctcatcttctctgaagatgaaatcgacatcgacgccacggtgaagctcctgaaagtctga

SEQ ID NO: 91323 - DNA, 540 bp, Enterobacter aerogenes
atgacaaaacttaccttacaagagcagatgctgaaagcgggtctggtcaccagtaaaaagatggctaaggttcagagaacggcgaaaaagtcacgtgttcaggcgcgtgaagcccgcgaggccgttgaggaaaacaaaaaagcccagcttgagcgcgacaagcagctcagcgagcagcaaaagcaagcggctttagcaaaagagtataaagcgcaggttaagcagctgatcgaaatgaaccgaatcacgattgcgaaaggccatatcgcttttaactttacggataataatctcatcaaaaacattgatgtggataaaaccacccaggcgcagctcattagcggccgtctggcgattgcccgccttgctgttgataataacggtaaatatgagtacgcgattattcctgccagcgtggcggataaaatcgcccagcgcgacgccgagagtattgtgttgaacagcgccctgagccaggaagccgaggacgaagacgatccgtacgctgactttaaagtacctgatgatttgatgtggtaa

SEQ ID NO: 91324 - DNA, 258 bp, Enterobacter aerogenes
atgaatttatcccgtcaggaacaacgtaccttacacgttctcgcgaaaggcggacgtattgcgcacattcgcgatacctcaggccgcgtcatcgccgtggagtgctatagccgcgaaggcctactgctcagcgactgtacgctcgccgtcttcaaaaaactccgcactaaaaaactgattaaatccgttaacggccaaccataccgcatcaacaccagcgggctgaataacgttcgcgcccagccggataaccgctaa

SEQ ID NO: 91325 - DNA, 759 bp, Enterobacter aerogenes
atgaccacaactatcgatatcccacgtatctttaccatcagcgaaagtgaacatcgtatccataaccccttcacggcggaaaaatatgccacgcttggccgcgtacttcgcctgcaggcaggggcgcagatcctcgaccttggcagcggttctggtgaaatgctctgcacctgggcgcgggaccatgctatcggcggtctgggcattgatatgagcccattgtttaccgcgcaggctaaacaacgcgccgcagcgcttggcgttagcgatcgcgtcacttttctccatagcgatgcggcaggttacgttgccgaacggcaatacgatgtagcggcctgtatcggcgcgacgtggattgccggcggcgtcgctggaaccgtggcgcagttagcccgcagccttaagcctggcggtatgctacttatcggggaaccctggtggcgtaaggtacccgccacagaagaacaggcgcgcgcctgcggcgtttctgcggtggccgatttgttgccgcttccagcgctggtcgccacttttggcgaactgggctatgacattgttgagatggtgctggctgaccgcgaagggtgggaccgttatgaagccgctaaatggctaacgatgcgccgttggctgctggcgaatcccgacgatgaatatgcggctgaggtacgtgcggagctcaatgccgcaccgcttcgccatgtcacttatacccgggaatatttcggttggggcgtttttgcgctgatgcagaaataa

SEQ ID NO: 91326 - DNA, 1026 bp, Enterobacter aerogenes
atgaaaaagattggatttttgtcatttggccactggacgccatcgtcgcagtcggcgacccgttccgctgccgacacgcttttacaatccatcgatctggccgttgccgccgaagagttaggcgcggacggcgcctattttcgggtgcaccatttcgcccgccagctcagttcaccgttcccgctgctggccgctatcggcgcgaaaactaaaaagattgagattggcaccggcgttatcgatatgcgctacgaaaacccgctatatatggcggaggatgccggcgctgcagatttgatagccggtgggcgtttacagcttggcatcagccggggctcgccggaacaggtgattgatggctggcgtcatttcggttttcaaccgcaggatggcgagtccgacgctgacatggcgcggcgccacactgaggtcctgttggacgtgctgcgcggcgaaggtttcgctaaacccaacccgcaaccgatgttccccaacccgccgggattgctgcgtctcgagccgtactccgccggactacgtgagcgtatctggtggggcgctggctctaatgccacggcgatgtgggcggcgaagctcggtatgaacctgcagagctcgacgctgaaagatgatgagacgggcgaaccattccatatccaacaggcgaaacagatccgcgcttatcgtcaggcctggacggaggcggggcacacgcgtacgccgcgggtatcggtcagtcggagtatttttgccctgatggacgatcgcgaccggatgtattttggctccagccgggataatagcgacagtattggttttcttgatgagaaaacccgcgccattttcggccgcagctatgccgctgaacccgataagctcgtcgagcaactgaaacaggatgaagcgatcgcggaagccgataccttattgctgaccgtaccgaatcagctgggcgtggattataacgttcatgtgattgagtctattctgaagcacgttgcgccggcaatgggatggcgtgattaa

SEQ ID NO: 91327 - DNA, 564 bp, Enterobacter aerogenes
atggcaattaaggacttttttgtacaaactgcaccaggtcggcgtcgctatggcgtcgcattattagttggggttattgccggaattatgtcggcattcgttaagtggggggcggaagtacctctgccgccgcgaacattttccggtgggcgtgatgaatttaatcctccttatctctttttacgcgactatcttggcattgaccctacacataccgtgtacaccttctctgagcatatcatcaacccggtgatggtcacgcatatcatcttttcgctggtgttcgcgattggctattgcgtggtggcggagatattcccaaaagttaaattatggcagggagtatgggccgggattgtcgccaccattgcggtacactggatttcatttccgctattaggacttacgccgtcgttattaaacattccggctgatgaatatatttctgaactgcttggccatattttttggttctgggcaattgaaatgattcgtcgcgatctgcgtaaccgaattacccacgagcctgacgcagaaattccgttagatgcgccattcagataa

SEQ ID NO: 91328 - DNA, 1092 bp, Enterobacter aerogenes
atgggattcaaatgcggtatcgtcggtttgcccaacgtcggcaaatccaccctgttcaatgcgctcaccaaagcaggtattgaagcggccaacttcccgttctgtaccattgagccgaacaccggtgtcgtaccgatgcccgatccgcgtctggacaaactggctgagatcgtcaagccgcagcgtatcctgccgacgaccatggaattcgttgatattgccggtctggttaaaggcgcgtccaaaggcgaaggcctgggtaaccagttcctgaccaatattcgtgaaaccgaagccatcggccacgtagtgcgttgctttgaaaatgacaacattatccacgtcgcgggtaaagtcgatccggcggaagatattgacgttatcaacaccgagctggcgctgtccgacctcgacacctgcgaacgcgccattcaccgcgtgtccaagaaggccaaaggcggcgataaagacgctaaggttgaactggccgcgctggaaaaatgcctgccgcagctggaaaaagcaggcatgctgcgcgcgctggatctgagcaaagaagagaaagaagcgatccgctatctgagcttcctgaccctgaagccgaccatgtacatcgccaacgttaacgaagacggttttgaaaacaatccgtatctcgaccaggttcgcgctatcgctgagcaagaaggttccgtggtggttccggtttgcgccgccgttgaatccgacattgccgagctggacgacgaagagcgtgacgagttcatggccgagctgggccttgaagagccgggcctgaaccgcgtgatccgcgcaggctacgctctgctgaacctgcagacttacttcaccgctggcgtcaaagaagttcgcgcatggactattccggttggcgcgaccgcgccgcaggccgccggtaaaatccacaccgacttcgaaaaaggctttatccgcgcccagaccatcgcctatgaagacttcattgcttacaaaggtgaacaaggcgcgaaagaagccggtaaaatgcgtgcggaaggcaaagactacatcgttaaagatggcgacgtgatgaacttcttgttcaacgtctaa

SEQ ID NO: 91329 - DNA, 585 bp, Enterobacter aerogenes
gtgacgataaaactgattgtcggcctggctaaccccggagcggaatacgcggcaacgcgccataacgctggcgcctggtacgtagatttactggcggagcgccaccgcgcgccgctgcgagaagagagcaaattcttcggctatacctcgcgcctgaacctggcgggggaagacgtgcgtctgctggtgccgaccacctttatgaatctcagcggcaaagccgtggccgcgatggctaccttttaccgtattaatccggatgaaattctggtcgcccacgacgagctcgatttaccccccggcgttgctaaattcaaacttggcggcggacacggcggtcataatggcctgaaggacattatcagcaagctgggtaataacccaaactttcaccgcttacgcgtcggaattggccatccgggcgataaaaataaagttgtcggctttgtgctgggtaaaccaccggccagcgaacagaagctaattgacgaagcggttgatgaagcggcgcgctgtaccgaggtgtggctgaaagacggtttaaccaaagcaaccaaccgtttacacgcctttaaagcgcaataa

SEQ ID NO: 91330 - DNA, 276 bp, Enterobacter aerogenes
atgaaacgcagaaacgcttcgttactcggtaacatactgatgggtttagggttggttgtaatggtggtcggcgttggttactctattttaaaccagcttccacaatttaacctgccgcaattctttgctcatggcgcggtgttgagtattttcgtcggcgccgttttgtggctggcgggcgctcgcgttggcggtcatgaaagagtctccgaccgctattggtgggtacgccactacgataaacgctgccgtcgcgaccagcatcgtcacagctaa

SEQ ID NO: 91331 - DNA, 1665 bp, Enterobacter aerogenes
atgcctttccgcgccctcatcgacgcttgctggaaagaaaaatacactgcatcgcgctttacccgcgatctcatcgccgggataaccgtcgggatcatcgctatcccgctggcgatggcgttagcaattggcagcggcgtagcgcctcaatatggactctacacctcggcggtggcggggattgtcatcgccctgaccggcggttcgcgctttagcgtttccggccccaccgcggccttcgtggtgatcctctatccggtgtcacaacagtttggcctggccggcttgctggtggcgacgctaatgtcgggtatcttcttaatccttttcggcctcgcccgctttggccgcctgattgaatatatcccgctttcagtcactcttggctttacctccggtatcggcatcaccatcggtaccatgcaaattaaagacttccttggtctgcagatggcgcatgtcccagagcactatctgcagaaagtcggcgcgctggtgatggcgctgccgacaattaacgttggcgatgccgccatcggtatcgtgacgctgggtattctgattttctggccgcgtttgggcatccgcctgccggggcacctgccggcgctgctggcgggctgtgcggtgatgggcatcgttaatttactcggcggacatgtggcgaccatcggctcgcagttccactatgtcctcgccgacggcagccagggcaacggtatcccgcaattgctgccgcagctggtgttgccgtgggatatgccgggctcggagttcaccctgagctggtcgtcgctgcgcgcgctgctgcctgccgccttctctatggcgatgctgggcgccattgaatcactgctctgcgcggtggtgctcgacggtatgaccggcaccaaacacaaagcgaatagtgagctggtcggccagggcctgggcaatatcatcgcgccattctttggaggcattaccgccaccgcggcgattgctcgctccgcggctaacgtgcgcgccggcgcgacctcgccgatttccgcggtgatccatgccctgctggtgatcctcgcgctgctaatcctcgccccgctgctctcgtggctgccgctatcggccatggctgccctgctgctgatggtagcgtggaacatgagcgaggcgcataaggtgattaacctgctacgccacgggccaaaagacgacatcgttgtgctgctgatgtgcatgtcgctgaccgtgctgttcgatatggtcatcgccattagcgtcggtatcgtgctggcttcgctgctgtttatgcgccgcatcgcgcgcatgacgcgactggcgccggtcaacgttgaagtgccggacgatgtactggtgctacgggtgatcggcccgctgttcttcgccgcggcggaaggattgttcaccgatttggaaagccggattgcaggcaagcgcgtggtggtgctgaagtgggatgcggtgccggtgctggacgccggcggtcttgacgctttcttgcgctttgtgaagcgcctgccggaaggctgcgagctgcgggtatcgaaccttgagttccagccgctgcgtactttggcgcgcgcaggggtccagccgattccgggacgcctgagcttctacccggaccgtaccgcggcgctggcggatattgaattaacgcaataa

SEQ ID NO: 91332 - DNA, 948 bp, Enterobacter aerogenes
gtgcctgatatgaagctttttgctggtaacgccaccccggaactagcacaacgtattgccaaccgcctgtacacttctcttggcgacgccgctgtaggtcgttttagcgacggcgaagtcagcgtacaaatcaacgaaaacgtacgcggtggtgatattttcatcatccagtccacttgtgctcccaccaatgacaacctgatggaattggttgttatggttgatgccctgcgtcgcgcttctgcaggtcgtatcaccgctgttatcccttacttcggctatgcccgccaggaccgtcgcgtacgttccgctcgtgtgccaatcaccgctaaagtcgtcgctgacttcctgtccagtgtcggcgttgaccgcgtactgaccgttgacctgcacgctgaacagattcagggcttctttgatgttccggttgataacgtattcggtagcccaattctgctcgaagatatgctgcagctgaatctggacaacccgatcgtggtttctccggacatcggcggcgtggttcgcgctcgcgctatcgcgaagctgctgaacgataccgacatggcgatcatcgataaacgccgcccgcgcgctaacgtttctcaggtgatgcatatcatcggcgacgtcgctggccgtgactgcgtgatggttgatgacatgatcgataccggcggtaccctgtgtaaagcagcggaagcgctgaaagaacgcggtgcgaaacgtgtcttcgcctacgcgactcacccgatcttctccggcaatgctatccagaacattaaaaactctgtgattgatgaattcgtcgtctgcgataccattccgctgacgccggaaatcaaagcgctggacaaagtccgcaccctgaccctgtcaggtatgctggccgaagcgattcgtcgtatcagcaacgaagaatccatttccgctatgttcgagcactaa

SEQ ID NO: 91333 - DNA, 855 bp, Enterobacter aerogenes
atgatgagtcgctggcccgcccccgcaaaattgaatctgtttttgtatatcaccggtcaacgcgccgatggttatcacacgctgcagacgttgtttcagtttctcgactatggcgacacgctgaccattgaaccgcgccgcgacgggaaactgcggttgttaacgccggtcgccggcgtgccggatgaagagaacctgattatccgcgccgccagattgctgatggcagcggcggagtctcacggtcaactccccgcaggcagcggcgcggatatcagcatcgacaaacgcctgccgatgggcggcggcttaggcggcggctcttctaacgccgcgacggtgctggtagccctcaatcatctgtggggctgcgggcttagcgaagaccaactggcgacgcttgggctacagctcggcgccgatgtcccggttttcgttcgcggtcacgcggcgtttgccgaaggggttggcgagattctcaccccggtcgatccgccggaaaaatggtatctggtcgcccacccgggcgtgagtatcccgacgccgatcatttttcgcgatccggagttaccacgaaataccccgagcaggtcaattaataccttactaaactgtgaattcggcaacgattgcgaggttatcgcaagaaaacgttttcgtgaggttgatgcaacgctttcctggctgttagaatacgcgccgtcgcgcctgactggcacaggagcctgtgtgtttgctgaatttgacaccgaatccgccgctcgtcaggtgctggaaaaagccccggaatggctgcaaggctttgttgcgcgaggaataaatgtctcgccgctgaagcaagccctactgaagtaa

SEQ ID NO: 91334 - DNA, 615 bp, Enterobacter aerogenes
atgaatcgactgttccgcctgctgccgttggcaagcctcgttctgaccgcctgtgcaatcaatactccgccgcaagggcccggcaaaagcccggactccccgcaatggcgccagcaccagcaggatgtccgcaaccttaaccagttccagacccgcggggcgtttgcctatctttccgatgagcagaaagtgtatgcccgtttcttctggcaacaaaccggccaggaccgctaccgcctgctgctgaccaacccgcttggcagcaccgaactgtcattaaccgcgcagccgggcggcgtccaattgattgacaacaaaggccagacctacaacgccaccgatgccgaagagatgattggccgcctgaccggcatgccgatcccgcttaacagcctgcgtcagtggattatcggcctgccgggcgatgccaccgactattcgctggatgaccagtaccgcctgcgcgaactcaactacacgcagaacggtaaaacctggcacgtgacctacagcggctacaccagcgacaccaaacccgccctgccgtctaatatggaactcaacaacggcagccagcgcatcaagctgaaaatggataactggattgtgaaatga

SEQ ID NO: 91335 - DNA, 1257 bp, Enterobacter aerogenes
atgacccttttagctcttggcatcaaccacaaaacagctccggtagcgctgcgagaacgcgtaacgttttcgccggatacgctcgacaaggcgctggagagcttattggctcagccgatggtgcagggcggggtggtgttatcaacctgtaatcgcacggagctgtatctcagcgttgaagagcaggacaacctgcaggaagcgctgatccgctggctatgtgacttccacggcctgaatgaagaagacctacgtaaaagtctttattggcatcaggataacgacgccgtcagccatctgatgcgtgtcgccagcggcctggattcgctggtgcttggcgagccgcaaatcctcgggcaggtgaaaaaagcgtttgcggattccagccgcggccatctgaacgtcagcgaactggagcgcatgttccagaaatcgttctcggtggctaagcgcgtgcgtaccgaaaccgatatcggcgccagcgccgtttccgttgccttcgccgcctgtacgctggcgcgacaaatttttgaatcgctctccagcgtcacggtgttactggttggcgcgggggaaactatcgaactggtcgcccgccatctgcgcgaacataacgttcgcaaaatggtgattgccaaccgcacccgtgaacgcgcccaggcgctggcggatgaagtcggcgcggaagttatcgccctcagcgatatcgacgagcgtttaaaagacgccgatattattatcagttctaccgccagcccgctgccgatcatcggcaaagggatggtcgagcgcgcgctgaaggcgcgccgcaatcagccgatgctgctggtggatatcgcggtgccccgcgacgtcgagccggaagtcggcaagctggccaacgcctatctgtacagcgttgatgacctgcaaaatatcattcagcacaatctggcgcagcgtaaggccgcggcggtgcaggcggaatcgatcgtcgagcaggaaaccagcgaatttatggcctggctgcgcgcccaaagcgccagcgagactatccgcgaatatcgttcccaatccgagcaggttcgcgaggagctgacggcgaaagcgcttgccgcgctggagcagggcggcgatgcgcaggaaattatgcaagatctggcccgtaagctgaccaaccgcctgatccacgctccaaccaaatctcttcagcaggctgcccgtgacggggatgatgaacgcctgcatattctgcgcaacagcctcgggctggaatag

SEQ ID NO: 91336 - DNA, 1083 bp, Enterobacter aerogenes
atgaagccttctattgttgctaaactggaagctctatacgaacgccatgaagaagttcaggcgctgcttggcgacgccgccaccattgccgaccaggaccgtttccgcgcgctgtcgcgcgaatatgcgcagcttggcgatgttgcccgctgctataccgactggcgccaggtgcaggacgatatcgaaaccgcgcagatgatgctcgacgatccggaaatgcgcgaaatggcgcaggaagagctgcgcgatgccaaagaaaaaagcgaagcgctggaacaacagctgcaggtgctgctgctgccgaaagatccggacgatgaacgtaacgcttttgtcgaagttcgcgccggtaccggcggcgatgaagcggcgctgttcgccggggatctcttccgcatgtacacccgctacgccgaagcccgccgctggcgggtcgaaatcatgagcgccaacgaaggcgaacatggcggatttaaagaagtgattgccaagatcagcggcgacggcgtctatgggcggctgaaatttgaatccggcggccatcgcgtccagcgcgttccggcgaccgaatcccaggggcgtatccacacctccgcctgtaccgtggcggtgatgccggagctgccggaagccgaaatgccggatatcaatccggcggacctgcgtattgataccttccgctcctcgggcgcgggcggtcagcacgtcaacaccaccgactccgctatccgtattacccacttgccgaccggtatcgtcgttgagtgtcaggacgaacgttcacagcataaaaacaaagccaaggcgctgtcggtgctgggtgcgcgtattcgcgccgccgaagtcgccaagcgtcagcaggcggaagcgtctacccgccgtaacctgctgggcagcggcgaccgcagcgaccgcaatcgtacctacaacttcccacaggggcgcgtgaccgaccaccgtatcaacctgactctttaccgtctggatgaaaccatggaaggcaaactggatatgctgatcgaaccgattgtgcaggaattccaggctgaccagctggcggcgctttccgagcaggaatga

SEQ ID NO: 91337 - DNA, 852 bp, Enterobacter aerogenes
atgacctttcgacagtggcttactcaggcaatagcccggctcggcgcgagcgacagcccgcgtcgcgacgccgagatcttactggggcacgtcaccggcaaagcgcggacctggatcctcgcttttgacgaaaccgtattgacggcggaacagttggcggagctggaagcattgctggcgcgccgcgtcaacggcgagccggtggctcatctggttggtcagcgcgagttctggtcgctgccgctgtttgtctcgccggcgacgctgatcccgcggcccgacaccgaatgcctggtcgagcaggcgctggtacgcttgccgcagacggcctgccgtatcctggatcttggcaccggcaccggcgctatcgccctggcgttggccagcgagcgggcggactgcgaggttactgccgttgattttatgcctgacgccgcggcgctcgccgcgcgcaatgccgcccatctcgctctcaacaacgtgaccgtgctgcagagcgactggtttagcgcgctcaaggggcagaggttcgcgatgattgtcagtaatcccccctatatcgatgaaaccgatccgcatcttgccgagggcgatgtccgctttgagccgagaacggcattggtcgccgccgaccaggggctggccgatttagcgcatatcatccgtgaagggcgtcagtacttgttacccaacgcttatatgctactggaacatggctggaagcagggtgaggcggtacgcgcattgtttaatgaagcaggttatctcgatgtcgagacctgccgcgattatggcgataacgaacgtctgactctcgggcgttggccgcacaaggagcaagccggcgaatga

SEQ ID NO: 91338 - DNA, 393 bp, Enterobacter aerogenes
atgaatttatttactgcagtactctatttgcatattgcctgcgtggtgacatccgtcgggcttttcgtgctgcgttactggtggacctacagcggcagcgcgatgctcaaccagcgctgggtgcgtatcgcgccgcattgtagcgatacgctgctgtttctcagcggcgcgggattaatggcgattacgcactatctgccgtttaccgaagatggcgcatggctgactgaaaagctgtttggcgttatcatttacatcgcattaggatttattgcgttgggccgacgtcgcccgcgccgccagcagacccggttcatcgcctttctgctggcgctggtggtgttgttcttcatcgttcaactcgccatcacaagaataccgttactggggtaa

SEQ ID NO: 91339 - DNA, 813 bp, Enterobacter aerogenes
atgaggtcattagctgatttcgaatttaacaaagcgccattatgcgaaggcatggtcctcatttctgaattgatccgcgacgactttccgacgcactttgtgcaggatgagctgcagcggttgttaacactggcgcaggaagagattgccacctcctgggatcaggagcgtcagctcgaccggctgctggaattgttctatcacgagtggggcttcggcgcgtcgcagggcatttatcgtctgtccgatgcgttatggctggataaagtgctggtgaatcgccaggggagcgccgtgtcgctgggggcgattctgttatggattgcccagcgtctggatttaccggtggtaccggttattttccccacgcagatgctgctgcgcgccgacccggaagccagcgaagagatgtggttgattaacccattcaacggcgagacgcttgatgaacacacgctcgaggtgtggctgaaggggaatatcagcccggtggcagaactgttcaatgaagatctcgatgaggccgataacgccgaagtgatccgcaaactgctcgatacgctgaaatcggcgttgatggaagagcggcagatggagctggccctacgcgccagcgaagcgctgctgcagtttaatcccgaagacccgtatgaaattcgcgaccgcgggcttatctatgcccaactggagtgcgatcacgtggcgctgctggatctcaattatttcgttgagcagtgtccggaggatccgattagcgagatgatccgtgcgcagatcaacacgatttcacataaacaaattacattgcattag

SEQ ID NO: 91340 - DNA, 855 bp, Enterobacter aerogenes
atgaaacaaaaagtggttagcattggtgatatcaacgtagcaaacgacctgccgttcgtgctgtttggcggaatgaacgtgctggagtcccgcgatcttgcgatgcgtatctgcgaacattatgtgaccgtcacgcaaaagctgggcattccgtatgtgttcaaagcctcttttgataaagccaaccgttcttccatccactcctatcgtgggccgggtctggaagaagggatgaagattttccaggagctgaagcagaccttcggcgtgaaaatcatcaccgacgtccacgaagccagccaggcgcagccggtggccgatgtggttgacgtgattcagctgccagcgttcctcgcgcgtcagactgacctggtggaagcgatggctaaaaccggcgctgtcatcaacgtcaagaaaccgcaattcgtcagcccgggccagatgggcaacatcgttgataaatttattgaaggcgggaacgacaaagtgatcctgtgcgatcgcggggctaacttcggctacgacaacctggtcgttgatatgctcggcttcggcgtaatgaagaaagcgtccaacaactcgccggtcatctttgacgtgacccacgccctgcagtgccgcgacccgtttggcgctgcttcaggcggtcgccgcgctcaggtgacggaactggctcgcgccgggatggcggtgggtatcgccggtctgttcattgaagcgcacccggatccggatcacgcgaaatgtgacggcccgtccgcgctgccgctggctaaactggaaccgttcctgaagcaaatgaaagcgatcgacgatctggtgaaaagcttcgacgagctggataccagcaactaa

SEQ ID NO: 91341 - DNA, 1101 bp, Enterobacter aerogenes
atgacacatgcacatgaggcggttaagacccgccacaaggagacctccctcgtttttccggttttagcactggtggtgctgtttctctggggaagcagtcaatcactaccagtggtcgttgcgattaatattctggcgctggtcgggattctgagtagcgcatttagcgtggttcgccatgccgacgttcttgctcaccgcctcggcgagccctatggttcattaattttgagcctgtcagtggtcattcttgaagtgagcctcatttccgcattaatggcgaccggcgacgccgcgccaacgctaatgcgcgatacgttatattcaatcattatgatcgtcaccggcggtctggtcggcttctctttactactgggcggacgtaaattcgccacgcagtatatgaatttgtttggtatcaagcagtatctgatcgccctcttcccgctggcgattatcgtactggtattcccgatggcgttaccgggcgccaatttcagcaccggccaggcgctactggtggcgctgatttccgccgccatgtatggcgtattcctgctcattcagaccaaaacgcaccagagcctgtttgtgtacgagcatgaagatgacagcgacgatgacgacccgcatcacggtaagccctcggcgcatagcagcggctggcacacggcctggttactggtacacctggttgcggttatcgccgttaccaaaatgaacgctaatccgctggaaacgctgttgaccagcatgaacgcgccggtggcctttaccggtttcctggtggcgctattgattctctcaccggaaggactcggcgccttgaaagcggtgctgaacaaccaggtacagcgcgcgatgaatttgttcttcggttcggtgctggcgacgatttccctgacagtgcctgtcgtcacgcttatcgccttccttaccggcaatgaactccgcttcggtttgggagcgccggaaatggtggtgatggtggcgtcgctggtgctgtgccatatttcgttctcaaccgggcgcaccaatgtccttaacggcgcggcgcatctggcgctgttcgccgcctacctgatgacgatatttgcctga

SEQ ID NO: 91342 - DNA, 231 bp, Enterobacter aerogenes
atgccttaccgtagtaaacaagaacttcccgatagcgttcagcgcgtcttgccggaacacgcgcaggaaatttataaagaagctttcaatagcgcgtgggatcaatataaagataaagccgaccgtcgcgatgatgccagccgtgaggagacggcgcataaagtcgcctgggcggcggtgaaaaatgattatcaaaaaggcgatgacgacaaatggcataagaaaaagtaa

SEQ ID NO: 91343 - DNA, 681 bp, Enterobacter aerogenes
gtgttaactcgtgatttcttaatgaatgcggattgtaagacggcgtttggcgcgattgaggaatcgctgctgtggtcggcggagcagcgggcggcctcgttggcggcgactctggcctgtcgtccggataacggttcggtgtggattttcggctacggttcgttgatgtggaacccggcgctggaatacagcgaatcctgcaccggtacgctgccgggttggcatcgcgcattttgcctgcgcctgaccgccggtcgtggcagcgcgcatcagccgggcaggatgctggcgttgaaggaaggcggccgtaccaccggcgtggcctatcgtctgccggatgagacgctggagcaagagctgacgttactgtggaagcgagaaatgatcaccggctgctatttgccaacctggtgccgtctggagcttgatgacggccgcacggtgaatgcgctggtatttattatggatccgcgccacccactgtatgaatctgataccagcgcacaaaccatcgcgccgctgatagcccgcgccagcgggccgctcggcaccaatgcccagtatctcttttcgttggatcaggaattacgcaagcttggcatgcgcgacgccagtcttgacgatctgattatccaggtgcgacatctggtcggcgaggcgagccaacctgggctcgcataa

SEQ ID NO: 91344 - DNA, 249 bp, Enterobacter aerogenes
atgaaaatggcaatggtaaaagcaagtttaacgttattcggcggtgatacgctggtggtgcgctgttcagagcgctgtcatattcacttaatgagcgccaaggccgccggcgacagccacgccgatatttttagcgtgcaggacagggacagcgcttatctcaccgtgccctacagcggcacctggaacgtgctgatcgacagccatagtcagtccctcgagcactccattagctacgttcccgcctga

SEQ ID NO: 91345 - DNA, 354 bp, Enterobacter aerogenes
atgcaacgtattgtgattgtcgccaacggagccgcttacggcagtgaatccttgtttaatagcctgcgcctggctatcgccctgcgtgagcaggagtcagacctcgatctgaagctgtttttaatgtccgatgcggtgaccgccgggcttcgcggacagaaaccggcggaaggctataacatccagcagatgctggagatcctcaccgcgcagaatgtgccggtaaaactctgcaagacctgtacggacggacgcgggatcacccatttgccattagtagatggcgtggaagtgggaacgctggtcgagctggcgcagtggacgctggcggcggataaagtgctgaccttctga

SEQ ID NO: 91346 - DNA, 1197 bp, Enterobacter aerogenes
atgaataatacgaccggcatgacgcctgaagcaatcggctggtttcattatgcgcgccaactacaaaaacagcagctccgtaagctaacgcagcaagggacgctggcgagcgaaattagtgggttggtccatatgctgcagtgcgagcgcggcgcctccaatatgtggctctcttccgagggccgcttgtatgacgccgagcgtcgggctggcggggcgctggtggacgcgcgcttaagcgctttttatgccgcgctgcaaccggcgcgggaatccgccagcagcgcgctgtgttggcgaatagccagcgcggtgtggtatctggcgcagcttccggcgctgcgagcggcggtgcaaggccgcgcggtggacgctcaggaggccactcagcgctttagccgtattattcgccatttattgaatattgtgccgcagttgaatgacagcatagacgatccgcagatcgccgggcgcatggttgccctgtacagctttatgcagggtaaagagctggcgggccaggagcgcgcgctgggagcgttgggcttcgcgcgcggccaatttaacggcgagctccgtcagcagttggttgaccgcattgacggtcagcagccctgttttgacagctttcaggcgctctccggtctgccgcgggcgcttgagctgctgcagggttgcgaagccgggcgcgagattgagcaactacggcgcatcgcctgtacccgccagccctcggcggacgaaggggccgcggcgcagcgctggtttagcctgcaaactgaacggctagagcagatgcgcagtctggaggaggcgttgattgccgacctgctcagcgcgacccggcaactgctcgaacgtggagaagacgatatgctgccgctgcaatggcctgaagaagagtgcggcgatagcctgactttgcgcctggataagcagctgctgccgctggtccgccagcaggcgtgggaacttgagcaactctccggccaactggcctcgctgcaagccgcgtttgaggagcgcaagattatagataaagcgaaagcgctgctgatgagccatcagggaatgcaggaagaacaggcctggcaggcgttgcgtaaaatggcgatggataagaaccagcggatggtcgaaatcgcccgcgcgctgctgacggtgaaagctctgctgccggactcatcgtcaaattga

SEQ ID NO: 91347 - DNA, 1257 bp, Enterobacter aerogenes
atgggcgataaagttttcatttcacgacggcgctttttgcaggccggggcggcgctgagcggcgctatgctgctgcccggcgtgatgcaggcggcgtgggcggcgggttccgataagccggagttggccaccgtgcgggtcggattcatcccgctaaccgactgcgcgccgctggcgattgcggcattgaaaggattcgataaaaagtatggcatcagcctgcagccaagtaaggaggccagctgggcggcggtgcgcgataagctggttgccggcgaactcgatgcggcgcatatcctctacggcatgctgtatgggcttgagcttggtattgccggcaaaccgaagcagatggccaacctgatgaccctgaaccgcaacggtcaggcgatcaccctctctagtgacctacaggcgcaaggcgtgagcgatggtcatgggctcaagcggctgatcgaccaaaaagcgccgggcagctacaccttcgcccacacctttcctaccggcactcatgcgatgtggctctattactggctggcgaacgccggtatcgaccccttcgccgatgtgcgcatggtggtcgtgccgccgccgcaaatggtgatgaacatgcgcatcggcaatatggtcggcttctgcgtcggcgaaccgtggaacgcgcgggcgatcaacgatcgcattggttttacggcggcaaccagccagcaaatctgggcggatcatccggaaaaaatcctcggcgcgcgcagcgattgggtggcgcgctacccaaataccgcaagggcgctggtggcggcgctgctggaggcccagcgctggattgaagcgtctgccgacaacacccgcgaaaccgcgcggatcctcgccagacgggcgtggctcaacaccaaagaacagtaccttagcgggcgcatgcttggcgaatacgacaatggcatcggcaaacgctggcgcgacgctcatcccatgcgcttcttccagcagggggaagccagctatccgtggctctccgacggcatgtggttcttaacccaattccgccgctggggcctgctgaaaagcgcgccggattatcaggcggtagcgcagcgtatcaaccgcatcgacctgtggaaagaggcggcgcaggccgtgggcggcatcactgcgccaacgcaaactttacgcagcagcacgctgctggacggcaaaatgtggaacggcgtcgacccggaagggtatgccgccagtttcgccattcaacataagggggcatga

SEQ ID NO: 91348 - DNA, 885 bp, Enterobacter aerogenes
atgaaaccagccattaacacgcagccgcgcgcgcagacctcaaccgcgccgggcgaaatcattgtcctgccgccgctgcaggtgcgcaaagctacgccgtccgccaggcgctggctgaacgccgcgctgcagcgtctactgccgccgctgctgggcctggctctgctgctgctcggctggcagctggcggcgattggcgcgaaaggcttcccgacgccgttgagcactctggattcagcgctgacgctgttttccgaccccttctaccgcgacggaccgaacgatatgggcatcggctggaacgtgctggcttcgctacagcgggtcgcggtgggctttggtttagcggcgctggccggtattccgctgggctttcttatcggccgctcgctgttctttgcgcgaatgtttaacccgctcatcgcgctgctgcgcccggtgagtccgctggcgtggttaccgattggcctgctgctgttccagaaggcggaaccggcttccagctggaccatttttatctgctctatctggccgatggtcattaacaccgcggaaggcgtcaggcgtatcccgcaggactatctcaatgtggctcgcgtgctgcagctgtcggaatggacggtgatgcgcaaaatcctctttccggcagtgctgcccgcggtattaaccggcgtgcggctgtcgataggcattgcctggctggtgatcgtcgccgccgagatgctgaccggcgggttgggtatcgggttttggatctggaatgaatggaacaacctcaatgtggaaaacatcatcatcgccatcgtcattatcggcgttgtcggcctgctgctagaacaggggctcatattgctcgcccgccgcttcagctggcaggaaaaataa

SEQ ID NO: 91349 - DNA, 789 bp, Enterobacter aerogenes
atgaaaccattaattcaggtacaggccgtcagtcaacgctttaacaccgccagcggcgagttcctggcgctgcaaaacgtctcttttgatattcacgaaggggaaaccatcagtctgattggccactccggatgcggcaaatccacgctgttgaatctgatcgccgggattacccagcccactgagggcgggctgctatgcgataaccgtgaaatttccggcccgggaccggagcggggggtggtgttccagaaccattcgctgctgccatggctgagctgttttgacaacgtggcgctggcggtggatcaggtgtttcgccgcaccatgagcaaggcagagcgccgggagtggattgaacacaatttacaacgagtacagatggggcacgcgctgcacaaacggccgggggagatctccggcggtatgaaacagcgggttggcatcgcgcgcgcgctggcgatgaagccaaaagtattactgcttgatgagccttttggcgcgctggacgcgctcacccgagcccatctgcaggatgcggtaatgcacatccagcaggaactgaacaccaccattgtcgtgatcacccacgacgtcgatgaagcggtgctgctttccgaccgggtgttaatgatgaccaatggaccggccgcgacgatcggcgagatccttgacgttaatctgccgcgtccgcgtaaccgggtccagctggcggaagataaccactaccaccacctgcgtcagcagatcctccatttcctctacgaaaagcagccgaaagcggcctaa

SEQ ID NO: 91350 - DNA, 4065 bp, Enterobacter aerogenes
atgcggcgactggtaattatcggcaacggtatggcggcaacccggctggcagagaagctggcggcgcgcgcgcaggggcgtttcatcatcacgcttatcggcgatgaaccgcagccggcctacaaccgcattcagctctcgccggtactcggcggggaaaaaacggcggcgcaaatccaactgctgccgacggagtggtacgcccagcatggtgtccgcgtgcggcttggcgaggcggtcagcgaagtggatgtcgcggggcggaggctgcgcgtcggcggcgactggctggaatgggatgaactggtgttcgccaccgggtcgcagccgtttatcccgtcgctgccgggtattgagcgcccgcaggtattcgcctttcgcaccctggcggatgttaaagacatcctggcagtccccggcccggcggtggtaatcggcggtggcgtattgggcgtggaggtcgcggcggcgctgcgccgtcacggtggggaagtgacgctactccatcgcggtagcggtttgatggagccgcttaccgatgcttttgccgcggaacagttaaaacaacagcttgaggcacgcggcatccgctgcgagctggagagccgaattgccgctattgacgagcagcatgtgcggctggaggacgggcgcgcttttgccgccagccgggtggtgttggccaccggagtgcggccggatatccgtctggcggcgcgcagcggcgtagcctgccagcgggggattatcgtcgaccgccggatggcgacctcgctgccggggatcagcgctatcggcgagtgttgtgagattgacggccaaacctgggggctggtggctccctgcttgcgccaggccgatgtgttagttgaacgcctgtgcggggttcccggcgaagaattcagctggcaggacggcggcacccggctgaaggtcaccggtatcgagttttttagcgccggcgaacagcgggccggcgagcaggaccagatctacagcagttgggaccccatcgatcgccactaccgtcgcctgttggtccgcgatggccggctgcacggcgtgctgctgctgggcgactgtcagcatgcggcgccgcttaccgcgctgctcggcagcgataagtctccttcagcggagtggctttttgacccttctataacgcagccgcgggctgcaggaaaaatgacgatgactaaacctgtattagtgctggtcggacacggcatggtcggccaccattttcttgagcaatgcgtgagccggaacctgcaccagcagtaccgtatcgtggtttttggcgaagagcgctatgccgcctatgaccgggttcatctctcggaatatttcgccgggcgcagcgcagagtcgctatcgctggtagagggagacttttttaaccagtacgggattgagctgcggccaggagagacgatcgcggaaatcgatcgtccggcgcgaatcgtgcgcgatgcccacggccatgaaacccattgggataagctggtgctggcgaccggctcctatcccttcgtgccgccaatccccggtaacgatgaagaaggctgcttcgtctatcgtacgcttgacgatcttgaccgcattgccgcccgcgccgccactgcgcagagcggggtagtcattggaggcgggctgttggggctggaagccgccaacgcgttaaaacagttggggcttaagacccatgtggtggagttcgccgccaacctgatggcggtgcagctggataacggcggcgcggcgatgctgcgggagaaaattctcgatcttgaggttggcgtgcacaccagcaaagcgacaacggcgatagtgcgcaccgccgacgggctgcagcttaacttcgccgatggcggcacgctgcagaccgatatggtggtcttttccgccgggatccgcccgcaggatgcgctggcgcgcggcgcaggcctggcaatcggcgaacgcggcggtatcggtatcgatgaccactgccggacctcggacgcagatatattggcgattggcgaatgcgcgctgtgggacaacaaaatttatggtctggtagcgccgggctaccacatggcgcgcaccgcggcggcgcagttggctggtgaagcggcccgctttagcggcgccgatatgagcaccaaactcaaactgctcggcgtggatgtagcgtcgtttggcgatgctcacggacgtacagctggttgccagagctatcaatggaccgatggtccgcggcagatctacaaaaagatcgttgtcagcgctgatggcaaaacgctgctgggcggcgtattggtgggcgatgccggtgactacgcgacgctgttgcagatgatgctgaacggcatggcgctaccgtctcgtccggaaagtctgatcctcccggccatcgatggggccacgacgaaagcgatgggggtggcggcgctgccggatagcgcgcagatttgctcttgccataacgtcagtaagggagacatttgccaggcggtcagcgccggagcgggcgatatggcggcgataaaaagctgcactaaagcggcgaccggctgcggcggctgcagcgcgctggtcaaacaggtgatggaacaccagcttgccgggcagggcgtcgaggttaaaaaagatatctgcgagcattttccgtggtcgcggcaggagatctatcatctggtacgagtcaaccacatccataccttcgatcaactcattagccgttacgggcagggccacggctgtgaagtgtgtaaaccgctggtggcgtcggtactggcctcctgctggaatgagtatctgctgaaaccggcgcatctgccgctgcaggacaccaacgatcgctacttcgccaatattcagaaagacggtacttactcggtggtgccgcggatggccgcaggcgaggtgacaccggacgggcttatcgctatcggccagatcgccaaacgttaccagctgtacagtaaagtgaccggaggacagcgtatcgacctgtttggcgcgcggctggagcaactgccggacatctggcgcgagctggcggcggcgggatttgaaaccggacacgcctacggcaaatcattacgcacggtaaaatcctgcgtcggctcgacctggtgccgctatggggttcaggattcaacggggctggcggtaaggcttgaacatcgttacaaggggctgcgcgcgccgcacaaaatcaaaatggcggtctcgggctgtacccgcgaatgtgccgaagcgcaaggtaaagacatcggggttattgcgactgaaaagggctggaatctttacgtctgcggcaacggcgggatgaaaccgcgccatgcggacctctttgcgagtgaccttgatgacgccagcctaatccgtaccgtcgatcggttgttgatgttttatattcgcaccgccgaccgcctgcagcgcaccagtagctggatggataaccttgaaggcggcgtggcgtatctacgcgaggtgatcttgcacgatagtctcggtatcggcgatgagctggagcaggagatggcgcgggtggtggatagctaccagtgcgaatggcagaccaccctgaacgacccacagcggctggcgctatttcgttcctacgttaacagcgatgaggccgatgaggcggtgcagcggcatatcctgcgcggtcagccgcagctggtggcgccgcaaaggcttgggcaaccggccctgccgtcgcggccgtggcaggcgatctgcgatctggacgcgatcccgccgcaggcggggatcggcgcgcgcctcggcgagcggcagattgcgctgttccgcttcggcgagcaagtttatgcgctggataaccaggaacccggcagcgaggccaacgtgttatcgcgcggcattttaggcgacgcgggcggcgagccgatcgttatttcgccgctgtataaacagcggattcgcttgcgagatggtcgcttgtacgacagcggcgagccgttggtgcgcgcgtggccggtgaagatcgaacagggcaaagtgtgggtcggcaaccaggcattgctgctgcgcgcggaggcgagctga

SEQ ID NO: 91351 - DNA, 2607 bp, Enterobacter aerogenes
atgagcgaaacccgaaccacctgtccatactgcggcgtcggctgcggagttatcgcccgcgttgaacccagtggaaccgtcacggttcgcggcgatgaaaaccatcccgctaactttggccgcttgtgcgtaaaaggggcagcgcttggggaaacgacctcgcttagcgggcggttattacaccctgaagtcgatggccgggcggtcggctggccgcaggcgctggcggaggcgggttcacgtctgcgcgacattattgagcgctacggcccgcaggcggtcgcgttttacgcttccggtcagctgttaactgaggattattacgccgccaacaagttgatgaagggctttatcggcgccgccaatatcgatacgaattcgcggttatgtatgtcatcggcggtcaccggctataagcgggcgctcggcgcggacgtcgtgccgtgcagctatgaagatgtcgagcagagcgatctggtggtgctggtgggctccaacgccgcctgggcgcatccggttctctatcagcggttggtgcaggcgaaacgcgataatccgcggttgcggatcgtggtggtggatccgcgacgcaccgcgacctgtgatattgccgacgatcatctggcgttggcgcccggtagcgatggcgggctatttgtcggcctgctaaatgccattgccgccagcggtgaaatggcggcgggttttcgcgaccagcggcaggcgctgaccatcgccgcgcagtggagcgtggaaaaagcggccgctttctgcggcctggcgccggagcaagtggctcgcttttatcgtgattttatcgctgcaccgcgcgccatcacgctgtacaccatgggaattaatcagtccgccagcggcagcgataagtgcaacgcgattatcaatgtccatcttgccagcgggaagtttgcccgccgcggctgcgggccgttttcgctgaccggtcaacccaacgccatgggcgggcgtgaagtgggggggctggcgacgatgctggcggcgcatatgaattttgagccgcaggacctgcagcgattagcgcgcttttggggcagcgagcgactggcgcagacgccgggactaaccgccgtcgaactcttcgccgcgattggacgcggcgaggtcaaagcggtgtggattatggggaccaatccggtggtctcactgcccgatagccacgcggtgagccaggcactgtccaggtgtccgctggtgatggtctccgatgtcgccgccaataccgatacggggcgctttgcccatatccgctttccggcgctggcatggggcgaaaaaaacggtaccgtgaccaactcggagcggcgaatttcgcgtcagcgggcttttttgccgccgccgggggaggcgaaagccgactggtggatcatttcccgtctcgccgccgaattaggttatgcccgagctttttcatggcaacatccgcatgaggtattttgtgaacacgcggcgctctcagggtttgaaaatgacggtcagcgggcgtttgatattggcgggctggcggacctcagccgggaggcgtgggatgccctgacgccggtgcgctggccggtgagccgcagcgccgcgccctggcggttaacggagggctggcacggcgacggcaggttgcggatggtgccggtatcgccgcagccgacccgggcgcagaccgaggcattttatccattaatcctcaatagcggacgtattcgcgatcagtggcataccatgacccgcaccggcgacataccgcggttgatgcagcacattgccgaaccagtcgtcgaggtggcgcctgccgatgcgcgtcgctttcaattacgtgagggagaactggctcgcgtctggtcgcgccacggcgtgatgattgcgaaggtgatagtcagcgaagggcagcgcgccggttcgctctttgtgccgatgcactggaataatcagtttgcccgccagggacgggtcaataatttactggcggcggtcaccgatccgcattccgggcagccggagagcaagcagtcggcggtggcgatagcgccgtggcggccggcgtggcaaggggagctattatatcgcgagcccttaccgttgccatcctcgctgcactggcggcgacgggcggtggtagggcttagccatttgtcgctggccgcggataccggcccgcaaagctggctgaccgagtggtgtcgcaagcagggatggcagttgcaaattgccgagggcggcgggctgtggaacctactggcctggcacgacgggcaattgatgctcggctgctggagcgatattaagccgccgcaaatcgatgctgaatggctgtatacggcgtttcggacgccgcagcagaccgccggcctacgccatgcgttgctcagcggccgtaagggtggcgacagcgcgccgcgtgggcagactatctgtagttgctttagtatcggcgagcggcagatcggcgaggctattgccggcggctgcgtcagcgtagaggcgcttggcgcgaagctcaagtgtggcaccaactgtggttcctgtattccggaactcaaagcgctgctggcggcaaatcaaacccgaacgccggtttga

SEQ ID NO: 91352 - DNA, 1377 bp, Enterobacter aerogenes
atgcctttgccgtaccgcttaaccccatcactgacgtttctcctgctgctgacaggcgctcccgcctgggcgctgattgctaacgataacagtatgccgccgcaaacgacgctgcccgatttaggcatagcgccgcaggtcgacgacgatgccaaacatttcgccgagatggccaagaaattcggcgaagccagcatgagcgataacggactcaccaccggcgagcaggcgcggatgttcgccatcagcaaaataggcaatgagttcagccatcaactggaaaactggctgtcgccgtggggtaatgccaatatcgacctgttggtggataaagagggtaacttcaccggcagcaagggtagctggtttgtgccgctgcaggacaatgagcgttacctcacctggaatcaatattcggttacccggcgcgagaacgatctggttggcaatgttgggctgggccagcgctggcgtgtcggtagctggctgctgggttataactcgttttacgacaaagtgctcagcgagagtctggcgcgcggcagcatcggcgcggaagcctggggcgagtatttgcgcttatcggccaactattaccacccactcggcgactggcagttacgcgaaaatcagacccaggagcagcggatggccgtcgggtatgacgtgactgcccaggcacgattgccgttttatcagcacatcaataccagcgtcagcgtcgaacagtacttcggcgatagcgtcgatctgtttcattccggtaccggataccataatccggtggcggtttcggtgggactgaattacaccccggtaccgttggtgacggtcaccgctaaacacaaacagggtgaaaatggcgtcagccagaataatgtcggcctgaagctgaattatcgttttggggttccgctgaaacagcaactggcggcggatgaagtggctatcagcaactcgctacgcggcagccgctacgatagtccggaacgcgataatctgccggtagtggagtatcgacagcgtaagaatctgacggtctatctggcgacgccgccgtgggatctgcactccggcgaaacggtacagctgaagttgcaaattaatagcctgcacggcattaaatcgctgcattggcagggggacactcaggcgctaagcctgacgccgccggttaatgccaacagtgcggatggctggagcatcattatgccggtgtggaacagcgagccgggcgcggtgaatcgctggcgtctgtcggtggtggttgaagataaatcgggtcagcgcgtctcttccaatgagatcgcactggcgctgaccgagccgctggtgacgtttacggctcccgacgtttcctggacggaatcgccttag

SEQ ID NO: 91353 - DNA, 651 bp, Enterobacter aerogenes
atgagtcaacaggaacgggcaaccatccttctcattgatgatcatcccatgctgcgcactggcgtaaagcaactggttagcatggcgccggacattcaggttatcggcgaagccagtaatggcgaacaaggtatcgaactggcggaatcgctggatccggacctgattctgctggaccttaatatgccagggatgaacggcctcgaaacgctcgacaagctgcgggaaaaatcgctctccggccgcgtggtggtattcagcgtctccaatcatgaagaggacgtggtgaccgccctgaaacgcggcgccgacggctacctgctgaaagatatggaaccagaagatctgctgaaagcgctgcagcaggccgctgcaggcgaaatggtattaagcgaagcgttaaccccggtactggccgccagcctgcgcgctaatcgcgccacgtccgaccgcgacatcagccagttgaccccgcgcgaacgtgatattctgaagctgattgcccagggcctgccgaacaaaatgattgcccgccgcctggatatcaccgaaagcaccgttaaagtgcatgtgaaacacatgctgaagaaaatgaagctgaaatcacgggttgaagccgccgtctgggttcaccaggaacggatcttctaa

SEQ ID NO: 91354 - DNA, 1779 bp, Enterobacter aerogenes
atgttaaaacgtttgtttacgccgctcacattggttaatcagctggcgttaatcgtactgctcgccaccatcatcggcgtggccggtatggcgatatccgcccgcctggtgcatggagtgcagggcagcgcccacgccattaacaaggcaggctcgttgcgtatgcagagttaccgcctgctggcggctattccgctgacggccaacgatcaaaagctgtttgacgatatgaccgctaccgttttcagcccggagttgcaatactccgcgcgtcgtgacggccaggaagtacagctgaaagcgctgcagcaatattggcagttgtcgctgggaccgggcatgaaacaggccgtcaggcaaagcgatgtggcacaggatgtcgccgactttgtcgaccgtattgaccagttggttaccgctttcgaccacaccaccgaacagcgtatcgagcgcgtggtctggatccaccgcatcctcgccatcggcatggcgctgctgctgatctttaccattatctggctgcgcgcccgcctgctgcggccatggaaacagttactgggtatggcgcgggcggtcagccagcgcgattttacccagcgcgcgcacatcagcggtcgcaacgaaatggcgaccctcggcatggcattgaataacatgtcggaagagctggcggaaagctacgccgtgcttgaacggcgggtacaggaaaagaccgccgggctcgagcagaaaaacgagatcctggcctttttatggcaggccaaccgtcggttacactccagcgccccgctgtgcgagcgcatctcaccggtgctgaacggtctgcaggggctgacgctgttacgagatattgaagtgcgggtgtatgacctcgaggatgaagacaatcatcaggagtttgcctgccactccgatatcgaatgcgatgataaaggctgctatctgtgtccgcgcgatcttcccccgctgccggatggcggcacaacgctgaaatggcggctatcagacgcgcataaccagtatggcatcctgctggccacgctgccggttggccgccacctgagccacgaccaacagcaactggtggatacgctggtggaacagctgaccagcaccctggcgctggatcgccatcaggaaaaacagcagcagctcatcgtgatggaagaacgcgccaccatcgcccgcgagcttcacgactctattgcccagtcactctcgtgcatgaagatgcaggtgagctgtctgcagatgcagggcgatagcctgccggatgaaagccggctgctgttggggcagatccgcaacgaactcaatacctcatgggcgcagctaagggagctgttaaccaccttccgcctgcagcttaccgaggcgggtctgcgcccggcgctggaggccagttgtcaggagtacagcgcgcactttggtttcacggtacaactggattatcagttgccgccgcgttttgtcccgtcgcatcaggcgattcacctgctgcagatcgcccgcgaggcgttaagcaatgcgttgaagcatgctaacgcgacggaagtcaccgtgaccgtgtcacaacgcgataatcaggtacgtttagtcgttgccgataacggccgcggcgtaccggaaaacgcggagcgaagtaaccattacggtttaattattatgcgggatcgcgcgcaaagcttgcgcggcgactgtcaggtgcgcagccgggagaccggcggtaccgaagtcgtggtgacatttatcccggaaaaatcgttttcaatccaataa

SEQ ID NO: 91355 - DNA, 1389 bp, Enterobacter aerogenes
atgagtcaatcttcaatcccggagaaggctagcagctcagtcatcaccgactggcgtcctgaagatcctgagttttggcaacagcgcggccaccgtgtggcgagccgcaatttatggatctcagttccctgtcttttactggcgttctgcgtttggatgttgtttagcgccgtcgcggtaaacctcaataaagtgggttttcagttcactaccgatcagctgtttatgttgaccgcattgccagcgctttccggcgcgctgctgcgcgtaccttatgcctttatggtcccgctgttcggcggccgccgctggacggcgttcagtaccggtatcatgattattccgtgcgtttggctgggctttgcggtacaggatacttccacgccgtttagcgtgttcgtgattatctctctgctgtgcggctttgccggcgctaactttgcttccagtatggcgaacatcagcttcttcttcccgaaagaaaagcagggcggcgcgctgggggttaacggcggccttggtaacatgggcgtcagcgtgatgcagctggttgcgccgctggtagtctcgatttctatttttgccgtttttggcggtagcggtagcgagcagccggatggctcaatgctgtatctggaaaacgccgcgtggatctgggttccattcctgatcatctttaccctggccgcgtggttctttatgaacgacctgtcggcctcaaaagcatcgctgagcgaacagttgccggtacttaaacgcctgcatctgtggattatggcgctgctgtatctggcgacctttggttcctttatcggtttctccgccgggtttgctatgctgtcaaaaacccagttcccggacgtgcagattctgcactacgccttcttcggtccgtttattggcgcgctggcgcgctcgatgggcggggcgatttccgaccgtctcggcgggacccgcgtgacgctggtgaacttcgtggtgatggctattttctgcgcgttactgttcctgactctgccgacaaatggtcagggcggcaacttcatcgccttcttcgcggtatttatggtgctgttcctgaccgccgggctgggcagcgcctctaccttccagatgatttccgtgatcttccgtaagcttacgatggaccgcgtgaaagcgcagggcggcagcgaagcgcaagcgatgcgtgaagcggcgacggataccgccgcggcgctgggctttatttcggcgattggcgcgatcggtggtttctttattccgaaagcgttcggtatttcgctggatctgaccggctcgccggccggggcaatgaaagtcttcctcgttttctatattgcctgcgtagtaatcacctgggcggtatacggccgtaaacagaaataa

SEQ ID NO: 91356 - DNA, 3744 bp, Enterobacter aerogenes
atgagtaaatttctggaccggtttcgctacttcaaacagaagggtgaaacctttgccgatgggcacggccagcttcttaaaaccaaccgggattgggaggatggataccgccagcgttggcagcatgacaaaatcgtgcgttccactcacggtgtgaactgcaccggctcatgcagctggaaaatttatgtcaaaaatggcctggtcacctgggaaacccagcaaactgattacccgcgtacccgccccgatctgccgaaccatgaaccacgcggctgcccgcgcggcgccagctactcctggtatctgtacagtgctaaccgcctgaaatatccgctgatgcgtaagcgtctgatgaagatgtggcgtgaagcgaaagttcagcatagcgatccggttgaggcatgggcttcaattattgaagatgccgataaagcgaaaagctttaaacaggcccgcggtcgcggcggttttgttcgttcttcatggaaagaagtgaacgaactaattgccgcttcaaacgtctataccgtcaaaacttacggtccagaccgcgtagcaggcttttcgccgatcccggcgatgtcgatggtttcctatgcgtccggcgcccgttacctgtcgctgattggcggtacctgtctgagcttctacgactggtactgcgacctgccgccagcctccccgatgacctggggcgaacagaccgatgtgccggaatctgccgactggtataactccagctacatcatcgcctggggctccaacgtcccgcagacccgtaccccggacgcgcacttctttaccgaagttcgctacaaagggaccaaaaccgtggcgattactccggactatgccgaaatcgccaagctctgcgatctgtggctggcgccgaagcagggtaccgatgccgcgatggcgctggcgatgggccacgtcatgctgcgtgagttccacctcgataaaccgagccagtacttcaccgattacgtacgtcgctacaccgacatgccgatgctggtcatgctcgaagagcgcgacggctactatgccgctggccgtatgttgcgcgctgccgacctggttgactccctgggccaggagcagaatccggaatggaaaaccgtcgcctttgacgagaagggcgaaatgaccgtacctaacggttctctgggtttccgctggggcgacaaaggcaagtggaacctcgaacagcgcgatggtaaaaccggcgaagaaattgagctgcgccttagtctgcttggcagccatgatgatatcgccaacgtcggcttcccatactttggcggcgaaggggccgagcatttcaacaaagtcgacctcgaaaacattctgctgcacaaactgccggtaaaacgcctgcagatggccgatggttccaccgcgctggtgactaccgtttacgacctgaccatggcgaactacggcctggaacgcggtctgaacgatgaaaactgcgcgaccagctacgatgacgtcaaggcgtacactccggcctgggcagaaaaaatcaccggcgtatcccgcgcgcacatcatccgtaccgcgcgcgaatttgccgataacgccgataagacccatggccgctcaatgattatcgtcggtgcgggcctgaaccactggttccatctggacatgaactaccgcggtctgatcaacatgctgatcttctgcggctgcgttggccagagcggcggcggttgggcgcactacgttggtcaggaaaaactgcgtccgcagaccggctggcagccactggcgttcggccttgactggcagcgtccggcacgccacatgaacagtacatcgtacttctataaccactccagccagtggcgctatgaaaccgtcaccgcgcaggaactgctatcgccgatggcggataaatcccgctacagcggacatctgatcgacttcaacgtgcgcgctgagcgtatgggctggctgccgtcggcgccgcagctgggcgtgaacccgctgcgtattgctgacgaagcgaagaaagccggcatgacgccggtcgattacaccgtgaaatcgctgaaagaggggtctattcgctttgcggccgagcagccggagaacggtaaaaaccatccgcgtaacctgtttatctggcgttccaacctgctgggctcctccggtaaaggccatgaatatatgctcaagtacctgctgggtaccgagaacggtattcagggcaaagaccttggcaagcagggcggcgtgaagccggaagaagtcgaatggcgggataacggtctcgacggcaaactggatctggtcgtcacgctcgacttccgtctgtcgagcacctgtctgtactccgacatcgtactgccgaccgcaacctggtacgaaaaagacgatatgaatacctcggatatgcatccgtttattcacccgctgtctgccgccgttgacccggcctgggaatccaaaagcgactgggacatctataaaggtatcgctaagaaattctctgaagtctgcgtaggccacctcggcaaagaaaccgacgtcgtgacgctgccgattcagcacgattccgccgcggaaatggcgcagccgtttgacgttaaagactggaaaaaaggcgaatgtgacctgatcccaggtaaaaccgcgccgcatattattccggtcgagcgtgattatccggcgacctacgagcgtttcacctctatcggcccgctgctggaaaccatcggcaacggcggtaaaggtatcgcctggaatacccagagcgagatggacctgctgcgtaagctcaactacaccaaggcggaaggcccggcgaaaggccagccgaagctggagaccgctattgacgccgctgagatgatcctcactctcgcgccggaaactaacggtcaggtagctgtgaaggcgtggaaagcgctgagcgaatttaccggccgcgaccatgcgcatctggcgctgaacaaagaagacgagaagatccgcttccgcgatattcaggcgcagccgcgtaagatcatctccagcccgacctggtctggcctggaagacgaacatgtctcctataacgctggttataccaacgttcacgagctgatcccatggcgtacgctgtccggccgtcagtcgctgtatcaggatcaccagtggatgcgcgactttggcgaaagcctgctggtctatcgtccgccgattgacacccgttcggtgaaagcggtgatgggcgagaagtctaacggcaataaggagaaagcgctgaacttcctgacgccgcaccagaagtgggggattcactctacttatagcgataacctgctgatgctgactctgtcgcgcggcgggccgatcgtctggatgagcgaagcggatgcgaaagatctgggtatcgaggataacgactggatcgaagtcttcaacgccaacggcgccctgacggcgcgtgcggtagtgagccagcgcgtaccggcaggaatgaccatgatgtaccacgcgcaggaacgtatcgttaacctgccgggttctgaagttaccggtcagcgcggggggatccacaactcggttacccgtattacgccaaaaccgacccatatgatcggcggctacggccacctggcgtacggctttaactactatggcaccgtcggttccaaccgcgatgagtttgttgtggtacgtaagatgaagaacattaactggttagacggcgaaggtaatgaccaggtacaggagagcgtaaaatga

SEQ ID NO: 91357 - DNA, 1536 bp, Enterobacter aerogenes
atgaaaattcgttcacaagtcggcatggtgctgaatctcgataaatgcatcggctgccacacctgctccgtaacctgcaaaaacgtctggaccagtcgtgaagggatggagtacgcctggtttaacaacgtagaaagtaagccgggcgtcggtttcccgaacgactgggaaaaccaggaaaaatggaaaggcggctggatccgtaaaatcaacggtaaactgcagccgcgcatgggcaaccgcgcgatgctgctgggtaaaatcttcgccaacccgcatctgccgggaatcgatgattactacgagccgtttgattttgactaccagaatctgcataacgcgccggaaagcaaacatcagccgatcgctcgtccgcgttcgctgattaccggccagcggatggacaaaattaccagcggcccgaacagggaagagatcctcggcggcgagtttgaaaaacgcgccaaagaccagaacttcgaaaacatgcagaaggcgatgtacggccagttcgaaaacaccttcatgatgtatctgccgcgcttatgcgagcactgcctgaacccggcgtgcgtcgcgacctgcccgagcggtgccatctataagcgtgaagaagacggtattgtcctgatcgaccaggataagtgccgcggctggcgtatgtgcatcaccggctgcccgtacaagaagatctatttcaactggaagagcgggaaatccgagaaatgcatcttctgctacccgcgtattgaatccgggatgccgacggtgtgctccgaaacctgtgtaggacgtattcgctatctcggtgtcctgctctacgacgcggacgcgattgaaaacgcagccagcaccgagaacgagaaagatctgtatcagcgccaactggatgtcttcctcgatccaaacgatccaaaagtgattgaacaggcgttaaaagatggcgtaccgcagggcgtaattgaagccgcgcagcagtcgccggtttacaaaatggcgatggactggaagctggcgctgccgctgcacccggaatatcgcaccctgccaatggtctggtacgtgccgcctctgtcgccgattcagtccgcggccgatgcgggcgaactgggtagcaacgggatcctgccggatgtagaaagcctgcgtattccagtccagtatctggcgaacctgctgaccgcgggcgatacccagcctgtactgctggcgctgaaacgtatgctggcgatgcgccacttcaaacgtgcggaaaccgtcgacggcatcgtcgatacccgcgcgctggaagaggtcgggctgagcgaagcgcaggcgcaggagatgtaccgttatctggctatcgccaactacgaagatcgtttcgtggtgccgagcagccatcgcgaacaggctcgcgatgccttcccggagaagagcggttgcggctttaccttcggcgatggttgccacggctctgacagcgaattcaacctgtttaacagccgtcgcattgacgccattgacgttaccagcaaaacggagccgcacgcatga

SEQ ID NO: 91358 - DNA, 711 bp, Enterobacter aerogenes
atgattgaactcgtgattgtgtcgcgtctgctcgaataccctgacgctgccttatggcagcatcagcaggagatgttcgaggctctcgcgtcatcggaaaaactcgccaaagaagatgcccaggcgctgggcgttttcctgcgcgatttagtagctcaggatccgctggacgcccaatcggcgtatagcgagctgtttgaccgcggccgcgccacctcgctgctgctgtttgaacatgttcacggcgagtcccgagatcgcgggcaggcgatggtcgacctgatggcgcagtacgagcgccacggtctgctactggatagccatgagctgccggatcacctgccgctgtaccttgagtatctggcgcagttgccggaagaggaagcgcttggcggcctgcgggacgttgcgccaatccttggcctgctcagcgcgcgtctgcaacagcgcgagagccgctatgcggtgttgttcgagctgctgttgaagcttgccaatactcaggtcgatagccagaaagtggcggagaagattgccgacgaggcccgcgacgatacaccgcaggcgctggatgccgtctgggaagaagagcaggtcaaattctttgccgaccagggctgcggcgagtcggaaatctccgctcaccagcgccgttttgccggagccgtggccccgcaatatttgaatatctctaacggaggacagcactaa

SEQ ID NO: 91359 - DNA, 678 bp, Enterobacter aerogenes
atgcacttcctgaatatgttcttctttgacatctatccgtacattgcgggttcagtgttccttattggcagctggctgcgctacgactacggccagtacacctggcgcgccgcctccagtcagatgctggatcgtaaagggatgaacctggcgtcaaacctgttccatatcgggatcctgggtatttttgccggtcacttcctcggcatgctgaccccgcactggatgtatgagtccttcctgccgatcgacgtgaagcagaaaatggcgatgtttgccggcggggcgtgcggcgtgatgacgttggtcggcggtttactgctgctcaagcgccgtctgctgagcccgcgcgttcgtgctaccaccaccacagcggatatcctgatcctctcgttgctgatggtgcaatgcgcgctgggtctgctgaccattccattctccgcccagcatatggacggtagcgaaatgatgaaactggtcggctgggcgcagtcggtggtcaccttccacggcggagcttcgcagcatctcgatggcgtagcttttgtcttccgtgttcacctggtgctggggatgacgctgttcctgctgttcccgttctcgcgcctggttcacatctggagcgcgccggtcgagtacctgacgcgcaaataccagattgtgcgcgcgcgtcgctag

SEQ ID NO: 91360 - DNA, 897 bp, Enterobacter aerogenes
atgcagctttctcgtggtgtctggcagatgagcctggcgatgatcatttccggctcgattggcgcattcgtgctgctctctggtttgccggtaattgatgtggtgttctggcgctgtcttatcggcgcggtcacattattgctgtttattttgttaagccggcaacccttcagccgcctgacgcgcctcactctggcgctggctgtccttggcggcgtcgcgctggtgatcaactggctgctgctgtttgccgcctactcacgcgtttctatcgggatggccaccgtggtctacaacacccagccctttatgctggtattactgagcatgatactaggtgaaagggtaagcgcggtaaaatggggatggttactgctggccttcggcggcgtggtgattctgctatcgagcgaactaactcccacccacggcgacaatctcgttactggcattgcactggcgttatgcgcggcgtttttttatgccctgaccgccattatcgcccgcaagctgcagccgctaccggcgcagcatatcgcttttattcaggttatcgtcggtacggtaatgcttttgccgctggttcatgcccccgagtttaacggccattttgcctggcgctatttgctgatcctcggcatcgtccataccgggattatgtatcaacttttatatagcgcgattcaaaagctgccgacgccggtcactggttcgctctcgtttatctatccgctgatggctatcgtggttgactatctggttttccatcatgcgctcacgccgctgcagttggctggaggggtgctgattctgtttgctgcggcgggcaacaaccttggctggggcgaaaaaaaaccccgccatggcggggtaagtcagccgtcgcgaatgaactag

SEQ ID NO: 91361 - DNA, 444 bp, Enterobacter aerogenes
atggaatacgtaattgatgaaatagaccgggcgattctgacctgcctgacacaagatgccagagtttcgctcaaggtattgagcgcgcaggtgggattgacctcgccgagtaccgccgagcgggtaaaacgccttgaggaaaaaggggtaatagagggttatggcgcgcgggtgaatctggcggcgctgggatatagtctgcaggcattagtacgagtgagaccgctaccgggattgctgcaaaaagtggataaatatatccaggctatgccggagtgtatcgaaagtgacaaagtcaccggagaggattgttttgttatgcgtcttgtggtccgtgatattacgcagctggatacgatactggatggtctcgcagagtatgcgcagtgcaatacgtcggtggtgaagagttcaccggtaaaaagacgattgcccccgctgtga

SEQ ID NO: 91362 - DNA, 414 bp, Enterobacter aerogenes
atgaaagagaacgatattgctagcattctgaccaccacccggacgattgcgctggtaggcgccagcgacaaacccgatcgcccgagctatcgggtaatgaaatatctgctggaacagggctaccacgtcattccggtttcaccaaaggtcgcaggtaaaaccctacttggtcaacaaggctatgccaccctggcggaagtaccggaaaaaatcgatatggttgatgtgttccgcaactctgaagcggcgtggggtgtggcgcaagaagcggtggccatcggggcgaagacgttgtggatgcagctcggcgtgattaacgagcaggcggcggtgatggcgcgtgaagcgggattaaatgtggttatggaccgttgtccggctattgaaattccccgactagggttagcgaagtaa

SEQ ID NO: 91363 - DNA, 459 bp, Enterobacter aerogenes
atggaactgacaacacgtaccttacccgcacgcaaacatatcgcgctggtagcacacgatcactgcaaagatctgctgatgaaatgggtcgaacgtcaccaggcgctactggctcagcaccagctctatgcaaccgggaccaccggcaacctggtctcacgcgccaccgggctggaagtgaaagcaatgttgagcggaccgatgggcggcgaccagcaggtgggcgcgctgatttcggaagggaaaattgatgtactgatcttcttctgggatccgctcaatgcggtacctcacgatcctgacgtcaaagcgctcctgcgtctggcgacggtgtggaatatcccggtagccacgaatgccgccaccgctgactttattatccagtcgccggactttaatcaaccgattgaaattttaatccctgattaccaacgctaccttgccgagcgcctgaagtaa

SEQ ID NO: 91364 - DNA, 2055 bp, Enterobacter aerogenes
atggaacttaaagcgacaacattgggcaaacgcatggcacagcatccttatgatcgggtgcagttgcttaatgccggggtcaaagtctcaggcgatcgtcatgagtatcttatacctttcaatcagttattgtcagttcaatgtaagcgtggccttgtgtggggcgagctggagttcgtgctgccggaaagcaaagttgtgcgtttgcatggtaccgaatggactgagacgcagcatttctttcatcatctcaataatctctggcagcagtggagcgcggagatgagcgaaatcgccgcggacttgctgcgccagcagttaagtgaaattgaacgagccagcgccgaaggtaagtggttgacgcgccagcaggtcgcggacgtgcaggataaaatccgccgggctttaaccggattacctttccctgagagccgtctggatgaattcgataattgccgcgaactgtggcgccagtgtcaatgttggcttagcgatatcgacgaggctcgcctggcgcataatcaagcctataccgaagctatgctggaacagtatcgcggtttcttcgataagattgagtcttcgccgctcaacccggcgcaggcgcgggcggtggttaacggcgagcgttcgctgctggttcttgctggcgccggtagcggcaaaacgtcggtactggtcgctcgtgccgggtggttattaaatcgcggcgaagcagcggcggatcagatcctcctactggcctttggccgtcaggcggctcaggaaatggatgaacgtattcaggagcggttgggaactgacgagattgccgcgcgaactttccattcactggcgttgcatattattcagcagggcagcaagaaagtgccggcgatcagtaagctggaaaacgatacagccgcccggcaaaagctattgttgaaggcctggcagcagcagtgtcaggagaaaaaagcgcaggccaaaggctggcgtcagtggctggtggatgagatggagtggcagattgacgaaggtgatttctggcaggatcgcgtgctgctgcgccgcctggccggccgccttgaccgctgggttagtttaatgcgcatgcacggcggctcgcaggcggagatgatcgcctgcgcccctgaagaagttcgcgatctttttaataagcgtgtgaaactgatggccccgctgctgaaagcctggaaagcagcgttgaaagaggaaaatgccgttgatttctccgggcttatacaccaggcggtcaacatactggataaaggccgttttgtgagcccctggaaacatattctggttgatgagtttcaggatatctctccacagcgtgctgaattgctggcggcgttgcgccggcaaaataaacagacctcgttatttgcggtgggtgacgactggcaggcgatttatcgcttcagcggcgcgcagctctctttaaccacggcgtttaaccactactttggcgaaggagattgctgcgcgctggataccacctatcgatttaacggtcgtatcggcgagattgctaatggttttattcagcaaaacccgcatcagctggctaaaccgctgaatagcctcacggctggcgataagaaagcggtgaccctgctgcccgacgataaactcgacgatctgctcgacaagttgagcggctacgttaaacccgaacagcgaattttgctgctggcacgctatcaccatctgaaacccggcgcgctggaaaaagccgcgacccgctggccgcatctgcagctagattttatgacaattcatgccagcaaaggccagcaggctgactttgttattgtgttgggcctgcaggagggggatgacgccttcccggcgccggcaagagagtcggtaatggaacaagcgttgttgccacagccggaagatttcccggatgctgaagagcgtcggctactgtatgtggcgataacccgcgctcgcctgcgggtctggctgctgttcaataaagaacggccttcgtcatttgttgagatactgcaggaactgggcgtgccggtggcgcgaaagccctga

SEQ ID NO: 91365 - DNA, 447 bp, Enterobacter aerogenes
atgcgtaccattctgaatattttgaactttgttcttggcggtttcgccaccacgctcggttggctactggcgacgctggtcagtattattttgatcttcacgttaccgctgacgcgttcatgttgggaaatcaccagactatcgctgttcccctacggtaatgaagcaattcatgttgatgaactggaacctgaagcaaaaaacagtttactgaacgcgggcggcactattttgaatattttgtggttcatgttcttcggttggtggctgtgcctgatgcatattttcagcggtattgcgcagtgcctgaccatcattggtatccccgtggggatcgccaattttaaaattgccaccattgcactttggccggtaggacgccgcgtggtctccgttgaaacggctcgcgccgcgcgcgaagccaacgcccgccgtcgctttcagtaa

SEQ ID NO: 91366 - DNA, 2136 bp, Enterobacter aerogenes
atgttaagccccctgctccgccgttatacatggaatagcgcctggctatataacgccaggatatttattgcgctttgtggcaccacggttgcgccgtggtggattggcgaagtcaaactcaccatcccgttaacgcttggggtggttgccgcggcgttgaccgacctcgacgatcgccttaccgggcggttacgtaatctcgctattacgctggtctgcttctttattgcctccgcgtcggtggagttactgtttccatggccgtggctgtttgctattgggttaaccctgtccacgacgggttttatcctgctcggcgggctgggtcaacgctatgccaccattgctttcggcgccttactgatcgctatctacaccatgttaggggtcactctgtataacagttggtacctgcagccgctctttttgctggctggcgccatctggtacaacgtattgacgctcgcagggcatcttatttttcccatccgcccactgcaggataatcttgcgcgcagctatgaacagctggcccaataccttgaacttaaatcccgactgttcgatccggatatcgaagatgaaagtcaggccccgttgtacgatctggcgctcgctaacggcaagctggttgcgatgcttaaccagacgaaagcgtctttactgacacgcctgcgcggcgaccgcgggcaacgcggcactcgtcgcacccttcagtattatttcgtcgcccaggacattcatgagcgtgccagctcatcacatattcagtatcagacgcttcgcgaccatttccgctacagcgatgtgatgttccgtttccaacggatgttgtcaatgcaggcgcaggcctgtcaaaaactttcccgcgccattctcttacgcatcccgtatcagcatgatgcgcactttgaacgcgcctttatgcatctggacgcggcgctggatcgcgtccgcgccagcggcgcgccgcaagatcaggtcaaagcgctgggttttctgctcaataacctacgcgctattgatgcgcaattggcaactatcgaatcggtgcagaccagcgtgctggccagcaaccatcccgaaaatctgcttgccgacgatcgccctagcgggtttagcgatatctggttacgactgcgcagcaatatgacgccggaatcggcgcttttccgccacgcggtgcgaatgtcactggtgctgtgcgcgggctatgcgttcattcagtttaccggcctcaaccacggttactggattctgcttaccagcctgtttgtttgtcagccgaactataacgcgacccggcatcgtctggcgttaaggatcatcggtacattgattggcgtcgcgatcggcctaccggtgctgctgctggttccctcggttgaaggccagctgctgctcattgtactaaccggcgtgctgtttttcgcttttcgcaacgtgcagtatgcgcacgccacgatgtttatcacgctgctggtactgctgtgctttaacctgttaggtgaaggattcgaagtcgctttaccgcgtatccttgatacgctgatcggctgcgccatcgcctgggcggcagtgacctttatctggcctgactggaacttccgtaacttacctcgcgtactggatcaggccatcaacgctaactgccgttatcttgacgctattctcgagcagtatcatcaggggcgcgataaccgtcttgagtatcgcgttgcccggcgtaacgcacataaccgggatagcgaactggcatcagtggtatcaaatttatccacagagcctaaagcagacaacacgatgcgtgaaacggcattccgcctgttgtgtcttaaccatacctttaccagctatatttccgcgttgggggcgcacagggaaaaactgacaactccggaaatactggcattactcgatgatgccgtctgctacgtcgatgatgcgctgcatcattctcccgcagacgaacagcgtgttcagcaggcgctcagcaacctgcaatcgcgaattcaacatctggagccgcgagccgacagtaaagaaccattggtcctgcagcagattgggctactgctcgcactgctgccggaaatatgtcgtctgcagcgccggattgctggtcaaccggaataa

SEQ ID NO: 91367 - DNA, 732 bp, Enterobacter aerogenes
atgaagccaaaattcatcttgctgcacaaaacgaactcacttattttcttcaataacggatccgttaataaaattacttttatgtgcatgattaccaaaggaatgatcatgaagaaaatttcaaaattacggttcctccagtttcaggagtgcctttcccccttaggtaaaatcagtagccggcctttattcggcgggtatagtctggcgattgaaaataccgtattcgccatggtggctgagggcgaaatctatcttagggtttgcgaacaaagcgcctcttatcgggttgaacatcacagcccgatgctgatgatgcgcaagaatggccggccagtggccttaaagtattaccggatagatgaagcactatggcaggacagtaaaatgctgtttcacctatcgcagctgtcattgcattcggcgcgaagcgaaaagcagcatcagcgtgattccggcagactaaagaatttgcctaatatcagcttccatatggagttgatgttgatccatgccggaataaccgatgtgaaaatgctgcgtacactcggggcggaaaagagctggttaaaattgagagagcataataaaggaatatcaatcaatgtccttgagtccctggcgggcgcgattgccggcattcattccgccgcgctcccggcgcagcggcgccaggagctacgggagtgggctaatacacaaggatacagcgtggaggattattccggttga

SEQ ID NO: 91368 - DNA, 510 bp, Enterobacter aerogenes
atgtttacttcagctcacgcaaatcgttcaccactgacttcggcttcagtacgtcgcccttcgcacagcgtcgtcgaacattcagccactgggctgattagtgaaatcgtctatcgcgaagatcaacccatgatgacgcagcttttgctgctacctttattacagcagcttggccagcagtcgcgctggcaactgtggctcaccccgcagcaaaagctgagtaaagaatgggtacagtcgtccggccttccgctttcaaaagtgatgcagattaaccagatgtcgccctgcaatactttggaatcgatgattcgcgctttacgtaccgggaattatagcgtggttattggctggctgacggatgaacttactgaacaagaacatgaacgtctggcgctcgccgcagaagaaggtcatgcgatgggctttatcatgcgcccggtgagaaatacaagccagcctgggagacaattaagtgggctaaaaattcactcaaatttatatcattga

SEQ ID NO: 91369 - DNA, 1053 bp, Enterobacter aerogenes
atgaaaaagacagctatcgcgattgcagtggcactggctggcttcgctaccgtagcgcaggccgctccgaaagataacacctggtatgcaggtggtaaactgggttggtcccagttccatgacaccggctggtacaacagcaacctgaacaacaatggcccgacccacgaaagccagctgggcgctggtgcgttcggtggttatcaggttaacccgtacctcggtttcgaaatgggttacgactggctgggccgtatgccttacaaaggcgacaaagttaacggcgcattcaaagctcagggcgttcagctgaccgctaaactgggttacccgatcactgacgatctggacatctacacccgtctgggcggcatggtatggcgcgctgactccagcaacagcatcgctggcgacaaccacgacaccggcgtttccccagtattcgctggcggcgttgagtgggctatgacccgtgacatcgctacccgtctggaataccagtgggttaacaacatcggcgacgctggcactgtaggcgttcgtccggacaacggcatgctgagcgttggtgtttcctaccgtttcggtcaggaagacaatgcaccggttgtagctccggctccagctccggctccggaagtcaccaccaagaccttcaccctgaagtctgacgtactgttcaacttcaacaaagcaactctgaaaccagaaggtcagcaggctctggatcagctgtacacccagctgagcaacatggacccgaaagacggttctgcagttgttctgggttacaccgaccgcatcggttccgagcagtacaaccagaaactgtctgagaaacgtgctcagtccgttgttgactacctcgtagctaaaggcatcccggctaacaagatctctgctcgcggtatgggcgaatctgatccggttaccggcaacacctgtgacaacgtgaaagctcgcgctgcactgatcgactgcctggctccggatcgtcgtgttgcgatcgaagttaaaggttacaaagacgtagtaactcagccgcaggcttaa

SEQ ID NO: 91370 - DNA, 453 bp, Enterobacter aerogenes
atgaaatatcaacaactggaaaaccttgaaagcggctggaaatggaaatatctggtaaagaagcaccgggaaggtgagttgattacccgctacattgaagccagcgctgcgcaagccgcggtcgatgtcttgctgacgctcgaaaatgaacctgttctggtgaatacctggatcgatcagcatatgaatccggagctcgctaaccggatgaagcagactattcgcgcacgacgcaagcgtcattttaacgccgagcatcagcatacgcggaaaaagtccatcgatctggagttcgttgtctggcaacgcctggccgggcttgcgcaacggcgaggcaagacattatcagaaaccatcgtacagctaattgaagacgccgagcataaagaaaaatatgccagcaagatgtcgagcctgaagcacgatctgcaggtgctcttaggaaaagagtaa

SEQ ID NO: 91371 - DNA, 1758 bp, Enterobacter aerogenes
ttgaccattacgaaacttacccgaaacgacctcgctcctgatacggaaagttatcaggcgctgtttacccaggtcaatctcgccgagacagaggcatccctcgccggcgatctacaaccccgtttattttatgcgctggaacagcttctgatcacgccagccatttcatcatttatgctggtaaaggcgccggaagagccggagtatctgcattgggtagccgaagccgcgcgcagcctgcagcagtccacaacagcgctatgcggtgtacgctatcaggtcaacggcggcaacgtaaccatgtcgccggcacaaagcgcggaagacaattttgccagcaacggttcggttgagtcggccgactggattgaagcggaacagctctttggttgcgtacgccagtttaacggcgaaatttcgctgcagccgggtctggtgcaccgcgcgaacggcggcgtcctgttgctctccctgcgtgcgctgctggcccagccgctgctgtggatgcgcctgaagaacatggtgacccgtcagcgctttgactggttgtccattgatgaatcccgccctcttcccgttagcattccttccatgccgctgaacctgaggatcattctgatcggcgagcgtgatgcgctggccgactttcaggagatggaaccggaactcgcgtcgcaggccatttatagcgagtatgaagataacctgcagatagccgatgccgacaccctgaaactctggtgccagtgggtctggcaacatgctcgtcagctttcgctgccggggccggcggctgacgcatggccgctgctgattgaagaaggcgtgcgcgacaccggcgatcaggagacgcttccgctttcccctctctggattggccgtcagctgcgtgaagcggcagccttctgcgaaggcgaattgattagcggcgcggagatgcaaactatgcttgagcgccgtgaatggcgtgaaggctatcttgccgagcgaatgcgcgatgaaattcttctcgatcagatcatgattgataccgaaggcgaatgcatcggccaaatcaatgccctgtcggtaatcgagtttccaggacacccgcgcgcctttggcgaaccttcgcgcatcagctgcgtggtacatatcggcgacggcgaatttattgacgttgagcgtaaagctgaactgggcggtaatattcacgccaaaggcatgatgatcatgcaggcgtttattatgtccgagctcgaacttgaacagcagctgccatttagcgcttcactaaccttcgagcagtcctacagtgaagtggatggcgatagcgcctcaatggctgagctgtgcgcgcttatcagcgcgctggccaatgtgccgatcaaccagagtattgcgattaccggctcggtcgatcagttcggtcgcgtccaaccggtcggcggactgaatgaaaagattgaaggtttcttcaccatctgccagcagcgcggattaacaggcaagcaaggcgttattattccgtctgccaacgtccgccatctgagcctggcacaggagcttcgccaggcggtggctgacgagcagttctttatctgggcgattgatgacgttaccgaagctctgccgcttctcacccagctgcaatgggatggtgaaggacaaacgctgcgacaaactattcaggaacggattgcgcaggcgatgcaacaagagactcgccatcgttttccatggccgctacgctggttaggcggatcaaattcgaactga

SEQ ID NO: 91372 - DNA, 519 bp, Enterobacter aerogenes
atggtagataaacgcgaatcctatacaaaagaagatcttcttgcctctggtcgtggtgaactgtttggcgcgaaaggcccgcaactgccggcgccgagcatgctgatgatggaccgcgtcgtcaagatgaccgaaaccggcggcaactacgacaaaggttacgttgaagctgagctcgacatcaacccggacctgtggttcttcggttgtcacttcatcggcgacccggtaatgcctggctgtctgggtctggacgcaatgtggcaactggttggcttctatctgggctggctgggcggcgaagggaaaggccgcgcgctgggcgtaggcgaagtgaaatttaccggtcagattctgccaacggcgaaaaaagtcacctatcgtatccacttcaaacgcatcgtaaaccgtcgcctgatcatgggcctggcggatggcgaagtgctggtagatggtcgtctgatctactctgcaactgacctgaaagtaggtctgttccaggatacttccgcgttctga

SEQ ID NO: 91373 - DNA, 168 bp, Enterobacter aerogenes
atgaagagacaaaaacgagatcgcctggaacgggcacatcagcgtggatatcaggccggcattaccggtagatcgaaagaaatgtgtccctaccagacccttaatcagaggtcccattggctaggaggttggcgagaagccatggaggacagggtgcaaactgcctga

SEQ ID NO: 91374 - DNA, 564 bp, Enterobacter aerogenes
atgaaaaagtggttagtggcggcagcggtatgcgtactgacggcctgcagcagcggtggtgagagtaaaacttactatcaattaccggtagcaaagagcggcgcgcaaagcgccgtcaaccagagcaagaatttgctgtgggttgagcaggtcagtatccctgattatctggccgggaatggcgtggtttatcagactaccgatgtgcagtatgtgattgctaataacaatctgtgggcgagcccgctggaccagcagttacgtaccacgctggtggcgaatctgagcaatcaactgccgggttgggtggtggcatcgcagccgttaggcagcgagcaggatacgcttaatgtctccgttagcggcttccacggccgctacgacggccgggtcattgttagcggtgaatggctgcttaagcatcaggggcagttaatcaagcgtccgttcaatattgaacttaagcaacagcaggatggctatgacgcgatggttaagactctggcgcaggcctggagccaggaagccaccgcaattgcgagtgagttgaaccgcctgccataa

SEQ ID NO: 91375 - DNA, 1641 bp, Enterobacter aerogenes
atggaaaataagagcggagaagcgaaagtgcagaaggtgaagaactggtcaccggtctggatctttccgattgtgactgtgctcatcggcgcatggatactgttttaccactacagccaccaggggccggaggtgacgcttatcaccaccaacgccgaaggcattgaagggggtaaaacgcgtatcaagagccgcagcgttgatgtcggggtagtggaaagcgctatcctgactgatgacctgaaacatgtagaaattaaagcgcgtctgaactcggggatgcagaagctgctgcataaagactcggtgttctgggtggtgaaaccgcaggtggggcgcgaggggattagcggcctcggcaccttgctttccggtgcctatatcgaattgcagccaggtaaagaaggttctgtggcgccacagtatccgctgttggattcgccgccattggcttcaccggatgccaaaggtatccgtgttctgctggaaagtagcaaagccgggcaactctcgcctggcgatccggtgctgttccgcggctatcgcgtcggttcggttgaaaccagtacctttgatacgcagaagcgccgcatcacctatcagctgtttatcaatgcgccgaacgaccgtctggtgacgaccaacgttcgcttctggaaagatagcggtatcgcagttgacctcacgtccgcgggaatgcgcgtcgagatgggatcgctgtcgacgctgtttggcggcggtgtgagctttgacattccggaaggacttgatctcggcgagccggtggcgaataaaacggaataccacctgtttgacgatcagaagagtattcaggattcggtgttcacccagcatattgattacgtcctgttctttaaagattcagtgcgtggtctgcagccaggggcgccggttgaattccgcggtattcgtcttggtaccgtcggcaaagtgccgttctttatccccggtttgaaacagagcctgaacgatgattatcgtatcccggttgaaatacgtatcgagccggaacgtctgatcaatcaactgggcggcgatccgaacattcgcgcgcatattgacgatctgatcaaccgcgggcttcgtgcttcgctgaaaaccggcaacctggtcaccggcgcgctgtatatcgatctcgacttctatccgaaagcgccaccgcgcggcaagattcaggagttcggcggctatccgatcattccaaccgtcagcggcggtctggcacagatccagcagcgtctgatggatgcgctcgataagattaacaacctgccgattaacccgctgctggagcaggcgaccagtaccctggcgcagagccagaaaaccatgcagcgtgtccagactacgctcgacaacttgaataagatcacttcaagccagtcgatgcagcagcttcctgctgatatgcagagcacgttgcgcgagttgaaccgcagtatgcagggcttccagccgggctcggcagcctacaataagatggttgcggatatgcagcgactggatcaggtacttcgtgaactgcagccggtactgaaaaccctcaacgacaagagcaatgcgctggtatttgaggccaaggataaaaaagatccgcagccgaagggagcgaaacaatga

SEQ ID NO: 91376 - DNA, 1269 bp, Enterobacter aerogenes
atgtgcgatcatcatcatgctgcgcggcacatattgtgcccacaatgtgatctgctggtggctttgccgccgctggagcatcgccagaaagccgcatgcccacgctgcggcaccacgctcaccacatcgtgggacgcgccgcggcagcgccccacggcctatgcgctggtggcgctgttcatgttgctgctggcgaacctgtttccttttgtttatatgaaagtcggcgggatcagcagcgaaattgagctgctggaaatccctaatgtgctgttcagcgaggattacgccagcctcggtacgttctttttactctttgtccaactggtcccggcgttttgtctggtgaccatcttattgttggtcaatcgcgttcatatgccttcacgcttgaaggcgtttctggcgcggattttgtttcacctcaaaagctgggggatggcggagattttcctcgccggggtgctggtcagcttcgttaaactcatggcctatggtgatatcggcgttgggctgagctttgttccctggtgtctgttctgcctgctgcaattgcgggcgtttcagtgcgtcgatcgccgctggctgtgggacgacattgcgccaatgccggtcattaagcagccgctgcgccctggcgtgccggggcttcgtcagggattgcgttcctgctcgtgctgcacggcggtgctgccagcggatgagaaagagtgtccgcgctgtcacaccaaaggtaccccgcggcgtaaaaacagcctgcagtggacgctggcgctgctgatgacgtcatttgtgctctatttacccgccaatattctgccgattatgattaccgatctgctgggcgataaaatgccgtcgacaatcatggcgggcgtcgttctgctgtggagtgagggctcttacccggtcgcgctggttatctttatcgccagtatcatggtgccgacgttaaaaatgatcgctatcggctggctatgctggagtgcgaacggaaacggcgcgcgtgattcagagcgtatgcacctgatttatgaagtggttgaatttgttggccgttggtcaatgatcgacgtttttgtcatcgcggtactctcggcgctggtgcgtatgggaggcttgatgaatatctatccggcgataggcgcggtgatgttcgcgctggtcgttgttatgaccatgttctcggccatgatgtttgacccacgtctattgtgggaccgtgaaccagatccaagccatgaggaaatgcaacagcatggaaaataa

SEQ ID NO: 91377 - DNA, 1908 bp, Enterobacter aerogenes
atgtcattgattagtatgcacggcgcctggctttcgttcagcgatgcgccgctgctggataatgctgaactgcatatcgaagataacgaacgcgtctgcctggtagggcgtaacggcgccggtaaatcgaccctgatgaaaatcctcaaccgcgagcagggtctggacgatgggcgtattatttatgaacaggatctgatcgttgcgcgtctgcagcaggatcctccgcgtaatgtcgcaggtacggtgtacgattttgtcgcggaagggatcgccgaacaggcggcgtatctgaaggcctatcatgatgtttcgcatcaggtgatgaccgatccgagcgataaaaatttaaatgagctggcccgcctgcaggaacagctggataacctggggctgtggcagttagatagccgtatcaacgaagtgatcgagcagcttggccttaacgccgacgcgcagctggcgtcgctgtccggcggctggctgcgtaaagcggcgctgggccgcgcgctggttagcgggccgcgcgtgctgttgctggatgaaccgactaaccacctcgatatcgaaactatcgactggctggaagggttcctcaaatccttcaaaggcaccattatcttcatttcgcacgaccgttcttttatccgcaatatggcaacgcgcattgtcgacctcgatcgcggcaagctggtgacctatccgggcaattacgatcaatatctgctggataaagaagaagcgctgcgcgtcgaagagctgcagaatgctgaattcgaccgcaagctggcgcaggaagaggtgtggatccgccaggggattaaagcgcgtcgtacccgcaacgaagggcgcgtccgcgcgctgaaggcgatgcgtcgcgagcgcggcgaacgccgtgaagtgatgggcagcgcgaagatgcaggtcgaggaggcttctcgctccggcaaaatcgtctttgagatggaaaacgtcaactatcaggttgacggcaaagtgctggtcaaagatttctccgcgcaaatccagcgtggcgacaagattgcgctgattggcccgaacggctgcggtaaaaccacgctgctgaagctgatgctcggccagttgcaggccgatagcgggcgtatccacgtcggtaccaagctggaagtcgcctacttcgatcagcaccgcgcggagttggatccggaccgcacggtgatggataaccttgcggaaggtaaacaagaggtgatggttaacggtaagccgcgtcacgtgctgggctatctgcaggacttcctgttccatccaaaacgggcgatgaccccggtacgcgcgttgtccggcggggagcgtaaccgtctgctgctcgcgcgcttgttcctgaaacccagtaacttattgattcttgatgaaccgactaacgaccttgatgtcgaaacgctggaactgctggaagagctgatcgatggctaccagggcaccgtgatgctggtgagccacgaccgtcaatttgttgacaacaccgtgaccgagtgctggatcttcgagggcggcgggcgtatcggccaatatatcggcggttatcacgacgcgcgcggacagcaagcgcagtcgctggcgaataaacagccgattgtaaaaaaaccggcggaagtcgctcaaccgaaagcagaaagtgtcaaacgctctgccagcaaactaagctataacctgcagcgcgaactggaacagctgccgcagaagctggaagatctggaaactcaactgcagacgctgcaggaaaaagttgccgatccttctttcttcggccagccgcatgaccagacccagcaggtgctggcgcagttagcggaagcggaacaggccctggaagcggcctttgaacgctgggaatatctcgaaggactcaaaaacggcgcttaa

SEQ ID NO: 91378 - DNA, 2106 bp, Enterobacter aerogenes
atgaaatctctgtttgccagcacggctcgtggtcttgaagagctgttaaaaactgaactggaaggacttggcgccacggcgtgccaggttgtccagggcggggttcattttcagggagatacgcgcctgctgtatcaaagcctgatgtggagccggctggcctcgcgcatcatgctgccgctgggcgagtgcagcgtgtatagcgatctggatctctacctgggggttcaatcgattccgtggacggagatctttaccactgacgccacctttgcggtgcattttagcggcctcaatgaggaaatccgcaacagtcagtatggcgcattaaaagtcaaagacgctatcgtcgatagcttcacgcgtaaaaatctgccgcgtccgaatgtcgatcgtgagaatcccgatctgcgtatcaacgtctggctgaacaaagaaacggcgcatatttcactggatctaagcggcgaaggtctgcatctgcgcggctaccgtgatggcaccggcatggcgccgatcaaagaaaacctcgcggcggcaatcgtcatgcgctccggctgggtggcgggaacgccgctgctcgatccgatgtgcggttccggcacgttgctgattgaagcggcgatgctggcgaccgatcgtgcgccgggcctgcaccgcggccactggggcttcggcggatgggcgcaacacgatgacgctatctggaaagaggtgaaagccgaggcgcaaacgcgcgctcgccaggggctggccgcttatgaatcgcgcttctacggctcagacgtcgacgagcgcgtgattgaacgcgcgcgccgcaacgcccgccgcgccggtattggcgagcttatcaatttcgaagtaaaagacgtcgcgcagctcaataatccgctgccgaaaggcccgtatggcaccgttatcagtaacccgccatacggcgagcgcctggaaagcgaaccggcgctgattgccctgcacagcctgctgggacggattatgaaaaaccagtttggcggctggaacctgtcggtcttcagcgcctcgccggaattgctgagctgcctgcagctgcgagccgataaacagtttaaagccaaaaacggcccgctggactgcgtacagaagaactatcatctggcggaaagcgaaggcggcaagccggcgatgctggcggaagattttgctaaccgcttacgtaaaaacctgaagaagtttgaaaagtgggcgcgtcaggaaggcattgaatgctatcgcctgtacgatgccgatttgccggaatataacgtagctatcgaccgctacggcgagtgggtggtggtgcaggagtacgcgccgccgaaaaccatcgatgcgcacaaagcgcgccagcgtctgttcgatattatcgccgcgactatcgcggtgttagggattgcgccgaataaactggtgctgaagacccgcgagcggcaaaagggtaaaaatcagtaccagaagatggcggagaagggcgactttatcgaggtacaggagtataacgcgcgtctgtgggttaaccttaccgactatctcgacaccggtctgttccttgaccaccgtatcgcccgtcgtatgctcggccagatgagcaagggtaaggatttccttaacctgttctcctataccggcagcgccagcgttcacgccggtctgggcggcgcgcgctcaactacgactgtcgatatgtcacgcacctatctggaatgggcggaacgcaacctgcgtctcaatggtttaaccggccgtgcgcatcgcctgatgcaggcggacgtgctgggttggctgcgggaaagcaccgagcagttcgatctgatctttatcgatccgccgaccttctccaactccaaacgaatggaagatgcctttgatgtgcagcgcgatcatatccgtctgatgaccgatctaaaacgtctgctgcgtaaaggcggcacgattatgttctcgaataacaaacgcggtttccgtatggatcatgacgggctggcggcacttggcctgaaggcgcaagaaatttcgcaaaaaacgctgtcgcaggattttgcccgcaaccgtcagatccacaactgctggctgattaccgcggcctga

SEQ ID NO: 91379 - DNA, 1110 bp, Enterobacter aerogenes
atggtaacgctattgaaactttttattcatcccgtcaaatccatgcgcggaattggcgtcacccatgcctttgccgatattagcggcatggccttcgaccgcatctttatgctgaccgaaaccgacggtacgtttattaccgcacgccagtttccgcagatggtgaaattcctgccttcgccgcttcatgacggcctgcacttgaccgcgccggatggcagcagcgcgctggtgcgctttgatgatttcgctccccagggcgagccgacggaggtgtggggcaaccatttcaccgccttaatcgcgccagccgccatcaaccagtggctcagcggcttcttcaaccgcgacgtccaactgcgctggctcgggccgcagctaacccggcgagtaaaacgccacgacgcggtgccgctctctttcgccgatggttatccctacctgctcgccaatgaagcctcgcttcgcgatctgcagcaacgttgccctgccagcgtaagcatagaacagtttcgccctaatctggtggtcaccggcgccgcggcgtgggatgaagatagctggaaagtcattcgcatcggcgaggtggtatttgacgtcgccaaaccctgcagccgctgcattttcaccaccgtcagcccggagcgtgggcaaaaacatccgtccggtgagccgctggagacgttaaagcgttttcgtaccgcgcaggataatggcgatgtcgattttggccagaatctgatcgcccgcaacagcggcgttatccgcgtgggtgatgaggtggaagtgctgacgcgcggcccggcgaaagtctatggcgctggcgatagcgacgatactctgacggccgatgcgcagccaaacgcgacggttgagattgagtggcaagggcaacagttcaccggcaataaccagcaggtgctgctggagcaactggaacaacagggcattcgtatcccttattcctgccgcgccgggatctgcggcagttgtcgtatccgcctggaagagggtgaagtgagtccgttaaagaaaaatgcggtcgccgcggatggcaccattttatgctgcagctgcgtaccgaaaaccgcgctgcgcctggcgccttaa

SEQ ID NO: 91380 - DNA, 543 bp, Enterobacter aerogenes
atgcggattaaacctgacgataactggcgttggtattacgacgaagagcatgaccgcatgatgctcgatctggccaatggtatgttatttcgctcacgtttcgcccggcgcatgttaacgcctgacgctttcgcaccgtcgggattttgcgtcgatgacgcggcgctctatttttcttttgaagaaaaatgccgcgatattgaattaaacaaagagcagcgtgccgaattagtattaaatgccttaaccgcgatccgttttctgaaaccgcagatgccgaagagctggcatttcactactcaccagcagaactggcagccgaccagcggcgacgccgccagcgtgtggatcagcgataccggcgagcaggtcaatttgctggtggtcgaaccgggtgaaaacgccacgctttgcttgctggcgcaaccgggattgactctggcagggcgggtgatgcagttaggcgatgtgattaaaattatgaacgacagactgcagccggcgcagagcgcggccagctacagcctggggcaggcggtttaa

SEQ ID NO: 91381 - DNA, 1011 bp, Enterobacter aerogenes
atgtactatcccttcgttcgtaaagctctttttcagctcgatcctgagcgcgctcatgaagtaaccttccaacaattacgccgcgtcaccggcacgccgctggaaatgcttgttcgacaaaaagtaccgtcgaaacccgttacctgcatggggctgactttcaagaatccgctggggctggcggccgggcttgataaaaacggcgagtgcattgatgcgctcggtgcgatgggcttcggctcaatcgaaattggtaccgtgactccgcgtccgcagccgggcaatgacaagccgaggatcttccgtctcgtcgatgccgaaggtttgatcaaccgcatgggctttaataaccacggcgttgataacctggtcgagaatgtgaaaaaagcgcattttgacggcgtgctggggattaatatcggtaaaaataaagataccccggtagagcagggtaaagatgattatctgatttgtatggaaaaagtctatccatacgctggatatatcgccattaatatctcctcgccgaataccccagggctgcgtactttgcaatatggtgaagcgctggatgatttactcagcggtattaaaaataagcagctcgaacttcaacagaaacatcaaaaatatgttcctgtggcggtgaagatcgccccggatctttctgtcgaagaattgatccaggtagccgacagcttagtccgccataatattgatggcgtcattgctaccaataccaccctcgatcgttcactggtccaggggatgaagcattgtgatgaaaccggtgggttgagtggtcgtccattacaattaaaaagcaccgagattattcgtatgctggccacggaattaaatgatcgtttgcccattatcggagttggcggtattgactcggtgattgccgctcgtgaaaagctggctgctggcgccacactggtgcagatttattccgggtttatttttaaagggccaccgctgattaaagaaattgttacacacatctaa

SEQ ID NO: 91382 - DNA, 576 bp, Enterobacter aerogenes
atgcgcgttattacactcgcgggcagcccccgctacccttctcgctcaagcgcattgctggagtacaccagagagaaacttaccgcggccgacatcgaagtctatcactggcatttacagaattttgatcccgaagatctgctttacgcccgcttcgataaccccgcgctacataccttaaatgaacaactggccggcgccgatggcctgattatcgccacccccgtctataaagcctctttttccggcgcactgaagacgctactggatttgctccccgaacgcgctctggaaggcaaaattgtcctgccgctggcgacaggcggcaccatcgcccatatgctggcggtcgattacgccctgaagccggtgcttaatgctctcaaagcgcaggagatcctccatggcgtattcgccgatgacagccaggtcaccgattatcaacataaaccgcagttcacaccgaatctgcaaaaccgtctcgaccaggcgctggagaccttctggcaggcgctgaatcgccgcaatagccgcatcccggggctaaagaccttacagggggttgagcatgcttaa

SEQ ID NO: 91383 - DNA, 963 bp, Enterobacter aerogenes
atgcttaatcctctgcgtgccctgaccctcggcgggctactcgcgctttcctttattacgcatgcggccccgcaggcgccggaagcgttacgcatcggctaccagaaaggcagcgtcagtatggtgctggcgaagagccatcagctgctggagcagcgctatccgcaaactaagatttcgtgggtcgaatttcctgccgggccgcaaatgctggaagcgctgaacgtcggcagtattgatatcggcagcaccggcgatattccaccgattttcgctcaggctgccggcgccgatctggtctatatcggcgctgaacccgcgaaaccgaaagcggaagtgattctggtcgccgataaaagcccaatcaacagcgtggctgaactgaaaggccgtaaggtggcgttccagaaaggctcaagctcgcacaatctgctgctgcgcgctctgcagcaggcagggctgaaattcagcgatatccagccagtgtatcttgcccccgccgatgcccgcgccgcttttcagcagggtaatgttgatgcctgggctatctgggatccctattactctgcggcgctgctgcaaggcggggtacgggtactgaaagatgggagcgacctgaagcaaaccggttcgttctatcttgccgcccgtccttatgccgaaaagaacggcgcctttatcgaaggggtgctggcgacctttagccaggcggatgccctgaccatcagccatcgccagcaaagtattgccctgttggctaaaacgatggggctacccgaagcggtgattgccagctatctcgaccatcgtccgccaactgcgatatcgccggtaagcgctgaaacggccgctcgccaacagcaaaccgccgatctgttctatgagaacaagctggtaccgaaaaaaatcactattcaaaaccgtatctggcagcctgcccccgcacaaggagcgaaatcatga

SEQ ID NO: 91384 - DNA, 1146 bp, Enterobacter aerogenes
atgagtctgaatatgttctggttcttacccacccacggtgacggccgctatctgggtaccgacgaaggcgcgcgcccggtagactacagctatctgcagcaaatcgcccaggccgccgaccgcctcggcttcaccggcgtactgattcccaccgggcgctcgtgcgaagatgcctggctggttgccgcttcaatgatccccgtcacccagcggctgaagtttcttgtcgcgctgcgcccaagcgtggtatcccccaccgtttccgcgcgtcaggcagccacgcttgaccggctctctaatggccgggcattgttcaacctggtcaccggcagcgatccgaatgaattagctggcgatggggtattcctcgaccacaccgaacgctatgaagcctccgccgagttcacccatatctggcgcaaactgatggaaggtgaaaccgtgactttccacggcaagcaccagcacgtgcgcggcgcgaaactgctcttcccaccgcagcagcaaccgcgaccgccgctctactttggcggctcctcggacgttgcacaggatctggccgccgaacaggtcgacctctacctgacctggggcgaaccgccggcgcaggtggcggaaaaaatcgcccaggtgcgtgagaaagccgcgcgcctcggccgcagcgtccgctttggtattcgtttgcacgtcatcgttcgcgaaaccaatgaagaggcatggcaagcggcggaaagcttaatctcccatctggatgacgaaaccatcgcccacgcgcaggccgccttcgcacaaaccgattctgttggccagcaccgcatggcggcgctgcacaacggccgtcgcgacaagctggaaatcagcccgaatctgtgggcgggcgtcggtctggcgcgcggtggcgcgggcaccgcgctggtgggcgatgcggctaccgtcgccgaacgtattaatgaatacgccgaactaggcatcgacagttttatcttctccggctacccgcaccttgaggaagcctggagagtcggcgaactgctgttcccgctgctcgatgtcaacgtcccgacgatccctcagccgcaaaacttgcgcctgcagggcgaagcggtggcgaacgaatttatcccgcgtaaagcggcgcaaagttag

SEQ ID NO: 91385 - DNA, 792 bp, Enterobacter aerogenes
atggcagcctcttcgcaaaaacttctattacgcctcgctccttggtttttaccggtgggcaccgtgcttatctggcaattggcgtcatcggtaggctggctctcaacccgtattctcccctctccggagggggtactgaaagccttctggacgctctccgccagcggcgagctgtggcaacacctggcgatcagttcctggcgcgccttactcggcttcgccattggcggctccatcggcctgacgctcggactcatcagcggcctctcgcgctggggcgaacgcctgctggatacctccatccagatgctgcgcaatgtgccgcatctggcgctaattccattggtgattttgtggtttggtattgacgaaagcgccaaaatatttcttgtcgcgctggggacgatgtttccgatttacatcaatacctggcacggtatccgcaatatcgatcgcggtctggtggaaatggcgcgtagctatggcttatcaggattcgccctcttccgccacgtgatccttcccggcgccttgccctcgattatggtcggcattcgcttcgccctcggattgatgtggctgacgcttatcgtcgctgagaccatctccgcgaatgccggaatcggctacctggctatgaacgcccgcgagtttctgcaaactgacgtggtggtggtcgccattattctttacgccattctcggcaagctcgccgattttagcgcgcaactgctggaacgcgtgtggctacgctggaacccggcgtaccgtcttcaggaggctaacgcatga

SEQ ID NO: 91386 - DNA, 774 bp, Enterobacter aerogenes
atgaatactgctcgtcttaatcccgggatcccgctgttactcaatggggtcagcaaacgctacggcgacaatgtcattctcaatgagctggatttacatattcctaccgggcaatttgtcgcggtggtcggtcgcagcggcggcggtaaaagcaccctgctgcgcctgctggccgggctggaaaaacccaacggcggcgaactactggcaggcgcgactccgcttgcgcagattcaggatgatacgcgtatgatgttccaggacgcgcggttgctgccgtggaagacggttatcgacaacgttggacttgggctgaagggccagtggcgcgatgccgcccgccaggcgctggccagcgtcgggctggaagagagagccgatgagtggccggcggccctctccggcgggcaaaaacagcgtgttgcgctggcccgcgcgctgatccatcgcccgcgtctgctgctgctggatgaaccgctgggagcgcttgacgccctcacccgtctggaaatgcaggaattgattgtttcgctctggcaagaacacggctttaccgtgttgctggtaactcatgatgtgagtgaagcggtggcgatggccgaccgggtgctgttaatagaagaaaagaaaattggcctcgatttgagcgtggatattccacgtccgcggcggttcggctcggcgaagctggcggaactggaagcgcaggtgctcgatcgggtgatgaagcgcggcgacagcgagcgtgcgccgcgtttgtttagtcatggctaa

SEQ ID NO: 91387 - DNA, 2616 bp, Enterobacter aerogenes
atgacacaacagccccaagccaaataccgccacgactaccgtgcgccggattatctgattagcgatattgatttgacctttgacctggatgccgcgaaaaccgttgtcacggccgagagtaaggtttcccgtcacgcggctgcgtctgatgtgccattgcgtctggatggcgaagacctgaccctgatttcactgcaggtgaacggtcagccgtggagtgactataaagaagaaaataatcagctggtgattggcggtttgccggacagtttcaccctgactatcgtcaacgaaattagcccggcggcgaacaccgcgctggaaggcctgtatcagtcaggcgaagcgctatgtacccagtgtgaagctgaaggtttccgccatattacctggtatctggaccgcccggatgtgctggcgcgcttcaccaccaaaatcattgccgataaagccaaatacccctacctgctttctaacggcaaccgcgtcgcgcagggcgagctggacaatggccgtcactggatccagtggcaggatccgttcccaaaaccctgttacctgttcgcgctggtggccggcgatttcgatgtgctgcgtgacaccttcaccacccgttccgggcgtgaagtcgcgcttgaactatacgttgaccgcggcaacctcgaccgcgcgccatgggcgatgacctcgctgaaaaattcaatgaagtgggacgaaacccgtttcggtctcgaatatgacctcgacatctatatgatcgtcgccgtcgacttcttcaatatgggggcgatggagaacaaaggcctcaacgtctttaactctaaatacgtgctggcccgtaccgataccgcgaccgataaagattacctcgatattgagcgcgtcattggtcacgaatatttccataactggaccggcaaccgcgtgacctgtcgcgactggttccagctcagcctgaaagaagggctgaccgtattccgcgatcaggaattcagttccgacctcggctcgcgcgcggtgaaccgcatcaacaacgttcgtaccatgcgtgggctgcagtttgccgaagacgccagcccgatggcgcacccgatccgtccggatatggttattgagatgaacaacttctacaccctgacggtatacgaaaagggcgcggaagtgatccgtatgctgcacaccctgctcggcgaagccaatttccagaaagggatgcagttgtactttgagcgccacgacggcagcgccgccacctgcgatgatttcgtgcaggcgatggaagatgcttcgaacgtcgatctgtcgcatttccgtcgctggtacagccagtccggcacgccggtcgttaccgtgcatgacgactataacccggaaaccgagcagtacaccctgactatcagccagcgtacgccgccgaccgcggaacaggccgacaagcagccgctgcacatcccgttcagtatcgagctgtacgataacgaaggcaaagcgatcccgctgcagaaaggcggccatccggtgcaccacgtgttgaatgtcacccaggcggaacagacgttcgtctttgataacgtttacttccagccggtaccggcgctgctgtgtgaattctccgcgccggtcaagcttgaatataagtggagcgaccagcagctgacgttcctgatgcgccacgcgcgtaacgacttctcgcgttgggatgccgcgcagagcctgctggcgacctacatcaagctcaacgttaaccgccatcagcaggggcagccgctgtcgctgccgatccacgtcgctgacgctttccgcgcgattctgctcgacgagaagatcgatccggcgctggcggcggaaattttaacgctgccgtcggccaacgaaatcgccgaactgttcaccatcatcgatccgattgccatcgcggcggtgcgcgaagcgctgacccgtacgctggcgaaagagctggccgatgagctgctggtggtttacaacgccaacaagctcgacagctatcgcgtagaccatgccgatatcggtaaacgttccctgcgcaatacctgcctgcgctatctggcttttggcgatgttgaactggcagataagctggtgcaagcccagtatcatcatgctgacaacatgaccgacgcgttggctgcgctgtcgtcggcggtggcggctgagttgccgtgccgtgatgcattgatgcaggagtatgacgataagtggcaccaggacggcctggtgatggacaagtggtttattctgcagtccaccagcccggcggccaatgtggttgagacggtacgcggcttgctcaagcaccgttcattcacgatgagcaacccgaaccgggtacgctcgctgatcggcgccttcgcgagtagcaacccggcggcgttccacgccgaagacggcagcggttaccagttcctggtggaaatgctgaccgagctcaatagccgcaacccgcaggtggcgtcgcgtctgattgagccgctgattcgtctaaaacgctacgatgagaaacgtcaggccaagatgcgtgcggcgctggaacagctgaaagggctggagaatctctccggcgatctgttcgagaagatcggcaaagcgctggcgtaa

SEQ ID NO: 91388 - DNA, 1239 bp, Enterobacter aerogenes
atggaacgccccagtgagaggatgctactgcgcaccatgacacaattcacttctcctgtactgcactcgctgcttgatacggatgcctataagctgcatatgcagcaggccgtcttccaccgctactatgatgtggaggtggcggcagagttccgctgccgcggagacgacctgctcggcatctatgccgacgcgattcgcgagcaggttgaaaccatgcgcgacctgaagctgcaggacgatgagtatcgctggctgtccaccctgccgttcttctcgcaggactatctcgcttggctgcgcgacttccgttacgacccaagccaggtcaccgtcatcaacgatcatggtaagctgaatattcgcctcaccgggccgtggcgcgaagtgatcatgtgggaagtgccgctgctggcggtcatcagcgaactggtgcaccactaccgttcgccggaaatcagcgtcggcctggcgctggagacgctcgaacataagcttgccgacttcgccgacatgaccgccgacatcgatatgtcggcattccgcctgatggattttggcacccgccgccgcttctcccgcgaagtacagcaggctatcgtgcagcgcttgcagcaggagccgtggtttgtcggcaccagcaactacgatctggcccgccgattgaatttaaccccgatgggtacccaggcgcacgaatggttccaggcccaccagcagatcagtccaaacctggccagcagccaacgcgcggcgcttgccgcctggctggcggaatatccggatcagctgggtattgccctgaccgactgcatcaccatggacgctttcctgcgtgatttcggtcctgaattcgccacccgctatcaggggctacgccatgactccggggatccgctggagtggggcgagaaagcaatcgcccattatcagaaattgggtatcgacccgatgagtaaagtgctggtgttctccgataacctcgacctcggcaaagcggtcgatctgtatcgccacttctcctcgcgggtgaagctcagcttcggtatcggcacccgtttgacctgcgatatcccacaggttaaaccgctaaatatcgtgataaaactagtagaatgtaacggcaagccggtggcgaaactctccgacagcccgggtaaaaccatctgccacgataaggcgttcgtccgcgccctgcgcgaggcgtttgacctgccgccgattaaaaaggcgagttaa

SEQ ID NO: 91389 - DNA, 1401 bp, Enterobacter aerogenes
atgagcgttgtgcctgtagccgacgtactccagggccgcgttgccgttgacagcgaagtcaccgtgcgcggatgggtgcgtacccgccgagattctaaagctggcttttctttcctcgccgtctatgacggttcctgctttgatcctgtacaggccgttattaataattctctgcccaattacaatcaggaagtgttgcgcctgaccaccggctgctcggttatcgtcaccggtaaagtcgtggcctcccagggtcagggccagagctttgaaatccaggcctccaatgtggaagtcaccggctgggttgaggatccggacacctacccgatggcggcgaagcgccacagcatcgagtatctgcgtgaagtggcgcacctgcgtccgcgcaccaacctgattggcgcggtagcgcgcgtacgtcacaccctggcgcaggcgctgcaccgtttcttcgacgaacagggtttcttctgggtatccaccccgctgatcaccgcttccgataccgaaggcgccggtgaaatgttccgcgtatcaacgctggatctggaaaacctgccgcgtaacgaccagggtaaagtcgacttcgataaagacttcttcggtaaagagtcgttcctgaccgtttccggtcagttgaacggtgagacctatgcctgcgcattgtccaaaatctataccttcggcccaaccttccgcgccgaaaactccaacaccagccgccacctggcggagttctggatgctggagccagaggtagccttcgctagcctcaacgatgttgccggtctggcggaagccatgctgaagtacgtcttcaaagcggtactggaagagcgtgcggatgacatgaagttcttcgccgagcgcgtagataaagacgccatcgaccgtctgcagcgctttgtctctgctgatttcgcccaggttgattacaccgacgccgtcactatcctggaaaactgcggcaagcagtttgagaacccggtgtattggggcgtggatctctcctccgagcatgagcgttatctggccgaagagcacttcaaagcgccggtggtcgtgaaaaactatccgaaagacattaaggcgttctacatgcgccttaacgaagacggtaagaccgtcgccgcaatggacgttctggcgccgggcatcggcgaaatcatcggcgggtcccagcgtgaagagcgtctcgacgtgctggacgcgcgtatggccgaaatgggtctgaataaagaagattactggtggtatcgcgacctgcgtcgttacggcaccgtaccgcattctggcttcggtctgggcttcgagcgtcttatcgcctacgtaaccggcgtacagaacgttcgcgacgtgattcctttcccacgtacgccacgtaacgccactttctaa

SEQ ID NO: 91390 - DNA, 1080 bp, Enterobacter aerogenes
atgatgaagcgcaatattctggcagtggtgatccctgccctgctggtagccggtgcggccaacgctgcggaaatctataacaaaaatggtaacaaactggatttctacggaaaaatggttggcgaacatgtctggaccaccaatggtgacaccagcagtgacgacaccacctatgcccgtatcggcctgaaaggcgaaacccagatcaacgaccagttgatcggttacggccagtgggaatacaacatggatgcgtccaacgttgaaggttcccagaccaccaaaacccgtctggctttcgccggtctgaaagcgggtgaatacggttcattcgattacggccgtaactacggcgccatctacgacgttgaatccgcaaccgatatgctggttgagtggggcggcgacggctggaactacaccgataacttcatgaccggccgtaccaacggcgtggccacctaccgtaactcagacttcttcggtctggtggacggcctgagctttgcgctgcagtatcagggtaaaaacgatcacgaccgctcaattcgcaaacagaatggcgacggtttcagcaccgcggcaacctacgcgtttgataacggtatcgcgctgtctgcaggttacgctaactccaaccgtagcgttgaccagaaacgtgacggcaacggtgacaaagctgaagcatgggcaacctctgccaagtacgatgctaacaacatctatgccgcagttatgtactcccagacttacaacatgacgccggaagaagatgaccacttcgcgggcaaaactcagaacttcgaagccgtagttcaataccagttcgatttcggtctgcgtccgtccctgggctacgtgcagactaaaggtaaaaacctgcaggctcgcggtggcttcggcggcggcgatgcggacctggttaaatacgtagaactgggtacctggtactacttcaacaaaaacatgaacgtgtacgcggcgtacaagttcaaccaactggatgataatgcctacactcgcgcagctggcgtagccaccgacgaccaggctgcggttggtatcgtttaccagttctaa

SEQ ID NO: 91391 - DNA, 1191 bp, Enterobacter aerogenes
atgtttgagaacattacagccgcccctgccgaccctattctgggcctggccgatctgtttcgtgccgatgaccgcccaggcaaaattaacctcggaattggtgtttacaaagatgagacaggtaaaacgcctgttctgaccagcgtaaaaaaagccgagcaatatctgctggaaaatgaaaccaccaaaaactacctcggtattgatggtattccggagtttggtcgctgcactcaggagctgctgttcggtaaaggaagcgcaattatcaacgataagcgcgcccgcaccgcccagaccccaggcggtaccggcggcctgcgcgttgcggctgatttccttgccaaaaacaccgacgttaaacgggtatgggtaagcaatccaagctggccaaaccataaaagcgttttcggcgccgccgggctggaagtgcgcgaatatgcttattatgatgccgccaaccaccagcttgatttcgacggcttgctggccagcctgaacgaggcgcaagcgggtgatgtcgtactgttccacggctgctgccataacccaaccggcatcgatccgacgctggagcagtggcaacagctggcgcaaatgtctgctgaaaaaggctggctgccgctgtttgacttcgcctaccagggcttcgcccgcggtctggaagaagacgctgaaggcctgcgcgcgtttgccgcgctgcataaagagttgctggtcgccagttcttactcgaaaaacttcggcctgtataacgagcgcgttggcgcctgtacgctggttgccgccgatcaagacaccgtcgatcgcgcgttcagccagatgaaagcggtgatccgcgccaactactctaacccgccggcgcacggtgcctccgtggtggcgacgattctcagcaacgacgcgctgcgcgccatctgggaacaagagctcaccgatatgcgccagcgtattcagcgcatgcgcttactgtttgtgaataccctgcaggaaaaaggcgccagccgcgactttaccttcatcaccaaacagaatgggatgttctcatttagcggcctgaccaaagagcaagtacttcgtctgcgtgaagagttcgctatttatgcggtcgcatccgggcgtatcaacgttgccggcatgacgcctgataacatgtcgccgctgtgcgaagccattgtcgcggtgctgtaa

SEQ ID NO: 91392 - DNA, 648 bp, Enterobacter aerogenes
atgaactatcgtattattccggtcacggcgttcgcccagaactgttctttaatctggtgtgaacaaacccggcttgccgcgttggtcgatcctggcggcgatgccgagcgcatcaaggaagaagtggcggcggcaggcgtcagcctgatgcagatcctgttgacgcatggtcacctggatcacgtcggcgccgcagccgagctggcgcaacattacggtgtgccaattattggaccggaaaaagaagatgagttctggctggaaggattgccggcgcaaagccgtatgttcgggctggatgagtgtcagccgttgcagccggaccgctggctaaatgaaggcgatgtggtgaccgtcggcaatatcgctttgcaggtattgcactgtccaggtcatacgccggggcacgtggttttctttgacgatgcctctcgtctgctgatttccggcgatgtgattttcaaaggcggagtagggcgcagcgacttcccgcgcggcgaccacggccagctgattgatgcgattaaacgtaaactgttgcctttgggcgacgacgtgacgtttatccccggtcatggcccgttatcgacgctgggatatgagcgcctgcataatccgttcctgcaggatgaaatgccggtctggtaa

SEQ ID NO: 91393 - DNA, 639 bp, Enterobacter aerogenes
atgtgttgcggcggtcaatacgacccagccaaggacattttagcggaaaagtatattacgattcatttacctgtagacctgattatcatggacaaatttgacgctaatcgccgcagattgctggcgttgggtggcgctgccctcggtgctgccgccattctccctgcgccggcatttgccaccctctcgaccccccgaccgcgtattttgacgctgaataacctgcacaccggtgaatcactcaaggcggagtttttcgatggtagaggctatattcaggatgaattagcaagacttaaccactttttccgtgatttccgcgcgaacaaaattaagtctattgacccaggattgttcgatcagctttaccgcctgcagggactactcggcaccaacaagcctgtccagctcatctccggttatcgctccgtcgataccaacgatgaacttcgcgcacgaagccgtggtgtagcgaaacacagctatcacaccaaaggccaggcgatggatttccacattgaaggcgttgccttaagcaatattcgcaaagcggcgttatctatgcgctcaggtggtgtaggatactacccacgtagcaactttgtgcatattgataccggtccggtacggcactggtaa

SEQ ID NO: 91394 - DNA, 1797 bp, Enterobacter aerogenes
atgttgcttaagaaacggtatggtcgacaaatgtcggtgctcagcttgagcctggcttttgcatttgctccgctgtttaatgttcaggccgcagagcctgaagtcatacccacagatagctctgcgacggtgggcgatctttcgtcggcattggtacaaaacgatggtcagtccgctgcggtcgcgcaaatggccggcgagcagccgctggcggcggatgtggtggcgaaaagccgtgctgaaatcgaggccatgctgccgtcgggttatcatccggtttatatcaacccgctggtggcgctatacgctgcccgcgacatgaaacccatgtgggagaaccgcgaagcagtacaggccttccagcagcagctggcagaggtcgctatcgccggtttccagccgcagttcaccacctgggtgagcctgctgacggatccgtccgtcagcggcatggctcgcgatgtcgtgctttccgacgccatgatgggatatctgcattttattagcggtattccgatgcaggggaaccgttggctgtatggctcaacgccgtacaaaatggcgacgccgccgctgtcggtgattaaccagtggcagctggcgctggataacggttcgctaccgcagtttattgccggactggcgccacaacattcacaatatgaggcaatgcatcaggcgctgctgacgctggtggcggataaccgtccgtggccacaactgaccagcaatgcctcgcttcgtccgggagagtggagtaacgatatcggcgcgctgcgtgaaatcctgcagcgtaccggcatgctggatgattcggcgaaaatcgccttaccgggcgatgtggttagcccatcggcgaaaccgaaatcgaaagcaaaacccgccgcgcgcggcgtttacgatcgccaactggtagaaggcgttaagcgctttcaagcctggcaggggctgggcgctgatggcgtcatcggccagtccacccgcgactggctgaacgtctcttcggcgcagcgtgccggggtgctggcgctgaatatccagcgtctgcgtttgctaccgagcaaattgtccaccggcatcatggtcaatattccagcgttctcgctggtctactatcaggacggcagtcaggtgctggcatcgagggtcattgtcggtcgtccggatcgtaaaacaccgatgatgagcagcgcgttgaacaacgtggtggtcaacccgccgtggaacgtgccgccgacgctggcgcgcaaagatattctgccgaaggtgcgcaacaatccaggctatctggagcagcatggctatacgttgatgcgcggctggaacagcaaagaagctatcgatccgtatggtgtcgattggtctaccatcaccgagaagaatctaccgttccgtttccagcaggcgccgggcgcacgcaactcgctggggcggtataagttcaatatgccaagctcggatgctatttatctccacgatacgccgaaccacaatctgttccagaaagatgttcgcgcgttgagctcgggctgcgttcgcgtcaataaagcctctgaactggcgaatatgctattgcaggatgcgggctggaatgattcacgcatttccgacgcgctgaagcagggggatacgcgctacgtcaatattcggcaaaatattccggttaatttatattatttaaccgcctttgttggcgctgatggacgtacacaatatcgaacagatatttacaattacgatctcaccgcgcgatccagcgcacaaattctgccaaaagcggaacaattaatcaggtaa

SEQ ID NO: 91395 - DNA, 4449 bp, Enterobacter aerogenes
atgattgaacgcggtaagtttcgctcgctgacgctggttaactggaacggtttttttgcccggaccttcgatcttgatgagctggtaacgacgctctccgggggtaacggcgccggtaaatccacgaccatggcggctttcgtcacggcgctgatccccgatttaaccctgctgcacttccgtaacaccaccgaagcgggcgccaccagcggttcgcgtgataaaggcctgcacggtaaactgcgcgccggcgtctgttactcggtgcttgacgtgatcaactcgcgccaccagcgcgtggtggttggcgtgcgtctgcagcaggttgccgggcgcgaccgtaaagtcgatattaagccatttgccatccagggattgccaacctcgatccagccgacccaactgttgaccgaaacccttaacgagcgccaggcgcgcgtcgtgagcctcaacgagctgaaagagaagctcgacgcgatggaaggggtgcagttcaaacagtttaactcgattaccgaatatcactcgctgatgtttgatttgggcgtggtagcgcgtcgtctgcgttcagcatccgatcgtagcaaatactaccgcctgattgaggcctcgctgtacggcgggatctccagcaccattacccgctccctgcgcgattacctgctgccggaaaacagcggcgtacgtaaggcattccaggatatggaagcggcgctgcgtgaaaaccgtatgacgctggaagcgattcgcgttacccagtccgatcgcgatctgtttaagcaccttatcagtgaagccaccaactacgtggcggcggactacatgcgtcacgccaacgagcggcgcatccatctggataaagcgctggagtaccgtcgcgagctctttacctcgcgttcgcagctggcggcagagcagtacaaacatgtcgatatggcacgcgagctgcaggagcacaacggcgcagagggcgatctggaagccgactaccaggccgccagcgatcacctgaacctggtacaaaccgcgctgcgtcagcaggaaaaaatcgagcgctacgaggcggatctcgacgaactgcagatccgtctggaagagcaaaatgaagtggtggcggaagccgccgatcagcaggaagagaacgaagcccgcgccgaggccgccgaactggaagtggatgagctgaagagccagctcgccgattaccagcaggcgctcgacgtgcagcagactcgcgccattcagtacaatcaggcgctacaggcgctggaacgcgcgcgcacgctgtgtcacctgccggatctaaccgccgacagcgccgacgaatggctggaaacgttccaggcgaaagagctggaagcgacggaaaaaatgctgtcgctggaacagaaaatgagcgtggcgcaaaccgcgcacagccagtttgaacaagcgtatcagctggttgcggcgatcaacgggccgctggcgcgtaatgaagcctgggatgtggcgcgtgaattactacgcgacggcgtcaaccagcgtcatctggcggagcaggcgcatgggctgcgtagccgtctcaacgagctggaacagcgtctgcgtgaacaacaagacgccgagcgccagctggccgaattctgtaagcgccagggcaaacgctacgatattgacgatttggaaacgctgcatcaggagctggaagcgcgcatcgcctcattggccgacagcgtctctaacgctcaggaacagcgcatggctctgcgtcaggagcttgagcagctgcagtcgcgtacccagacgctgatgcgccgggcgccgatttggctggcggcgcaaaacagcctcaaccaactgtgcgagcagagcggcgagcagtttgaatcaagccaggacgtcaccgaatacctgcagcagttgctggagcgcgagcgcgaagccattgttgagcgcgatgaagtcggcgcccgcaagcgcgccattgacgaagaaattgagcgtctcagccaaccgggcggctctgaagacccgcgtctgaacgcgctggcggagcgctttggcggcgtgctgttgtcggaaatctatgacgacgttagcctcgacgatgcgccgtacttctccgcgctgtatggcccatcgcgccatgcgatcgtggttccggatctgtcacaggtggcggagcagctcgaagggctggaagattgcccggaagacctgtatctgatcgaaggcgatccgcagtccttcgatgacagcgtattcagcgtcgatgagctggaaaaagcggtggtggtgaagattgccgaccgccagtggcgctattcgcgttttccgacgctgccgctgtttggccgcgccgcccgtgaaaaccgcatcgaaacgctgcacgccgagcgtgaaagtctctccgagcgttttgctacgctgtcgtttgacgtgcagaaaacgcagcgcctgcatcaggccttcagccgcttcatcggtagccatctggcggttgcctttgatgacgacccggaagaagagatccgcaaactcaatagccgccgcggtgaactcgagcgtgcgctgaatgcgcatgaaagcgataaccaacagaatcgcgtccagtacgagcaggcgaaagagggcgtatcggcgctgaaccgcctgctgccgcgcctgaacctgctggccgatgagacgctggccgatcgcgtagatgaaatccaggagcgtctggacgaagcgcaggaagcggcgcgctttatccagcagcatggcaatcagctggcgaaactggaaccgatcgtctcggtactgcaaagcgacccggaacagtttgaacagctgaaagaagactatgcctattcgcagcaaatgcagcgcgatgcgcgtcagcaggctttcgcgttggcggaagtcgtgcagcgccgcgcccacttcagctactctgactcggcggagatgctcagcggcaacagcgatctcaacgagaagctgcgccagcgcctgcaacaagcagaatctgagcgcagtcgcgctcgcgaagcgatgcgtagccacgttgcgcagttgaaccagtacaaccaggtgctggcgtcgctgaaaagctcgtatgacaccaagaaagagctgctcaacgatctgtataaagagctgcaggatatcggcgtacgcgccgataccggcgcggaagagcgtgcgcgtgcgcgtcgtgatgaacttcatatgcagctgagcaacaaccgctcccgtcgtaatcagctggagaaagcgttgaccttctgcgaagcggagatggacaacctgacccgcaaactgcgcaagctggagcgcgattactgcgaaatgcgcgagcaggtggtgagcgctaaagcgggatggtgcgcggtgatgcgtctggtgaaagacaacggcgtggaacgtcgtctgcaccgccgcgagctggcctatctctccgccgacgaactgcgttcgatgtcggataaggcgctgggcgcgctgcgtctggcggtcgccgataacgaacacctgcgcgacgtcctgcgtatttcggaagatccgaaacgtccggagcgcaaaattcagttcttcgttgcggtttatcagcatctgcgcgagcgaatccgccaggatattattcgcactgacgatccggtagaagcgatcgagcagatggaaatcgagctcagccgtctgaccgaagagctgaccaatcgcgaacagaagctggcaattagctcccgcagcgtggcgaatatcattcgcaagaccatccagcgtgaacagaaccgtattcgcatgctcaaccaggggctgcagagcgtgtcgttcggccaggtcaacagcgtgcgtctgaacgtcaacgtgcgcgagacccactcgacgctgctggatgtcctgtctgaacagcatgagcaacatcaggatctgtttaacagcaatcgcctgaccttctcggaagcgctggccaaactgtatcagcgcctgaatccgcagattgacatggggcaacgtacgccgcaaaccatcggtgaggaactgctcgactaccgcaactatctggagatggaagtggaagttaaccgtggttccgacggctggctgcgcgcggagtccggcgcgctgtcgaccggtgaagcgatcggtaccgggatgtcgattctggtgatggtggtgcagagctgggaagatgaatcccgtcgcctgcgcggcaaggatatctcgccttgccgtctgctgttcctcgatgaagcagcacgtctggatgctcgctctatcgccacgctgttcgaactgtgcgaacgtctcgagatgcagctgattatcgcggctccggaaaatatcagcccggaaaaaggcaccacctataaactggtgcgtaaagtgttcaataatcacgaacatgtacacgttgtcggtctgcgcggttttgccgcgccggtgccggaagcgctgcctggaaccgctgacgcctcctga

SEQ ID NO: 91396 - DNA, 705 bp, Enterobacter aerogenes
atgtcattgacaaatattgaacaagtgatgccagctaagctggcgcaggcgttggccaatccgttatttccggcgctggacagcgccctgcgtgcgggccgccacattggcctggatgagctggataatcacgcatttttgatggattttcaggattacctggaagagttttacgcgcgctacaacgttgagctgattcgcgcgccggaggggttcttctacctgcgtccgcgctccacgacgttgatcccacgctcggtattatcagagctggatatgatggtcggcaaaattctgtgctacctctacctcagccccgaacgtctggctaatgaaggcatcttcactcagcaagagctctacgatgagctgctgacgctggcggacgaaagcaaattgctgaagctggtcaacaaccgttccaccggttccgacctcgaccgccagaagctgcaggaaaaaatgcgcgcgtccctcaaccgcctgcgccgcctcggcatggtgtggtttatgggccacgacagcagtaaattccgcatcaccgaatcggtattccgctttggcgctgacgtgcgcgttggcgacgatccacgcgaagcgcagctgcgcatgatccgcgacggcgaagcgatggcgctggagaatcacctgcagctcaatgatgagaatgaagagaatcagccggatagcggggaggaagaataa

SEQ ID NO: 91397 - DNA, 1323 bp, Enterobacter aerogenes
atgagtgaattttcccagacagtccccgaactggttgcctgggccaggaaaaatgatttttccatctcgctgccggtcgacagactctcttttctgctggctgtcgccacgctgaacggcgagcggctggaaggggaaatgaccgagggagaactggtggacgcgttccgccacgtcagtgatgcgtttgagcagaccagcgaaaccatcagccagcgcgccaataacgccatcaacgatatggtgcgccagcgtctgctgaaccgctttaccagcgaaataacggaagggaatgcgatctaccgcctgacgccgttaggtattggcattaccgactactatattcgccagcgtgaattctccaccctgcgtttgtcgatgcagctgtcgattgtggccggcgaactgaagcgggctgcagattctgcggatgagggcggcgatgaattccactggcatcgcaacgtctttgcgccgctgaaatattcggtggcggaaatcttcgatagtatcgatctgactcaacgcatcatggatgagcagcaacagcaggtgaaagacgatatcgcccagttgctgaacaaagactggcgcgcggcgatttccagctgcgaactgttgctgtccgaaacctccggcactctgcgcgaattgcaggatactctggatgcggcgggcgataagctacaggccaacctgctgcgtatccaggacgccaccatcgcgcgcgacgatctgcattttgtcgaccgtctggtgttcgatctgcaaagcaagctcgaccgtattgtcagctggggtcaacaggctatcgacctgtggatcggttacgatcgtcacgtacataaatttatccgtaccgccatcgatatggataaaaaccgcgtgttcgcccagcgtttgcgtcagtcggtacagacctacttcgacgctccgtgggcgctgacctatgccagcgccgaccgtttgctggatatgcgcgatgaagagatggcgctgcgcgatgaagaagtcaccggcgaactgccggcagaccttgaattcgaagagttcaacgaaattcgcgagcagctggccgcgctgattgaagcgcagctggcggtctacaaagagaagggtatgccgctggatctcggcctggtggcgcgagagtttctggcgcagtatccgcgcgcgcgtcactttgacgtcgcgcgaatcgttgttgaccaggcggtacagctgggcgtcgcccaggcagatttcaccggactgccggcaaaatggcagccgattaatgattacggagccaaggtacaggcgcatgtcattgacaaatattga

SEQ ID NO: 91398 - DNA, 798 bp, Enterobacter aerogenes
gtgcaggatcgcaattttgatgacatcgctgaaaagttttcgcgcaatatttatggcaccaccaagggccaactgcgccaggcgatcctttggcaggatctggaaccgctgctcgcgcagatggggccatggccgttgcgggtacttgatgccggcggcggcgaagggcaaacggcgatccgcgtcgcggaattaggccatcacgtgacgctatgcgatctttccgccgaaatggtggctcgtgctcagcaggccgcccgcgataaaggtgtgatcgacaacatgcattttgtacaatgcgcggcgcaggatattgctcagcatttggaaagccccgtcgatctgatactgtttcatgcggtgcttgagtgggtcgcggaaccgcaggaaatgatgcgcacgctgtggtcggtattgcgccctggcggcgcgctgtcgttaatgttctacaatgctaacggcctgctgatgcacaatatggtcgccggaaacttcgactacgtgcaaatcggcatgccgaaaaagaaaaaacgcacgctgtcgccggattatccgcgcgatccgcagcaggtatacggctggctggaagctctcggttggcagataaccggtaaaaccggcgtgcgggtgtttcatgattatctgcgtgagaaacgtaaacagcatgacagctttactgcgctgctggagctggaaacgcgctactgtcgccaggagccgtatatcagcctgggccgctatattcatgtcactgcgcttaagaaagatccaggcgcacagccgcagatgcaaggataa

SEQ ID NO: 91399 - DNA, 780 bp, Enterobacter aerogenes
atgcttttcactctgaaaaaggtattgggcggcatgatgctgccgcttcctctgctgttattgctgatggcgatcggcatcattctgctctggcgcagccgttttcaaaaaaccggcaaagcgctggttaccctgagctggctgttgctggcgctattaagcctgcagccggtagccgatgggttgttaaaacctatcgaaaaaagctacccgacctggcgtggcggccaatccgttgagtatgtcgtggtgctgggcggcggctatacctggaatccgcagtgggcgccgagctccaacctgatcaacaacagcctgccgcggctggcagaggggatccgcctgtggcgggaaaacccaggcgcgaaaatgatctttaccggggcggcggccaaaaccaacccggttagtaccgccgaggcgggggcgcgcgtcgccgaaagcctcggcgtaccgcgcagcgcgattatcgtccttgaccgaccaaaagataccgaacaggaggcggctgaagtaaaaaaagccatcggcggctcgccattcctgctggtgacatccgcgtcgcatctgccgcgagcgatgatatttttccgccatgccggactgaatccattaccggcgccagccaaccagttggcggtggaatcggcgcttaacccctgggaacgcgcgctgccgtcaccgtattggctgatgcacagcgaacgcgcgatttacgagaccctgggacgaagctggcagtggctgaagggagcgtcaggcgatccagggcaggattga

SEQ ID NO: 91400 - DNA, 897 bp, Enterobacter aerogenes
atgatggaacagttgcgagccgaactgagccacctgcttggcgagaagctaagccgcgtggagtgcgttagcgagaaaccctcgtcagcgctatggtcgctgtatgatgcgcagggaaacccgatgccgctgttggcgaaaagctttaccacgcccggcgtggcgcgccagctggcgtggaaaatttcgctgcttgcccgtagcggcaccgttcgtatgccggtggtatacggcgtcatgacgcatgaagaacatccggggcctgacgtattgctcattgaacggttacgcggcgtttcagttgaagcgccagcgcgcacgcccgagcgttgggagcagctgcaggatcagattgtcgaggggttactggcgtggcatcggcatgatagcggcggctgtgtggggatggtcgatagcacccaggaaaacctctggccgcactggtatcgccagcgggtagaaatgttgtggagcacgctcaacctctatcatgacaccgggctaacgatgcaggataagcgtattttattccgcagtcgtgagagcctgccgcagttgtttagcgatttcaacgataactgcgtactggtccatggctgctttacgctacgtagtatgctcaaagacgcgcgcagcgatcagctgttggcgatggtcggtccggggatgatgctgtgggcgccgcgcgagtacgaactgttccgcctcgccgacggcggattaggggagcagttactatggcgctacctgcagcgggcgccggtagcggagtccttcgtctggcggcgttggctgtatcagttatgggatgaagtcgaaaatctggtgaataccgggcgcttcgatcgcgcccgtttctcgcttgccgcgaaatcaatcctgccctggatcgcctga

SEQ ID NO: 91401 - DNA, 747 bp, Enterobacter aerogenes
atgagttttgtcgtcattattcccgcgcgatttgcctccacgcgcctgccggggaaacctctgcaggatatcaacggtaagccgatgatcgtccatgtactggaacgcgcccgcgaatccggcgcggatcgcattatcgtcgccaccgatcatgaagatgtcgcgcgtgcggttgaagccgcgggcggcgaggtttgcatgacccgcgccgatcatcagtccggcaccgaacgtctggcggaagtcgttgaaaaatgtgctttcagcgatgacactatcatcgttaatattcagggtgatgaaccgatgatcccgtcggcgatcgtgcgccaggtggcggaaaaccttgcggccagcaccagcgggatggcaacgctggcggtgcctatccacgatgccgaagaagcatttaacccgaatgcggtcaaagtggtcatggatgccgacggctatgcgctctatttttctcgagcgactattccctgggatcgcgatcgttttgcaaaatcgcgcgaagaaattggtgattccctgctgcgccatattggtatttacgcttatcgcgccggttttattcgccgctacgtcagctgggcgccaagcccactggagcaaattgagatgctcgaacagctgcgcgtactatggtacggcgaaaaaatccacgtcgcggtggcggaagtggttcctggcaccggcgttgatacgccggaagatctggagcgcgtccgcgccgagctgcgttaa

SEQ ID NO: 91402 - DNA, 183 bp, Enterobacter aerogenes
atggatcaccgtttactcgaaattatcgcctgcccggtttgtaacggtaagctgtactacagccaggataagcaagagcttatctgcaaagccgacagcctggccttcccgctgcgcgacgggatcccggtactacttgaaaacgaagcgcgctcgctcgcggtagaagagagccagccatga

SEQ ID NO: 91403 - DNA, 1230 bp, Enterobacter aerogenes
atgtcggtattgcaactatcgctaaaagaggctcgccatcttcatcttgcggcgcaggggttactgaaaaagccccgacgtcgcgctcgccagactgacatcctttccaccatccagcagatgtcgctgctgcaaatcgatacgatcaacgtggtcgcccgtagcccttatctggtgctgtttagccgccttggtagctatccgcagcactggctggatgattccttgcgtagcggcgaactgatggaatactgggcgcatgaagcctgttttttgccacgcagcgatttcgccctcgtgcgccaccggatgttgaatcccgacaagatgggctggaaataccataaagagtggatgctcgagcatgccgcgagcatagaagagttgctggcgcatatcgcgcaaaatggcccggttcgctcggcggatttttcccatccacgtaaaggcgccagcggctggtgggagtggaaaccacataaacgtcatctggaagggttgttcaccgccggcaaactgatggtcgttgagcggcgtaattttcatcgcgtctatgatttaacccatcgggcgatgccgcactgggatgatgggcgcgatgcgctctcccgtcaggaggccgagtccattatgctacgtaacagcgcgcgcagcctgggcgtttttcgtccacagtggctggccgattattatcgtctacgccagcctgcattaccggcgctgctgaagggctggcaggatgaggggctggtggtgccggtgatggttgaggaactgggtgagatgtggctgcaccgcgatctgcaagctgtgctggaatcggcatccggcggtaagttaaccgccagccacagcgccgtgctctcgccgtttgatccggtagtctgggaccgtaaacgcgccgagcagttattcaacttcagctatcggctggaatgttataccccagcgccgaaacggcaatacggctactttgtactaccgttgctgcatcagggcaaactggttggcaggatggacagcaagttgcaccgtaagggcggcgtgctggagatcttttcgctgtggctggaagagggggttaaagtgactgccgggctggagagcggactccagcgagcaattaatgattttgcgcgctggcaaggggcagaagaggttgtgctgcgccagttacccgcggcgctatttgctaaccagcggcaaggttggggtgttgatgccgcgtga

SEQ ID NO: 91404 - DNA, 981 bp, Enterobacter aerogenes
atgatagcgcgcatctggtccggcgaatcgccgctatggcggctactgctgccgctctcctggctgtatggcctggtgagcgctttcattcgtcttagctataagctggggtggaaaaaagcctggcgcgcgccggtgccagtcgtcgtggtcggtaatctgaccgccggcggcaacggtaaaacgccggtggtggtatggctggtggagcaactgcagcagcgaggcattcgcgtcggcgtggtgtctcgcggctacggcggcaaagccgacagctacccgttggttctggatgacgcgaccagtacggcgcaggcgggcgatgaaccggtgttgattcatcagcgtaccggtgcgccggtggcggtttctccgctgcgaagtgaggcggtaaaagcgttattagccgctcacgatttacaaattatcgtcaccgatgacggtctgcagcactataagctggcgcgggatgtagaaattgtcgtgattgacggtgtacgccgctttggcaacggctggtggctgccggccgggccgatgcgcgagcgcgcatcccgtttgcaaagcgtcgatgccgttatcgtcaacggcggggtcgcccgcccgggtgaaattccgatgcagttgcgtcccgccatggcggtgaacctgcttaccggcgagcgtcgcgatgttgcgaccctcgataacgtagtagcgatggccggcattggccatccgccgcgctttttcgcgacgctagaaaactgcggcgtgcggccggtgaaaaccgtggcgctggcggatcatcaggcgctgagtcaaagcgctgtcgccgcattggtaaccccgtcgcagacgttgttgatgaccgagaaagacgcggtaaaatgccgtgaattcgccgccgctaactggtggtatctgccggttgacgccataatgaccgatgatcgcgcacagcggttgctcgcggacttagtgacgctggcgcaacgttaa

SEQ ID NO: 91405 - DNA, 1749 bp, Enterobacter aerogenes
atgcagaacgataaagatctctccacgtggcagaccttccgccgactttggccgatgatagcgccgtttaaagccgggctaatcgtagcggccgtggcgttggtgcttaacgcggcaagtgataccttcatgttatcgcttcttaaaccgttattggatgatggttttggtaaaacggatcgctcagtgctgttatggatgccgctggtggtgatcggtttgatggtgcttcgcggtatcagtagctatatctcgagctactgtatctcctgggtttccggcaaagtggtaatgacgatgcgtcgccgcctgttcggtcatatgatgggcatgcccgtcgccttcttcgacaagcagtccaccgggacgttgctgtcccgtatcacctacgactccgaacaagttgcttcatcttcctccagcgcgttgataaccgtagtgcgtgaaggggcctcaattattggcctgttcgccatgatgttctattacagctggcaactgtcgctcattcttatcgtgctggcgcctatcgtctcagtggcgattcgggtggtttcgaagcgttttcgtaatatcagtaagaatatgcagaacaccatggggcaggtgaccaccagcgcggaacagatgctcaaagggcataaagaagtgctgatgttcggcggccaggccgttgaaaccaagcgttttgacaaggtcagtaataagatgcgcctgcaggggatgaaaatggtctccgcgtcctctatctccgacccggtcattcagctgattgcctctctggctctggcctttgtgctttatgcggcgagcttcccaagcgtcatggaaaccctgaccgccggtaccatcaccgtggtcttttcgtcgatgatcgcgctaatgcgtccgctgaaatccctgactaacgtcaacgcgcagttccagcgtgggatggcggcatgtcagacgctgttctccattctggattccgagcaggagaaagatgaaggcacgcgcgtgattgagcgcgccaaaggtaacctggagttccacaacgtcacctttagctatcctggtcgcgaagttgccgcgttgcgtaacattaatctgagcattccggagggaaaaaccgttgcgctggtagggcgttccggctcaggtaaatccaccatcgccagcctgattacccgtttttacgatgttgacgaggggcaaattctgctggatggccacgatctgcgcgagtacaaactgagctcgttgcgtgaccaggtggcgctggtttcgcagaacgtgcacctgttcaatgacaccgtcgccaataacatcgcctatgcgcgtaccgaagagtatacccgcgagcaaattgaagaagcggcgcgtatggcctatgcaatggactttatcaacaagatggataatggcctggacacgattatcggcgagaatggcgtgatgctctccggcggtcaacgtcagcgtatcgctattgcgcgcgcgctgctgcgcaacagccctatcctgatccttgatgaagccacctcggcgctggataccgagtcggaacgtgcgattcaggcggcgctggatgaactgcagaaaaaccgtacctcgctggttatcgcccaccgtctgtcgactatcgaacaggctgacgaaattgtggtagtggaagatggtcgtatcgttgaacgcggcagccatctggatctgctggaacataaaggcgtttacgcgcagctacacaagatgcaattcggtcaatga

SEQ ID NO: 91406 - DNA, 2256 bp, Enterobacter aerogenes
atgcgattaccacatctggcaggctgcgccataatcggaatttcgccgctgctttggctaccggcgctaccgaatatgctaagcgtctggtgcttgattggcgctgcgctaatcattgcaacgctgcgcaaaccttgcacaacgtatgccgcattgacgttgctatttttcgtatggggaatattacatgcccggcaagcgctgtggcccactgaacatattcccggtcgcaaccgacaggccgttattgaactggtcgcaggtgatggcctgacgagctggcaaggcaagataattcgtcttgagggtcggcgtttatatcctgcggttgggattaccctctacggcagcgaactacctgaacccggttgcgccgggcagcgatggctgatgaccatccgcgctcgtccggtacatggacagttaaatgagggcggcttcgatagccagcgctacgctcttgcacagcatcgcccgcttagcggacgttttctaaatgcctcatcgcttgattcacgttgtagcttccgggctcgctatctggcctcgttaaaccgcacactcgctgagtatccatggaaaacggtgttgctggggctgggaatgggggagcgcctggcagttgcggatgagataaaaagattaatgcaggagacgggaacctcccatttaatggctatctctggcctgcatattgtgctgggggcgtcgcttggctggttgctggttcgcggagtacagttctttcttccgtgccgctggataggctggcggataccgctgcttgtcgggttaggctgcgcgctgttttacgcctggcttaccggcatgcaacccccggcgctgcgtacctgtgcggccttaagcgcaggatgtctgttgaggctacaggccaggcgttggtcgccgtggcaaatcttttgctgttgtattgcggcaatactgttggctgatccgctggcgatgatttcagaaagcctgtggttatcggtgtttgcggttgctgcgttgattttctggtatcagcttgcgccgcttcgccggctccgctgtcgttcaccgtggcggcaactgttggcgctgggccacctgcaatgcggcctgatgctactgctggcgccactgcagatagggctttttcatgggattagcctgacttcattgatagcaaacctggttgccgttccgctggtgacatttctgatagtcccgctgattttagcggcgatgctactgcatctaagcggcccggtgttgcttgaaatggcgttatggcaactcgccgatcgtctgctggcaatattattctggttcttacgccatttgcctgccggatggttatcgcttgacgaacggtggttggcgatcagtgtactaccgtggctggcgctcctggcatggcgttttcaggcctggcgtcagatgccgttactctgtatgagcggcgtggcgctactcagttggcccttctggcgcaccgcgacgccaggcgagtggagagtgacgatgttggatgtcggacaagggttagcgatagtcattgagcgtcaaggggcggcaatgctgtacgataccggccccgcctggccgggaggcgatagcggccagcgactcatcgtgccctggttgcgctggcgcggtctccatccggaaggggtcatcctgagccacgaacatcttgatcatcgcggtggtctgaatgcgctcattaaggcgtggccgcatctcgtgattcgcagtccgcttaagctgcgtggacatctaccctgccacagaggagaaacctggcgctggcgagggcttcgatttcaggcgctttggccgttgcctgcgggtgagcataaaggaaacaatggttcctgtgtggttagggtcgatgacggcaagcgcagcgttttacttaccggtgatatcgaaattccggccgaacagaaaatgatgagtcattactggcagcatcttacgtctacacttattcaggttccgcaccacggtagtaatacatcatccagtctgacattactgcagcgggtaggaggagaggcggccatcgcatcggcagcgcggtacaatgcctggaagatgccttccagtaaggtcgtgcagcgttatcgccaacaggggtatctgtggtttgatactccgcactcagggcaaattacgcttattttttctccagatggttggcaaatccagagcttacgggatcaacttttacctcgttggtatcatcagtggtttggcgcagaggcgtag

SEQ ID NO: 91407 - DNA, 288 bp, Enterobacter aerogenes
atgaccaagtcagaattgatagaaagacttgccagccagcaatctcatatcccggcgaaagcggtggaagatgctgttaaagaaatgctggaacatatggcctcaacgcttgctcaaggtgagcgcattgaaatccgcggtttcggcagcttctctctgcactatcgagcacctcgcaccgggcgtaacccgaagactggcgataaagtggaactggaaggtaaatacgttccgcactttaagcctgggaaagaactacgcgaccgcgccaatatttacgaagagtaa

SEQ ID NO: 91408 - DNA, 1674 bp, Enterobacter aerogenes
atgactgaatcttttgctcaactatttgaagaatccttaaaagaaatcgaaacccgcccgggttccatcgttcgtggtgttgttgttgctatcgacaaagatatcgtactggttgacgctggtctgaaatctgagtccgccatcccggctgagcagttcaaaaacgcccagggcgagctggaaatccaggttggtgacgaagttgacgttgctctggatgcagtagaagacggcttcggtgaaaccctgctgtcccgtgagaaagctaaacgtcacgaagcttggatcacgctggaaaaagcttacgaagacgctgaaactgtagtcggtgttatcaacggcaaagttaaaggtggcttcactgttgagctgaatggtattcgtgcgttcctgccgggctccctggtagacgttcgtccggtgcgcgacacgctgcacctggaaggcaaagagcttgaattcaaagtcatcaagctggaccagaaacgtaacaacgtcgttgtttctcgtcgtgccgttatcgaatccgaaaacagcgcagagcgcgatcagctgctggaaaacctgcaggaaggcatggaagtcaaaggtatcgttaagaaccttactgactacggtgcattcgttgatctgggcggcgttgacggcctgctgcacatcaccgatatggcctggaaacgcgttaagcatccgagcgaaatcgtaaacgttggcgacgaaatcactgttaaagtgctgaagttcgaccgcgagcgtacccgtgtatctctgggcctgaaacagctgggcgaagatccgtgggtagctatcgctaagcgttatccggaaggtaccaaactgaccggtcgcgtgaccaacctgaccgactacggctgcttcgttgaaatcgaagaaggcgttgaaggcctggttcacgtttccgaaatggattggaccaacaaaaacatccacccgtccaaagttgttaacgttggcgatgtagtggaagttatggttctggatatcgacgaagaacgtcgtcgtatctccctgggtctgaagcagtgcaaatctaacccatggcagcagttcgcggaaacccacaacaagggcgaccgtgttgaaggtaaaatcaagtctatcactgacttcggtatcttcatcggcctggacggcggcatcgacggcctggttcacctgtctgacatctcctggaacgttgcaggcgaagaagcagttcgtgaatacaaaaaaggcgacgaaatcgctgcagttgtactgcaggttgacgcagaacgtgagcgtatctccctgggcgttaaacagctggcggaagatccgttcaacaactacgttgctctgaacaagaaaggcgctatcgtaaccggtaaagtaactgcagttgacgctaaaggcgcaaccgtagaactggctgacggcgttgaaggttacctgcgtgcttctgaagcatcccgtgaccgcgttgaagatgcaactctggttctgagcgttggcgacgaagttgaagctaaattcaccggcgttgatcgtaaaaaccgcgcaatcagcctgtctgttcgtgcgaaagacgaagctgacgagaaagatgcaatcgcaactgttaacaaacaggaagatgcaaacttctctaacaacgcaatggctgaagctttcaaagcagctaaaggcgagtaa

SEQ ID NO: 91409 - DNA, 684 bp, Enterobacter aerogenes
atgacggtaaatgttccggtaatcaccattgatggacctggcggtgcgggtaagggcacgttgtgcaaggcaatggcggaagcgcttggctggcatctgctggattccggggctatctaccgcgttcttgcgctggcagccttacatcatcacgtagacgtcgagtcagaagaggcgctggttccgctggcagctcatctcgatgtgcgttttatttctactgacggcaacctggaagtggtgctggaaggcgaggatgtcagcgcagagatccgtacccaggaagtggccaataccgcctctaaggttgcggctttcccacgtgtacgtgaagcgctgctgcgccgtcaacgcgccttccgcgaactgcctggcctgattgccgacggccgcgatatgggcaccgtcgtgttcccggatgcgccggttaaaattttcctcgatgcgtcggcggaagaacgtgcccagcgccgcctgctacagttgcaggagaagggttttagtgttaactttgaacgtcttttgtccgagataaaagagcgtgacgatcgcgatcgtaatcgtgctgtggcgccgcttgtcccggccgctgatgcattagttctcgattccactgaactaagcattgagcaagtaattgaaaaagcgctacaatatgcgcgcgaaaaactggctatcgcttaa

SEQ ID NO: 91410 - DNA, 1284 bp, Enterobacter aerogenes
atggaatccctgacgttacaacccattgcgcgcgttgatggcaccgtaaacctacccgggtcaaaaagtgtctctaaccgcgctttgctgctggcggcattagcccacggcaccaccgtgctgaccaatttgctggacagcgatgatgttcgccacatgcttaatgcgcttaacgccctgggagttcactataccctgtccgccgatcgtactcgctgtgaagtcaccggcaacggcggtccgcttcaggccagcggcgcgctggagttgtttctcggtaatgctggtacggcgatgcgcccactggcggcggcgttgtgcctcggcgacaacgatattgtgctgaccggcgaaccgcgaatgaaagagcgaccgataggccacctggtcgatgcgttacgccaggggggcgcgcaaattgagtatctggagcaggaaaactatccgcctctgcgcctgcgcggcggtttcaacggcggccaggtggaagtcgatggcagcgtctccagccagttccttaccgctttactgatgactgcgccgctggcgccgcaggacacgacgatcgcgattaaaggtgacctggtgtccaaaccttacatcgacatcacgctgcacctgatgaaaacctttggcgttgacgttgaaaaccacaactaccagcgctttgtcgtacgcggcaagcaacagtatcagtcgccgggcgactatctggtggaaggtgatgcctcttcagcctcgtatttccttgctgccggcgcgattaaaggcggtacggtaaaagtgaccgggattggccgcaatagcgttcagggcgacattcgctttgccgatgtgctggaaaaaatgggcgcgacaattacctggggcgacgatttcatcgcctgtacccgcggtgagctgaatgctgtcgatatggatatgaaccatatcccggatgctgcaatgaccatcgccactgcggcgctgttcgcgaaaggcaccacggtgctgcgcaatatttacaactggcgggtgaaagagactgaccgcctgttcgcgatggccactgaactgcgtaaagtgggcgccgaagtagaagagggcgaagattatattcgtattacgccgcctgagacgctgaaatttgctgaaatcggtacctacaacgatcaccgcatggcgatgtgcttctcgctggtggccttatcggcgacgccggtcactatccttgatccgaaatgtacggcgaaaacgttcccggattatttcgagcagttggcgcgaattagtaccctcgcgtaa

SEQ ID NO: 91411 - DNA, 1089 bp, Enterobacter aerogenes
atggctcaggtctataactttagttcgggcccggcaatgctgccggcagaagttctcaaactggcgcaacaggaactgtgcgactggcacggtctggggacgtcggtaatggaaatcagccaccgtggtaaagagtttatccaggtggctgaaacggcagaacaggatttccgcgatctgcttaatatcccttccaactataaagtgctgttctgtcatggcggcggtcgcggccagtttgccgggatcccgttaaatctgctgggtgacaaaacaacagcagattatgtggatgctggctactgggcggcgagcgcagtgaaagaagcgcaaaaatactgcacgccaaacgttattgatgcgaaaaccaccgttgacggcctgcgagccgttaaaccgatgagcgaatggcagttgacgccgggcgcggcttacctgcactactgccccaatgaaaccatcgacggtatcgctatccacgaaacgccaaactttggcgatgatgtggtcgtcaccgcggattactcctccagtattctatcgcatgagcttgacgtcagccgctatggcgtgatttacgctggcgcgcagaagaatatcggcccggcagggttaacgctggttatcgtgcgtgaagatctgctgggtaaagccagcgtcgcctgcccatcgatccttgattacaccgtgctgaacgccaatgattcaatgttcaacacgccgccgaccttcgcctggtatctggcggggctggtatttaaatggctgaaagagcagggcggcgtcgctgcgatggataaaatcaaccagcagaaggctgaattgctgtatggcgtgattgataatagcgatttctatcgtaacgatgttgccgcggccaaccgctcgcggatgaatgtgccgttccaactggcggatagcgcgctggacaaactgttccttgaagaatcttttgcggctggtctgcatgcgctgaagggccaccgcgtggtgggcggtatgcgtgcttctatatacaatgcgatgccgctggccggcgtcaaggcgcttaccgacttcatgcaggactttgaacgtcgtcgcggctaa

SEQ ID NO: 91412 - DNA, 228 bp, Enterobacter aerogenes
atgcgtgaattaacctataacgaaatgtctgatgtgagcggcggctttggcctgttatccattccggcagcaattggtttgctggtcagtatcccgacaattgtcatcggcgcgattaccgggccctttacgctgggggcaggcttcgcagtgatggcggcaggcatcgtcggtaccagtcttgctggcgccgctatgatcgttagcatttgtacgccaatcctgtaa

SEQ ID NO: 91413 - DNA, 1761 bp, Enterobacter aerogenes
atgacccagacatttatccccggcaaagatgccgccctggaagattccatcgctcgcttccagcagaaactgctcgacctcggatttgatatcgaagaggcctcgtggctgaacccggtaccacacgtgtggtccgttcacattcgcgataaagagtgcgcgctgtgctttaccaatggtaaaggcgcgacgaaaaaggcggcgctggcttccgcgctgggcgaatatttcgaacgtctgtccaccaactacttcttcgcggacttctggttaggcgaaaccatcgccaacggtccatttgttcattatccgaacgaaaagtggttcccgttgaccgaagatgatgaagtaccggaaggcctgctggatgcccgcctgcgcgccttttacgatccggacgatcagctgaccgccagcatgctcgtggatttgcaatccggtaatgacgagcgcggcgtttgcggcctgccgtttacccgtcaatccgacggcgaaactgtttatattccgatgaatatcgtcggcaacttgtacgtttctaacggcatgtcagcgggtaataccccgaatgaagcgcgcgtacagggcttgtctgaagtctttgagcgtcacattaaaaaccgcatcatagcagaaagcatcagcctgccggagatcccggctgaggtaatggcgcgctatccgggcgtcgttgaatctatcgctaaacttgaagctgaaggtttcccgatcttcgcttacgatggctcattgggcggcaaatacccggttatttgcgtggttctgtttaacccggctaacggcacttgcttcgcctctttcggcgcccatccggatttcggcgtggcgctggagcgtaccgtcaccgaactgctacagggccgcagcctgaaagacctcgacgtctttaccccgccgacctttgatgacgaagaagtcgccgagcacgccaacctggaaactcacttcattgattccagcggcctgatctcctgggatatgttcaaacaggatgccgactatccgtttgtagactggaatttctccggcacgactgaagaagagttcgccaccctgatggctatcttcaaagcagaagataaagaagtctatatcgccgactacgaacatctgagcgtctatgcctgccgaatcatcgttccagggatgtccgatatttatccggcggaagacctgtggcttgcaaacaacagcatgggcgcgcatctgcgcgacactattctctccctgccgggtagcgagtgggaaaaagaagattatctggcgcttattgagcaaatggacgacgaaggtcttgatgacttcacgcgcgtacgcgagctgttaggactggcaaccggcaaagacaacggctggtataccctgcgcatcggcgagctaaaagcgatgctggcgttggccggcggcgacctggatcaggcgtttatttggacggagtggaccatggaattcaatgcctccatcttcagccctgagcgcgccaactattatcgttgcctgcaaacgttgctgctgcttagccaggaagaagaacgccagccgctacagtatctgaatgccttcatccgtatgtatggcgcggatgcagtagaagccgcgagcgccgctctgagcggcgaagcgccgttctatggcctgcaggcggtcgatagcgatctgcacgctttcccggcgcatcaatctttactgaaggcctacgaaaagctacaacgtgcaaaagcggccttctgggccaaataa

SEQ ID NO: 91414 - DNA, 858 bp, Enterobacter aerogenes
gtgaaagctgacaacccttttgatcttttactccctgccgcgatggcgaaagtcgccgaagaagcaggtgtctataaagcgacgaaacatccgctgaagacgttttatctggcgattaccgccggtgtcttcatctccatcgcttttgtgttttatatcacggcgaccaccggtaccgccgcaatgccattcgggattgccaaacttatcggcggggtatgcttctcactaggtctgattctttgcgttatctgcggtgctgacctcttcacctctaccgtactgatcgtcgtggcgaaagccagcgggcgtattacctggggtcagctggcaaaaaactggcttaacgtctatgttggaaacctcatcggcgcactgctattcgtattattaatgtggttatccggcgagtatatgacggccaacggcggctggggcttaaatgttctgcaaactgcagaccacaaaatgcaccatacgtttattgaagccgtctgcctgggtatcctggcgaacctgatggtttgtctggctgtctggatgagttactccggccgcagcctgatggacaaagcgatgatcatggtgttgccggttgcgatgtttgtcgccagcggctttgaacacagcatcgctaatatgtttatgatcccgatgggtatcgtaattcgcaactttgcaagcccggaattctggaccgctatcggttcaactccggagagtttttctcacttaaccgttatgaacttcatcactgataacctgattccagtcactatcggaaacatcatcggcggtggtttgttggttgggttgacatactgggtcatttacctgcgtggcgacgatcatcattaa

SEQ ID NO: 91415 - DNA, 2283 bp, Enterobacter aerogenes
atgtccgagcttaatgaaaagttagccacagcctgggaaggttttgcgaaaggtgactggcagaacgaagtcaacgtacgtgactttatccagaaaaactacaccccatatgaaggtgacgaatccttcctggctggcgcaactgatgcgaccaccaagctgtgggacagcgtaatggaaggcgttaaacaggaaaaccgcactcacgcgcctgttgatttcgacacttccctcgcatccaccatcacttctcacgacgcgggctacatcgagaaagcgctcgagaaaatcgttggtctgcaaaccgaagctccgctgaaacgtgcgattatcccgttcggcggtatcaaaatggttgaaggttcctgcaaagcgtacaatcgcgaactggacccgatgctgaaaaaaatcttcaccgagtaccgtaaaactcacaaccagggcgttttcgacgtatataccccggacatcctgcgctgccgtaaatccggcgtgctgaccggtctgccggatgcttacggccgtggtcgtatcatcggtgactatcgtcgcgttgcgctgtacggtatcgacttcctgatgaaggacaaattcgcccagttcaactcgctgcaggcgaaactggaaagcggcgaagatctggaagcaaccatccgtctgcgtgaagaaattgctgaacagcatcgcgcgctgggtcagatcaaagagatggcggctaaatatggctacgacatctccggtccggcgactaccgctcaggaagctattcagtggacctacttcggttacctggccgccgttaaatctcagaacggcgcggcaatgtccttcggtcgtacttccagcttcctggatatctacatcgaacgtgacctgcaggcgggtaaaatcaccgagcaagacgcgcaggaaatggttgaccacctggtcatgaaactgcgtatggttcgcttcctgcgtaccccggaatatgatgaactgttctccggcgacccgatttgggcaacggaatctatcggtggtatgggcgttgacggccgtactctggtaaccaaaaacagcttccgcttcctgaacaccctgtacaccatggggccgtctccggagccgaacatcactatcctgtggtctgaaaaactgccgctgagctttaagaaattcgccgctaaagtatccatcgatacctcttctctgcagtacgagaacgatgacctgatgcgcccggacttcaacaacgacgattacgctatcgcatgctgcgtaagcccgatgattgttggtaaacaaatgcagttcttcggcgctcgcgctaacctcgcgaaaaccatgctgtatgctatcaacggcggcgttgatgaaaaactgaaaatgcaggttggtccgaaatctgaaccgatcaaaggcgacgtcctgaacttcgacgaagttatggagcgcatggatcacttcatggactggctggctaaacagtacgtcaccgcgctgaacatcattcattacatgcacgacaagtacagctacgaagcctctctgatggcgctgcacgaccgtgacgttatccgcaccatggcgtgtggtatcgcaggtctgtccgttgctgctgactccctgtctgctatcaaatatgcgaaagttaaaccgattcgtgacgaagacggtctggctgttgacttcgaaatcgaaggcgaatacccgcagtttggtaacaacgatgctcgcgtcgatgacatggccgttgacctggttgaacgtttcatgaagaaaattcagaaactgcacacctaccgcaacgctatcccgactcagtccgttctgaccatcacctctaacgttgtgtatggtaagaaaaccggtaacaccccagatggtcgtcgcgctggcgcgccgttcggaccaggtgctaacccgatgcacggccgtgaccagaaaggcgctgtagcctctctgacttccgttgctaaactgccgtttgcttacgctaaagatggtatctcttacaccttctctatcgtgccgaacgcgctgggtaaagatgacgaagttcgtaagaccaacctggcgggcctgatggatggttacttccaccacgaagcgtccatcgaaggtggtcagcacctgaacgtgaacgtcatgaaccgcgaaatgctgctcgacgcgatggaaaacccggaaaaatatccgcagctgaccattcgtgtatctggctacgcagtacgttttaactccctgactaaagaacagcagcaggatgttattacccgtaccttcactcagaccatgtaa

SEQ ID NO: 91416 - DNA, 741 bp, Enterobacter aerogenes
atgtcaactattggtcgtattcactcctttgaatcctgtggcaccgtcgatggcccaggcatccgctttattaccttcttccagggctgcctgatgcgctgcctttactgccataaccgcgacacctgggatacccatggcggtaaagaaatcaccgttgaagaattgatgaaagaagtggtgacctatcgccactttatgaatgcctcgggcggcggcgtcaccgcctccggcggcgaggcaatcctgcaggctgaatttgtccgcgactggttccgcgcctgtaaaaaagaaggtatccacacctgtctggataccaacggtttcgtacgccgttacgatccggtgattgacgagctgctggaagtcaccgatctggtgatgcttgacctcaagcagatgaacgatgaaattcaccagaacctggtcggcgtttctaaccaccgtacgctggaattcgcccagtatttgtcgaagaaagggattaacgtgtggatccgctacgtggtggttcccggctggtctgatgatgacgattccgcgcatcgtctgggtgagtttacccgcgatatgggtaacgtcgagaaaatcgaactcctgccctaccatgagctgggtaaacacaaatgggtggcaatgggcgaagagtacaaacttgacggcgtacacccaccgaagaaagagaccatggagcgggtaaaaggcatcctggagcaatatggccataaggtgatgtactaa

SEQ ID NO: 91417 - DNA, 1149 bp, Enterobacter aerogenes
atgaccatctacactcgcccagtgcaaatgttgctctgtggcctgcttctgttgacgctggcaatcgcggttttaaatacgcttgtcccgctgtggctcgcccatgaaaatatgccaacctggcaggttgggatggtcggctcttcttatttcaccggtaatctggtgggaacactatttgccggctgggtcattaaacgtctggggtttaaccgtagctattatctggcgtcattaatttttgctgtcggcggcgttggtctgggtattacactcggcttctggacatggctgagctggcgttttatcgccggcgtgggctgtgcaatgatttgggtggtggtcgaaagcgcactggtgtgcagcggtacttcccgcagccgcggtcgactgctggcggcgtacatgatggtctattacatcggtactgtattgggccaactgatggtcagcaaattaccgaccgatttaatgagcgtgctgccgtgggttaccggcctggcgctggcggcgatcctgccgctgatgtttacacgtattatgagccaggccgacgagccgcatgaaacggtacgtatctggccgatgctgaaactgcgtcaggcacgtcacggtgtgaatggctgcatcatctccggcatcgtgcttggttcactgtacggcctgatgccgctgtggctaaatcatcaaggcgtcagcgattcgggtattggtttctggatggcggtgatggttagcgcaggtattctcgggcagtggccggtcgggcgtctggctgaccgctatggccgcctgctggtgctgcgcgtgcaggtctttgtggtgattctgggctgtctggcgatgctgagccaggcggcaatggcgccagcgctttttgtgctcggcgcatccggttttactctgtatccggtggcgatggcctgggcctgcgagaaggttgaacaccatcaactggtggcgatgaaccaggcgctgctgatgagctataccatcggcagtctgctggggccgaccctgacggcgatgttgatgcagaacttctcggataatctgctgtttatcatgatcgccagcgtatcgtttatctatctgctgaccctgctgcgcaaagccgggcatcatccgacgccggtggcacacgcgtaa

SEQ ID NO: 91418 - DNA, 864 bp, Enterobacter aerogenes
atgggaaatggatggcatgaatggccgctgatgattttcacggtcttcggtcaatgcgtcgccgggggctttatcgttctcgcgctggcgttgatgaagggcgaactttcgcgcgagcagcagcggcgggtgataatgagcatgtttgggctatgggtgttaatggggatcggttttatcgcctccaccatgcaccttggttcaccaatgcgcgcgtttaattcgctgaaccgcgttggcgcatcctcgttaagcaatgaaatagccagcggcgcgcttttcttcgccgtcggcgggattggctggctgctggcggtggtaaataaattaccgtccgggctgcgtaatctgtggctggtcgtcaccatgatcctcggcgtcatctttgtctggatgatgatccgcgtatataacaccatcgataccgtacccacctggtataccatctggacaccgctcaacttcttcctgaccctgtttatcggcgggccgctgttgggttacctgctgctgcgtgtcgcgggtgtggacggttgggcgatgcgtttattgccggtgatcatgctggtggcgttagtgattagcgtgaccgtcgcgctgattcagggcagcgagttggcgacgatccatagttcaatccaacaggcctcggcgctggtgccgaattatggttcattaatggcatggcggacggtagcgttagtgctggcgttggtctgctggattgtaccgcagcttaaaggttatcaacccgcattgccgctgctggggttggcgtttgtgctggtgctggtcggcgagatgattggccgcggcgtattctatggtctgcatatgaccgtcggtatggctatcgccagttaa

SEQ ID NO: 91419 - DNA, 1491 bp, Enterobacter aerogenes
atgtttagcgaaatattcgctttccttacaggtaaaatctccggtacagttcgaagagtcaaggcaagtatcagaggtagccccatttttagcttatcccaactacaactggtgaatggcactgccaaagtcacccagattgttgattttatcagcgcggcaatcatcggcggccaattattaccgggcagtcgtttaccttccctgagggaattctgcgaccaggttgaaaccagtaaatttaccgttgtggaagcactggaacgtttgcgtgccagaggactgatcacctctattcagggaagaggatattttgtcagccatgcacggcaaacgactgagattgacgccgacaagcctctttcgttagtcagccccgatctgcattcaagactgaaacacgcttttgcaaaaagtagcgatattcttcgtcccggatgcggttttttgcctgaagagtggctggatactgagtttttccgtaaagcgctacgccaaattatccgcaaaccgcagctaaaattctctgagtacggtaatccacgaggatacctgccattgagaaaaacactgcagatgaaaatgaatgaggcgggaattagcgtaccggttgagcagattattatggcgaatagcaccatgaatgccatcgacatgctgttccgtattctgatcaaacctggcgataccgtgctgattgacgacccttgctatttcaattttcgcgccagcctgagtcagcatcaggccaatgttgtctttatccctcgcggccatacaggggttgatattgatgagcttgaaaccttattaaaagagtccaggcccagggcttatctcacctccggactaatgcataaccccaccgggcaaagttatagtctggaagagatgtttgctttaatcaccgtattaaaccgctacgattgtcatctcattgaagatgacctgtatcatgacctgatggaaccggcaaccaagccaatgtcggcgcttgccgggctcactaatgccagttatatatccggcttctcaaaattgctgagcgccaatatgcgggttgcctatattgcaacgaacccattgctggctgaaaaattagtacagctaaaacagcagactggcggcgtcacctgtgaatttaccgagcagacattacatcaattcttccgtgacggtagctataatcgccatcagcgccggcttattggtaatttgagtgacgtctcctcgcgggtaaaaagctggcttcaggaagcaggttgtcgtttcccggtcgtccattcttacgggttgtttttatgggctgaattgcctgaacatatcgatagtgaaacgctggctgaaagagcattagcgcagggtctggctctggcgccaggtacgctgttttgtcaaaaagcggaagggctacgctatatgcgctttaatatcgcccatagccacaatgataaagttgccgcgctggttacccggttactaaaaccctaa

SEQ ID NO: 91420 - DNA, 1149 bp, Enterobacter aerogenes
atgacagcggcaaaaaataacttttatttattatttatcaaaaggttgggaacgtcttccgcccagctattgttactacggatggtctctgcaattgccctgttttccctgctcgggcaggctaatgtttggttagacacgaccagtaatgccttactggcttttggttatcggtttctgttgatattgaccccattgacgctaggtctgtttggtcaacgtgcattaatagttactctgtcggtgtcgctgctgggaatagtattattagcactaaatgttgcaacgggcgtcaattggctggcggtggtcctctttagctatggtgtcgccgtgctgggttatatcgtgaagaatgatgcggccagaaccccggcaggagcggctaataataaaattatgcttaatctcggcagtctgtgtgccgggttattattactctatccgcactggagtccattattattttatattgtaattgctgctttattgctcgtttgtttaccaaccgcacgccattttagtttatcaagtgacctgacggcgcagacgctactgacgaagaactttgccaaatctggaaagttgaaatgggtattagcagggattgttactggggttaaattatttgcggtattctctatcctgccgcaggaaattctggttcatcgacagactctaccagcctggtatggcatgatgatcatctttaacagcgcaattgttgcattaatacagataccattaatggcgcttattaatcgcagtggcgataaagcaatgctgatgtcgatagtgattatacttcttggtttgatcgttttggcagtacctggcattttccatgtttatactttttggggagcagcggtatggctaacaatactatcaattgctgaatgtgcattgagttatattgactattgtgcagcgcaagaaaattctctgttaataaaagagttgtccgtcagtcttggcgcaggattaacggttctggttatgcgttattttccggtggcgattaacacagaagtgctttctttaatttctattgtcgcgttattactttggctgtggaaatataagtactcatcaaataaattctataaggaaaatatagatgccgtcagtgatgtttgtgaaaagtga

SEQ ID NO: 91421 - DNA, 279 bp, Enterobacter aerogenes
atgccgtcagtgatgtttgtgaaaagtgaaactgaattcactttcagggatgtggtgagccttttagaatgcagggagaacatgaggtttggttgtaaaactggaaactgtgggttgtgtcgagtcaaggtattatcagggatggagaatatcacgggcaagactttaaaagagaaacgtttattcaaattgcttggtatagaagatcaaacggtgcggctggcgtgccagtgcaaaattagcggtgatgtcactttaattgaaaactatctggagtaa

SEQ ID NO: 91422 - DNA, 735 bp, Enterobacter aerogenes
atgaaaaatcgtattaaagacacgtctattgtacgtaatgaaccttttctgaatgcagaaaaaagcgcgcaggtaaaacgtgaaatcgacgactttcttgataccaagatcatcgagtgggaaaatacggttccttcggcaaaacatcttgaaggcaaagaaattaacaaagcgtactatcagcagacgttgattgaacatgcatggcgtattcgcctgatgcgtagcgcccaggctaatgcgttacataaaatcacccagtttaatgctgaagccgcacagctctacgccgcttatcaggatgaagagatgcttcatgacaccttgttcattcaggatgctgagagccagggtattagtaaagagactatctatagcactgaacctagcttctatacacgtcttctcagtggattcctgtactttgtcgccgagcacgaaaaaccactgggcgtggtttgctatagctaccttgtcgaatacactactcaaaaactgacgcccaaacagattaaggcactcggtgaatctcttggtaaagataagattatcggccaggccgcacatttgaatactgaccttgttgaggatcatacccaggatatgtggaatattttgagtctgctggtggagtctgatgacgatattcaggatcttaaacgctatttctctgaaattcaggagttgttgaagttattctttgttgaattacataataaaacaatcaacgcataa

SEQ ID NO: 91423 - DNA, 1245 bp, Enterobacter aerogenes
atgaacaaagcaattcttattttatcacatcaattattatcgatggtggcgcctataaaaaagatagttgaggataatggctatgcttgctacgtcctctcatctacttcaagtaaggcgacagcaccgcagtgggaaattgatgaaaaacaatttagcattacttcttcattatatttagaaaaagcagatatcgatctttttttgcaaacgacgggtaagaatgtcgattttgccggatgtcttagcgtatgggatggttatcgccacttgatgtcttatgccaaccacatttttggtgccagggatattagcgaagaggtggtagccaggctgcgcgataagctagttatgcgccaggtattacaggccgcagggctaacggccgtcacaagccaggttttaaatgaagcattatttgaatccataagtcaccctgaacagtattttattaaaccacgtattggtttagcgtcaatgggaacgtttcctgcaaaatcattgacggagtatgctcaactcgaacacctgtggatgcgtgcagcggaagacaaaaattatgaaggcattttttctcgcgataatggctttattcttgaaggctttatttccggcgtagagtgcagctttgagatcgctattgataacggcgtaatggatgttctggctgttcatgagaaacttgacgtgacccaggaaacctattctgtactggagggagcctgtatctgcccgccgcgatcgttaacgacggcgcaggtggaagcgggaaaagtacgtctggatgaaataatgaaagcgctcggtgccgataccggcgtttatcatgtcgagatgaaattcgattcacaactgcaatgggaagttgtagagattaatccccggattggtggggcctatattgttgatagcactaaaattcatgccggagcgtgcttactagaaacctggctgatgttaatcctggggaggagccctgtgcgtagtgctgcgccggctcgaacgacatttttccgtgtgttcttcggccagtcagggaaaacgctgctgcgtattcaacgcagtactctcgaattacccgcagtgcaagaaaaagtgctttataaagcccaggataaattaccttcggtggaacgcgaaatatttttaggtatggcgttgtgggatattaccgatatggcgatatctgaacaccctatattttttaagcaaaccaacgattatctgattacggagtaccagtaa

SEQ ID NO: 91424 - DNA, 1164 bp, Enterobacter aerogenes
atgaaaatagtcatcctgcatcgtattccatttgacaagatccgctacgatcagattatcgaccaccaactgcatgaggtttattatatttgcctgcaggggaactctgatgagttcccctccgaggcgaaggtgatcatgctggagagtcagcatttcgagccagctgagttaattaatttttatgcgccggtgtttgaatatgccgatcgtattatttctcgctccgaatacgatctgcttgccgcggcgaccctgcgggagcatttttcgattagcggcgataaactggctgagattcttcctttgcgcaataaatggattatgcgcagtcgctgtaaacagcaggggattcctcagcctgagttctggcatccgctggaatttattcaactagcgcctcgtgcgggtaaattcgtgcttaaaccacgaactgaggcttccagcaatgggattatggtgggggatttcgcgactatcaaacaggcatcgttagctcttaaggatgatgaaacgatgctggttgaagaatttattgatggcgttatttaccattttgatggttggatgcataaaggaataccgctggctttcgtgagtagtcactatattcgagactgtttgagctttgccgatggcgtgccgctgggatcggtacaaaccactactgaagccgcgcatatcgatttagtcgttaacgccctaagtgtattaggacaccagaacggcagtttccattttgaggctattcgagatgcggaaggtaatttctggtttctggaagttgccgcacgggttggcggggccggagtggctgaaacattccagttacgtacaggccttaatctttatcacgctgatttacgttaccagttgtttggtaatccgccagtgtgtatcgatctcattaatgctgtctactatggctggttcgtctatccagctcaccagcttaactctgcttatacgctcaacttttcggctgaggagtggcaggaaaatctactgcattatcaatccaatcaggatgtctcctcgcgcggcacaatttcttactcaccgacaacctcgccattgagtggtgtggtctttggcgagcaaacgaaaatcgcaagagtcattgagtcaatttttaatacctgcacagtggaagccttatcatga

SEQ ID NO: 91425 - DNA, 1245 bp, Enterobacter aerogenes
atgaatacgccatgctttattgtcgttggatataataacgtcagaatttatgatgttgctaaaattcgcgttgaggcacaaaaatattttgacgccaaagttgtattaattactgagaaaaaaacagcaagcgatgagcaatttgctgatctggtgattgaaacaacgcttgaagttacacaactcccggcctcagcggatgtcgttcatcaatatctggcaaccgaatcactttctcccatcggtattttaccattttccgatcgaggtgttcctttgggggcgctgctggcgcaaaagaacagactacccggcgcgctgccagaacaagcaaaagcagggctggataagcaaatattccgtcaactggatgccagggcttcattccatcccgccggttatcggacggtaaccagccagccggtaacatcattgaatgaacttaaagatctggtcgattcgttaggcggtaaggcgtttatcaagccagcgaaggagggcaatagccgcgggtgccaggtgattgagtgtattgagcaatgcgagtctatctgggcttcactggcgccttatcgcgaagcagggatcctggtggaatctcttatcgaaaatgcgaaagaatttagttgggatagtgtggcgggtaagcagtggatcacggaaaagcatactactgaaggccactaccgtgcggagtatcaacaggtggtgcctgcccgtttgaccccggcggatgaaatactgctgcgttctgcaggcgaacatatgcgtgaactggtgtcgccgtcaaatggcgcctggcataacgaaatatttttacttcccggcgcgacggccgctgttgaaaccaatatgcgccctgccggtatgcatatttgggatctggcgatgttgagctttgaaaatttcaatccatggctgctgtggctacgttgggctgcggagggtaaatatacggctgagccgctcaaacagaactattactctggtatccgcatgcttcgggcccgcgtatcaggaaccttgcaggcattaccagatgttgagcaattggcattgcaggcgggtattacgcttcatgaagccagcttttcagccaaaatcggcgacatccttaatggcgaaattaagacgaatgccgattttattggccatatcattttgcgcgatagtagccatgagcagttactcaattcattagagacgctggcggcggctattgagtctgccgctgaaattagctaa

SEQ ID NO: 91426 - DNA, 1209 bp, Enterobacter aerogenes
atgaaatcctcttttatctggcacgataaacgtagtctgaactatttgctgtcgttgttcatattcagcctcggcagctttattatcaatccttactatgccatttatgtgtcagataatttaggttatggcgtggcatttgccggtgtgttggtctcaattaaagtcatttcacagcgcgttttcgctttatttggcggcagcatggctgatatttttcctgccgtttatgctgcccttgccggggtgggggtgcgcgcgctgtcgtttgcgcttctggctctgaatgcgaatcatgagatcctgctcgtttctgcggtgatgaatggtattggcggtgcgttgtttaacccagccattcgtaagttattgtttacacgctataaagaagatgatgtaaagttaaagcaggttatcgcctggcgtaatgccgcatttaatctgggggcggcgatagggccacttattggcgtatacttgattaatctggattttaaaggcgcctgcgttgcgattacgctgattcatatcgtcgtagggctgatgctgtctggcgcaaagcaggcgtatcaattacggccgactgaggcggggcgccggtcgctgatagtcgagctctcggctagcctgtttaatccagcgttattccccgtttttgccctgcaatttttctttatgtatttttactctcatattgagtacctgttgccaatatttatcacccaccagtatagcgagtattttgttagcgtggttttcttcgttaataccttgttcgttattttcgcacagacgatatttagccgtatttttaatgaattacgtgccggtattgcatggggcgcgatggtgctattttttatctcgctggcgatactgtcaattttcccaggcgctaatccgatgatctatgggttattgatagtgctgggcgttatcgccttttcaaccggggaggtgattctgtctatacaggtggattatattgccactcatgttggcggacaccttaactccggaacgatttttggcgctatttcactggtggcggctggcgggttatttgcggccaacgccatcaacagcgtcatactcgagtactttgactttgcagttgtctggctggtgaattcgttaattgccgcaggcctgggaggcttttcattgtatcgatattatttatcccgaacgctggcttattctcgttag

SEQ ID NO: 91427 - DNA, 1455 bp, Enterobacter aerogenes
atgaaccagaaggccgtcagtctgaccccggagcaggcgctttcccagttggaagcgcagtatgaaagagcggttaacgcgttgcgtaaggccattggcgaatacattcaccacaatatctttcctgatgaaatagcccgtgctgaaggcttattcgtctatcctcaactgtctgtttcgtgggatggcgccgaacacaaagccttaaaaactcgcgcctgggggcgattcacccattcgggctgctacaccaccaccataaccaacccaaaactctttcgcgcttatctgctggaacaattaactcttctgtatcaggattacggcgcgcatattagcgtcggcaattcgcagcacgaaattcccttcccttacgtgattgatggctctgcgctgacgctggatcgctcgatgagcgccggattaacgcgttattttccgaccaccgaactgtcgcaaattggcgatgaaaccgccgatggtctgttccacgccaccgagtattatccgctgtcgcattttgacgcccgccgcgtcgatttttcactggcacgcctgaagcactacaccggcacgccggttgagcacttccagccgtatgtcttgtttaccaactacacgcgttacgtcgatgaattcgtcagttggggctgtagccagatcctcgatccggatagcccgtacattgccctctcctgtgcgggcggaatttggatcaccgccgacacggaggcgccggaagaggcgatttccgatctggcatggaaaaaacaccagatgccggcctggcacctaatcactaacgacggtcagggcattacattgatcaacatcggcgtcggcccggccaatgccaaaaatatttgcgatcatctcgcggtgctgcgccctgacgtctggctgatgattggtcactgtggcggtctgcgtgagagccagtctataggcgactatgtactggcgcatgcctacttacgtgacgaccacgtgctggatgcggtgctgccgccggatattcccatcccaagtatcgccgaagtgcagcgcgcgctgtatgacgccactaaacaggtcagcggcatgccgggggaagaggtcaaacagcgtctgcgtaccggtacagtggtgacgaccgatgaccgcaactgggaattgcgttattccgcctcggcgctgcgatttaacctcagccgggcggtagccatcgatatggaaagcgccactattgccgcacagggctaccgtttccgcgtgccttacggcacgctgttgtgtgtctccgataaaccactacacggtgaaatcaaactgccgggacaagcgaaccgcttctacgaaggggcgatttccgagcatctgcagatagggatccgcgccatcgatctgctgcgcgccgagggcgaccacatgcattcccgcaagctgcgtaccttcaacgaaccgccgttccgttaa

SEQ ID NO: 91428 - DNA, 240 bp, Enterobacter aerogenes
atggaatggtgggtaaagaaagttcggaaaaatttatctacagcaagaacttgcgtggtgctccagagcggtcatatcgtggtgattgctgaaatcgaaaatcaatgcagactgcaggaaggcgataagctaacacctggccccaacgcgctttattacatcaacaataacggcgcggcgacattaagagtggtaagcgcaagtaattttagcgccgaacgctgggcacagacagcctga

SEQ ID NO: 91429 - DNA, 1578 bp, Enterobacter aerogenes
atggctttgatgcggcttaacaagcttctgaatcaatctggattaagaatagtctcgctagccaaaaaaacgctggctgcggcggttattgtggtggtggtatttttcattggacgaatatatgaatcggaacgaggccctgcattgcagcgctggcatacctggtctggcgatgagatgaccgctgatgaaatcgaccgcgccagttttgccagctatctcaaacgggaagatgagatatttgccgatttgcggcgtgaggtgagcgatcgcctgtcagccgctgacaaaacgccgataaaccgcttttatcgcgacagcctggtctacccacaacgctttacgccagactggaatcgctcctttatcctactgccatccggcaaaccgcgtggggcggtggtgttgctgcatggattaaccgactctccctacagcgtacgctatctggcggaggagtatcaacggcaaggttttgtcgcggtggcgccgcgcttacccggtcacggtaccgcgcctggcgcattaacccacgttgattggcaacagtggctggcgacaactcgcctggcggtacgagaagcgacgcgacttgccggtggggatgtgccgctgcatctggtgggatattctaacggcggcgcgctggcgttgaagtatgcgcttgatgaactgaccgataaatcgctggtcaggccgcagcagattattctactttcgccgatgattggcgtcaccgctttcgcccgtttcgccgggctggctggcctgccttcggtgtttcccgcctttgcgcgcgcggcgtggctaaacgtcattccggagtttaacccctataagtacaattcatttccggtaaaggcagcgcgccagtcgtggctgctgacccaggccttacaaaaacagattatccaggcggcgcagagccagcggctaacttctatcgcgccggtgttaacctttcagtcggtgattgattctacggtcagtactcgggcagtggttgattcgttataccgctatttgccggacaacggcagcgaactggtgattttcgatattaatcaggcggcgaacctgcgggcgctgtttcgcccggcgacttattcggcggtgaataccttgttacctccggcgccgcgtccgtactccacgacgatcgtgacgaatgcgactcagcacaccctcgataccgtcgcgcgcctgacgctggcggggcaaaccgccgagagaacccaggcgctgcatctggcctggccgcaggatatgtactcgctttcgcatatcgcggtgccgttccccatcaccgattcgctgtatggccgcgagccgacggagaaaaaccttagcggtattagtcttggcaccatttcgctacgcggcgagaccgcgacgctgagcgtcggtcttgatacgttaatgcgcgccacctctaacccgtttttcccctacctgctgctgcggattgatcagcgtctaccgttgggctcagaacaccaggatgtgcaataccgtccgcagcgcaataccgatgagggcggcaggggcgacgaagcggaaaagacgcacaaatcttga

SEQ ID NO: 91430 - DNA, 933 bp, Enterobacter aerogenes
atggatgtcatcggcatcattatgtcagcggggaaatcctccgtcgacgtagcgctttataccttattacccattatggtcgtcatgctgatcataatgaaatatctcgaagtccgcggaattctcgacatcatcgtgcgctggctggcgccgctgctaaaaccctttgggttgaccggcatgagcgccttcgcgctgattcagataaattttgtgagttttgccgccccgctcgccacgctggcgattatggataaacgtggtgtttccgaccgacaaatggccgccaccctggcgatggtgttcgccatgggccagggcaacgttttctaccccttaacgccgtttggcctgcactggctggccgcaatcaccatttctattgtcggtggactctgcgccgcagcggtctgctggtacgccaccgggcgtaagttatccattgtcgagagcagccgggcagaagtactcccggaaagcgaacaaaataatcacgggctgattgcggtgatcaatagcgccggcgccgacgctatccgcctggcgcttggcgccgtgccgatgctgattttatctttgaccatcgtcggcctgatgcaggcggctggcgtcatcgaaatgctgcagcgcgtgctgatgccactgctgcaatggctacatatcccggaaaacttcgttctgcccgcgctggtgaaatgtgtggcgggcggtaccgcctattttggggttatctccgagctggcgcagcagggaaaagtgacgctcagccagattaacgcctccgcggggctgctcatccagactttcgacctacccggcatcggcattttccttggcgtcagctcaagatttgtgcgtcttttccgcttcgtcgcccctgccgccctcatcggtattgcgctgcggacggtattgcacatcctggtgttctga

SEQ ID NO: 91431 - DNA, 714 bp, Enterobacter aerogenes
atgtttatcgttaccgacaccttccgcgatttaccttttattcagcatgccgagtgcggctatcttcgcgctgacccggcgttaaaattctgtcgggtacgtttcgccaggacacaattacaggacgcacttttcaaccaatacgccgtcccgttcccttcttctcttgcgggcgccgtcgtaaaacgtaaagccgaatatctggccggacgctactgcgcgcactatttactgcgacaagccggctgcttagagccggtgttaagcgccgccgatcgcgcgccagtttggccggcaggctggcgaggaagcgtctcgcacagcgaagataccgccatcgcggtggttatcgcagaggccaacggccggtatcccggggtcgatatcgagcatctgcaaccgggggtcatgctggaaagcgccgatatgtttgtctcgagaacggaacagacgctgctttcctgttgtgggctggatatggagtgggcactgctgctggctttctcagccaaagagagcctgttcaaagcgctatatccgcgcgtacagcagatgtttgattttgatgccgccgccatagtcgcagtcgacccggcaaaacagcgtttcacgttacgcctcaataaaacgctcagcgacgcctttgccgcaggtagcccgttcagcggcgaatatcacttcagtgaaggcaccgttcttacctgcctgtgctag

SEQ ID NO: 91432 - DNA, 480 bp, Enterobacter aerogenes; identical to SEQ ID NO: 5181

SEQ ID NO: 91433 - DNA, 267 bp, Enterobacter aerogenes; identical to SEQ ID NO: 5180

SEQ ID NO: 91434 - DNA, 735 bp, Enterobacter aerogenes; identical to SEQ ID NO: 4868

SEQ ID NO: 91435 - DNA, 213 bp, Enterobacter aerogenes; identical to SEQ ID NO: 4869

SEQ ID NO: 91436 - DNA, 9621 bp, Enterobacter aerogenes; identical to SEQ ID NO: 71861

SEQ ID NO: 91437 - DNA, 2601 bp, Enterobacter aerogenes; identical to SEQ ID NO: 71860

SEQ ID NO: 91438 - DNA, 867 bp, Enterobacter aerogenes; identical to SEQ ID NO: 71859

SEQ ID NO: 91439 - DNA, 249 bp, Enterobacter aerogenes; identical to SEQ ID NO: 4873

SEQ ID NO: 91440 - DNA, 1131 bp, Enterobacter aerogenes; identical to SEQ ID NO: 4874

SEQ ID NO: 91441 - DNA, 1269 bp, Enterobacter aerogenes; identical to SEQ ID NO: 4875

SEQ ID NO: 91442 - DNA, 4797 bp, Enterobacter aerogenes
atggaacagcaagggattatgagacagttgcctaccgacgaccaaacgatagtcgactatttgtatcgtatcgccggagaatatggggaaaaagccgctgtattgatgggggacgcggcgctgagctatcacgatcttaatgcacgctctaaccaactggcgcattatctgcgtgggctggggatcggcgaggatcgtgtggtagctatccgcctgccgcgcggcatggcaatgctgattgccattttcgctattgtaaaagctggtggtgcctatttaccgctggcgtacaatgcaccgcgcagccgcattgaaaatatactgagcaacagcggcgctgtttgtctgatcggtactgacgatggtgatcgctggccgattcctcgcgtcgaaatcgacagcgcggcggtcagtgccatgccaacgacggatctgcgttaccgaccacatgcgcggcaactggcgtatattatttacacctccggttccaccggtgtccctaaaggggtggcgacggaacatgcagcgctgctaaaccgaattgtctggatgcagaacgcttatcctatcagttctcaggacgtgctgtttcagaagacggtgtacacctttgacgtctctgtctgggagatgttctggtgggcgatgtacggcgcatctgtagtgctgttaccgtccggactggagagcgatccgcgaaccttggctcgactgattcagcgtcaccgcgtgtcggttgtgcactttgtcccttcgatactgaacctgtttgtcgagtatctggagatgaaacaggatcctcgtttgaccgcctcattgcgattagtgttttccagcggtgagaaactcacggtccacagtgtggctcgcttttatcaatcggtggcgcagggtgatcttataaatctctatggcccgaccgaagcagcaatcgatgtcagtcatcaccgctgcctgcgcgggtacgactacgacgatatccctatcggtcaagcgattgacggttgccgactctatgtgctggatgaccatggtaatccggtagcagacggcgaagagggcgaactgtatctcgctggtatcgggctggcacgtggctatctcaacaacgtggcgttaactgatcgctgttttactatacatccaactttgcgccatttagggaaaccggagcggctgtataaaactggagatctggtgtggcgcgacggggaaagccaacaaattcattacattggccgtaatgattttcagattaaaattagagggttgcgcgttgaattgggagaaatcgaagcccatgcgatgcgtttcccgggggtacagcaggcagtcgtggtggcggatcaggatgatcccgacaatcagttgatttacgcttttgtcgtcagtagcgtgccgctcaatttggcggccttaatggacgcactgtccaaaaacttgcctgcctacatgctgccgaaccgtttgttggcaatgtcagagttaccactctccgacaatggcaagtgctgtcgtaaaacgttgctcgacttggcgcgggcgtactcagccagtcgcgtcgatttacgtgaaactcccgccgtgcgctacctaccgttgtcatcggctcaatcgtcgatgtggtttatgcaacaattggcgccgcatactgcactatacaataaccccaccgccttgctgcttgaaggagaactggatcgcacgcggatggacggcgcgattcgtcaattgatgagtcggcatactctgttacgtgctatggcggaaacccacaatggacaaccagtattggcggtgcctcagtgcgtatcgtcgcaggcgttgctgaccatagtgccactcccctcggtgagtgatgataacgcgctacaggcgatgatcaaccagcgtgcggcacaccccatgcccttaacgtcaggcacaccgctgtgccggtttgaactgttgacgatcgatgacgatcgtagcgtattgttgattcatctgcaccacatcatcagtgatggctggtcgaaaggcgttttgttacgcgaattgcaggccgcatataacggtgaatcgctgacgccagaaccgttgttggagtatgccgactacatggagtaccaagaagagtggcgtcagagtgacgcctatcaggacgcgatgcgttactggcaaaataccctggcggggacgttgccgattcttgatatccccaccgatcaaccgcgtcagaaggtggcacgttaccaaggcgcgtttgttgccttcgcattgtctgccaacacatgcgagcgagtgttggcggcggcgcgtgcgcagcgcgtgtcgttgtataactatctgctgaccgccttcgtcctcctgctgcatcgtaatgcgcgtcaacaggaatacatcgtcggtatgccgattgctgcgcggctgacgaaagaacaggagcatatgatcgcgccgctggtcaacgtactaccgctgcgcttacctcttgacgaagcggcatcgttttccgagttagtacagacgatcagaggtattctgtttgccgctttcaggcaccagcgtctcgaatttaccgacatagtgcgcgcagtgaatgtggatcgcagcgccggacatttcccaatatatcagtgcatgttccaactcgacaatatgcctctggcgagcccgacactaaacggtgtcaacgttacaccattattgttggataccagtgcatctcaggtggatatttcgctaagtatgcagcatatcgatgggcgcatcaccggcactttcgaatacgacgctgggttatacagtgcggatcgtattcagcacctggtggcgcagtggagagaactgctagatgaggccagcagccaacccacgcagttagtccgcgatttgattcgtttcacccctcgagagcacgcttggctggcgcggcacaacgccactgaagttgctctgccgcccgtagataacctgctggcgctagtgttaccgcactgccagcagcgccctacacaggtggctttgcgccacgctgacgacgccatgacctatggcgaattgcaacaggccacgatgcagatgtgtacttggctgcgtgcgcaaggcgtaaaacgcggagaatctgtcgcactgcaactgcctttttgtttcgaattgattatcgcacaattggcgatcctctctttgggggcgagctatgtgccgctggatggtaacgcgccagcggcccgcaatgccctgatcttggcgcaggcaacgccgtgcatgctgctggtggcgcaaccgctggaatcccctcatgggctgacgataccttgggtgctagtgcctgactggcgtagcctgctgacagaaataccgaacctgccagttagtgttgcgccagatgctttagattgcgatgcggtggtgatctttacctccggtactaccgggcagcccaaaggcgtccgactcagccaacgtaatctggtcaacttaaccgcatcctttatatccagctatcaagtgacgcatcaggatgttctgctacccattacctcagtcgcgtctgctagctttgtcggggaggtactgccgctgctcgccgctggcggtaccttagtattggcgcaaaaagcgcagagtttggatagtgatgcgctcattgcgctgctggcatctcagcgggtgactatcctgagcaccaccccatcgctttctgccagcctctctgtgctggctcagtcgatgggatcgctgcgcttgtttctgtgcggtggtgaagcgttagagtatgagcagatagcgccgcttctgccgcacatggcagtggttaacggttatggcctgaccgaaagcggtatctgctcgacctactttcctgtcgcaaagcgtagggagcaagaaacgggagcattgcccattggccgcccgattcagaacacccaagcttatgtggtggatgcatataatcgtttggtaccgccaggtgcctgtggagaactctgtttctctggtctgggcatttcgcccggctaccttgatgcacgacaggatcccgagcgctttgtcgagttgccggaataccctggcgttcgggtgctgaaaactggcgatcgtgctcgttgggcaaccgacgggatgttgttctatctcggcagacaagatcgccaagtgcagatccgtggataccgagttgaactgggcgacatcgaaagcctactgaaacagcatccggatattgctgatgcgtgggtcgatgtgcgacgcaatgcggcggcaacgccgctactagtggccttctattgcagcgtcaacggcgttgcgctggatgctcagcaattgcgcgtatggctcagcctgcggcttccgttgcatatgctgccgttgctctacgtgccgctgagcgccatgccgctaggtgtaaacggcaaaatcgatccccagtgcctgccgctggtcgatctgcggcagttggaagggccgggcgagtatgtccctccggcaaccgaactggaacagcgtctggcggagatctggcagcagttgcttggcctggagcgtgtcggcaccaccacaaatttcttcgatctcggtggacactcacttctgctagtacagatgcagcaatacatcgggcagcagtgcggtcagcacgtggcgttggttgacctgctgcgcttcactaccatcaaacgcttggcggaatttctgctggccccggacgcagcgcaagggaccacaggagatcagacacaactgcgtgcggcgaagcagcgtttggcctttggtcacacgcgctgggcagccacaaccgacagtcatcactga

SEQ ID NO: 91443 - DNA, 3033 bp, Enterobacter aerogenes; identical to SEQ ID NO: 71854

SEQ ID NO: 91444 - DNA, 6501 bp, Enterobacter aerogenes; identical to SEQ ID NO: 71853

SEQ ID NO: 91445 - DNA, 6465 bp, Enterobacter aerogenes; identical to SEQ ID NO: 71852

SEQ ID NO: 91446 - DNA, 1464 bp, Enterobacter aerogenes; identical to SEQ ID NO: 4880

SEQ ID NO: 91447 - DNA, 1440 bp, Enterobacter aerogenes; identical to SEQ ID NO: 4881

SEQ ID NO: 91448 - DNA, 4368 bp, Enterobacter aerogenes; identical to SEQ ID NO: 4882

SEQ ID NO: 91449 - DNA, 2460 bp, Enterobacter aerogenes; identical to SEQ ID NO: 71848

SEQ ID NO: 91450 - DNA, 1506 bp, Enterobacter aerogenes; identical to SEQ ID NO: 71847

SEQ ID NO: 91451 - DNA, 723 bp, Enterobacter aerogenes; identical to SEQ ID NO: 4885

SEQ ID NO: 91452 - DNA, 513 bp, Enterobacter aerogenes; identical to SEQ ID NO: 71845

SEQ ID NO: 91453 - DNA, 765 bp, Enterobacter aerogenes; identical to SEQ ID NO: 71844

SEQ ID NO: 91454 - DNA, 1740 bp, Enterobacter aerogenes; identical to SEQ ID NO: 71843

SEQ ID NO: 91455 - DNA, 306 bp, Enterobacter aerogenes; identical to SEQ ID NO: 71842

SEQ ID NO: 91456 - DNA, 303 bp, Enterobacter aerogenes; identical to SEQ ID NO: 71841

SEQ ID NO: 91457 - DNA, 399 bp, Enterobacter aerogenes; identical to SEQ ID NO: 71840

SEQ ID NO: 91458 - DNA, 900 bp, Enterobacter aerogenes
atgtgggaacagcatgccgttcctttgagctatgaggattgctacaactttgcccggtgcctggcaaagcaccacggcgacaatatcgaagatattaagccgggactgtcagccacgctggaatctggcgaacggtgccaggttattgttcctccggcctgtgagcgcgatacggtgtctgtcaccatccgtaagccctcgaagatacaaatcccgcaccagggatatatcgatgcgggattttataaccgggtaacaaacgacgagaagacggagacacacgacgaagaattaattgcattgtacaacgccagaaatattcctctgtttatggagaaatgcgtggagtatggaaaaacattagccgtcgcaggtgaaactggttcagggaaaacaacattcatgaaaatgttgatacagtatatccctgtccatttacgcataacgacgatagaagacaatccggagataatattttttaaacacaggaactacgttcacctgttttatccttctgagtcatccgatgaaaaagggtctgtcgttactccggcgagccttttacgctggaattaccgcatgaaccctgaccgcattctgttgacagaagttcgcggcgcggaagcctgggattttctcaaaattacaggttccggccatgaaggaagcatgacctccattcatgccgggtcagcaaaagaagcaatagatggatttattacccgttgctacgagaacccacagtgcgcccagctcccctatacatttatgttgcgtaaggttctggacagtctggacgtgatagtgagcattgatttggacggagatgtccgccgtatgaatgacatttatttccacccggcccatcgcaatcaatattttgaggagatgaaagcatga

SEQ ID NO: 91459 - DNA, 954 bp, Enterobacter aerogenes
atgtatgccgccgcctttgatgccggggcgccgctgagcgtacctgaggaggtgatgcctggcggggctaaagagaaaacctatcggataatgcaaggtgacgtattaaaacaattcaaaatctccgcccaggccatcgccctgtttaacgcctggcagcaggccggggcgcagcaggcgggggcgaagagcgaaacgccggccatcaacgaagcagaggtggtggccatcgccgtggcccaggggcgggatccggtcgccgcgctgaaggcagctcacgacaaggcggatggcgataaggcgaaagccgccgccgcgaagccgccggagaacggcccgatgggcaaactgccggatccggtgtatgtgccgctgaaggccaaagcgctggaggtgatgctggcggaccagctgagctggatcaccgcctggcgcaccgagcgctttgccagcccgcaatacgccgataagtattatcagcgtaagcctttttatcagcaggcgctgaatgagtcgtccggcgcgctgccgtcggcgggggcgcccgcggaaagcaaagggccgcgtgaagtgccgtttatcgataaggatcggcttgaccgcgcggcgtggggctatgactttgcccataccggtatcgtggcgctgctggcccaggtgctgctggatgtgatccccaccacgcaaaccaaccagcttggcggtccgctggtggcggcgcaggagtcggaatatatccagatcaagaaaagcggcgatgcccggcgggcggcgctgatgggctcgccgacgatgctggatttttacgataactacgtgcatgacacgctggccaaatataatcacgacccgctgcactcctcgttttcacacggttattttgcgtcgcggacgatttacgataacgatgacgatacgtgggattcggtgaaacaatttggccagcgattatag

SEQ ID NO: 91460 - DNA, 2445 bp, Enterobacter aerogenes
atgttcaaggaaaaaaatgccgcggtaatgaccgtagcggctaccgcgaccctgtgtcttgccgtctggacaattgtggtcctgctgagtggtctgggatggtggaactggcacgccaaccgcacgctgcagtggacggcgatccgcgagatagtgaccgtctgtggcctgatctgggcgtatggtctctgtctctggatactgggctttattgctttccacctgtttatcaggcaaaaagccgatgggcaacagcgtcagacgcggacttttattagccagcagacaaaaccggcgcagccgtttgcgtccttaaagcactttctccgtcgccgctacggccgattgtggcgcaataaggtccgcctgctgtgggtcgctggcgaggcggcgcagattgccgccatcgctccaggccttgcgcaacagcaatggctggagggccgcggtacggtgctaattcacggcggtagcctgttggctgaggtggataacgagcggctcagtgccctgcgtcggctgcgcggccgccggccgctggatggtatcgtgctggcgctggacaatgctcaggccaccgccgcgaccctggacgggtatttgcgaacgctggagcaggttgcgcaggttctgcgctaccagccgccggtctatctgtggcaactccacgacagcgactggctgcaggatacgcgcattacccagacgctgggggcgttgttcccgccgcgggccgtcccgcaggatgttgaacggcagcttcgcgccattctgcccgccatgctggcgcaggggacccagcagttgtgcgctgattcgtcccacgattacctgctgcgtgtcgctaaatggctgaaggagggcggtatcagcggctggaagacgctactgacgccgtggcttactgggtatctgcaacagatcccgctccgcggtctgctgttcagcccctcgttaaaggcggaagaagcggtggacaatgggctctatccccaccgttggccggccccggccgtctggcaggggatcatcgcagactgcggccgcgcgcgcggcgtgccggtgggggtggcgtggcgccgctccctcggcgtcggcctgctggcgctgtttggcttgtgggcggcgggaagcctgctctcttttatcgtcaaccgccagcaaattgtcagcgccacccagcgggtacagctgctgcggcagcccgtcgttaacgaccagcagctgatcgatttgcaggtgctgcgcaacgatatcggccgtctacagaatcagctcgccaacggcgcgccctggtatcagcgctttggtcttaatcataatgcgccgctttctgccgcgctgctgccgtggtatgggcgggctaaccagcgtctgatccgcgacgccgcggcagaagcgctcacccggcaactgacggtgttggtcaacctaccgccgcgcagcccgcagcgggcgcagctggcgaaagcgggttatgaccagttaaaggcctatctgatgatggcgcgtccggacaaagccgatgcggcgttttaccgccaggcaatgaccgccgcgcagcagacgcgtcagggagtcgccccggcgctatggcagagcatcgcccccgatttatggggcttctatatggacaacttgccatcgcagccgacgtggagaatcaccccggacgccgcgctggtgacgcaagcgcgtcaggtgctgctggcgcaaatcgggcggcgcaacgccgaaagcacgctttacgagaacatgctgctgcaggtgcgccgtaactatgccgacatgacgctggaagacatgacgccgcagaccaatgcgagccggttgtttaccacggaagaggtggtgccggggatgtttacccgtcaggcgtgggagggcggcgtgcgcgaggcgatcgataaggcggtggcgaccaggcgcgatgagatcgactgggtgctgagcgatagccgccagaccgtcagcggcgacgtctccccggaggcgttgaaacagcggctgaccgatcgttatttcaccgatttcgccggggcgtggttgggttttctcaatagcatccgcttgaatccggcgcgcaatattgccgatgtgaccgatcagctgacgttggcgggcgacgttcgtcagtcgccgctgattgcgttgatgaatacccttgcctggcaggggcagaccgggcagcagcgtgagggcgtggcggattcgctggtgaaatcggcaaaaagtctactcgataaggataagcagccgtttatcgaccagcaggccggcggcgtgcgcggcccgctggagagcacctttgggccgctgctggcgctgatgggcaaaaatccctctcagagcgtggtcgccgcagacaacaccctcagtttacagacctggctgacgcgcctgacccgcgtacgcctgcggctccagcaggtggggatgatttag

SEQ ID NO: 91461 - DNA, 1119 bp, Enterobacter aerogenes
atgtcaccgagaccacgaaaaaatagcattaagatacccgggctgtatgcccggtttgaccgacgcacggataaaacctactaccagtataaaaacccagtgaccggaaaattccatggtctgggaactgataaagaaaaggcagagaaaatagccactacggcaaatcagcgtctggcagctgctgaagcggattattttttgaagagaattgaagataatccggaggccaaaaagcgtcgaggaatcagtctggcatcatgggtcgagcgctacctcaaaatacaggccgccagactaaaagataataccatcgctgaaaccacatattcggaaaaggtcaggatggctggaaatttagttgagcgtcttggcaaccatcctttaaagaatctagaggttcgcgattttgcaatgattctcgatgaatggatcgataaagatatgaacagcactgcccagaataatcgtgtgttgtggatcgatatattcaaagaggctcagcatgcaggtgaagtcccccctggctggaatccgcccgaggcaaccagaaaaccagtgattcgagtttcccgagcacgcctgacgtttgaggagtggaagtgtattttcgatgctgctccagataaacattacataaaaaatgccatgcttctggctatagcaactggccagcgtcgagaagatatttgtaacatgcgttttgctgatgtctgggatggatatatccatattgttcagggaaagacaggtaccagactggcgctgccgcttagtctaagatgtgaagctctgggattaacactgaaagaagttattgatggatgtcgggatcgcattgtgagcccgtatctcatccattcctccaacaaaaggaaagcaggacctttaagaaaggataatctgtcacgtactttcgctaaagcgagagataaggcaggcatagtgccaccggaaggaaaaacagatgtgacgtttcacgaacagcgttcgttagctgaacgtctctatcgcgctcagggaatcgatacaaagatactcttgggacataagatgcaaagcactaccgatcgttataacgacacacgcgggcaggaatggataaagctggtcatataa

SEQ ID NO: 91462 - DNA, 2460 bp, Enterobacter aerogenes
atgaacaactacgcgtatctcattaaagcaaaggcaaaggccaccgaagcgaaaaacctattctgctggttctctgcaaaatctgattcccgcgccgaacgccggatcctggacattctggaagacgctgagattaatgttggccgcggcgccaaccatcagctgcctatccgcaccaactggctcatcgttgatgacctaccggaagaaggtgtgctggatgacacctggtgtgatcgctacgaactggcagaaaacgggctgacatggcaaaaaatcgttgcgccggcggcggctgaacctcaggcggacaacgaaccggaaaacaatacctctactgatagcgatgaagaggactattcggccaatgaagatgccctgttcaacctggccgaaatgtccttccgcacgcagctgcttgcccagtacatggctgacgatcgccacgtgtatcacattagcattccacatcgtgaccgcctttccttaatggaaatggatacagagaatcacgctgtacagaatctgatcctggctgctgaaaatgttcaggaaattaagaaatacgatatgcctggactgtggaaattcactagtgcattcaaaaccgttttccctgatggaaagcgctatgagcttggtaaacaggttcagtttgccaaattatggtttgagacggcgcacattgaccgcgggatcctaactaaggaatgggctgcaggtaatagtatttcagccgttaatcgcactccctccggcgcgaatgccggcggcggtaatgtaacagaccggaaaacaccgctgaccagaacagggctggcctacgaaatcgcagctggcctgctcgcccgtgttaacgagttcgatatctataacccaccattcaaaaccgaatgcgccatcaacgccataatgaacgattgtgacaacctggagttcacggcgaccgtcaagttattcgaggaaatgccgggcggcatggattattcccgcgcctgcaatattgcgacggttaaaacaacaccagaaggtttgtggaaagatccggtgaagcatcgcgaatatctgaaccgtgtcatgactgaagcagaccacgctcacccggacgaacttattgttgatatcgcctgcggccgttcctcgatgcctatgccaatgcgtaaagttgaagaacctgacaatagtaatgcagataagatgaccggcgcgaatgatcaggccgatgatacgccggcgcgcgaacttgaaatcaggcctcaggtagaactggctatttccggtaaaactgcagtaatggatctgtcagaagcaagtgaactgcttaaccttttagaaatcgaacgggataattttatcaaatccctttcattcgacctttattttatggaggtaggtggtctctccatttccgatgacgaaattcatcacctcacattacaggcactgcataagtggattaaggttccggccagacgtgtgcgaatgcttgaagaagcactggcgaacaaccgcacagcaaagtcaatgtctgaaaacccggaacgagatgatctgcaggacaaaacaaatcagatattagccgctaaccgtggcgaatatatcgaaggcatcagcgatcctaacgacggcaaatgggttacagaagatctaaccaaaactaattctaacgcagaggccaccagcgatgtgcggatggaagagaatttcggtaatgaaaccaaagttaataatgaaatttctggaagcgaaacagcagttgagaaaggtacaggtaatgctgacattggtagcgaaacaactaccgtaaatattgaatccggtcatcataatgatgttgaagaattaccagcagataatgttcacgtcatggttgaccttgaaaccatggggaataaacaagatgcccccatcgtcgctatcggcgcagtcgtgtttgatccggcaacaggttcaatcggagaaagtttctacaaagtcgtaagcctggagtcctcagtgaattggggcgccaaaatcgatccatctactgtcatctggtggcttaagcaatcctctgaagcgcgttcggcaattgtgaatgatgacgccatcccgctgcttgatgccttgatccagttcggtgaattcatttttgaaaatatccctggaggtcgtaaaaaagctcagctctggggtaatggcgcatctttcgataattgtattctgcgttcttcatttgattacatcgctgaagaatacccatgggaatactggaatgatcgcgatgttcgaacaattgtagaactcggcaaagcaattggaatcgatccgaagaaaaccataccgtttgagggtgaacggcacaacgcccttgctgatgccatccaccaggcccggtatgtttctgcaatctggcagcgtctcattgagggaaatcaagtctggaagaaattgacggcgccagtacacgtagcaatttaa

SEQ ID NO: 91463 - DNA, 297 bp, Enterobacter aerogenes
atgtcagctaacgaactggcattgaaatttagcactgctccagctgagcagctcatcggcgttctgaccgttcacgaagtgaaagaggcacttcacgatgaagtggaggaagaagtgcagagtgaagtatggatggaacataactttgctatggaagccgctgaagaggttacagatgcctttgctacagcgatgaagctggcgctgacgcaacccgcaaaggtggctaaagctacattacgcaaagcgctaaaggattatccgggttatggctcagaaccaaagagcggcccataa

SEQ ID NO: 91464 - DNA, 195 bp, Enterobacter aerogenes
atgaatacgctgtttgcccttgtcatcagcgtatgcgccctgaccggcgagtgctctgatgtcctgataggcgtgtatccatctgagaccagttgtaacagcgatgctgaggcccagaaggtaaaaggcacatgccagccatacaaaaaggcatttaagacggctgacgaccaacagcctgcagtaagtttctga

SEQ ID NO: 91465 - DNA, 123 bp, Enterobacter aerogenes
atgatcgatttcaaacgcaaaccagcgcgccagcaggccatccgcctgagctggttcgaggcaagagttcgccagctttgctacctgttagcccagaaaggaaacccagaggctaaagcatga

SEQ ID NO: 91466 - DNA, 315 bp, Enterobacter aerogenes
atgtcccgtagccctatacctgtcttctggtacaaaaatcccgctcactatgaagaattccaaaaaattctttctgatgcttacgtcctaccctttgactaccacgactggcgtatccgcgccgatagcatggtggagcgctacgaaaacagcggtatccaggttgtgaaggtgatagccagcacttacgagttcatctcctggtgcgaaattgaggcacgagatgtcagcaccaaaagctgcaatgactacgcggtcgccgaatcgggcctccaaatcctgcgcgacagagagtttgattggggagacgagtaa

SEQ ID NO: 91467 - DNA, 216 bp, Enterobacter aerogenes
atgaacaacatcgcgaaggagagacagtctctcggacttactcaagaacaactggcctcactttttggttggcgccagtcacgaatttctaattacgaaaatgggacacgaaaaccaacgctgattgactgccgccgtatcgtagagcagctaaacaagctaggggctgaatgtaccctcgatagtgttttcccaccaaatatggagaaggaataa

SEQ ID NO: 91468 - DNA, 555 bp, Enterobacter aerogenes
atgcagaccatctcttttgaaaatcataccccggtgaagggtgtgcagctgaaaactgaaaatcagtatttaccgatgcgccgcgatcgcattaagtgcagggccatttataccgccgttcaggaatgggagtcctcattacctggacgtgcgcaagaccacgtcgcgcagctggtggccgaacagtgggagaaacaaaacgggcgcggtatcagcgtcaataaacaaaatctgtatcgctacctgaaaaacgagggcggttcagagaagtacaccagttatgtcatccagctttcggcggcgatcgctgatgcaatgccgatagagatcgcgcgcaaacatggcctaaaacgtggcttaactgaaaccgagctggtggccaatgcaatcaaagaatgcagcgaagcgcaccaggccaagttacttggcgcacctctgcagaagctagagcgtgaaatacgggaagctgcaattgcactttttaacatgctccctgcagatgcggcgggaccactactggcgagtatcagcgccgtagcgccgcagtttttctaa

SEQ ID NO: 91469 - DNA, 672 bp, Enterobacter aerogenes
atgcaagaattcaatcagttaacaccgcatcccgggcagttcagcaaattcaggaagccagagagctctgggagaagcaacgcggacttgctggcggcggatacggcatggcggctatggacggtcatgggggagatattctcgaaccgatggacccagaagaacggggcggcgccatcggatatgtggattgcccagattggatcgatgagtgatgcccagattaccctggtctgccgtcagtgcatggagcgctgcgccgcgggtaacacatggccaccggatctggctgaattcgttgcgctggtttcggcgagcggagcaaacccattcaacctgacatccgaagctgtgatggctgaatacaagcgctggcgcaatgagtcttatcgctattcgggcagcgacagatacccctggaaacaggacgtgctgtatcacatttgcgttgagatgcgcagaacgggagttgagcgaaacctcacagagggggaactaaaaaaactggcagaaaaattactcactaagtggacgaagcacctggctaatggattctcgatcccgccgattcgccgacagcttgaagcgccgcgacatccggcagggccgacaccagcacagcttctgatggaagagtacaaacgccgcaaagcggcaggtttaaccaagtaa

SEQ ID NO: 91470 - DNA, 288 bp, Enterobacter aerogenes
atgaccaaaaaaatcaaatccagatatcgcaatgaaataaccgcctttgagttcctcagggccaacccggatatgacgtccggcgaaatagccaaagcaatggggcgtagtggcagttctgtcagtggacaggttaagcagctggcggggaccggacgaattgtccggacgggcactaaagatggttcccctacgtggagagttaacgatatgccgtttggctgcggtaacccgatccgaatgaggttcgaacagttgctacaagaacaccgcacaaagggactttaa

SEQ ID NO: 91471 - DNA, 354 bp, Enterobacter aerogenes
atgagcaaatcacttaacgcacgatgcatacgccgctggaaagttgaattcaaagggcgctgcgattcgaaatatagcccctactggcacaagcgcgatctccgcggttacatccgtgaggcggcactgactacggcgtattgtatggttgaaaacttggcctacaacaacgcaatgcacgattttttcgctgatgtgggtgacaggaatggctggtcgccagagttctcagcatggtacgacggacgtcgagagcattatctcaaagaagctcgcgactacctgaatgaagaagccaccaacgacgaaatcgacgacgaaatagagaacgaactggaggcctggaatgactga

SEQ ID NO: 91472 - DNA, 684 bp, Enterobacter aerogenes
atgactgagcgcggaatgatatttaacggtgagatggttcgagccatcctcgacggccggaagacgcagacccggcggcctatcaaatggaaacagactcggttcactgaaattggtgagcgcgaagacggtagcaaatggccgtggagcgaggatgcagagcatgcttgcgacttctggcacccatgcccgttcggcgccgtcggcgatcgcatctgggtgcgtgaaacgttctcatgcattggtaatgaagatggtcatcctgtggatgccaaaggcaacttgtgcaccagagaagaagcgcagcgtatctaccgtgccagtgcgatccagaaacccaataattatgggctttggtcgtctcctgatggtttcgattttgaaggtgcctggacgccatcaattcatatgccgcgctgggccagtcgcattctgctggagatcacagacgtgcgtgttgagcgcctcagagagataagccaagcagatgctgaagctgagggagttggaaaactgaagaaaggtttctggaaaaactatcaacccggctggacggagtttcaacttacagcgcgtggctcgttcgcaaccctctggaaatcaatctatggcgatgaaagctggtatgccgatccatgggtttgggttattgagttcaaacgaattgaggagcaggcagcatga

SEQ ID NO: 91473 - DNA, 348 bp, Enterobacter aerogenes
atgactgatatcactgagctgcgcaatgcgaacaagcaggcgctagacgatgcgttggattttgatctttttgaaggtgacttcggaacacctggtgacactgagctatcgaacaaaatcgttacaggccgccgggaatacaagtgccacgtttgtgctggcccgattgcaaaaggtgaagtgcatcgcagcgctacctggaaatttgacggtgagctgatgtcgtaccgctgctgttatgcctgctgtttggcaatggtagccagcgtgaatggcgattatgaagagaatgacccgattgaagctcgctatgctctgggccatgaacagaaggatgttaaggcatga

SEQ ID NO: 91474 - DNA, 270 bp, Enterobacter aerogenes
atgagcaacgatatggacgcttcacttaaatatgcctgcaagcgcgtgcaggaactggagggcatgctgctggtggatataccggaaacagtatggccagcggaagtcagtatggtcttcgctcagattgaaaacgccgggacactcccggcgcaccaccagcgccgactgcagcatcatatcaaccgcatgtggctggaaaaaatgccggtaccattaattatcgccgcggcaggttcgctggcctgcgccatggagaaatacgcgtga

SEQ ID NO: 91475 - DNA, 291 bp, Enterobacter aerogenes
gtgattaatagtgaaatcatagttgataactttgctggtggcggcggcgcatcgacgggcatcgagctagcgattgggcgtagtgtggacatgcgtatgcttcagccacatgaactgtaccgcgcgcagggcttcccggactggtacatcatcgaccagaattaccgcggcgttaagtatgcaaaggataagcaagttgcgcgctgcggcaacgctgtgccgcctccgttcgcagaggctctggtgagggcaaacttacctgaaatgtgctcgagaaaagttgctgcgtaa

SEQ ID NO: 91476 - DNA, 330 bp, Enterobacter aerogenes
atgggcttcccatcaccagctaaagactacgcagaacagacacttactataaataggctgtgtcagattgacgcaaattgccgcgtgttagagacgagcgcgggtttcgccgttgttgatgtttcccgccgtcctaagcagggagatcacgtactgatttctttctgcgggataattcagtttggcattgttcgcggtcgcgcactcattacttcagatggtgaagcgatagaaggcgatgccctggacgatgtggacgtgaagggcgttttaacgttcctgatcaaccgggcaaattacgtcgaggaagacccgaacccagtgatttaa

SEQ ID NO: 91477 - DNA, 234 bp, Enterobacter aerogenes
atgaaagtggaaatcacaattgatcgtcgcaaaaagcttccagagggcgctgtcccggcattagaaaaagagctgctgcggaggcttgaccaaaactttaataactgcagtttgatcattcgccgaaccggtactgatggtctgagtgtgtttggtgggatggatggggacaaaaaacgggtggagcaaatccttcaggatacctgggaaagtgctgacgactggttctattga

SEQ ID NO: 91478 - DNA, 258 bp, Enterobacter aerogenes
gtggctaaaaaacaacaaatgccgaacaccggctatgtagtaatcagatgcgatgacggcgtaattgttgcccgtatcacctcttttcccgtatgtgagcgcgctttaatgtaccgtcgcggtgatactgtttcgtttatgcctctgcagcccgatgagagcgtggggactctctcgctgttttcgcagatgattgaaagagcaaaggccggagggggttaccagattccaccgggctctgttacactcccgtcatag

SEQ ID NO: 91479 - DNA, 393 bp, Enterobacter aerogenes
atggcgcaaacaaaattaatatctgatgcggaacaggctggcgatcatgttgatggcgctggtctttcttcattgcaaaatctgacaccacgacagcaggaagtttttgatctgctggtggcgtttatcaatcagcatggctacccgccgacctttcaggaactggcagggttaatcggcgttagctcaccaaacgctgttgcattgcaccttcgtgcgttacaaaaaaagaacttcataaaattatctcgcggtgtttcccgtggaatttctgtcgtcggaagaaaggaaccggtacttgccgtgcagctgctgcaggaaatgatcgctgacgaaccgggagcgcgtgatcgggcgctggagttcctccgagtgtacgaggcccgcccatga

SEQ ID NO: 91480 - DNA, 204 bp, Enterobacter aerogenes
atgaagaaaagctggtttctccatgaacaactttcagagtctcaggctctggagctggcggaacgctaccggagaaagaattgtccggttgagaaaagcctgtcgagcgactttatctcatgggaactccgtgtgctgttgccggaatccagcaagccacctcgcattaacagaacttacacacaaaaaatgtggagggactga

SEQ ID NO: 91481 - DNA, 1032 bp, Enterobacter aerogenes
atgcgcgcattactaaatgttgatgttgcccggcacctgggaattgtgttgcttaaacccggtaaagagttgatgtctttattcagtggtgggcgcgtgctggtggagactctgccagaaaaaatgaaggctctcccaagcgggcgcattcctgacgccgggcaacctttacgagatgatcccgaaattcgcccattctttatgaaagagcgagtggtgagggctgctggcggggtgaatggtctcgaatcctggttgcttcagagggtcaagcattgccagtggccacattctgattatcaccattcagagctggtaacgttccggcattcaaccggggcaatcgtcgcatgctggcattgtgataacgagctgaagtaccagaccgatcaaacccttgataggctggtaggtatcaataacgcagatctgataatcgatgctgcccgtattgcactgggatttgaccctgaacgctccctgtcacttgctgaattgtgctggtgggctgtcagcgttggaataggggacgaaatcacagaagagatggcgcgccgttctctccggcttaaagaagaggttttccagtcagtctacaaagaaagcgaaatcgtcccatcggtgccggccaccagcattctttccccgcttgttgctaaggttgccaggcatcctgaaccaccagccccggtaaaaccagaggtgccagtggttgttgatcccgtggcaccagccactttattcaccagacctaagcggatccgctgggtgtcagatggttttatttcctgggtaaagactcagccatgtatgtgctgcggtcagtctgccgacgatgcgcatcaccttatcggatgggggcagggcggagttggtaccaaggcacacgatatttttacgatcccactttgccgcaagcatcaccggacgcttcatcacgatccagttgctttcgagcgcgagtacggcacccagccggaattgattattaaattgctggaccgggcctatgcgctcggcgttctggcgtaa

SEQ ID NO: 91482 - DNA, 603 bp, Enterobacter aerogenes
atgacaccgcgtcaacgccgacagtacaacgcagggttacaaaccgtagccgctgcgccgcgcaaaagctggttaggtcgattcacccctttgagcggtattcagtcgccctggattaaatcactgctaacagtctggggggagggtatgcggggaagtccttcacctcgcaaacccacaggtcattcatgttggcgaggcctcagggcagagcgatggtcggataaagcaatggagcgttttaccgcggctattgagcaagcccggagtgaaggtttccgtgggcagcaggcattaaaccgggcgcacgctattttatggcctcagcctaccactagcgcgatagattcagctatgcgtgaggatgacgttaaatttatggaaaagtgtgtgctgtctgcatttgagacaggtgatccggtttatctcgttggagtgaactattacaccacacgtaaaaaaatctctgatattacccgtgagctacagttggtggcgccgtggctaacggacagcgaagccagaaagcgaatgcgctggtgcctggaaatattcagagcaaaagtctttctttctgtctggcgtgaaattcatggggattag

SEQ ID NO: 91483 - DNA, 429 bp, Enterobacter aerogenes
atgaaaatcagtattccgctgccgtcactgagcgaacaaaagaaaatcgcttatgaggaaggcataaaagagaatgtgcgacagctgcaggccaatctgaatgcgccggtgattgatactggttcagaaattaatgccgccgaatacggcgataagcatttgttgaccgaagagagtgggtgggaaccaccagccggagaactgattgatgcatggtttactcagttcaaacgtgcattccctgaatacaactcagataaaaagctgggttatctactgggtatggtcggcagtaataccgatcgcagaatccgaacgttcagaactggcgaacggccgataccctacgggatatggcgccgctttttagttgtcacagggagggtcaaccaggaaatttttgaagtaaaaggtttttttaccgattaa

SEQ ID NO: 91484 - DNA, 288 bp, Enterobacter aerogenes
atgaaactctctgagttgacgattacgaagacgaacttccctgaggcagatttctggattgttcgtcggggctctttaaaaacctgtggcgaaccgaccagaacctttaacccggagcacatcggaataaaggtggtcaggaccgatatccttcttcctgattacctttactactgcatgatgcacctgcaccgctcaaaggtatgggaggccagagccacaggaaccctgaacctcgtcaacataaagatttcagatgtgcgttctatcgagttggaaccgcgctga

SEQ ID NO: 91485 - DNA, 249 bp, Enterobacter aerogenes
atgaacagaaccatgcctgacaaaattgcctctgcattagggtattgcacttcgggcggcctcatctgctggggcggaattgccagatggatacatgaccttgactggaacttaatcgcagttgtcggcggctttattattggcctcctgactttctccgttaatttttactttaaatggcgacaaaccagagcttacgaaaaggcgctggcgagaggctatgtaacaacaccaccgcaggatcactaa

SEQ ID NO: 91486 - DNA, 534 bp, Enterobacter aerogenes
atggccaacctgaaaactaaactcagcgcggctatgttgggattaattgccgccggtgcgtcagctccggttctcatggatcagttccttaacgagaaggaaggaaacagcctgaccgcgtaccgggatggcagtcaggggatttggacaatttgccgcggtgccacgcgcattgatggtaaacctgttacgcagggtatgaagctgacgcaggccaaatgcgatgaagtgaatgctgtcgaacgtaacaaggcgctggcgtgggttgatcagaacatccatgttccattgacgcccccgcagaaagtcggcattgcttcattctgcccgtataacatcggcccgggtaaatgttttccttctacgttctatcagcggattaacgccggcgaccgtaaaggagcgtgcgaagcgattcgctggtggattaaggacggtggaaaggattgccgcatacgctccaataattgctacgggcaagtatcccgcagggaccaggaaagtgcgctgacgtgctgggggataggtcagtga

SEQ ID NO: 91487 - DNA, 321 bp, Enterobacter aerogenes
atgccaaagagcagatcgcactggacgcatcgggagccgcggcagatatcaaaatggctattacggatgatgattgtgctaatcggtctgtgcctgctggtgcagttaagcggttgcaacaatacgcgaacggtttacgtcaaagtaccgctagttccgttgccagccagcctaacggccgaaacaccgcaaccagaaatccctgaaagtatgacgtggggggaaagtcttgatttgaacgtcaggctgttatctgcgttaggacagtgcaatcgagataaagccgacattcaacgagcagagaaaggaattgcacgatag

SEQ ID NO: 91488 - DNA, 525 bp, Enterobacter aerogenes
atgacacagcaaaatgcagtatccagaagaattgaaaaagccataaaagctttcacagataaggattatgagacctgtttattacatttattcccagctattgatgccacaggcaaggcaagaaggcccacccaaggcgtaggtaaaaggatcaggggcttcttagaggatcaggaagatataatttcatttgtagcactccgttccttatttacaggaaatagtgttgatggtcagacattacctcaggcactttataattttggaaggacttcaattgctcatgaaggtcaactagatccaagactcaagattattgaagaaggcagcatcagagcaagcaaggacaactgggaaatttcatcaggtttcataatggggatgataattgccgtaatttcagctaaagaaaaccaagatgctttccttgttgaggatgtcacaataacaattcatggcacaccctttatcataaatgatacatgggggaaagaggataatgtcagaacagctcttttccgttag

SEQ ID NO: 91489 - DNA, 639 bp, Enterobacter aerogenes
atgtcaacgctcaaggaattatcccggcagctaaagcaactgcagaaacagctccctttcgccacggcacaggccatgacatcggtagtaagggatatcgccgcagcccaaaaagtggcgctggggcgaaagctggaatcgccgacgccatttactgttaactctgtgggttctgctggcgccagaaagaacaacctccgcgcaaaagtctttgtgcgtgatgtcgctgctgaatatctcgaaccctttgagtttggtggcgaacataaactgaacagccaggcgctgctcaatccaaagaacatcaaactgaacaaatacggcaacatgtcgcgcaacaagctgtcgcagttgaaagcgaagccgaatgtgtttgttggtgaggtcaacggtgttgatgctgtctggcaacggcgtaaaccgaggaaggcgaaaaagaaacgagcccggcgctcagcgaatggtacgcgccgaccaaagcggaaacagcgcgctcctaagctgctggtgaggtttggtgatgctctccctgttacgcctacgcttgactacatgaaccgctcacggtcaatggcatccggcttgattcccggcgcgctgagcagggcgatagaagaagcgattcgaacggcaaaatga

SEQ ID NO: 91490 - DNA, 582 bp, Enterobacter aerogenes
atgaaccagtcagattttgcacggttacatggcgttagccgcaagaccgttacgatgtggaaaagtcggggatggctgatcatgtccggcgatgatatcgatgttgacgcttcaaatgcacaactcgaaaagtacaggaaaagcgttaaccgatccgataaacagaaaacatctgcgccagaaaaaaagaaagctgaccgggtgttacctgcgcgggagcagccggaagaaagtgactcgtcactggaggggcttgcgcgggatttcctccttgaaaacggcgctgagttatcgctggatgaagcgcgccgggtaaaggaaaactacctggcgttactgacaaaattagaatttcagcaaaaagatggtcaactcattgagatggctgccgccgaggaggttcttttcaacgcctttcgccaacagcgtgacgcctggcttaactggccgtcaagagtggcaccattaatggctgctgatctgggcgtgccggcggacaggatgacagaggtgctgattgaacatgtccacaaacatatctcagtcctcggagaaccagaatttaacccagcagaagattga

SEQ ID NO: 91491 - DNA, 2127 bp, Enterobacter aerogenes
atgtccacaaacatatctcagtcctcggagaaccagaatttaacccagcagaagattgagcgccttcaactgagtgtccgtaagggatggacaccaccaccacgcatcagcgtccctcaatgggccgatgactaccggaagctggcgaaagaagctggcagcacctccgggaactgggaaacatcaacggttgaaattgcccgcggtcctatgctggccgcgacggaatcgggcgtccatattatcaccgtgatgtgctgtacccagttaatgaaaaccgcgctgctggaaaacctgtttggttatttcgcgcacctcgatccatgtccgattttgctcctgcaaccgaaggaagaggccgccgagcagttttccaaagaacgcataagcccgttggttagggtgacgccagttctgcgtaacatcataggtgactcaaagcagaagagttcgaaagaaaccattctgtataaagccttcacgggcggatttctggcgctggccggcgccggtagtccagataaccttgcgcgccgtccgatccgtgttctgcttgcagatgaggtggataaatacccgattactcgcgagggcgatcccattgcactggcggaagagcgaaccgccacatttggccttaactggctgtctgtgcgggcctgttcgccgacggttgaagatgaaagccggattgctgacagttacgaagattcagatcagcggcgggcctctgtagtttgcccccactgcgggcatcgacagttccttgatttcttcaaacatgttcaatggccgaaagaaggtgataagcacctgaccaaagcggccatgatccattgtgaatgttgtggtgctggctggtcagagggggagcgtctgcgggcattacagacaatccgatggcatcagaccaaaccgtttgaatgctgtggttcccgccattctccattaatggaatacgaccagaaatggcatgaaggcgatgaggggagtgttgatactgtctggcgctggtcggagtcggaacggcatgccgtataccgggcgatttgcccggactgtggggccgaggcactggataatcaccacgccgggtaccaggcgtcaaagctgtttagtccctggcagaaagataagccgtcggacattgcaaagaaatacctcgatgcgaaaggcgatccggataaagaacaggcctggtggaacacccagatggggttgccgcaccggcctaaccatgggaaacaactcccggttgatgttctgctggcacgccgtgaagtcttcccggccgtcgttcctgatggcgtggcaatgttaactgcgggcgtcgatacccaggatgaccgattcgaaatcacgatcactggctggggacgggacgaggaatcgtggtcagttgcgcatgacgtcatttatggcgacctggaaacagaggaaccgtggaagcgcctcgatgcgtacctgaaacagatatggcgacgcggcgacgggcgagggttgaatattctggctgcatgtatggactccggcggtcaccacacacaaaaggtttatgagttctgcaaagatcgccttgggcgccgcatctgggctatcaagggagaatctgcgcagggtggcaaacgcaaccccgtctggcccaccaagcgaccgacatcgaaaagtaaagccagcttcaggccaattatacttggcgtgaactctgcgaaagatgttgtccgtggtcgtctgcatcttgaaccgcctgctttaggtactgcaggtgcgggctatatgcatttcccggatgatcgtgacctcggatatttcaaccagctactggcagagcgactggtttacaaagtggtggccggacagcgattcagtgtctgggagcccattcccggccgggcgaacgaagcgctcgactgtctcgtatacagctatgccgcgctgtgcggactgaaacatatgggactaaaactcaatgttcgggccgctaaccttcaggccgatcccgataagttcctgccggcgccagccgagccagaagaaaaaatcaattacgaattaccgggtgccatcgtggatgaggctatggctcctgttaagcgtaagaacatttctaaactcctgccgcaataa

SEQ ID NO: 91492 - DNA, 264 bp, Enterobacter aerogenes
atgtttaatcgaaacacgagcttacttgctggtgggatgactgatgagcagctcagagacgctctgcagaaagcgcagcaggcttatatcgacctgactaccggcagccgtggtgtctcattctcctatacgcagggtgatgggacgcgctctgtttcctatcagcaaagctctctcgccgacctgttggcgctgattcagttgctgcaggcacaactgggaattgtcgcccggccacggaagccagtgaggttcagattctga

SEQ ID NO: 91493 - DNA, 1635 bp, Enterobacter aerogenes
atgaataaagtgcaaatccttggtcctgacgggagaccttatcaggcaccaaaacccagcatgttgacgggcggtagccgggtgccatatgacgccgcggattccttcagcgatcaactggcgaactggcagcccgcactatggtcaccggataacgaaattaatatctaccgtgaccgtatcgtttcccgtgcgcgcgatctggtccggaatgatgggtgggccaatggtgccataactcgcctgcttgataatgcggtcggtgccaatttccgcccgatcatgaagcctgactatcgtgtattacggatgatgacaggtaataaaagttttgacgcagtatgggcggaagagtacggaaaagcgctcgcttcccactggcgaacttgggcatacgatacaggtcgttattgtgacgttgagcgcaagttaaccgttccgcaaatgttgcgtctggcatttcgccacaagttgatagatggcgacgccctgatggtgcttcagtatcgcaccgatcgccttggcccaggcaaggggcgttatgccacgacggtgcaggttgtcgatcccgacagactcagcaacccgcagcagaattttgatatgccgaatatacgcggcggcgttgaaattgatgctgacggcgcgcctgtggcttatcacatacgtgaagcacatattggtgactggtggagtggcgccaaaacgatgacatggcgaaggataccgcgcgagacagattgggggcgtccgcatgttgtgcacgacttcgaccatgaacgtggggctcagcatcgtggtaatggcattctgactccggtggttcaacgcctgaagatgctggtgaagtacgatcagagtgagctggaagcggcaattctgaatgctatatttgccgcttatattgagtcaccttacgaccccgaaatgatccaatccgcgctgggggaaaacttcgaagagggattgggggcatatcaggatggtcgcgctgagtttcataatgatcgccgtttgacgctgcagaatggcgcccgcatgccaatcctttatcccggtgagaaaattacaacggtcaatgctgcccgtccttacagcaactttgaagttttcgagtctgcagtattgcgtaatttctcatccggtacggggttatctcctcagcaggttacacaggactggtctgatgtgaattacagctctgcgcgatcttctttgctggaggcatggaaaacgctcacccgccgacgtgatgatttttctatgggtaccgctcagcctgttctgacagcttttgtggaggaagttcacgataacgaggatttaccccttccgaataatgctcctgattttgttgatgcccgggcagcgtattctcgtgcccgctggatggggccgggacgaggatgggtggatccggtggcagagaaaaaaggcgccattcttggcctcgatgccggcctttccactctcgaaattgaagtgggtgaaaacgtgggtgaggactgggaagagattcttgaccagcgacagcgggaaattgagtcctgcctgaagcgcggacttccattaccgagctgggcgcaggcggaccagttcgccagccagacaattaccgatccggaggaaaagtga

SEQ ID NO: 91494 - DNA, 867 bp, Enterobacter aerogenes
gtgaatctacctcatctggcccagcgcctttttaatacaccgctggcgctgcacccaagtaaagctgaagtcatcatggcatccgttatggaccgttttggcatcagtaaaatcgaatcctctcttgccatggatgatgactggtatggatacgatgataaccgggggcgggaatcccgtagcgacccgggttatgacaatgtgctgggcgtcgctgtcatcccgatatgtgggaccctggtgcagaagctgggtagcctgcgcccatacagtggcatgacaggctatgacggcattcgtcaggccttcctgaccgcgatggaagaccccgatattacggggatctgcctggatattgattcgccaggcggcgaggtcgccggatgtttcgatctggtcgatgtcatttatggcgcccgcgggaaaaagcccatccatgccattctgacggaaagcgcctattccgccgcctatgcgattgccagtgcggcggaccggatttctgttccccgaaccggtggtgtgggttcagttggtgtgatcaccatgcaccttgactggacccagcggataaaagatgacggcctcaaagtcaccattatcacctacggttcccgtaaggctgaggggtcaccgctgagagaactgtcagatgaagcgctggcggctattcagcaggacatcaacaccatgggcgaattgtttgtgaataccgtcgccagaaatcggggaattagcgcaaaggttatcaaaagtactcaggctgcctgttttatggctgctgatggtgtggaacttggactggctgatgaggtgtgtcctcctgatgctgcgttcagaaacttacttgaaaaaacaggagcctga

SEQ ID NO: 91495 - DNA, 591 bp, Enterobacter aerogenes
atggcgaagaaaaagacatttagttttgctcatcttattggccgtggcgcgactgcttccgaagaggaagaagataaaaaggccaaaaaagcgaaaggccgtcgcgcggaagaggatgagcgcgaagatgatgccgaggacgatgaacgcgaagatgacgcggaagacgacgagcgtgatgatgacgctgaagatgacggtgacgacccggatgctgcggaagacgatgacgattccgaagatgatggcgatgatgaccgcaaagaaagcaaagcggtgaaaaatgcccgcgccgccgagcgtaaacgttgtgcccgtatcttcggcagtaagcatgctgcggcgaatccttcactggcagcgtcactggcctttaataccggaatgagctcttctgcggccatcaatgttctggcttctaccgcgccagcaacgcagacagcagcaacccgcaagctttcacttgaccaacggatgcaggcaagccatcaggcccgcctgaacccggatagtggtaagaaagagaacggtaaatcggcgctggtaaaccagatgaccggcctctacaactccattaaaggagagaaataa

SEQ ID NO: 91496 - DNA, 408 bp, Enterobacter aerogenes
atggatcaatttggtcagaatgcctttgcaccaggcatgaagagttcagtgtttatgccggatcagttggttgccggtacgctgcaactggtcacggataccggcactatcaccggcggcgtgtataagcgtggcactgtgcttggcatgatcactgccagtggtaaatacaccgtcagtgtgaaaaccgcaacggatggtagcgagacgccggcggccattctggttgatgatgttgacgcttccactcatggcgatcagtccggcggcctgtacctgatgggggagttcaaccagaatcatattatttttgacgattcctggactgcgtcggaactgaaaacagcactacgcccgctggccatcttcctgaaagacagtgcccaggcacctttaaccacctcctga

SEQ ID NO: 91497 - DNA, 1050 bp, Enterobacter aerogenes
atggaaaatatttatgataccagtgtgctggtgcaggtcgttcctaacctgaaaaccagtcagaactggctgcttgatcgcttcttcccgaacgtcgtgacttatgagactgaagaagtggcgattgacgtggatgtcggcctgcgtcgtatggcgccattcgtctccccgctggtggaaggtaagctggtcgagtcccgtaaataccagaccaatacgttcaaaccagcttatatcaaagataagcgcgcgccggatctgcgtaaacctatccgccgccagattggtgagcgtattggcggtgaatataccgccgcagaacgcgaaatgttgaacctgcagtttgagatgaccgatcagattgacatgatcaaccgtcgtcttgagtggatggcggccagcgcgctggtgtccggtaccgtcacggttgccggggaaggctatgaaaccaaagtagtggatttcgggcgctctccggatttaactattactctaagtggttcagataagtggccgctgacggttgccgcgggtgccactaatacccagccctctgatgatattgaaatctggcagacgcttttcctgaaagaatccggttccgtcgcgacagatctggtgttcacaagcaagtcatggcgtgctttccgactggacaccaccatcaaagataacgccatcacgttcccggcgctgagcccgtttggtaaccagattaacgctggcccacaggcgatgaagggcgctatttataaaggacgctggggtaactttgacctctggttatataacgactggtttattgacccacttgataatgtcgagaagccgatgatccccgacggcgccgttatcatgtctggcgctgatctgatgggtacccgcgcttttggcgttatcctggacccggcatttaactacggtcccctggcctatgcgccaaaatcctgggtgaaagaagatccggcccagcgtcttatcctgatgcaatcctctccgctggttattccgagccgggtaaatgcatccctttgtgcaacggtggtctga

SEQ ID NO: 91498 - DNA, 411 bp, Enterobacter aerogenes
atgcatccctttgtgcaacggtggtctgatatggctaaaacaaccaaaactgtactgggcgatgatctgaatgcggaaggcgccaccgaagacgccctgaatatcgacgacctgaatgctggtggcagcgttcatgagacccaacagcatgacgataaacacggcgaaccatcagatgatgaggataccgctgaagaagatgaccaggaagatgccccggagcctgagtttgtggtgctgaaagggaattgtatccgccatgacggtgaggtctatcgggaaaactcccttattccggtctccggtaaggatgccgagcgtctgctggcagcaggtgtaattgccgatgtccatgctctgcgacagcgcgcattatctgctgtgcgtggtgtgaaaatcacaacggagtaa

SEQ ID NO: 91499 - DNA, 360 bp, Enterobacter aerogenes
atgggcgtggactgggatttacatcttctgagtccgctccatggcgtgtttggcgatgagcatgagtaccgtccccgcaacggtactccttttacgattaacggtatttttgaccgtggctatgcgcaggttgcagaaaatcttgatggtgaatcagaaattaacacctccagcccgatgctgggtgtgcgtgatgctgaatttcgtcaattgggtaaaccgcagcctgccgtatctgaccgtgtgtttattaaaacggtcgggggtcaggtcatcaatcagttatttgttgtgtccaacgtcgaaccggacagccatggcggctcgcgtctcgttctcaatgtggcgaaaacccgatga

SEQ ID NO: 91500 - DNA, 546 bp, Enterobacter aerogenes
atgaatgcttccgcaatacgacaaatggtcgtggccgcgctgaaagataaaaccgccgccggcgatcgtgtgtattccccgcgtgactgggcaacttccccggacttgtaccctgcattgcttgttcagacgccatttgatcacaaaaaggcgcaggggcgaaataccccggccttcacctctctgaccaccgttcgtattaccggccgggttcaggagtatgacagtgaaaccactgatgatggcgccatgcgcgcggaggttgcactggaggagctccgggaacaggtggaaagggcggtgattaacagctacgagttgacccggaacatccagaaatatgcggaggttcgctcgacgattgatgttgatgcggatggcgaagcgcatatgggccagctgcttatcgaaattgatattgagcactatcaaggaccggaagacttttatccggtcgaaacggtgccgctggcggggatcgacatcaccatagacatgccggacggtacgccgcagccgggcgtaaaaatagaccttcaggagtaa

SEQ ID NO: 91501 - DNA, 186 bp, Enterobacter aerogenes
atgtttgtaaaaccgaaggacgggctcagcgttcgctgccctgtaaggggcgagcctttgcccaaagatggcgcggaggtgcctgataatacgttctggcgccgccgccttaaggatggcgacgtcagtctggtaccggtaaagggcgtgaaaaacgccgtaaaaaaagaggacgtaactaaatga

SEQ ID NO: 91502 - DNA, 1512 bp, Enterobacter aerogenes
atgaccgttccatttacgcgagttcccggcaatttacgtgtgccgcttttttatgtggagtttgataactccatggccaacacggcgacggctacacagcgaacgctgctgattggtcagatgctggcatcaggctctgcacaggaaaaaatcccggtaaaagtctcctctcctaatgcggtaagtgagctcaccgggaaaggttcaatgttgcatggcatgatgacggcgtatcaaaaaaacgatactgcagcggaggtatggatcctcccgctggccgatgatgcggactccatggcagcggccacaggcagtatcaaggttgccacacaggcgacagaaaccggcgttatctctctttatgttgctggcgttcgcgtacaactgaccgtactggcgactgacactccggctcagattgccactgcgctggtcgcggcaattacccgcaaaacggaactgccggtgacagctgctgtaaaagccgatgcaacggataccgtaacactgacggccaaaaatgccgggttagtgggcaatggtattgatatcaggctgaattatcttggtgttcaggggggagaggtgacgcccgcgggcctgacgctcactatcacgggcatgaccggcggtgccggcgcgccggatttagttgatgccctgggcaacctgcaggataagacctttgattttgtcatcaacccttatgatgacactgcatcactggacgccatcagagaatttctgaacgatgcaaccggccgctgggcatgggataaacagctctatggccacgcattcaccgccaccaacggtacttacgctgagcttggtaccaaaggggaaactcgtaataaccagcatgagtcactgcttggcgtgtaccgctcaccgtcaccgcgttatatctgggcggcagcactgacaggggccgcagcacccagcctgcgtaatgaccccggacgcccgctacaaagtctgcctgtttatggcgtgctggcaccggacctggcggatcgctttgagctgaccgagcgcaacaacctgctttacagcggcatctccacttacaccgtgggtgatgacgggacggtgatgattgaaaacctgattaccacctaccagaaaaacagctatggcgacgaagacgacagttacctgcaggtggaaacgctgttcagtctgatgtttgtcacgcgatatctccgcacggcagtgaccagtaaatttggtcgcatgaaactggccgcggatggtacgcgttttgcgccgggggcggcgattgtgacgccaaacataatcagagccgatcagatcgcggaataccagacactggtctttgacggctacgcacaggatgctgaggctttcgccagaaacattatcgttgagcagaacaaaacaaacccgaaccgcgtcgatgtgttgtggccgggaacactcatgaaccagctgcgtattttcgcgctgcttaaccagttccgcctgcaggctgaatcgacaggagcataa

SEQ ID NO: 91503 - DNA, 372 bp, Enterobacter aerogenes
atggctggagataccactaatcgcctggcaggtactgcgtatgtcaccgtaaacggggtaaccgtcatggtggaaggatcattcaagtatcagacctccacggttaaccgcaccacgctgacaggcatggacggtgtacatggctataaagaaaagccggttgccccgtatatttctgcccgtcttcgcgacagtggcggtaccaacgtactgggttttaacaaacagacgaacgtcaacgtgatcgccgagctggcgaacggcaagaccatcatcggtcgtgcgctctggacggtaaacgttcaggaagtggagagcgaagatgctgtgtttgatgttcgctgggaaggtcgggacgtaacggagaactaa

SEQ ID NO: 91504 - DNA, 279 bp, Enterobacter aerogenes
atggcagaacttgaacgcaccaaagtcattcccctcatcaagcctctggtcgatgaggcgcaaaaaacgcgctatgagcaactggagctgaaggcgccgacgctcagtcaggccgagcaattctacgaaaagcaggcatcgtccacttcgctggcggcgatgcgcctgctgatctcgctggtcacggatacgcgggaaagcgtgcttcagccgatggattttattgacttccgaaaatgcgaggagtttttgctcggttttttgacctggaagtcctga

SEQ ID NO: 91505 - DNA, 1854 bp, Enterobacter aerogenes
atgagtaattctttcgactttgagctggtggccagcgaccaggcgacggaagccattgagcgtatcaatgaggctatccgtgatctggaaccaaagctggataaaaccaaagaggggctccagttaggaggacaggagactctcgatggacttaacggctttatctcccgtttcgaaaatctgtccaaaaatgtccgtgataatgtgcagtatatcggggatatggtaccgccgctgaagatggtcggggaactctccggtaagctggcatcactgggcgtggttggagcggcgggatacgggctaaaacagattgcctacggtttccatgaggcctcaagggaggcttataacctcgatgtcgccgcgaaaaatgccgggatgcgggtggaagatttttcccgcctgtccggcgcaatgaggatactgggtgctgatggtgacagtgcaaattcctccatcgaggggatggctaaaagtctgaaggaggccgccagcggtgccaacagccaggtgctcggcgcattgtcccagattggcgttcagatccagaaaaacaatgacggatccgttgatacgttgagaacgctggaatcgatagcgcgcgttttcccgagcctgcggccagaccagcagaagtcggtttccgatgctctcgggctgacacctgaaatgctggcactgatgcgagaaggtgtaaggatgaaagcattgctggcgaaatccgatgagcttggtctgacggttgacccggagcttaaccggcaattgtccgaggttaacggctccatgaatgagctgggcgcagcatgggatggactgaaaaatcgttcgaaaaattctctgtttaagggattgctttccgatggttcggtgaaagacggcctcgaaggtgtaaccgacttattcacgaatggcgactttaccgggctgtcgcatgcgctggggtttatcagtagcaaagatgccgggaagctacgccgcattcagggtgataaagcgctgtataacaccctttcccggcgagagcgcggggcggttgatgccggctttatgacagatgccgtcaggaagcgttacgacgcgaaatatggggctggtgatcgggctgaacaactccgtaatgatttgtccatcatcctgccagcaggtgctgcagctccacgcggggaggtgaattataaccagccatcgaatcaggcactggggctgaggaataataaccccggcaatctccggatagcgcccaatgctacaggaattaatcgtggatttgtcacttatgacaacagtaacgatggtctggcggcaatggcccggcaactgatgttatatggcgatcgtgggaagaacacactgaacagtatgatccacacgtatgcaccgcggtcagaaaatgatacccagtcctacatcaattcagtatcagccgcgacgggattccagccccagcaacagatggatctccataatccggaagtactgaaatctgtcatggctgccatgattcagcatgagaatggcgcgcaaccttattctgaggatgagatacgggcggcaattcagacggctataagtgacccacgctggtcaggtcttcgtgacagtagcgtgctcagccaacagagacagaacatcctcgcacctcaacctgataagtttgacagctcttctatcctgaccgcttccggcaacggcagcgaggccgccagcgagaacctgacgcgcgctctcaaagaggcgatggccgatcagaaaatgaagctggaaatcaccatggtcaatgataagggtgagaagaaaacctataacgtcgaggataacggcagaataacaaccgccatgaattactaa

SEQ ID NO: 91506 - DNA, 1401 bp, Enterobacter aerogenes
atggcaattatccaggatgcaataacttccttgatgggcggaggcggtagtgatgactggttgagtcaattgcggccagcatctttccgtggcgtgccctttgctgtggttaatgaagaagggagtcatggccgccggcaggccgtccacgaatacccttatcgagataccgcatgggtagaggacatggggcgcggaacacggcgttttattatccgtggttttatcgtccagaacagcctggtctacggcggcggcgatgttatttctcagcgacagtcatttattaatgcgtgcgaagctaaggggagcggtacgctcatccatcccacgctgggagagatgacggtttccattcctgaaaacgggttaagactctccggctctgccgacaatggtcgttcgtttgaatttaccctgatggtaattgagtcgggtttgaaggttttcgccgttacagatagcaccgccgctggtgataccgttggcactaactatctgaaactggtaagcacagcggttgccagtactcttgcgagaatcaaaagtgaaatccgtggcgtgacgcaggggattcagactatcaagggaaccgtgacgttctggaccaatatggttgataacaccatcagtgaggtaacaaacgtcagtaacgtgctggattctaccttcggaaataatcgttacggtcggtacagcaaggggaccgtcggcgggagttcgtcaggcataaacggcaatcgtgacgctgacgactcagaagactatcaggccttgtctgaacagatatccgcgcgggcggtgatggaccgccaggctgtgctggatacgactgctgcactgaatgattctgcatcggtaaatgaattagttcagggcgttgcggatgtgatcaatcgcattctggccagcgccggcagtgtgaatgacaaaattgcagtgtttgaaaaactggcggcttcaaccagtaccgaatatcagcgctctgacagcagcaagcaactggctggcacaatgaacacgctgatcattgtgctgtccaccggggcgatgactgatgctgccgcagattacaatcctaccagccgtaatgaggccgaagacatcactcaacgcgttgccgggcagctggatacagcattactgctggctggcgaccgtggcgatgatgatctctacacggcattaatgggcgttagaaccgctttcctgaatgccatggctcagatttcatccgggctgagtgagttaatgcaaatcaatactgcggcgccggttcctgctctggtgctggccaatcgtctgtatcaggatgcctcgcgggcaaatgaactgatacaggaggccagcgtgccacatccggcatttatgccgacgacgatgaaggtgttgagacaatga

SEQ ID NO: 91507 - DNA, 1086 bp, Enterobacter aerogenes
atgagtacggataacgaccaggagatcgtctcactcaccgttgatggaaaaatcattgagggctgggactcggtaagggtaacccgtggtattgagcgtttcccctcagattttgacctggggctgatggactatttcccggggaatggccagaagcaactggtgacagaggggatgccctgtcaggtgaagtttggaagtgacctggtcataaatggctatgttgacgactgggcgccatcgatttcccggtcccgccatgaagtcagagcctcaggccgtagtaagtgcgcagatctcgtggattgttctgcagaatggccaaataacgttatcaataacagtaatgcgcttgatatagcctcccgcctggcatcccattacaacattggggtaagtacagacgttgatgatctggtgaaagtcccgcagttttccctgaactggggagaatcgccacaggaaatacttgatcgtgtttcccgctggtcggcattgctttattacgatcagcctgacggtaacttatttctgacccgagtgggaacaaagcgcgcggccagcggtatagctgaaggggtaaatatcgaacaggcttatttccgccgttcgatggcggaccgcttttctgattacgtcggtgtatcgatgagcatttccccgattgcaggattctcgccggatacggcttatgactcggtgacactggcgacggcacacgatcctgaggcagccagtatgcgttaccgaaaacggatcattattgttgaaagtacgctgatggcttcacaacaggcgcagcgcgcgattgactgggagatgaatcgacgatacggccgttcccgtcagttgacggtgacgattgactcctggcgcgataaatccgggaaattatgggagcctaatactctcatcccggtcaacataccgagtctgcaactgcctgacaccgaaatgcttatcgctgaagtcacttatatcagagacagtgacggtacccatgcgcgtctgtatctgatgcctccggaggcgttcagtgtccagccttatgctttctaccagcagataccaggactgaaccaatga

SEQ ID NO: 91508 - DNA, 582 bp, Enterobacter aerogenes
atgaatcaaaatttaaagaaaacggccacgcgtatagccggcatgctgggtattggtcgtattaccacgcagaaagatagtggggttgtacaggaaatccaataccagaccccgctggaagttgccagcgccccacggttctctgattttggtttttcgtccgggttgccggcgggatctgatgtggtcattgccttcctgggaggggaccgctccagtcctgttgtcattgcctctaaccatcaacgcttccggcataccgggcttaagcctggcgaaaccgtcgtctataaccagcaggggatgaatattcatctgactgaggctggaattttcattgatgcgaaaggtaaagatgtagagatcaacaacgccagaaacatcaccgcaacggcaacggaacaagtaaagctggttaccccgaaactcctggtgacgggtgacatcatcgataactgcgagacgaataattcaacgctcaaagagctgcgtgatgctcacaacgatcatgaccattacgttaaaaaagttcagtccggcgatagcacgatctcaagcgaaaaaacagagagtcaggtatga

SEQ ID NO: 91509 - DNA, 450 bp, Enterobacter aerogenes
atgagtgatatttcctctttctggaacgttgatgcccttcatgcggactggcaggccggaaacggcatcttaacttcagagaatgacttgcacacggcagtaatcatcagtctgtttactgatgggctggcacgtgccgacgatgattatgaaggaactgatcgccgcggctggtggggggatctggagaatgaccggaatattggctcaaggctgtggttactacggcgtgaaaagttgacacgcgaagtggcgatgagagctgaagattatgccgaagaggctctggcctggatgaaatcggatggtattgccgctgaaatacaggcgcaatcggaaatcgtcttccccaacagactgaatctgatcatccgatatttgccgccggagggggactggcaggaattcaaattcttctggttatgggagcaactgaataatgccatttaa

SEQ ID NO: 91510 - DNA, 1149 bp, Enterobacter aerogenes
atgccatttaaacggaaaacactgagcgaactccgcgatgagaatcgccagtttatgcaggcagaattggaggacgtcggcgcactgctacggttcggaaatctgaaggtactggccgacatggacgcgggtatggcgcatttgcattatgcctatctcgattacattgcccgccagtgtacgccgttcacgtccaccgatgagtggctggccgggtggatggcgttaaaacagacttaccgcaaagcggcaaccgcggcccactcgccagctgccgcaattaccggaacgccagggcgagtattagcaaagggctctgttatcaaccgtgcggatggataccagtacatcacggataccagtataaccattgactctacaagcagcgccacggttgctgtgactgcaagtctgccggatgtctcggaggatgtcaccgggggcggcagtcggggaaatgcggatgccggaacaatcctgacactggatgccaatgtaccgggtatcgatagtgaggttacgttaattgaacccgctaccggcggcgcagatattgagagcgaagaggattttcgtcagcgtggactactggcgtttcagaatccccctcagggtggaagtgatcccgattatcgtaattgggccctggcagtttccggcgttaccagagcatgggtccgccggcgggggatggggccagggacggtcgtgatttacatcatgtgtgacggcagcgacaaaacaaatcatggtttcccgatcgggactgatggtgtctcgcagcttgaagagtggggggcagtcaaggctacaggcgatcagggaagagtggctgattatatgtatccgcttgcaccggttacttccctgaactacatctgctcacccatcgagaaagtgattgatttcgaaattagcggtatatcaggtgcagacagcgagacgacggcagccattgctgatgccattgatggggttctgtttgaatctgcaaatccacttggtacaggaaaaatatacctctcagatctgaaccgtgcgataggggatgtctccggaactgccggatttattctggtttcaccctcagtgaatattgtgccaggaataggagagctggctgttcgtggcgaggtgaactatacatga

SEQ ID NO: 91511 - DNA, 678 bp, Enterobacter aerogenes
atgagtcttttctcgaccgacgactaccttcgggcgctgcaggcgctaattccctccggcagggcatggaccagagagccgaaaacagttcaggccgcagtgctacgcgcgctggcggccagttttcagcgaagtgataacgacgctcttggattattgcgaggggcattcccgaaaacagcgaccatcatgctcactgagtgggaaaaaacgctgggtttacctgatgactgttccattggtgaagtggacacgattggaaagcggcagagcgcggttgtctctaaattaatcagcactggcggtcagtcaaagagttattttatcggtattgccgctgcgatgggctatgtcatttctattaaagaataccggcaggcgcgcgcaggcttatcagtctgtggtgatggtttaaatggtgatgactggccattcgtctggttggtcgaagcagaagataccacaatatcctatgcgcgcgccggacttagctattgcggcgatccactccgttcatggggaaaccggcagcttgaatgccgtattaacgcgctggcgccatcctatacgctggtgaagtttggatatatctattttggttttaatgatgaaggtgtttatgacatcacgccggagttttccagaatgtttgatgtcgcctcaggatatattccttaa

SEQ ID NO: 91512 - DNA, 870 bp, Enterobacter aerogenes
atgagaaaggttggaagtactacagatacggcagatgcgaatggcgagtacacaaatggtaatgttgcacaaggcattgcacctacaattattaatgctgaaatgctaaatacatttcagcgagaactcgttaatgttgtcgaaggtgccgggattgagttggatccatctaatgattctcaggtactggaagcaatgaagaaattgctttcaccgggacgattattaaatgttaaaaaattcaccacgtcagggacttatacaccaactcccggaactaaatcgatcatagttgaaggggttggtggcggtggtggtgcaggaggctcctttaaaacccagacagggtattataccggaacgggaggggggggcgcaggagggtactttaagacgagaatcacgagtattcctgcatcagtaaacgtaactgttggaaaaggaggaaaaggaggtgttggcggtacttcaccaactgctggagaaagtggagggcaaacaagttttggaacatttgttcaggcttcaggtggcagcggttcttcggcctcacaagccgcagtaaattctggcgtagcatatcaattagggtccggttttggtgggtttgccactggcggaaatattttaaattcaagaggtggtgatggtagcgcatctttgatagttaagaatggatctggcgttagtggcgctggtggtgcaagtcactttgatattggaggttcaagccagccttggagtaattcaggcaatcctggtggtataggtgctgggggcggaggatcaattcatcaagatggtagttcaatacagccagatggaggtgatggtggaaacggagttatttttgtatatgaatattcatag

SEQ ID NO: 91513 - DNA, 516 bp, Enterobacter aerogenes
atgagcgatttacttgtaaaatatcaacttaactattcatcactactctttggttatttattgctagggaagttagtttacgatgcatgtgaaaaacaattatcaaaaaaagcactggccttgtcacttaccttatatgtagcatttagcttaatcacagcagtcgcaactcaaaaatggagtgatgttaacaataaaccagatgcacttttctactcaaatttatcaccatttgtagtagtagcttcagcatcttttttttcatttttattattaataaacaaagcaatgccttcaattcataaagtgacaaaatttatatctaaactaagtcttggcgtctattgcatacatatagtatttctagaattatttataaaggcattcatcaaaaactcaaacaagctaaatttaaatattatagaaacggcattgcttgccgccttggtgtttttaatatcaatcatttcagtctggattttgcaaaaaataaaaccattgcgctttatactctaa

SEQ ID NO: 91514 - DNA, 501 bp, Enterobacter aerogenes
atgtcggcaataaataaagagatgtcctcaggtatcgacttggcacgctcaatatcttgcttccttgttgttcttcttcatgttgcaggatatggattttatgaaaatggccctaattggttttcagccaatttgatagactctttcacaagagtatgtgttccagtattcataatgataacgggagcacttctaatccgagatgagccatcaaaagcagtaaaaaaaattaccagagttgttgtttgcatttttttctggtcagtattctacactattgttgatgggataaaattcaatagcattttgaactggcttacatctattatacaaacaccacaaaaataccacttatggtatttatatgcgtgcatcggattctacatttcaattccagttttacgaaagttttatatacactcagaaaagaatactgtatacatcattacagctttatggataattatatcatgcgtgccgctcattgaaaaaaccacatga

SEQ ID NO: 91515 - DNA, 1242 bp, Enterobacter aerogenes
atgataagcctacttcactggtctgtttttttattactatttattccaaaaataaatcttatttctgttggggggtttaatgcaggattaaggctagatgacttaattattgctttctgggcagtgatttttgtttcatcattctttatgtctcgcaactattctttgtctaaaattgaagtgcagtattatatttttattttaattatttccttgggtacattatttacttccgctgtatatgcccaaggcactatcttattcccattgaggtttttggaatattttacgttttttataatgggtttgaagttaggccagaaagatgattatatttctggtgtcatgaaagttatctttttcgctaatattgcggttagtttgctccagtttgtggggataatcggagggtttactacaacagggtaccgtgattcagtttcggcaagggtcataggcctttgcagtggtccttgggagttaggcgtgatacttaatttcctgacatgctattttttatctataaaagttaaagagacatttaagtaccttgtattctttaccgcattagctgttatattcttgtccgggtcaaggatgtcttttgttgcgcaaatgattctaatggttatttatgtttatcagagttcatcttttgttggtattttaaaaagagttttgatattagcaccgtttgttgcgattgcattggtttttgttgccgattcgacagtggcctcacgctcggaaaaccttttcaatatggataatattgtatccatcccggaaacgtatagaacaacacaattagttcacggaaacccggactggtctttatttggtgtgctcagtggtgatgatgttgatgctagttgggctatcaggtcgttgaaatgggtatatgcggttaaattatttgtatccgagtggaccttttctttcactggcgtcggtgctggtacatttggtaatgctctggatggcggatggttacgtctatttacagagtgtggggtcctgggttttgtcgcatttattatgttcatgaagcagaatagctccgtttcgaatatgaataagttgatgttcatttcattttcgataaacatgataatgattgatatttatatgtcttataaagtcatgtccttcatgctgtttatttttggttacatgtattcgaaatcaaaaacagatgagccattaccaagaaataggactattaaatttatcagttcatga

SEQ ID NO: 91516 - DNA, 1134 bp, Enterobacter aerogenes
atgctggcagcatcctcagtattggcatcgcaacaagcgttagccgcacctttaggcaaccccaaaacagtacgtcccgaagattttggtgcaaaaggggatggtttggctgatgatacaaatccaatccaaaaagcaataaattctggtgcagatgaaataattttctcaggtaaatacaaggttaccccccagtcctttcctggcattcccggcgtcattggtcacaactcagtatgtttagatgtaaaaagcaaccaagtattgaaaggtcaaggaaaaatcatcttgggtaaaagctcacatggtaatagcggagcaatattagccaacataaccagtcaacaaataaacgacaccactatatcggtatccattgatggcgggcaaatcggaggcaaaaatggattttctgggattgttttaattaatgccaaaagatgtgttattggtaataatatttcgatatcgaacatgagctataatggtatacgtttagcaagaagttcactctcctgtagaattcaagatgtgaatataagaaatgttggctatataggaattcaagcccagcaaccaagaaatatatttgtgtgtaacaatataattgaaaatacaaaagataacgccatagatttcgaatctaataaaggttatcaagatggatatatccatgacaacaccattacaaagtgcaagacaggtatttttttagaatctggtggaaattgttcaatttataacaataaaatcagtaaattttatgtggcgggaatttttttaaacagaataaacacccctgccaataacgttagaatttacaaaaatataattgacggcacaggaaataaagtacaaaaaggcggaatagcaataaacaataatatacgaaccgcaactattagtagtaatacgttcaaaaatctcgattattctatttgggccaacggtaagatatcccatatcacagttggtgaaaataaaaatataaacattggcaaatcaataattcgggtagggaacgtcaaaaatgacctaaccgattccgtcgtaagcaaacaagaaatgaataaaagcaccactcctatcattgacaatgatatatccaattacaaaggattggttataaaataa

SEQ ID NO: 91517 - DNA, 1011 bp, Enterobacter aerogenes
ttgcgagttaataaaaatatgaatgaactaaaaagaaatgccgtatccgttattattcccgtatacaatgtaagccagtatgtggtacaagctgtagattcggttattgcccaaacagtccaaccttatgaaattattatcgttaatgatggatctactgataactctggtgagttaattgaagaacattatggtgatattccttacgtgaccattatccatactaaaaatcaaggtttgggtgaagctcgtaatgttggcactcgagtggcaaaaggcgactatatttactattttgattcagatgatcttctggaaaagaatctgcttgaagattttaatcaagcattatctaaatataaagatattgatatttttgcattttctgccgagtcgtttattgacgatatccaaaagtctgagaccaaacataagaagttgcctcaatattggcgtggcgagaacgtcttgtatccggatggtgtcaatgcttatactggactatcaaaaaagggagcattttacccaaacgcatggatatatatttttaaaagaagtattcaggttcaacatgagctattcttcaaaccaataatacatgaggatgaagaatttacgccaagattatttttcgcatccggtagtacttatgtcacagagaacgtttactttagacgacgtatgagacctggttcgataatgcataccaagcgcaatgaaaagaatatcgttggatatcttgaaagtatttatgcgcttgagtcattaaaaaataaacataaaaatgttgaatctagctatctccgaaccaggattatcagccatttaatcagcattcagatgattaaacataataatgctttggttctatcgagagagacagagtctgagtttcaaaaactcactcaaaaataccatagtattttcctgtccttagcgaagagaaatatatttatgtataagtcatgtcgattcataatcagacgtttgggatataaagcgctgctttag

SEQ ID NO: 91518 - DNA, 957 bp, Enterobacter aerogenes
atgcatcatatggatttattaaaaaataacttgtctgtcattgataacgtagtacctcgtggaagtcgagttgtgtatttggatattcccttacatttgaatgtaggtgatttacttatttataagggaacagagcaatttttcaaggaacggcaatatcaagttttagcaaggcgtactgatagaacaagcctgaaatttgtgcaaaacactaaagatctccctgaggatgtagttattttactgcacggtggcggtaactttggtgatttatatccacatcatcaaattttaagggaggcggttgtacaaaaattcccaaacaataaaattgtttatatgccgcaaacagtacatttcaagaatgctgaaaaaatggagcagtcagcaaaaattatcagcaagcacaataatttaaccatattttgtcgcgacacaagaagctataagattttgagtgaaaacttttgtgataatgttgttctttgccccgacatggctcattctttatggggcgtattccctacgcaaaaagaaaacgacattaagcgtgatacattatggatgattagaaaagatattgaagaaaccaatgttggtagcctggccaatatccctgaaccatctaaatttgaagactgggaggatatttgcacagataaagatcgttcctttatgaacttattattcaaattcgaacgcatcaataatttacttggcagtaacctgatacctacagtcacaatgtgggaaaaacatacagataaattagttgaaagggtaaatgcatttttcatgtctcatgagcaggttgtaacttcgcgaatgcacgggcacatattatgctgtttacttggtgtgaaaactaagttattagataactcatatggtaaaaactcaacatattttgacgcttggacaaaggatgtaccaaattgcgagttaataaaaatatga

SEQ ID NO: 91519 - DNA, 1473 bp, Enterobacter aerogenes
atgagtttacgagaaaaaacggttaatggtgctaaatggtcagcaattgctacagtagcaagtatagggatatcatttttacaaatcacacttctggcccgtattatagaacctcatcaattcgggttattgactatatcgatgctagtcattatgatcgcggatacaatttctgactttggtatctcgaattcaattattcaacgaaagaatatctccgaagttgaactgtctacattatattggattaatgtaatgataggccttttagtattttttttggtgtttgtattgagtggcctgatttctgacttacttaatcaaccagaaataaagcctttggtacaattacttgcatttgcatttattataatacctcatgggcagcagtttcgagcgttgttacaaaaagaactcgaattttcgaaaataggtcttatagaaacttcttcaattttgattggatttgcaattaccatgtgctctgctctgtattatcctttcgcgataacggcgatatggggctatctctgcatgtcgatatgtaaaaccttgatgtttgccgtggttggtaggaaaatatataaaccaatattacggtttaactacaaatcagtatcttcaaatataaaatttggagcttatttaacagctgatgctctggttaatcaattaaattccaatattgctactgttatactttccaggagcctgggggcggtaatcgctggaggttataatctggcatacaatgttgctgtgctaccaccttccaggcttaatccaatattaacaagagtattatttcctgcattttcgaaaatccaggatgataaagaaaagctaagaactaatttttataaactattatcttttgttggtttaataaatttccccgttttattaggcctgttgactgtttcagataattttgtaattactattttcggtgagaaatggcagtttataactcctatcctccagatcttatgcatcgtaggattgcttcgttctattggaaatccaattggttcattgttaatggcgaaagctcgagttgatattagcttcaaatttaatgtttttaaattgttcttgtttattccatcaatatggattggagcaacctatttcggtggtattggtgctgcattaggctttcttatagtacaagttattaatacttatcttagttacttcattttgattaagcctgtactcggtagcagttatcgtgaatatattcagagcataacactccctttagtattaacgatcccaacagtagtagttgcttggttagtaggtactataaatatatctccactgccagtgattatgcttattttgcaagtgtcttctggcgttatcacctttgcaataacattagtgtttagtcgtaatgactttgttcgtgagattaagcaacaagtagttaaaaatccaaaacttcgtcgacttttaagggcttaa

SEQ ID NO: 91520 - DNA, 1407 bp, Enterobacter aerogenes
atgtctaaacagcaaataggcgttgtcggtatggccgtgatgggacgcaatctagcgctgaacatcgaaagccgtggctataccgtctccgtattcaaccgctctcgtgaaaagaccgaggaggttgttgccgagaacccaggcaagaaactggttccttattatacagttaaagagtttgttgaatctcttgaaacacctcgtcgcatcctgttgatggtcaaagcgggggcaggtacagatagtgctatcgattctttaaaaccttatcttgataaaggagacattatcattgatgggggaaacaccttcttccaggatacgattcgccgtaaccgtgaattgtctgcagagggttttaatttcatcggaacaggtgtctcaggcggcgaagagggcgcgcttaaaggtccttcaatcatgcccggtggtcagaaagaagcttatgaattggtcgcaccaattcttgagcaaattgcggcccgggcagaagacggcgaaccgtgtgtcacatacattggtgccgatggtgctggtcactatgttaaaatggttcacaatggcatcgaatatggtgatatgcagttaattgcagaagcctatgcgctgcttaaaggcggactttccctatcgaatgaagaattggctgaaaccttcacagaatggaataaaggcgagttaaatagttatctcattgatattacaaaagatatttttaccaggaaggatgaggagggtacctatcttgtagacgtcattttggatgaggctgccaacaaaggtactggtaaatggaccagtcagagttctttagatcttggcgaacccttatctttgattactgaatcagtttttgcccgctacatttcctctttaaaagaacagcgtgttgcagcatcaaaggttttaagcggcccagaatcacaatctgcgggggataagattgcatttgtcgagaaagttcgtcgtgcactctatttgggtaagattgtatcttacgcacagggcttttctcagttacgtgcagcgtctaacgaatatggctgggatctcaactacggcgagattgccaagatatttcgcgcgggttgtatcattcgagctcagttcctacagaaaattacagatgcttacgcgcaaaatccgggcattgccaatcttctgttagcgccttacttcaaaaaaattgcagatgaatatcagcaagcacttcgcgatgttgtttcttatgccgtccaaaatggtataccggttccaacgttctctgcggcagttgcttactatgatagttatcgttcagctgtacttccagctaacttgatccaggctcagcgggactattttggagcacacacctataagcgcacagataaagatggagtattccacactgagtggatgagttaa

SEQ ID NO: 91521 - DNA, 840 bp, Enterobacter aerogenes
atgagcccgacttgcttggtaattattgttacatataatagccagaaacacatacaatgggctattgatggactaaacaattctgagagttcacttgttatcaagattattgattcgggttctaccgatactaaatatcttgaatgcttgcaaagtaagcacccattatctatagaaaaacatgagaatatcggttttgtagccggaaataataaagccattgagcaggagcatgggtgtgattgggttttacttttaaaccctgatgcaagaattgaaggccgggctctggatgatttgttggctattgctgtacgggaagataatgctgatgtcggaatattttctgttccgttaataagatatgacataaaagaaaataaaccactggaattatatgattctttaggtattaactgcagtaaattaggtaaatggcaagatgtcggttctaatcaaccgattaaatcaattaacattaatgatattgaaaaaatgcctgaggcaatttgtggggcatttatgttaatacggaatgatgccttgcttcagtgtaaagataaaaaaggtcttattggttttgaaagatcttattatatgtacaaagaagatattgaactttctcagcgtttcaaagcgaatggctggaagctacgaatcgccgaaaatttaagtgcttaccattgtcgtggctggaatagtacacggagtgatacgccatattgggctcgatatcattctgctgttaacgatttagatcttgctataagatataaaaatcgcgcattcccttatgcattactcaaatatatctgggtccgtttctttgaaaaaagataa

SEQ ID NO: 91522 - DNA, 867 bp, Enterobacter aerogenes
atgcttggatgtcaaccccttgttagtatatatataacaacgcacaatagagtggaaaaattgaagcgagctatttgttcggctcaaaaccaaacttatgcaaatattgaaatcttaatttgtgatgatgcctccaccgatgaaactcaatcatttgttgaaaaagttatgatgtctgaccatagagtacaatactttaggaacgacagtgcggcaggagcttgtgcagcaagaaatttgggtatatttggggctcaaggagagttcattactggtttagatgatgatgatgagtttactcctgagcgagttgagctgttcgttgcaaactgggacgaaaaatactctttcctttgttgcaattttattgagcgttatagagacggtaaagaaagtaaatattataaaaataatatggagtcgtattttaattataaagatatgcttttcgataatacggcgtctaatcaggtttttacactaacgggtcggttagttgaaattggtggttttgatatcagagctaagcgcttgcaagactgggatacatggttgcgattatcacaccagttcggtcaatttaaacgactgaatgctgcaacatatattatgcatcatgatcataagattgatgaaaaaagagtatctaaaagctatccacttagtaaagcattaaatgatttgaaggacagaaatcgggaattgtatgttggtgaggatgcacgattcatggaatatattattagttctgtgaggggcgaatccactctactagaatccatgaaatggagtgcaaaaaagaaaaccgccaggcacattgctaagcatctcgctcaaaacgtttttaagcttaaaaaatatgaatga

SEQ ID NO: 91523 - DNA, 912 bp, Enterobacter aerogenes
atgaaatattttattgcaataccaacctataatggtggcggactttggcatcaaacaatcaaaaatataactcaatattctccagcagatgtatttgtccatgtaatcgattcaagtagcaaggatgatacagcatctttggcttctgaagctgggtttgatattttgacaattgcgggcgatgattttaatcatggcggaacaagaaatctggcagtaaaagagtatatagatgattatgatgttgttatatttctgacgcaggatgctattccagaatctggatttatcgaagagattatttccgttttcgatgacgaagaagttgccagtgcgtatggtagacaacttccgcatttgaatgcaaaccctattgccagacacgcaagaaattttaactatccaacaaaaggctatgtcgctgataaaacaagcatagctaagatgggcttaaagacagtattcatgtcgaactcattttccgcgtacaggctttcggtatttaaaaaacttggcggctttccttctgatactatattgtgcgaagacatgttttatactgctaaggcggtcatggcaggttataagaatgtttatgctgcgaacgctaaagtacgacactcgcataattacactccaattgaagagtttaagcgatattttgatataggagttttccatacggatcaaccatggatacgtgataattttggtggtgcaggaggagaagggactaaatttattatttctgaattaaaatttctaattgctaatggtatctcatggttgccgctggcgatgatcaacaattttatgaaaatcgtaggttacaaattggggcaaaattataaaaaattacctaaggtgatcatcaaaaaatgtagcatgcataagcgattttggaaattttaa

SEQ ID NO: 91524 - DNA, 1428 bp, Enterobacter aerogenes
atgtcacttctcgtaaggaatatattagtcagcacatcacttgcgttggctgattttattggctttattgtgtctccatacctggctatggggatattagtatttattgcaaatgaaagtgatagggtgacgcttattcatcagacggatggatggtttcttttacatctaatactggcggtttgttgcgttgcttggtattcaatgagacttagacattatttttacaggaaaacattctggtttgaattaaaagaaatcctacgaactttagtcatttttgcaattatcgaaatagcggtaatggcttttaccacctggtcattttctcgtttcttatgggttttgtcgtgggtatttattttaattttggtaccagtattaagaatgttaactaaacgagttcttgatacttttggtctttggcgcagagatacatgggttattggtaacggtgctaatgcagaagaggcatataaagcaatcaatagtgaacggaatctcgggctatcaatagtaggttttatctcaagctcccaatatgtaaaagataatgagtctatagatggaattcccgtattaccaaatagtattgcatggttaaatacaaaagatactaagacacaatttattgtggcagtcgagtctgatcaaagtgaaattagaaatacatggttacgtaattttatgattaagggatacagatatgtatctgttattcctaccttacgagggatgccattagacagcacagatatgtcattcatattcagccatgaagtgatgatttttcgggtgcaacaaaatctggcaaaatggtcttcacgaattatcaagcgtatctttgatatcgtaggctctttagccattataatactactatctccagtactgctttatatttgttttaaagtgaaaaaggatggcggtccagcaatttatggacatgagcgcataggtaaaggaggacggccgttcaaatgtttgaaattccgctcgatggtgactaattccaaagaggtgttggaagagttgctagcgacggatcttgctgcaaaacaagaatgggaccttacattcaaattaaaaaatgatccacgagtgaccaaaattggtggttttttacgtcgcaccagtttggatgagttgcctcagttgtttaatgtactgaagggagaaatgagtctggtgggacctcgtcctataatcactgctgaattggagcggtataatgatgaggttgattactatttgctcagcaagcctgggatgacaggactttggcaggttagtgggcgtagtgatgtagactatgaaacgagagtatattttgatgcctggtacgttaaaaattggtcaatgtggaatgacattgcaatattatttaaaactattgccgttgtgctcaaaaaagatggagcatattaa

SEQ ID NO: 91525 - DNA, 2163 bp, Enterobacter aerogenes
atgtcatcagtaacaaaaaaatctaccactgtagattcaaatgaaatcgatttggggcgccttattggcgaactgatcgaccatcgaaaactaataatatctattacatcattatttacactgttagctctaatctatgcgctttttgcgacacctatttatcaagctgatgcaatgattcaggttgagaaaaaacaagcaaatgcgcttttaagtaatttgagccaaatgttgcctgacggtcaacctcagtctgcgcctgaaatagcattgttgcaatcccgtatgatcttaggaaaaactgttgacgatcttaaccttcaaacgatagtgacacaggaccattttcctatatttggtcgtggtcttgctcgcttaatgggaaaaaaagaaggtaatgttagtatatcaatattttctcccgtcgcgaaaaatactaatgaaacgcaagtatttaagttaaaagtattggataagactcactaccagttgtctaatgacgatttcaagtttgagggaaaagttggtgagttagtcaataaaaatggttatttaattaaagtcgactcgtttgttgcttcaccggatgccgagtttactgtttcatatgttccacgcctaaaagcaatagctgatcttctgaataactttactgttactgatgaaggtaaagatactggaatcttagctctgactcttattggtgatgatccggatttagttaagaaaattgttgatagtatcagcgcaaattacttagcccagaatatctcacgccaagcagctcaagatgcgaaaagtttggatttccttaatatacaacttccaaaagttcgtaacgacttagatgttgctgaagataagcttaatacctttaggcgtcaaaatgattcagttgatttatctttagaggctaagtctgtacttgaccaaatagtcaatgttgataatcaacttaacaccttaactttccgtgaggctgaaatttcgcaattgtataccaaagagcacccgacgtataaggcactaatagaaaagcgtcagactctacaaagcgaaaaagcaaagttaaaccaacgtgtttcaggcatgccaaaaacacaacaagagattattcgacttaaccgggatgttgattctggtcgtgcgatttacatgcttcttcttaatcgtcaacaagaactcaatatttcaaaatcgagtgcgatcgggaatgtcaggataattgatgaagctattactgagccgcaacccgttaaacccaaaaaggtattaatcgttttaattggtattgttttaggcggaatggtatctgtaattttagtactgtttagagtttttttgcgtaaaggaatcgagtcgcctgaacagttagaagaactaggtataaacgtatatgcaagtattcctgtagctgaaatatattcgcagaaaaaagttcgctcaagaagtttattcgaagggaaaaaccactctcttcaattgttggcaatagaaaatccagcagatttagctattgaagctattcgaggattgagaactagcctgcactttgcgatgatggaagcaagaaataacgtattaatgatttcaggcgcgagtccaaatgccggaaaaacatttgtaagttcgaatcttgcagctatcatttctcaggctggaaaaaaagtcctatttattgatgcggacctacgcaaaggttattcacataaattatttgacgttgataataacaaaggcctttctgaatatttatctggtagagcttccattacaaatgtcctaaagccgctcccagcattcggttttgatttcatatccagaggcattgtgccaccaaacccagcagaacttttgatgcataggaattttggtgaattaattaattgggctaatgaaaactatgatttggtaatcgtagatacgccaccaatattagccgtaacagatgcagcaatcatcggcaattatgtcggaacgacattgctcgtaactcgttttgaacaaaataccgccaaggaaattgaagttagtattaaacgattcgaacaaagtggagttgtagttaaaggttgtatccttaatggcattgtaaaaaaagcaagcagctattatggctatggttatagccattatggatattcttactcggatgataaataa

SEQ ID NO: 91526 - DNA, 1137 bp, Enterobacter aerogenes
atgaagaacaaaattattaagttttcagccttagcggtggcaataggttttttatcgggttgcacaattgttccggggcaagggttaaatagcttgcgtaaaaatgtggtggaactaccagatagtgattatgacatagataagctagtgaatgtctatccgatgacacccggtttggtagagcagttgcgtccggaggcggtgattgctcgatcaaatccgcagctagacaaccttttgaaaagttacgaatataggattggtgttggtgatgtcttaatggtcaccgtttgggaccatcccgaattaaccactccagctggtcagtatcgaagcgcgagtgatacgggtaactgggttaatgctgatggagcaatattctatccgtacattggtaaggtacaggttgctggaaaaacgcttagtcaagttcgccaggatatcactagccgattaactacgtatatcgaaagcccgcaggtcgatgtcagtattgcggcgttccgttctcaaaaagcgtatgtgacaggggaagtagccaaatccggtcaacaagcgataacaaatattccgttgacggttatggatgcaataaatgccgctggtggcttagcaagcgatgccgactggcgtaatgtagtgcttacacataatggtaaagataccaaaatttctttgtacgcactcatgcaaaaaggcgatttaacgcaaaaccatttactttatccgggtgatatcttattcgtaccgcgtaatgatgatttgaaagtattcgtaatgggtgaggtagctaaacagacaacccttaaaatggatcgtagcgggatgactctcgccgaggcattaggaagttcagaaggtatgtctcaatatgccgctgatgcaaccggtatctttgtcatcaggcagcttcaaggcgataagcagggtaagatcgctaacatctatcaattaaatgcacaagatgcatcagcaatggttctgggtacagagtttaagttacagccatatgatatagtttatgtaactacggcaccgctagtccgttggaaccgtgtagtttctcaattgatacctacaatcggtggtatccacgatattacagaaaccactcgttatattaagacatggccataa

SEQ ID NO: 91527 - DNA, 1434 bp, Enterobacter aerogenes
atgatgaaaattgctcgtatcgcacttgctttgggtctggtcgcttcagttagctcgcaggtatatgcagctggactagtgcaaaatgataatgaacttcgtaacgatctggcttggctttccgatcgtggggtcattcatctcagtctttccacctggccgctcagtcaggaagaaatcacccgagcgttgaaaaaagcaaaaccttcatattcttccgaacaagttgtgctggcgcgcatcaatcaacggctttctaatttgaaggcggattttcgcgttagcggctatacctcgactgaccaaccaggcacgccacagggctttggtcaaacccagccggcagataactcgctctctcttgcttttaataacagcggtgagtggtgggatgtgcatttgcagggcaacgttgaaggcggcgaacgcattagcaacggttcacgttttaatgccaatggtgcatacggcgccgtcaagttctggaaccagtggctgtcgttcggtcaggtgccgcaatggtgggggccgggttatgagggtagcctgattcgcggggatgcagccagaccaatgaccggtttcttaatgcagcgcgctgaacaagctgccccggagacatggtggttgcgctggattggtccgtggcagtatcaaatttccgccagtcagatgaaccagtatacggcagtgcctcataccaaaatcattggcggccgtttaactttctcaccgttccagtcacttgaacttggcgcttcacgcataatgcagtggggcggggaagggcgaccagaatcatttagtagcttttgggatggctttaccggacaggataataccggtactgacaatgaaccaggtaaccaacttgcaggcttcgactttaaatttaagctagaacctacattagggtggcctgtgagcttctatggccagatgattggcgaggatgaagctggtggcttaccttcggcaaatatgtaccttgggggtatcgaaggtcatcatggctggggcaaaaatgcgattaactggtatgtagaagcacatgatacgcgtacgaatatgaatcgtacgggttacagttatacccatcacatctataaagatggttactaccagcagggttatcctctcggtgatgcaatgggtggcgatggccaattatttgccggtaagattgaactggtaacagaggataatcagcgctggagcacccgtttggtgtacgcaaaggtgaatccggaaaatcagtctatcaataacgcgtttccgaactcagatacgttaaaaggtatacagttaggctggagtggcgatgtttataaatctgttagattgaatactaatctttggtacaccaatgccgataatagcgatagcgatgatgttggtgccagtgcagggatagagattccatttagtttatag

SEQ ID NO: 91528 - DNA, 630 bp, Enterobacter aerogenes
atgaactggcaattagtctctttttttggcgatagtaccgtgctgctgcctagcgcagtggtgctgtttgcggtgctggcgctgcgtaaagcatcccggacgctggcctggcaatgggcgttgctttttggcattacgggtactgtcgtgtgcatttcaaaactggcatttatgggctggggcatcggcatacgggaaatcgattttaccggtttcagcggacataccgcgctttcgaccgctttttggccaatccttttatggctgttaacctcacgggcgcctttctccgtccgctgtagcgccgtattcgtaggttatgcccttgctgtcatagttggctattcccgtttgatgattcatgcacattcggtatcggaagtggtgagtggatttatcctcggagcctgcgggagtttgatttttctgctgttgcaatggcgtacgcattcatcgcgcactgcgcagatctcatgggcaggagcgctgagcatggtaatcattcccctcgtgctgttaaacaccggggctaaagcgccaacacaatcgctgctgggggaagttgcaaccatgatcggcccatttgacaaaccgttcaccagagccgatctgcataagcatatatattaa

SEQ ID NO: 91529 - DNA, 891 bp, Enterobacter aerogenes
atggtgaatttgaaagcaattattccggtcgcagggttagggatgcatatgttgcctgcaaccaaagcgataccgaaagagatgctgccgatcgttgataagccgatggttcagtatatcgtcgatgagattgtcgccgccggaatcaaagaaattgtgctggtcactcattcatctaagaatgctgtagaaaaccattttgatacctcctatgagctggaagcgctactcgagcagcgtgttaagcgtcaactattagccgaagttcaggcgatttgtccaccaggtgtaacgataatgaacgttcgtcagggccagcaactgggtctggggcattctatcctctgcgcacgcccagccgttggcaataatccatttgtagtggtgctaccggatatcattcttgatggcgcaagcgccgatccgctgcgttataacctggcggcaatggtcgcgcgtttcaatgaaacagggcgcagccaggttctggccaaacgaatgcctggcgatctctcagaatattccgtcattcaaaccaaagatggcttgaaagtggaaggggagattggccgtattgttgaatttattgaaaaaccagacgagccgcaaacgctcgactctgacctgatggccgtagggcgttatgtgctgtctgctgatatctgggaagaacttgagcgtactgaacctggcgcctggggccgtattcaattaacggacgctattgcggcgctggcaaagaaacagtctgtcgatgccatgttgatgaccggtgaaagctacgactgcggcaaaaaaatgggttacatgcaggcttttgtgagttacggcttacgtaaccataaagaagggaccaaattccgcgagagcatcaagaagctactggcgtga

SEQ ID NO: 91530 - DNA, 1587 bp, Enterobacter aerogenes
atggaatggattgccgatccctcgatctgggcgggtctcattacgctggtggttatcgaactggttctggggatagataacctggtatttattgcgatccttgccgaaaagctgcccccggcacagcgcgatcgcgctcgcgttaccggcctgctcctcgcaatggtgatgcgtctggttctgctggcgtcaatttcctggctagtcactctcacgacaccgctcttcagctggcatgacttaagcttcagcgcccgcgatttgatcatgttattcggtggattgttcctgttatttaaagccaccgttgagcttaatgagcgactggaaggaaaagacagtaataaccccacccagcgtaaaggcgcgaagttctggggcgtggtggcgcaaatagttgtacttgatgctattttctcgctggattcggtcattaccgcagtgggtatggttgatcatctggcggtgatgatggctgcggtcatcattgccattacgctgatgctaatggccagcaaagctctcacacgctttgtcaacagccaccccacgatcgtcattctgtgcctgagtttcctgctgatgatcggttttagcctgatcgccgaaggatttggcttcccaatcccgaaaggctatctgtatgccgccatcggtttctcggtgatgatcgaatcgttcaaccagttggccatcttcaatcgccgccgtttcctctcagccaatctgaccatgcgacagcggacgactgaagccgtgatgaatctgctaagcgggcgcaaagagaatgctgagcttgatgccgagacggcaaccatggtcgccgaccagggcgaaagtccgttgttcaatccacaggaacggttgatgattgagcgcgtcctgaatctgaatcaacgcaccgtcagcagcattatgacttcacgtcatgatattgaacacatcgacttaagcgcgcctgaagaggaagttcgcgcactgctggagaaaaaccagcatacccgtattgtcgttaccggcggcaacgataacgaagatctgttgggggttgttcatgttatcgacctgctacaacagtcattacgcaatgagccgctggatttacacgttctgctacgccaaccgcttatttttccagaaaccttgccgttgcttccggcgctggagcagtttcgccaggcgcggacgcactttgcttttgtggttgacgaatttggctccgttgaaggcctggtaaccatcagcgatgttatggaaaccattgcgggtaatctgcctaatgaagtcgaggagatcgatgctcgtcatgacattcacaaaaacgccgatggcagctggaccgctaacggccatatgccgctggaagatctggttcagtacgttccgctgccgttggatgataaacgtgaatatcacacaatagccggattattgatggaatatttgcagcacattcctgccgctggcgaagaagtgaaaatcggcggttatacgctgcgtactctggaagtggaaagccacagggtgcagaaagtacagattatcccgccggttgaagtagaagatgaattagattatgaagtgtga

SEQ ID NO: 91531 - DNA, 1848 bp, Enterobacter aerogenes
atgagacgaattctgaccacgctgatgatcttattgaccgtcattgttgcggggctcgctgcgctggtgctgctggtcaaccctaacgacttccgcaactatatggtgcaggaagtggcggagcgtagcggctatcaactgaagcttgacgggccgctgcgttggcatgtttggccgcagctgagtattctctccggtcgtatggcgctgacggcgccaggcgcttccgaaccggtggtgcgtgccgataacatgcggctggatgttgcgctgatgccgctactttctcaccaactgcaggtgaagcaggtgatgttgaaaggcgcggtcattcagcttaccgcgaaaacggaagcggtgcgtaaccagaacgcgccggtggtgccacatgacaatacgttgccgcaggcgccgcaagatcgcggatggtcctacgatgtccgtaaactacaggtggccgatagcgtcctgttcttccagcatgaaaatggcgaacaggtcaccgtgcgcgatatacgcttacagatggagcaggatgacaaccatctggcgacggtagatttctccggcagggtcaatcgcgatcaacgtgacttaacgttgtcctttaccgcccaggttcagggcggcgattaccctcactctttgaaagcggatttttcgcagcttaactggcaggtacgtggggcggagctgccgccggacggcctgagcgggcagggaagtctgcaagccagctggatcgaagaagcgaaaaaactcgatttcaacaatctcaatctcactgctaatggcagcgcaattaccggcagcggtagtgtcgtactgggggagaaacctgactgggcgctaaacctgcaggcgaccaccctgaatctggatagtttgcttgcgcaaagtgcgacggccaatgaagggaatgtcgatcagcgtggacaaagccagccgagacagctacgccctgtgattgctgatagcgatattcagcaggattatcatagtttgcttggctttaacggccaactggcgctgtcggcggaccaggtgcagtggcgtggtatgcgattcagtcaggtgaagagtgatatcactaaccagcaggggctgctgacggtgaaacagctggagggtagcctgggagagggacgtctctcgttgcctgggatgctggatgtcagaggcaacacttcgcatgccgctttccagccgcaactggataatgtggagatcggtaccattttgcaggcgtttaactacccgattaacctgacggggaaattatctctgaaaggtgatttctcggggccgcgtattgatgcagaagacttccgtcgcaactggcagggacaagcacagctgcagatgaaggatacgcgtaccgaagggctcaacttccagcagttagtacaacaagctgtagcgaggagcactaatgtacaggcgcaggaaaacttcgataacgcgacccagctcgacgcattaagcagtgatttgaccctgaataatggccaagtcacgcttaacggcttgctgggacagtcggcaatgatggcgttgaccgggcaaggtaatctgaatctgcaagcagaggattgcgacatgcatttcaacgtgcgggtgttaggcggttggaaaggcgaaagcaagcttattgatcgtctcaagcagacggcaatcccgttacgtatctatggcaagtggcagtcgctaagctatagcctacaggtagatcagatcctgcgtaagcagttgcaggacgaagccagacagcgtttgaatgagtgggcggaacgcaacagtaatagccagaacggcaaagatgtgaagaaactgcttgataagctgtaa

SEQ ID NO: 91532 - DNA, 582 bp, Enterobacter aerogenes
atgcgtctgtgtgaccgagatatagaagcctggttggatgaagggcgcctggcaatcagcccgcgcccgccggtggatcgaattaacggcgccaccgttgacgttcgcttaggcaataaattccgtaccttccgcggtcatacggcgccgtttattgacctgagcggcccgaaggcggaggtgagcgcggcgctggaccgggtaatgagcgaagagatcgtactgccggaaggcgaggctttctatcttcatcctggagaattagcgctggctgtgacttatgaatcagtaacgcttccggctgacctcgtcggctggcttgatggccgttcgtcactggcgcgcctggggctgatggtacacgtcactgcgcaccgtattgatccgggctggtctggctgcatcgtgctggaattctataattccggcaagctgccattggcgttgcgcccgggaatgcccattggcgcgctgagctttgagccgctttcgggcccggcggcgcggccatataaccgccgtgaagatgccaaatatcgcgaccagcagggcgcggtagcgagtcgaatcgacaaggattga

SEQ ID NO: 91533 - DNA, 642 bp, Enterobacter aerogenes
atgactgatacgtctcatcagtgcgtcattgtaggcatcgccggcgcatcggcttcgggcaaaagccttatcgccagcacactttatcgtgaattacgtgaacaagttggcgatgagcatattggcgttattccagaagacagctattacaaagatcaaagccatctgtcgatggaagagcgtgtaaaaaccaactatgaccatccaagctcaatggatcatagcttgctgttccagcatttacagacgctgaaaagcggccagccaattgaattgcccgtgtatagctacgttgaacatacgcgtatgccggaaactattcatattcaaccgaagaaagtgatcattcttgaagggatcctgctgttgacggatgctagactgcgcaatgaattaaacttctctattttcgtcgataccccgctggatatctgtctgatgcgccgcatcaagcgtgatgttaacgagcgtggccgttccatggactcggtgatggcgcagtatcagaagacggtgcggccaatgttcctgcaatttattgaaccttccaagcaatatgctgacatcattgtcccgcgcggcggtaaaaaccgtattgccatcgatattctgaaggccaaaatcagtcagttctttgaataa

SEQ ID NO: 91534 - DNA, 849 bp, Enterobacter aerogenes
atgacattattatcctggcgagcgccctatgactggcaatggatgttcgcgtttctcagcgcgcgtgcggtggcgggaattgaaaccttccatgaagatcaatatacccgcagcttcagtttagatgggcatcgtggattgattaccgttaaaccggatgaacgccgccaggggttccaggttacgctttctcatgggctgttaccggtagcagatcagtgcctggcgcgtgtagcgcaactgtttgatttagcatgcgatccatttgaggtcacgcaaaccttaggcaaactggcgcagccgcgaccaggacttcgcttgccgggggcgctggatgcgtttgaacaggcggtgcgcgcggtattggggcaactggtgagcgtagcgatggcggcgaagctgacggcgaaagtggccgcggtctatggggaagcgttaagcgaagcgcctggttatgttatttttcccgaaccgcagaaactggcgcaagccgaccctttggcgcttaaggcgttagggatgccgcttcgccgcgcggaagcgttaattcaccttggcaaagcggcattgagcggagaattgccgttgacggcgcctgctgatatggcaaccggcatgaaacaattgcagagtctgccgggcatcggtcgctggacggcgaattactatgcgctgcgcggttggcaggcaaaagatatttttctgcccgatgactatctgattaaacagcgttttcccggaatgacgcctgcgcgtatcgcgcgctatgccagccgctggcaaccctggcgctcctatgctttgttgcatatctggtacaccgaaggctgggcgccggacgaggaatag

SEQ ID NO: 91535 - DNA, 1353 bp, Enterobacter aerogenes
atgtttattggttttgactatggtaccgccaactgttcggtcgccgtcatgcaggataatgcgccacggcttttaacgctggaaaacggtagcccgctgctgccatcaatgctttgcgccccgacgcgcgaagcggtcagcgaatggctataccgccatcataatgtcccggccgacggtgcagaaaatcaggcgctacttcgacgcgccattaattataaccgtgatgaagatatcgaagtcctgggcaacagcgtccagttcggcctcgcctcactgcatcaatacgttgacgatccggaagaggtctatttcgttaagtcgccaaaatcgtttcttggcgccaatggcctgaaaccccagcaggtcgcgttatttgaagatctggtctgcgcgatgatgctacatattaaacagcaggcgcagtcgcagcttagtgaacagattacccaggcggttattggtcgaccaattaacttccagggtcttggcggcgatgacgctaacgctcaggcacagggtattctcgaacgcgcggcgacgcgagcaggattcaacgatgtcgtgtttcagtttgaacccgttgcggcggggttagattttgaagccacgctcaatgatgaaaaacgcgtgcttgtcgtcgatatcggcggcggcaccaccgactgctcactgctgttgatggggccgcaatggcggcagaaagccgaccgtcaggatagcctgctgggccacagcggctgccgtatcggcggtaacgatttggatatcgccctggccttcaaatgcctgatgccgttactcggcatgggcggtgaaacggaaaaaggcattgcgctgccggtactgccctggtggaatgcggtggcgattaacgacgtcccggcgcagagcgatttttacagcgctgccaacggacgtatgctcaatgacctgctgcgcgacgctcgcgatgccgacaaggtcgcactgctgcttaaagtctggcgccagcgcctgagctatcgcctggtacgcagcgcggaagagagcaaaatcgccctttccgctcagccggatttcaacgccgaactgccgtttattagcgatgagctggctaccgctatcagccagcaggggctggaagaggcgctcaatcaaccgctggctcgcatcatggagcaggtaaagttagcgctggaaagcagccatgaaaccccggacgttatctatctcaccggcggtagcgcacgatcgccgttaattaaaaaggcgctggccgcacagctgccgggaataccgatcgccggcggcgatgattttggttccgttaccgccgggcttgcccgctgggcgcaggtggttttcgcctga

SEQ ID NO: 91536 - DNA, 1245 bp, Enterobacter aerogenes
atgaaaagcagtaacacacttcgttggggaatggtcctgacggtaattttggcggcgggagccgcctattggttctggcacgatcgttccgaagagacaaccgcaggcgctgctggcgcaagtcaacaaggagcaaaagcgcctgccggggcgcgccatggccgcttcggcgcggcgctggccccggtgcaggcggcgaccgccaccagcgaatccgtcccccgctaccttactggcctggggactatcaccgcggcgaacaccgtgaccgtgcgcagtcgggttgacggccagttactgagtatccatttccaggaaggtcagcaggtaaaagccggcgatctgctggcgcaaatcgatcccagccagttcaaggtcgcgctggcccaggcgcagggccagcttgccaaagataacgccaccctcgcaaacgcgcgccgcgatctcgctcgctatcaacaactggtcaaaaccaaccttatctcccgtcaggagctcgatacccagcagtcgctggtggtcgaatccgccggtacggttaaagccgatcaggccgccgtcgccagtgcgcagctgcaactggactggacccgcatcaccgcgccgattgacggccgcgtgggcctgaaacaggtcgacatcggcaaccaaatctccagtggcgacaccaccggcattgtcgttctcacgcaaacccaccctatcgatttggtctttaccctaccggaaagcgatatcgccaccgtggtacaggcgcagaaagccggtaaaacgctgagcgtcgaggcctgggaccgaaccaataaacagaagatcagtacaggcagcctgctgagcctcgataaccaaatcgatgccaccaccggcaccattaagcttaaggcgcgctttaataacctcgatgacgctctgttcccgaatcagttcgtcaatgccagaatgctggtggataccgagcaggatgcggtagtgatccccaccgccgcgctacaaatgggcaacgaggggcacttcgtgtgggtgctgaacagtgagaataaagtcagtaaacatacggtcacgccgggtattcaggatagccaaaaagtggtgattaacgccgggctgtcagcgggcgaccgggtggtgaccgatggtatcgatcgcctgacggaaggcgctaaggtcgaagttgtcgaagctcacagcgccgtgcaggaacaacctaccacccgcccgagtggtaaaaacggagcgggcgcctga

SEQ ID NO: 91537 - DNA, 3123 bp, Enterobacter aerogenes
atgcaagtattacccccaagcagtacgggcggcccttcccggctgtttattatgcgtccggtggcgacaacgctattgatggtcgccattctgctggccggtatcatcggctatcgcttcctgccggtctccgcgctgccggaagttgactacccgaccattcaggtagtaacgctctaccccggcgccagcccggatgtggtgacgtcatcgattaccgcaccgctggaacgccagtttggccagatgtccggccttaagcagatgtcctcacaaagctcgggcggcgcgtcggtcattactctgcagttccaactgaccctggcgctggatgtcgccgaacaggaagtgcaggcggccatcaacgccgcgaccaacctgctgccgtctgatttacccaacccgccggtttacagcaaagtgaacccggcggatccgccgatcatgaccctggccgtgacctccagcgcgatgccgatgacgcaggttgaagatatggtggaaactcgggtagcgcagaagatatctcaggtttccggggtcggcctggtgacgctggccggcggccaacgtcctgcggtgcgcgttaagctcaatgcccaggcgatcgccgcgttaggtttgaccagcgaaaccgtgcgtaccgccattaccagcgccaacgtgaattcagcaaaaggtagccttgacggcccggcccgcgcggtcaccctttccgccaacgatcagatgcagtcggcggaagattaccgtcggctgattatcgcctatcagaacggcgcgccgatccgtcttggcgatatcgcgaccatcgaacagggcgccgagaacgcctggctgggggcatgggccaataagcagcgggcgatagtgatgaacgtccaacgccagccgggagcgaacatcatcgccactgccgacagcatccgccagatgctaccgcaactgaccgagagcttgcctaaatccgttaaggtacaggtgctttctgaccgcaccaccaatattcgcgcgtcggtcagcgatacgcagttcgaattgctgctggccatcgcgctggtggtgatgatcatttatctcttcctgcgcaatgtcccggcgactatcatccccggcgtcgccgtaccgctgtcgctggtcggcaccttcgcggttatggtgttccttgatttttcaattaataacctgacgctaatggcgctgaccatcgccaccggcttcgtggtcgatgacgccatcgtagtcatcgaaaacatctcccgctacattgaaaaaggtgagaaaccgcttgccgccgcgctgaaaggcgcgggggaaatcggcttcacgattatttcattaaccttctcgctgattgccgtactgattccgctgctgtttatgggtgatatcgttgggcgattgttccgtgaattcgccattaccctggcggtggcgattctgatttcggcggtggtctcgctgaccctgacgccgatgatgtgcgcgcggatgttaagccacgaatcgctgcgcaaacaaaaccgcttttcgcgggccagcgagcgtttcttcgagcgggtgattgccgtctatggccgctggctaagccgggtactaaaccacccatggctaacgttgagcgtggcgttaagcaccctggcgttatcgattctgctgtgggtctttatcccgaaaggcttcttcccaatccaggataacggcattattcaaggcacgttacaggccccgcagtcggtgtcgttcgccagtatggcgcaacgccagcagcaggtgtccgatctgattctgaaagatccggcggttgaaagcctgacctcgttcgtcggcgttgatggcaccaacccggcgctgaacagcgcgcgtctacaaattaacctcaaaccgctggatgaacgcgacgatcgcgtgcaaacggtcatcagccgtctgcagcaatcggtggctagcgtaccgggtattgagctttatctccagccaacgcaggatctgactatcgataccaccgtcagtcgcactcagtatcagtttaccctgcaggctaactcgcttgatgccctgagcaactgggtgccgcaattgctgtcgcgcctgcaatcctcacctcagcttgccgacgtcagcagcgactggcaggataaagggctcgcggcttatattaatgtcgatcgcgatagcgccagccggctgggtatttccatggcggatgtcgataacgcgctgtataacgcctttggacaacggctgatctcgacaatttatacccaggccaaccaatatcgtgtggtactggagcacgacacccaggcgacgccggggctgacggcgctggataatattcgcctcaccagcagcgatggcggcattgtgccgctgaagtctatcgccactgtcgagcagcgttttaccccgctgtcggtgaaccatctcgatcagttcccggtgaccactatttcattcaacgtgccggataactactccctcggcgaagcggtagaggctattttgtcagccgagcagtcgctggatttcccaagcgacatccgcacccagttccagggcagttcgctcgcattccagtcggcgctcggtagcaccgtctggctggtcgtcgcggcggtcgtcgccatgtatatcgtcctcggcgtgctgtacgaaagcttcattcatcccatcaccattctttctaccctgccgaccgctggcgtcggggcgctgctggcgctatggctggccggtagcgagctggatgtgattgccatcatcggcatcattctgctgattggtatcgtgaagaaaaacgccatcatgatgattgactttgccctcgccgccgagcgcgagcagggaatgccgccgcgcgaagccatttatcaggcctgcctgctgcgcttccgtccgattctgatgaccaccctcgccgccctgctcggcgctctgcccttgatgctcagtaccggcgtcggcgccgagttgcgccgcccattggggattggtatggttggcggtctgatgctcagccaggtactgacgttattcaccacgccggtgatttatctgctgttcgaccggctatcgctgtatatgaagagccgcttcccgcgtcgtgaagaggaggcgtaa

SEQ ID NO: 91538 - DNA, 3078 bp, Enterobacter aerogenes
gtgaagttcttcgctctcttcatttatcggccggtggcgacgattcttatctcgctggcgattaccctatgcgggatcctcggattccgcctgctgccggtcgcaccgctgccgcaggtggatttcccggtgatcatgattagcgcctcgctgcccggcgcctcgccggaaaccatggcctcgtcggtggcaacaccgctggaacgctcgctggggcgcattgccggggtcaatgaaatgacctcgtcgagctcgcttggcagtacccgcatcatcatggagtttaatttcgatcgcgatattaacggcgccgcccgcgacgtgcaggcagcgattaatgccgcgcaaagcctgctgccgagcgggatgcccagccgccccacgtatcgcaaagctaacccgtccgatgcgccgatcatgatcctgacgctcacctcggatacctattcgcaaggcgagttgtacgatttcgcgtcaacccagctggcgcaaaccatcgcgcagattgacggcgtcggcgatgtcgacgtcggcggcagctcactgccggcggtgcgcgtcgaccttaacccgcaggcgctatttaaccagggcgtctcactggacgccgtgcgcagcgccattgataacgctaacgtgcgtcgcccgcagggcgcgctggaagataagacccaccgctggcaggtgcggaccaacgatgaattgaaaaccgcggcggaatatttgccggtgatcgtccactacaataacggcgcggcggtacgccttggcgacgtggcaaaagtgacggattcagtgcaggatgtgcgtaacgccgggatgaccaacgccaaaccggcgatcctgttgatgatccgcaagctgccggaagccaacatcattcagacggttgatagcattcgcgcccgcctgccggaactacagcgtaccatccccgccgccattgatttacagattgcgcaggatcgttcgcccaccatccgcgcttcgctggaagaggtcgaacaaacgctggtgatttcggtcgcactggtgattctggtggtctttctgtttttgcgctccgggcgcgcaacgcttatcccggccgtcgccgtgccggtatcgttaatcggtacctttgccgcgatgtatttgtgcggcttcagcctcaataatctgtcgttaatggcgctgaccatcgccaccggtttcgttgtcgatgacgccatcgtggtgctggagaatatttcccgccatcttgaggcgggaatgaaaccgctgcaggccgcgttacaaggcagccgtgaagtcggctttaccgtgctgtcgatgagcctgtcgctggtggcggtgttcttaccgctgctgctgatgggcggcctgccgggtcgtctgctgcgcgagttcgccgtcacgctatcggtagcgatcggtatttcgctcgccgtgtcgctcacgctgacgccaatgatgtgcggctggctgctgaaaagcggcaaacctcatgaaccaacgcgcaagcgtggctttggccgcctgctggtcactattcagggtggctatggcaaatcgttaaaatgggtgctgaagcatagtcgcctgaccggcctggtgctgctcggtacgatggcgctcagcgtgtggctgtatatcgccattccgaaaaccttcttcccggagcaggacaccggggtgctgatgggcggtattcaggcggatcagagtatttccttccaggcgatgcgcggcaaactgcaggactttatgaagatcatccgcgaggatccggcggtcgataacgtgaccggctttaccggcggctcgcgggtgaatagcggtatgatgtttatcaccctgaaaccgcgcgatcagcgccacgaaacggcgcagcaaatcatcgaccggctgcggaaaaaactggcgaaagagcccggtgctaatctgttcctgatggcggtgcaggatatccgcgttggcggacgtcagtcgaacgccagctatcagtacaccctgttatcggacgatctgtcggcgctgcgtgaatgggagccaaaaatccgcaaggcgctggcggcgctcccggaactggccgacgttaactcggatcagcaagataatggcgcggagatggatctggtctacgaccgcgacaccatgtcacgcctgggcgtcagcgtgcaggatgccaacagcctgttaaacaacgctttcggccagcggcagatctcgaccatctatcaacctttgaaccagtacaaagtggtgatggaagtcgatccgctttatacccaggacgttagcgcgctggagcaaatgtttgtcattagtaacgacggtaaacccatcccgctgtcatacttcgccaaatggcaaccggcgaacgcaccgctttcggtcaaccaccaggggctctcggccgcctcgaccatctccttcaacctgccgaccggcaaatcgctgtcggaagccagcgacgccattgaccgggcgatgacccagcttggcgtgccgtcgagcgtgcgaggatcgtttgccggcaccgcacaggtattccagcagacgatgaactcacaggtgatcctgattatcgccgccatcgccacggtgtatatcgtgctggggatcctctatgaaagctacgtgcatccgttaaccattctctcaacccttccgtcagcgggggttggcgcgctgctggcgctggaattatttggcgccccattcagcctaatcgccctgatagggatcatgctattaattggcatcgtaaagaaaaacgccatcatgatggtcgatttcgcccttgaagcgcagcgtaccggcaatcttccgccggaagaagcgatattccaggcctgtttgctgcgttttcgcccgatcatgatgaccaccctggcggcgctattcggcgcgctgccgctggtgctatcgggcggcgacgggtccgaactgcggcagccgttggggatcaccattgtcggtggtctggtcatgagccagctgctgacgctgtacaccaccccggtggtctatttgttctttgatcgtttgcggctgcgttttacgcgcaagccagctcaaccggtaagcgaataa

SEQ ID NO: 91539 - DNA, 1416 bp, Enterobacter aerogenes
atgacagatctgcccgccagcgtacgctggcagttatggattgtggccttcggcttctttatgcagtcgctggataccaccatcgtcaacaccgccctgccctcgatggccaaaagccttggggaaagcccgctgcacatgcatatggtagtggtctcgtatgtgcttacggtggcggtcatgctgccggccagcggctggctggcggaccgggtcggagtgcgcaatatctttttcagcgccattgtgttgtttaccgtcggttcgctgttctgcgcccaggccaccactctcgatcaactgataatgtctcgggtgctgcagggcgtcggcggcgcgatgatggtgccggtcgggcggctaacggtgatgaaaatcgttccacgcgatcagtatatggcggcgatgaccttcgtcaccctgcccggccaggttggaccgctgctcggcccggcgcttggcggcgtgctggtcgagtatgcctcctggcactggattttcttaattaacatcccggtaggtatcatcggcgctatcgccacgttatgcctgatgccgaactacaccctgcagacccggcgctttgatatccttggttttattctgctggcgacaggaatggccgccctgacgctggcgctcgacggcaaaaaagggctcggaatctcgccgctgctgctcgctgtgctggtaaccggtggcctgatggcgatagttttttatttgtggcacgcccgcggcaacgttaacgccttatttagcctcaatctgtttcgcaacaaaaccttctcgctcggtcttggcggcagcttcgccgggcgtatcggtagcgggatgttaccgtttatgaccccggtattcctgcaaattggcctcggcttctcgccgttccacgccgggctgatgatgatccccatggtgctgggcagcatggggatgaaacgcatcgtggtgcaggtagtgaatcgctttggctatcgccgcgtgctggttttcgcgacgctcggcctggcgctggtgagtttactgttcatggccgtcgcactggccggttggtactggctgctgccgctggtgctgttcctgcagggcatgattaactccagccgtttttcgtcgatgaatactctgacgctaaaagacctgcctgatgagttggccagcagcggtaacagcctgctctcaatggtcatgcagctctcgatgagtatcggcgtgaccatcgccgggctactgctcggcatgtacggccagcagcatatcagcgccgatgcgccagctgtccatcaggttttcctatatacctatctgagcatggcgatgattatcgctctcccggcgctcatcttttcccgtgtaccgaacgatgtcggcagcaacaccgtcatccgccgacgcaaaaggagtgaatcgtga

SEQ ID NO: 91540 - DNA, 1455 bp, Enterobacter aerogenes
gtgaaactttggcgcccgggtatcaccggtaagctgttcctggctattttcgccacctgtatcgtgctgctgattagcatgcactgggcggtgcgcatcagctttgagcgcggctttatcgactatattaaacgcggtaatgaacaacgattgacgatgctcggcgacgcgctgagcgaacagtacgagcagcacggcgactggaaatttttgcgcaacaacgatcgttttatcttccagttactgcgcaccttcgagcgggataacgacgaacgtccaccaggtgggccgggtccgcatggcgagccagggccaatgcccggtcctggcccgcggcccgatatgccgccgcacggctggcgcacgcaattttgggttgtcgatcaacaagggcgcgtgctggtaggcccgcgggtgccggtcccgcaggacggtacccgccgtaacattgtcgtcgacggcgtgaccgtcggggcggtgatcgcctcgccggttgagcggctcacgcgcaacacggatattaatttcgaccgccagcaaaaacgcaccagttggctgattgtcgcccttgccaccctcctcgccgcgctggccaccttcccgctggcccgcgggctgctggcgccggtcaaacggctggtggaaggcacccataagctggcggcgggcgatttctccacccgcgtcacggtcaccggcggggatgaactgggccgtctggcgcaggattttaaccagcttgccagtacgcttgagcgtaaccaacagatgcgccgcgatttaatggccgatatttcgcatgaactccgcacgccgctagcggtcctgcgcggcgagctggaggctattcaggacggcgtgcgtaaattcaccccggattcgatctcttcgctgcaggcggaagtcggcacgcttaccaagctggtggacgatctgcatcagttgtcgatgtccgatgaaggcgcgttagcctaccagaaagagtcggtggatttaattgcgctgctggaggtcgccgcaggggcgttccgcgaacgtttcgccagccgcggcttgaccatcggcgtctcgctgccggataacgctatcgttttcggcgatcgcgatcgtctgatgcagctgttcaataacctgctggaaaacagcctacgctataccgacagcggcggccgcctgcagattgacgccaaacaaaatggtcgcatgttgacgctcgatttcgccgatagcggccccggcgttagcgacgagcagctggcgcggctctgcgagcgtttttatcgcaccgagggctcacgcaaccgggccagcggtggatccggtcttgggctggcaatctgtatgaatatcgtcgccgcccacggcggcagcctgaacgccggtcattcgccttttggcggggttagcattaaagtagagttacctctggaacaggatttatcgagggatgtatga

SEQ ID NO: 91541 - DNA, 723 bp, Enterobacter aerogenes
atgagcgaattacctattgatgaaaacacgccgcgcattttaatcgtggaagacgagcccaaactcggtcagttgttgatcgactatttgcaagctgcgagctatgcgccaacgctcattgcgcatggcgatcaagtactgccctacgtccgccagacgcccccgcatttgatcctgctcgatttaatgctgccgggcaccgacggcctgaccctgtgccgcgaaatccgccgattttccgagataccgattgtgatggtcactgccaaaatcgaggagatcgatcgcctgctggggctggaaatcggcgccgatgactatatctgcaaaccgtacagcccgcgtgaagtcgtggcccgtgtgaagacgatcctgcgtcgctgtaaaccacagcgcgacctgcaggctctggatgcgcaaagtccgctaattgttgacgaaagccgcttccaggcctcgtggcgcgaaaaaatgctggacctgactcccgccgagtttcggctattaaaaacgctgtcgcaggagccgggtaaagtcttctcccgtgaacaactgctcaatcatctgtacgacgattatcgcgtagttaccgaccgtaccatcgacagccatattaaaaatctgcgccgtaagctggaatcgctggacgcggagcagtcgtttattcgcgccgtctacggcgttggctatcgctgggaagccgacgcctgtagaatggcttga

SEQ ID NO: 91542 - DNA, 1362 bp, Enterobacter aerogenes
atgtttaaaccggaacttctttccccggcgggaacgctgaaaaatatgcgttacgctttcgcttatggcgccgatgcggtctacgccggccagccgcgttactcactgcgcgtccgcaacaacgaattcaaccacgaaaacctgcagctcggcatcaatgaggcccatgagctggggaaaaaattctatgtggtggttaacatcgcgccgcataacgccaagctgaaaacgttcattcgcgatctcaaaccggtagtggaaatgggcccggacgcgctgattatgtccgatcctggtttaatcatgctggtgcgggaaaacttccctgatatgccgatccacctgtcggtacaggccaacgccgtcaactgggcgacggtgaaattctggcagcaaatggggttgacccgcgtgatcctctcccgcgaactgtcgctggacgagatcgccgaaattcgcagccaggtgccggagatggaaattgagattttcgtccacggcgcgctgtgcatggcctactccggccgctgcctgctctccggctatatcaataaacgtgaccctaaccagggcacctgtaccaacgcctgccgctgggagtacaacgtccaggaaggcaaagaagatgacgtgggtaatatcgtccacaagcatgaacctatcccggtgcagaacgttgaaccgactctcggtatcggcgcgccaaccgaccaggtatttatgattgaggaagccaaacgtccgggcgagtatatgaccgcctttgaggatgagcatggcacttacatcatgaactccaaagatctgcgcgctattgcccacgttgagcgtctgacccagatgggcgttcattcgctgaagattgaaggccgcaccaaatccttctactactgcgcccgcaccgcccaggtgtaccgtaaagcgatcgacgacgccgccgccggtaaaccgttcgacaccagtctgctggagacgctggaaggtctggcccaccgcggctataccgaaggcttcctgcgccgccacacccacgacgactatcagaattatgaatacggctattcggtttccgaacgccagcagtttgtcggcgaattcaccggcaagcgtcatggtcatctggccgaagtggcggtgaaaaataagttctcggtcggcgacagcctggaggtcatgactccgcaaggtaacgtcaactttacgctcgaacatatggagaacgccaaaggcgaagcaatgcctgtcgcgccgggagacggttatatcgtctggctgccgctgccggaggatatggcgctggagtatgggttgctgatgcgtaattttaacggcgagtcgacgcgcaatccgcataaaaattag

SEQ ID NO: 91543 - DNA, 894 bp, Enterobacter aerogenes
atgacccaatttccagccagcttattaattctcaacggtaaaggcgcgaatgagccacaactgcgcgaagccgttaatctcctgcgtgaagaaggtatcgagatacatgtccgcgtaacctgggaaaaaggcgatgcgattcgttttgtcgaggaagccgaaacgctcaaggtggcgacggtaattgccggcggcggcgatggtacgattaatgaagtcgccaccgcgctggtcgagcgcggcagcaacatggcgctgggaatactccccctcggcacagccaatgatttcgccaccagcgtcggcatcccgcaggatttagccagcgcgctgaagctggcgatagccgggcgcgatgtccctattgatgtggtacgcgttaacaacgaggccgggtttatcaatatggccaccggcggctttggcacccgtatcaccaccgaaacgccggaaaaactgaaagccgcgctcggcggcgtctcctatctgattcacggcctgacccgcatggataccctgaagccggaccgctgcgaaattcgcggcgagaactttcactggcagggtgacgcgctggttatcggcatcggcaatggccgtcaggccggcggcggccagcaactgtgtcctgaggcattaattaacgacgggctactgcatctgcgtattttcaccggcgaagagttgctgcctgcgctgtttagcaccctcgctaatcccgataattcgccaaatctgatcgatggcgtatcgccgtggtttgaagtcaccgccgcccatgaaatgaccttcaacctggatggtgaaccgctgagcggcaaatctttccgtatggaaatcctcggcgaggcgctacgctgccgtctgccgccggactgtatgttactgcgttaa

SEQ ID NO: 91544 - DNA, 810 bp, Enterobacter aerogenes
atggcgcaaaatcgcccgcatgacaccgcggaggttatccgcgaaaaggtccaccatgacgacaatcagggattcagaatgaaaaaagcgcttaccgtcctgctgctgaccacatccttcatcggaacggcttctgccgagacgctccattttggcaccacaaccgccaatccgccgtttgagaccgtcaaaggcaaaggccaggcaacgggtttcgacattgatttggccaatgcgctgtgtaagcagatgcaagcggaatgcaaattcacgccgcagcgctttgataccctcattccggcgctgcgctttaaaaagttcgacgccattatcgccggcattgaagtgttgccgatgcgtgaaaagcaggtcgccttcagccaaccttatcgccaggagctatccggcgtggtagtcacggcaaaagacgccgcccacgggtttgccgacctgcagggtaaaaagctcgccgtcgtcaaaggtagcgtccaccagcgttatctacgcgataaacaaaaaggcattcaagccgtcgcctttgacaacgatagcgacgcgctggcggcgttgaaaagcggcgaagtcgacggcgcgatcggcgatttagcgacgatggaccagtggctggcggagaatcctgattacgccgagatgaaagagcgcgccaccgacccggcctactacggcaaacaatatgccatcgcggtacgcaaagacgatccggagttgcttaagcagattaacgaggcgctggaggccgtgaaggcgtcgccggagttccagcagatggaacagaaatggtttaagtaa

SEQ ID NO: 91545 - DNA, 546 bp, Enterobacter aerogenes
atgagtgcagatgaaaacaacctgatttggatcgatcttgagatgacggggctggatcccgagcgcgatcgcattatcgaaatcgccaccctggtcaccgacgcgaatcttaatattctggcagaaggcccgaccattgccgtgcaccagtctgatgctcagctggcgctaatggacgaatggaacgtgcgcactcataccggcagcgggctggtcgatcgcgtgaaggccagtaccgtgggcgaccgcgaagcggaactggccactattgagtttctcaagcagtgggtgccggcggggaaatcgccaatttgcggcaacagcatcggtcaggaccgccgcttcctgttcaaatatatgccggaactggaagcttacttccattatcgctatctcgacgtcagcaccctgaaagagctggcgcgccgctggaagccggaaatcctcgatggctttaaaaagcagggcactcaccaggcgatggacgatatccgcgaatccgtcgccgaactggcttactatcgcgagcattttattaagctctga

SEQ ID NO: 91546 - DNA, 1062 bp, Enterobacter aerogenes
ttgagtaaaaataagctctccaaaggccagcagcgccgcgtcaaggccaaccaccagcgccgcctgaaaacgacttcggagaaggccgactacgatgacaacctgtttggcgagccttcagaaggcatcgtcatcagccgttttggtatgcatgccgatgtcgaatccgcggatggcacgacccaccgctgcaacattcgccggaccattcgttccctggtgaccggcgaccgcgtggtctggcggccaggtaaagacgcagccgacggggtcaacgtcaaaggcatcgtcgaagcggtacatgaacgcgcctcggtgctgacgcgcccggacttttacgacggcgtgaagcctatcgcggcaaatatcgaccaaatcgtggtggtttcggccattttacccgaactgtcgctcaatattatcgaccgctatctggtggcctgcgaagcgcagaatatcgaaccgctgttggtactgaataagatagacctgctggacgatgacggcatggccttcgtcaacgagcagatggatatctatcgccagatcggttatccggtattgatggtgtccagccatactcaggacggcctgaagccgcttgaagaggcgctgaccgggcgcatcagtatttttgccggccagtccggggtgggtaaatccagcctgctgaacacgctgctgggactgcgggatgagcaaatcctgacgaacgacgtctccgatgtgtcagggctcggccagcacaccaccaccgccgcgcgtctttatcacttcccgcacggcggcgatgtgatcgactccccgggcgtccgcgagtttggcctgtggcatcttgatgcggaacaaatcaccaacggctttgtcgaattccatgattatttaggccattgcaagtatcgcgactgcaagcacgacaccgatccgggctgcgccattcgcgaagcggtagaaaaaggcgccatcgctgaaagccgtttcgccaactatcaccgcatcctggaaagtatggaacaggtgcaggtaaaaacgcgtaaaagcttttcatcaaccgacgactga

SEQ ID NO: 91547 - DNA, 963 bp, Enterobacter aerogenes
ttgttaaactcgtttaaactctcgctacaatatattctgcctaaactgtggctcacccgcctcgcaggctggggggcaagtaaacgagcaggctggctgactaaactggttatcgatctgttcgtcaaatactacaaggtcgatatgaaagaggcgcagaagccagataccgccgcttaccgcacctttaacgacttcttcgttcgcccgctgcgtgacgatgttcgcccgctcaacaccgatcccaacgtgctggtgatgccggctgacggcgttatcagccagcttggcgctatcgaagatgacaaaattctgcaggccaaaggccacaattacaccctggaggccctgctggcaggtaactaccagatggccgacctgttccgtaacggtagcttcgccaccacctacctgtcaccgcgcgactatcaccgcgtgcatatgccgtgcaacggtatcctgcgtgagatgatctatgtcccgggcgatctgttctcggtaaaccacctgaccgcgcaaaacgtaccgaacctgtttgcccgcaacgagcgcgtcatctgcctgttcgatactgaattcggcccgatggcgcagattctggtcggcgcaacgattgttggcagcatcgagaccgtctggtccggcaccgtgacgccgccgcgagaaggcattatcaagcgctggacctggcctgcaggcgaaagcgaaggctccgttgcgctgctgaagggccaggagatgggtcgctttaaactgggctcaacggtgattaacctgtttgcgccgggccaggtgaagctggttgaacaactgcaaagcctgtcagtcaccaaaatcggcgaaccgctggccacggccgtagaaactgatatctccgtggaacctgcgccgttgccggaagaagagatccgcgccgaacaccgcgccagcccgctggttgacgataaacaagacgaaggttaa

SEQ ID NO: 91548 - DNA, 3327 bp, Enterobacter aerogenes
gtgcgcctgatatacacttttctgttggccttgagcctcagcttcggggcgtacgcagcgacggccccggacgtcaagcaaattacccaggaactggaacaggcgaaggcggcgaaacccgcccagcctgaaaccgtagaggtcctgcaagccgcgttgaatgcgctggaggaacgcaatgcctccgttgagcgcgctcgccagtaccaggatgtcatcgataattttcccaaactgtttcaaactctccgcgcccagttagcgaatgtcagcgaaacgccgcaccaggtacctaccgccctcaccgccgacgcgctgaatcaggagatcctgcaggtcagcagccagcttctggaagccagccgccaggcgcagcaggagcaggatcgggcgcgggaaattgccgactctctcaaccaattgcctcaacagcaaaccgacgcccgccgcaagcttaatgagattgaacgtcgcgtcggcgcgcagcccggcaatacgccgctggcgcaggcgcaaaatctcggtctgcaggcggaatccgcgcgtctgaaagcgctggtcgacgagctggatctggcccaactctccgctaacaaccgccaggagctgtcgcgcatccgctctgagctggcgcagaaacagagcgaacaactcgatgcctacctgcaggcgctgcgcaatcagcagaacagccagcgccaacgcgaagcggaaaaggcgctggagagtaccgagctgttggcggaaaacagcgaaaacctgccgccggggatcatcgaccagttcaaaattaaccgcgagctatcgcaggcgctcaaccagcaggtccagcgccttgatctggtggcctcgcagcagcggcaggcaaccaatcaaacgctccaggtgcgccaggcgctgaacaccctacgcgaacagtcgcagtggctgggatcatcgaatctactgggcgaagcgcttcgcgcccaggtcgcccgtctgccggagcgcccgcgcccacagcagttagatactgaaacggcccagttgcgcgtgcagcgcttgcattacgaagacctgctcagcaagcaggcgcagctacggctgattcgccaggccgacggcgaaccgctcaccgcggaccaaaaccgcatcctgcaggcgcaactgcgcacccagagcgagctgcttaactcgctgctgcgcggcggcgataccttgctgctcgaactgacgaaactgaaagtcgccaacggccagttagaagacgcgctgaaagaaattaacgaagcaacccaccgctatctgttctggacctcggacgtcagcccaattggcttctcctggccgctggaagtggtgcaggatctgcgtcgtctgatctcgcttgataccatcaaccagctcggcaaggccagcgtcatgatgctgaccagcaaagagacgctgttcccgctgtttggcgcgctggtgctggtgggcttcagtatctattcgcgccgccactttacccgcttccttgagcgctccagcgcgcggattggcaaggtgactcaggatcatttctggctgacgctgcgtaccgtgttctggtcaattctggtggcttcgccgctgccggtattgtggatgacgctcggctacggattgcaggcggcctggcccttcccgctagcggtcgccattggcgacggcgtgaccgccaccgtgccgctgctgtgggtagtgatgatttgcgctaccttcgcccggccgaatggattgttcatcgcccacttcggttggccgcgtaaccgcgtcgccaaagccatgcgctactacctgatgagcattggcctgattgtgccgctgataatggcgctgatcatgtttgataacctcaacgaccgcgaattctccgcctcgctgggccgcttgtgcttcatgctgatatgcggcgcgctggcgctggttacgctgagcctgaaacacgccgggatcccgctgtatcttgataaagcgggcgacggcgagaacatggtgaaccgcctgctgtggaacctgctgctcggcgcgccgctaatcgcgatgctggcggcggcggtgggctatcttgccacctcgcaggcgctactggcgcgactggaaacctcggtcgccatctggttcctgctgttggtggtttaccatattattcgccgttggatgttgattcagcgtcggcgtctggccttcgatcgcgccaaacaccgccgtgcggaaatcctcgcccagcgcgcccgcggcgaagaagataccgcccactccaccagcaccgaaggctcggtcgaagcggaagtcagcgaagtcgacctcgacgccatcagtacccagtccctgcgcctggtccgctcgctgctgatgctgatagccctgctgtcggtgattattctgtggtcggaaattcactcggcattcggcttcctcgaaaatatctcgctatgggatgtgacctccacggtacagggcgtcgaaagtcttgagcctattaccctcggggccgtactgattgccattctggtgctgattatcaccacccagctggtgcgcaatctcccggcgctgctggagctggcgattctgcaacatctggatttgacgccgggtaccggctacgccatcaccaccatcaccaaatatctgttgatgctaattggcgggctggtcggcttctcgatgattggtattgagtggtcgaaactgcagtggctggtggcggcgctcagcgtcggtcttggttttggtctacaggaaattttcgccaactttatctccggcctgatcatcctgtttgagaaaccgatccgtatcggcgatacggtcactatccgcagcctgaccggtagcgtgacgaaaataaatacccgcgccaccaccatcagcgactgggaccgcaaagagatcattgtgccgaacaaagcgttcatcaccgaacagttcatcaactggtcgctgtcggattcggtcactcgtgtggtgttgactatcccggcgcccgcggaggccaatacggaagaggtcacgcagattctgttgaacgccgctcatcgctgctcgctggtgattgataccccggcgccggaagcgtttctcgttgacctgcagcaggggattcagattttcgagctgcgtatttacgccgccgagatgggacaccgtatgccgctgcgtcatgagctacatcagctgattctggcgggttaccgcgcgcatggcatcgacatgccgttcccgccgttccagatgcgtctggaaagcctggatggcctacgcagcagccagccgctgaactcagcgggtaaaagcagccgtacgccaggaagtttgtaa

SEQ ID NO: 91549 - DNA, 1503 bp, Enterobacter aerogenes
atgcctcaacaaatcaagaagatgagcctgattgggctgatattaatgatctttacttcggtgtttggctttgccaacagcccttcggcgttttatctgatgggttatagcgcgatgccgttttatcttttctcggcgctgtttttctttattcctttcgccttaatgatggcggagatgggctcggcatatcgtaaggaagagggcgggatctattcgtggatgaaccgcagcgtcgggccgcgctttgcatttatcggcacctttatgtggttttcctcttatgtggtgtggatggtcagcaccgcggcgaaaatttgggtcccgttttcgacctttctcttcggcgcggataaaacccagagctgggcttttgccggcttaacctcgacgcaaaccgtcggcgtgctggccgcctgctggatggtgctggtgacgctggtggcggcgaaagggataaataagattgccaaaattaccgccgtcggcggcatcgcggtgatgtgcctgaacctggtgctgctgctggtgagtggggcgattctgctgctgaacggcggccatttcgcacaatcgctggatttcacggcgtcgccgaatccaggatatcaatccgggctggcgatgctctctttcgtggtgttcgccattttcgcctacggcggaattgaagcggtcggcgggctggtggataaaaccgagaagccggaaaagaactttgccaaaggcattattattgccgcgctggtgatttcgatcggctactcgctggccatcgtgctgtggggcgtcagcgccaactggcagcaggtattgagcaaccacagtaccaacctcggcaatatcacctatgtgttgatgaccagccttggcgcaacgcttgggcaagcgcttgatctgtcgccgcaggcggcggcgctgaccggcgtatggtttgcgcgcattaccgggctgtcgatgttccttgcctataccggcgcattcttcaccctgagctattcgccgctgaaggcgattattcaggggacgccgaaagcgctgtggccgacgatgatgaccaaagtcaacggcaacggcatgccggctaacgccatgtggctgcagtgtctgctggtgagtctgtttatcctgctggtctccttcggcggcgataccgcctcggcgttttataacaagctaacgctgatggcgaacgtctcgatgaccttgccgtatctgttcctggcgatcgcgttcccgttctttaaggcccaagccgagctcgatcgtccatttgtgatgttcaaaagccgcataagtacgctgctggcgacgacgatagtggtactggtggtagcgttcgccaatatcttcaccgttattcagccggtgatggattccggcgactggaacagtacgctgtggatggtcggcgggccgattttcttctcgctactggcgctagggatctacgagaactatcgtcagagaacggcggtacaggtagcgctggcggagggttaa

SEQ ID NO: 91550 - DNA, 978 bp, Enterobacter aerogenes
atgagcgagacggcaacctggcagccgagcgcatccattccaaatctgttaaaacgtgcggctgtaatggcggaaattcgccgtttctttaccgaccgcggcgtgctggaggtggaaacgccttgtatgagtcaggcaacggtgaccgatatccacatgttcccgtttgaaacccgtttcgtcggccccggccactctcagggtctgaatctgtatctgatgaccagcccggaataccacatgaagcggctgctggccgccgggtgcgggccggtatttcagctgtgccgaagcttccgtaatgaagagatgggccgtcaccacaatccagagttcaccatgctggagtggtaccgtccgtgctacgacatgtatcgtctgattaacgaagttgacgatttactgcagcaggtgcttgagtgccaacccgcggaaagcctctcttatcaacaggccttccagcgctatctggagatcgatccgctctcggcagataaaacccagctgcgcgaagtggcggcaaagctcgatctcagtaatatcgctgatacggaagaagatcgcgatacgctgctgcagttgctgttcgccatgggcgtagagccgcacatcggtaaagaacgtccgacgttcgtctatcacttcccggcaagccaggcttcgctggcgcagatcagcaccgaagatcaccgcgtcgccgagcgcttcgaggtctactacaaggggatggaactggcgaacggtttccatgaattgaccgacgcgcgcgaacagcagcagcgttttgagcaggacaaccgcaaacgtgcggcccgcggcctgccggagcagcccatcgactataatctgctggctgcgctggaagccggcctgccggattgttccggcgtcgcgctgggcgtcgatcgcctggtgatgctggcgttaggtgtagagaccatcggcgaagtgatctcattcaccgtcgatcgcgcctga

SEQ ID NO: 91551 - DNA, 1791 bp, Enterobacter aerogenes
gtgcaaacttttcaagccgatcttgtcgtcattggcgcaggcggagcaggtcttcgcgcagccatcgccgctgcgcaggctaatccaaaagccaaaatcgcactgatttcaaaagtctatccaatgcgtagccataccgtcgccgccgaaggcggttctgcggcggtcgcgcaggatcacgatagctttgaataccattttcacgacaccgtcgccggcggcgactggctctgtgaacaggatgttgtagactatttcgtacatcactgccccacggaaatgacccagcttgagctgtggggttgcccgtggagccgccgcccggatggcagcgtcaacgttcgccgcttcggcgggatgaaaatcgaacgtacttggttcgccgccgataaaaccggcttccatatgctgcataccctcttccagacctccctccagttcccgcaaattcaacgtttcgacgagcacttcgtgctggatattctcgtcgatgacggccaggcccgcggcctggtggcaatgaatatgttggaaggcacgctggtgcaaattcgcgccaatgcggtcgtcatggctaccggcggcgctggccgcgtctatcgctataacaccaacggcggcatcgtcaccggcgatggcatgggcatggcgctgggccacggcgtcccgctgcgcgacatggagtttgtccagtatcacccaaccggcctgccgggatcggggatcctgatgaccgaaggctgccgcggcgaaggcggtattctggtgaataaaaacggctatcgctacctgcaggattacggtatggggccggaaacgccgctcggcgagccgaaaaacaaatacatggaactcggcccgcgcgataaagtctctcaggctttctggcacgagtggcgcaaaggcaacaccattccgacgccgcgcggcgatgtggtttatctcgacctgcgccatcttggcgagaagaaactgcttgaacgcctaccgttcatctgcgagctggcgaaagcctatgtcggcgtcgatccggtgaaagagcccattccggtgcgcccgaccgcccactacaccatggggggtatcgagaccgaccagcagtgcgaaacccgcatcaagggcctgttcgccgtgggcgaatgttcctccgtcggcctgcacggcgccaaccgtctgggatccaactcgctcgccgagctggtggtctttggccgccttgccggtgagcaagctatgcagcgcgcaatggccgcgggcgaagccaacaacgcggcgctggatgcgcaggtcaacgacgtggaaaaccgtctgaaagacctcgtcaaccaacaaggcaatgaaagctgggccaaaatccgcgacgaaatgggtatgtcgatggaagaaggctgtggtatttatcgcacgccggagctgatgcaaaaaaccatcgataagctggccgagctgcaggagcgctttaagcgcgtgcgtatcaccgacacctccagcgtgttcaataccgacctgctctacaccattgagctgggccatggtctcaacgtcgccgaatgcatggcgcactccgctatcgcgcgtaaagagtctcgcggcgcccatcagcgtctcgatgaaggctgcactgaacgcgacgacgtcaatttcctcaagcatacgctcgccttccgtgaggctgacggcagcacgcgcctggagtatggcgatgtgaagatcaccactctgccgccggctaaacgcgtgtatggcgccgaagcggaagccgctgagaagaaggagacgacccatggctga

SEQ ID NO: 91552 - DNA, 735 bp, Enterobacter aerogenes
atggctgagatgaaaaaactgaaaattgaagtggtgcgctacaacccggaagtcgacaccgcgccgcacagcgctttctatgaggtcccttacgacgaacaaacctcgctgctcgacgcgctgggctatatcaaagataacctcgcgccggacttaagctaccgctggtcgtgccgcatggcgatctgcggctcctgcggcatgatggtcaacaaggtgccaaaactggcctgtaaaaccttcctgcgcgattacagcaagggtctgaaggttgaagcgctggctaacttcccgattgagcgcgatctggtggtcgatatgacccactttatcgaaagtctggaagcgattaagccgtacatcatcggtaatgcgcgcacgccggatcaggggccaaataaacagaccccggcgcagatggcgaaataccatcagttctccggctgcatcaactgcggtctgtgctatgccgcctgtccgcagtttggtctgaacccggagttcattggcccggcggcgatcaccctcgcccatcgctacaacgaagacagccgcgaccacggcaaaaaggaacgtatggcgcagctcaatggccagaacggcgtgtggagctgtactttcgtcggcttctgctccgaagtttgtccgaagcatgtcgacccggcggccgccattcagcagggcaaggtagaaagttcgaaagacttcctgatcgccaccctgaaaccacgctaa

SEQ ID NO: 91553 - DNA, 396 bp, Enterobacter aerogenes
atgacgactaaacgcaaaccctacgtgcggcccatgacctccacctggtggaagaagctgccgttttatcgcttctatatgctgcgtgaagggacggcggtgccgacggtctggttcagcatcgtgctgatttacggcttgttcgcccttaagcacggcgccgaaagctgggagagttatgtggccttcctgcaaaacccgattgtggtgatcctcaacctgatcacccttgcagcggcgctgctgcacaccaaaacctggtttgagctggcgccgaaagccgccaacatcattattaaaggcgagaaaatggggcctgagccgctgattaaagggctgtgggcggttacggcgctggttagcatcgtgatcctgtttgtcgcgctgttctggtaa

SEQ ID NO: 91554 - DNA, 360 bp, Enterobacter aerogenes
atgattaatcccaatccaaaacgttccgatgaaccggtgttctgggggctgtttggcgcaggcggtatgtggggggcgattatcgcgccggtgatggtgctgctggtcggcattctactgccgctggggctcgcgcctggcgatgctttcagctacgaacgcgtttacgccttcgcccatagcttcatcggtcgcctctttatctttctgatgattgttttgccgctgtggtgcggcttgcaccgtatccaccatgcgatgcacgacctgaaaatccacgtgccgaacggcaaatgggtcttctatggcctggcggcgattttaaccgtcgtcaccctggtcggcgtgttatttatctga

SEQ ID NO: 91555 - DNA, 531 bp, Enterobacter aerogenes
atgcgtctgctgccagttctcaccgtggttatcgcgtcattgctgagcgttgcgtgcagcaatcccgttcctcccgctggcgtgaccgtcgtcagcccatttgaaagccaacgcttcctcggcacctggtatgaaatcgcccgcttcgatcatcatttcgaaagcgggctggaaaaggtcaccgcgacttacagtctgcgcggcgatggcggcatagatgtggttaataaaggttataaccccgagcgtgggatctggcagaaaacagacggcgttgcctggttcaccggcgatcccaaccgcgcggcgctgaagatctctttcttcggccccttctatggcggctacaacgtgattgcgctggataaagagtaccgccatgcgctggtttgcggcccggatcgcgattacctgtggctactggcgcgcacgccgaagatttcgccgcaggtgaaacagcagatgctggatatcgccacccggcagggcttcgacgtaagcaaactgatttgggttaaccagcgctattaa

SEQ ID NO: 91556 - DNA, 318 bp, Enterobacter aerogenes
atgtcctggatcattctctttatcgccggtttgctggaagtcgtgtgggccgtcggcctcaaatatacccatggatttagccgcctgttgccaagtgtgattaccatagccgctatggtcgtcagtatggcgctgttatcgtgggcgatgaaatcactgccggtgggtaccgcctatgcggtgtggaccgggatcggcgccgttggcgcagcgataaccggcatcgtgctgctgggcgaatccgcaagcccgatgcgtatcgcgagcctcgcctgtattgtgatcggcattatcgggctgaaactcagcgcgcattaa

SEQ ID NO: 91557 - DNA, 147 bp, Enterobacter aerogenes
atggtgaaaaaaacgattgcggcgttctttactgttttggtcctttcttctgtgctcaccgcatgtaacaccacgcgtggtatcggtgaagacatttctgacggcggcagcgctatctctggtgcggcgaccaaagctcagaattaa

SEQ ID NO: 91558 - DNA, 171 bp, Enterobacter aerogenes
atgccccaacccctggatatcttcgccaaaaccgcgagcggtattgcatccagtaagcaacgcgccgctgagcagcagcaaggcaagaagtttgagcgtctggttcatgttagtcccggcgtgaaactgaaggcgcagcaaccaggctgcgcccaccgtctcaaagcatga

SEQ ID NO: 91559 - DNA, 567 bp, Enterobacter aerogenes
atggcgacttactatagcaacgattttcgtgctggtcttaaaatcatgatggatggcgaaccgtatgcggttgaagccagcgaattcgttaaaccaggtaaaggccaggcattcgcacgcgttaagctgcgccgcctgctgaccggcacccgtgtagaaaaaaccttcaagtccaccgactctgcagaaggcgcggacgttgtcgatatgaacctgacttacctgtacaacgacggtgagttctggcacttcatgaacaacgaaaccttcgaacagctgtctgctgatgctaaagctatcggcgacaacgcgaaatggctgctggatcaggctgagtgcatcgttaccctgtggaacggtcagcctatcgctgtcacgccgccgaacttcgttgaactggaaatcgttgaaaccgatccaggtctgaaaggcgataccgcaggtactggcggcaagccggcgactctgtccactggcgcagtggttaaagttccgctgttcgttcagatcggcgaagtcatcaaagtagatacccgctccggcgaatatgtatctcgcgtgaagtaa

SEQ ID NO: 91560 - DNA, 1032 bp, Enterobacter aerogenes
atggcgcatattgtaaccctaaataccccatccagagaagattggatcacgcaacttgccgatgttgtgaccagtcccgatgaactattgcatcttttagatctggaaacagatgcaaacctattggcgggacgcgatgcgaagcgtctcttcgcgctgcgcgtaccgcgcgcgtttatcgcgcgtatggaaaaaggtaatccaaacgatcctcttcttcgtcaggtacttaccgcacaagaagagtttgttgccgccccaggtttctccaccgatccgctggaagaacaacacagcgttgtacctggcctgttgcataaatatagcaaccgggcgctattgctggtgaaaggcggctgtgcggtcaactgccgctactgcttccgccgccacttcccttatgccgagaaccagggcaataaacgcaactggcaggcggcgctcgagtacatagccgccaatccgcagcttgatgaaattattttttccggcggcgatccgctcatggccaaagaccatgagcttgactggttgctgacggaactggaagcgatcccgcatattaaacggttacgcatccatagccgcttgccgattgtcataccggcgcggatcaccgaagggctgacggctcgctttaacacctcatcgctgcagatactgttggtcaaccatattaatcatgccaacgagatcggcccggagttccgggcagcgatggcgcggctgcggcaagcgcgcgtaacactactcaaccaaagtgttctgttacgcggagttaacgacaatgcgcaaaccctggcggacctcagcaatgcattgttcgacgccggggtaatgccctactacctgcacgtgctcgataaagtccagggcgcagcccacttcatggtagaagatgaggaagcacgggcgatcatgcgtgagctattaacgctggtatctggttatatggtgccaagactggcacgtgaaatcggcggcgaaccgagtaaaacgccgctggatttaggtttgaaacaacagccctag

SEQ ID NO: 91561 - DNA, 552 bp, Enterobacter aerogenes
atggcatttagcgagttcattattaataatgaagtcatattcgatgtgaatatgagtgagttacgacctgttaatggaaatggtgaaagcattaacttgaatggtccaactgcacgttgtctacaattgttaattgaaagtaatggacgaatcatttctcgagaagaatttctggaatctgtctggaaaacaaggggggttgtcgtcgcgcaaaatactttttatcaaaacatatcattgctcagaaaatcactgctgaaggctggattatcacaggatatcattgttactgtcaggcagcgtgggtttattcttgcaactggttccttgatcgtaccggttgtcaaagctgaggaagaagtgtctacctgccagataacccccttaataaaaaaagttgtaacaatagaagatagtgtgccagagataaataacaatgagcgccaaaattatattgaaaacaaaagagatagagcatttaaattacccatgtggtttattcttatgttcgtaattatggctgtaactaatatcctttcgttattttattag

SEQ ID NO: 91562 - DNA, 510 bp, Enterobacter aerogenes
atggccgctaacactgctgaagtgaccgttcttggcgaagtcaacgactcctcttcttcttgcgtagtcaccccgactggtactctgaacaacggcatcgttcgtctgacttctgttaccaccagcgaagcgaatgcacagactgctaacgtcctgttcaaaagccagaagtttggttttgacgtttctgattgcgccaaaggcagcgaaaaaccagcaaccggcctgactgttgcagttactggtaccaccagcgccaacgcaacaattctggacaacaccgctgacgacggcgctgccggcatcggtatcggcatcgcgaaagccagcgatggttctcgtgtagccttcgatggttcccaaaccatggctgaaacctacactgacggttccgtcacttctctgaactactacgcgggttatgtgaaagtaaacgaagctaccaccgtaaccgaaggtccggttaaaggcgtagcaacctttactatcgactataccactggcgcttaa

SEQ ID NO: 91563 - DNA, 687 bp, Enterobacter aerogenes
atgttcaggaccttatttaaacttgtctttccctgttttttactgataagcggcattgcgcatgccggtatcgtcattgagtctacccgctatctttacaaagaaggctcccgtgaagtaacggcacaaatagagaacaaagacggtatcccctatttaatcaagtcctggattgagaccccaaaaggacaaacgccgtcattcatggccacgccgccactgtttcgtctcgaagcaaaacaacaaaataccgttcgcctgttttctacaggtaatgtcgcggcgccaaccgatcgcgaatcgatattttatttcaacgttatggctattccccccgcggatgatacgaatgctaaaaataataccatccagctggcggttcgccatcgtatgcgtctggtatttcggccaaaatcgctgtttgatatgaccccgaataccgaagcggcaaaacttgaatggcgaaaatcaggcaataaattatcaattaagaaccctacgccatttttctattacttcaatacaataaaaatcggtaataccgaaattaaaaatgaagtgagttctgtcccgccgatggagaccaaggaagtcactttaaaacaaaatgtaaccgcatcaggtattacatggaaaatagtcaacgattatggcggagccggaacgctctattcatcatcgttgtaa

SEQ ID NO: 91564 - DNA, 2547 bp, Enterobacter aerogenes
atgcaaaataaaaataaagacctattcaaactatcagcgccaggaattgcattactggccgcatttttttctggtttggataacaaagcgcaagcacgtgattttttcgatccctcattcataaactcattgaatggtagcgatccttcaaacgccccagacttatctgtgtttgaagccaggaacgcgcaggctcccggtaactaccgggtggacatcgtctttaatggccaatacctggataccaaaactataaaatttgtgattgataatagccgggccagcaccgctagcgatgagatcaaactggcgccctgcttcagtctcaaggacttatcgcaatatggcgttagagttaaagcattcactaaattgcaagaagatgctaatggttgtactaacctgacggttattccagataccaaagcggattttgattttaacgcgcagcgtttaaatatctccatccctcaggcggcattatccaccgtcgtgcaaggatttatccctgaggatcaatttgacgacggaattaacgcgctactggtgaattaccagttcagcggctcggatgatttcgaatccgaagacgaatactatagtcttaacctccagtccggcttaaacctcggcccctggcgcatcaggaatctgagcacctggaataaaacaaaaggcgacgcaggcgactgggagtcggcgtacctgtacatgcagcgtagtatacgccccattaacagtaatttggtgatgggcgaaagctcctcgctttccgggatctttgacagcgttccgtttactggggtccaactcgcgacggatacctccatgctgccagagagcctgcgcggctatgcgccaattatccgagggattgcaaaaaccaacgccagggtgatcgttaagcaaaacggctatcaggtctatcagacctacgttgcccccggcgcctttgaaatcaccgatatgtatcccagcggcggtagcggcgacctgtatgtaaccgtagaagaatcagatggctcaaagcaagaattcatcgtaccgttcgccacgctaccggtcatggtgcgtgaaggccagctgcagtatgaaatcacttcaggtaaatatcgcccatatgatgacggcgtacatgaaacgccatttacccaggcaacggccagctacgggatgtccagtagcctgaccgcctacggcgggatgcagatggcctcgcattatcaggcgttgtcatccggtctcggctataacctcggcgatttcggagccgcgtcagctgacgtcacccaagcctggtcaaaaatgcaggatcgggaaaagacttcgggacagtcctggcgaatccgttatggtaaaaacatccttgataccggcaccaacatcaccatcgctggctatcgatactctactaagggatttaacaccttatccgaggtgctggatagttatgctaatgacggtcgctataccacccgttcattacgcaatcgcaccaacctgaccctcaaccaaagtctgggtaaaggcctgggcagcgtatctattagcgggctggttgaagattattgggatgataaacgcaccaacaaatctatcagcgttggctataacggcggctttagaaatgtgaacttctatctgggctatagctatagccgctatacctggagcaacaatagctccgacagcgacgcgcaggacgatcagcgcattacgttgaccgtcacgctgccaatcagcaactggctccctggcacctacaccagctatcagctcaccaatagtaaccccggctcgacggatcaatccgtcgctatcggcggcgtggggctggaaaacgatagcctggactggagtatccagcagggatatagcaaccgtgagtattacagcggcgacatgcgcgctacctataacggttcccagggcagcatcaatgccggttatagctacgatcgtgacagtcagcgcgtggattatggcgccagcggtagcattatcgcccacgccgacggtattacgttaggacaggacatcaccgatgccgccgtgctggttaaggctccaggcttagataacgtcaagctgactaccgatagcactatctcaaccgactaccgcggctatgccatcgtgccttacgtcaccccttatcgccgcactgatattacccttgatagcaccacgcttggtgatgatatggaactgccggaaacgacgcaaaccgtggtgccaacccgcggcgccattgtacgggccaactacgacggcaagatcggacaacgcgcctttattcacctgaaaacggctagcggtcaagacgttccttacggcgctatggtcttactggccgacgatgcgaaaagccaggcgagtatcgtcagcgacgccgggatggtctatatgtccggtctgcagcaaaccgggacgctcaacgtacagtggggaaaaagtagttcccagcaatgtaaagcccccttcacgttacctccgcgagaaggcaaaaccgctggcttaaaccagatcgaagcggtgtgtcgctag

SEQ ID NO: 91565 - DNA, 1017 bp, Enterobacter aerogenes
atgaagagaatgtttattctattaatgcttttagttacctgcggtgaggcgactgcaaaatgtagttactcaggcagcatccagcggcaagcatttactattagagcaaaaataccgacagacgactcaattccagtgggaagcatattatattcggctaaatacggcactggtaactataaaaacttctcatgtagccaaaaaactaacgatcagtatataactaccatcagtacaccagaagtagctggcgttacaggaatacagggaaagccagtatatgaaaccggaattgacggtattggattccagatatccgatcttctggaaagcaaaaatggcgcattagtgcctgctgtcgcgggctcagtactagtaccatttgaaaatacgtcagataattactataaattcattaccgtgtggtttatcaaaaccaagcaggtcattgatacttcaggttcggactcaaatccatcaataagtttctctgtcggcaatcctaccaccaaccctggaagtaatgacaaactattatatacaaccaatatcaagctaaaaaacaccaaatatcaggcaacctcatgtgacatatcaccatccagttcacaaataacgctcggccggattaaaaaaagcacgctaatgtcggtctcccgcggcggcgtcacgccagagcaaaagaatttcttattaaccattacctgccctgcaggttccatcgggaatactttaatgtactggtttaatccgataggcaccgcgagcacatctggcgatggtatcattgataatatgataaccgacgattctggcgccaaaaatgttggtatcattttcaaacaaactggcaccccgttagtcttttatgatatggatagctacagttttaatagtgccgcaacatcgcaggtgatcaatctcaccgctgattactatcgcaaaagcaatagtgttgacgacattacaaatggtagagttaaagcaatgttagaagtagttattcaggaacaataa

SEQ ID NO: 91566 - DNA, 366 bp, Enterobacter aerogenes
atgaaggaattaactgtatttgaaatggaagagatctccggtggttacacttgggatttctcatcagttacctccactatcacttcactagctagcaatgcggtagaggctcttgctattggaacattaggtgccattattgtgtcagccgtcggcacgtggattggtggtgttcaaggcggtcataatggtggtattttgggacttggcctacttggtaatgctgtaggggctgttgttggctttgttcttggtgctattaccggagctgctggagccgtcgcattcggttgggacaagtcaatggctattttccaggaatttatagatagtgcccttgatggtacctttgcaccgggatcttga

SEQ ID NO: 91567 - DNA, 1290 bp, Enterobacter aerogenes
atgaataaaaatctctatcgcaaggaagcgatcgaatacaaaaggcatcactggaaagggaaagccttgttgctcgctggcttacccgcctggttaatcgccttattgtcggcattatttctcattgcgcttatctgcgcattgatattttgcaagtttacccagcgtgtcgatgttaaaggcgaagtcattaccctgcctcactcaattaacgtctttgcgccacagcaggggtttatcgtcaagcaattcgtaaaaattggtgacgtcgttaaaaaaaaccaaccgctatacgagattgatgtttcccgcagcaccaccagtggcaatgttagcgcggcacagatagaagttatcaatgaaaaaatcgccaactctgaagatattattaaaaaactggaagataataaaaaccagacgttaaatgcgctgaatgcgcagttgaaaactaccactgcctccctgaaggagaccaaccgtatgctggtcaacacccaggtaggcctgaagaaaatgcatgataacctttccagctacgataaataccttagcaacggcctgataacaaaagatcagtataactatcagcactctttatactttcagcagcagagtgcctaccagtctttagttagccaaaaaatgcaactcgaatcgcaaattacacaacttaatagcgatataatcactaaagctgctgattttgacaaccaaatttccagtcaatacaaccaggccaatgattataaaaatcagttagtggaatctaatgctaacggtaatattattatcaaatcgaccagcgatggcaggattgagtcactgtcggctacccaagggcaaaccgttgataatggaagtagcctggcccagataaaaccgaccggaaacgttgagtattatctcattctgtggctacccaacaataccattccgtatttaaaaacgggagataccatcaatattcgctatgatgccttcccatcggataaatttggtcaattcccaggaaaaattatatccatatcatcaatgccagcgtcacggcaagaaatgtctgaatacaccaacgtcagtaacggtaccaatcagcaacaagaactggcgctgtataaagcgattgtcaaaattaaagataaacagttcgaatatgacgggaaaaagctaagcctctccaatgggcttaaagcacaggctgttgtcttccttgaagaacgccctctctacatgtggatgtttactccggtttataagattactcaaagcgtgagcggcccgattcatgactaa

SEQ ID NO: 91568 - DNA, 2124 bp, Enterobacter aerogenes
atgactaatgaactgtttgaaaaaattacggcgaaagttaatttttcaatactgaaaaaaacgccggtcatattgcaatctgaagccgccgagtgtggcattgcctgtctggcaatggtttgcggccattatggtctcgatatcgatctgttcaatttccgtcaacgctttggcagcccctcccagggggtaacgttgatgtcactgagcaaaacggcagaacatgctggcttaaaaagccgtgcgctgtcgctcgatcttgatgaaatcagacaattaaagctgccctgcgttatccactggggaatgaaccactacgtcgtgctcaccaaagtacgcaaatctagctttgtggttcacgacccggcgctgggtaaacgcattatcggcattcaggaaatgtcgaacaactttaccggcatcgcgttagagttatggcccgatcagaacttccagcaggaaaaagccaaatctcgcctgcgtttgttagatctgatgcgtaatattgttggcttaaaatcagcgctgctgaaaattttcgccttttccgtcgtcgttgaagcgattggactactgttgccaataggcacgcagttggtcactgaccacgtgatcatggcccacgatcaaagcctgctctcggttatctgtattggtctggtcttctttaccctcttccgcacctttatcagtatgctgcgcgcatggacttcactgacgctcaacacgctaaccaatattcagtggaaaaccactctattcgatcatttggctagcctgccgctggcatttttcgaaaagcgtcatctgggggatattcagtcccgtttctcttcgctggataccattcgctccacgttcactaatagcatcgtcagcggcattatcgactcgatcatgacgatcggcctgctgattatgctcaccctgtacggcggttggctaacatgggtcgtcgttggctttaccttatgttacgcccttatgcgtctgggaacttatcgcttctatcgccgcgttgctgaagaacaggtaatcaaaggcgcgcgctccagttcacactttatggagtcgctatacggtatttcgaccatcaaagcgctgaacctgaaagaacgccgctctcagcactggctgaatatcaacatcgacgcctgtaatgcggggatcaaacagacccgtttcgacatgatgtttagcggtatcaatacctttattaccgccatcgatcaggttgcggtactgtggctgggcgccattatggttattgataatgaaatgaccctcggtatgtttatggcttttaacgcctaccggggccagttctcccagcgcgcatccagcctggttgatcttaccatgcagctacgcatgctctcgctgcataacgagcgtctttcagagatcgtcttcagcgaaccagagcaagagctaccgtcacgtgaagtcttttcgaaggatgccggcgccaggcttgaagtcagaaatctcagctatcaatacgatcccttttcgcagccgattttctcaaatctgaacatcaccgttgagccgggggaatccgtcgcgctggtcggcccgtccggcgtcggtaagaccacgctattgaaagtgatgtgcgggctgctctcgcccaccagcggcgacgtcttcgccgataatctcgatatccagaagataggtctaaataactatcgccagggaaccgcctgcgtgctgcaggaggaccgcctcttttccgggtcgcttatcgataatatcagcggttttgaagataacgccgatgtggattttgtcgtcgaatgcgccaaacgctgcaacattcacgacgaaattatgaaaatgccgatgggctatgaaaccatcgttggtgagttgggcctggggatttccgggggccaaaagcaacgtattttgattgcccgcgcgctttaccgtaaaccgagcattctgtttatggatgaggccaccagccatcttgatttaagaaatgagtcggttatcaaccagtctatttcaggcctcagtattacccgcgtcatcgtcgcccaccgcccgtcaaccatcgcctctgcggatcgggttattgatttatcgcagtcaagaataccaatgccagcgtaa

SEQ ID NO: 91569 - DNA, 870 bp, Enterobacter aerogenes
atgcaaggaacgtttattggttttaacaccgccggaattacctacgaagaccatttcatggcgctgctgctgaaagtaaaacatcggaatggcatgtttcagacgtactatttgcaggcgccggtgctggctgacctgctcatggtcctggcaaaccgaatgtctattttcttgcagagattacaacaggatggcgagaatgaggctcagaaagtggagcttcttgcctacaatgaaacgctaatagccaacacgccagagatagatatgttggaggtacaaaaccccaacccggagctgcgaatcatgtcgatcaccctgaaaccaggggaaacagaatcgacgctgatattaatgctgcagaacgagcaaatagcaactctacggattgatgaccgccaggtcgaagcgctgatattggggatccaacaatctctcaccatggccgcggacacgaaactgaatgaatatttagctttggctctggacttcgtactgctgtataccgtcgatttaacgacccaacctaatatcgagtaccagcaatacgctcaggaagagtggaagttaaatctgttcaaccatcatcttggcgtgctgtatagctacgagcaggaagagggtaaaaaagtactctctggcgcggtgattaaaaccagcgccgcgcatcagtcagattttgaaaaaagtatcgcgctacgtctgattgaaaagagccagaagctaaaacaagttcacaaccaacatacaccgtatcaaatcttcagcaaggtgattccatccgcaccgggacaaatgctgactaaggatgaatgcttaaagtcattgcacgaattctacgtggcgaccagagcagcgcttgaggcataa

SEQ ID NO: 91570 - DNA, 354 bp, Enterobacter aerogenes
atgcaggtaaaatatttagcagggattgtcggcgcagcattattgttagcgggttgcagttccagcaacgaattaaccgcaggcggccagagcgtgcgttttgttgaagataaaccgggaacggaatgccagctgttagggacggcaaccggcacgcaaagcaactggctgtccgggcagaatggcgatgaaggcggctcgatgcgcggcgcggcgaatgcgctgcgtaaccaggcggcggccatgggcggtaacgtcatttatggcgtgagcagcccgacgcaaaatctgctgtcgagctttgtcccgaccgatagccagatgaacggccaggtttataagtgcccgaactga

SEQ ID NO: 91571 - DNA, 1647 bp, Enterobacter aerogenes
atggcagcaaaagacgtaaaattcggtaacgacgctcgtgtaaaaatgctgcgcggcgtaaacgtactggcagatgcagttaaagtcaccctgggcccgaaaggccgtaacgttgttctggacaaatccttcggcgcgccgaccatcactaaagatggcgtttccgttgctcgtgaaatcgaactggaagacaaattcgaaaacatgggcgcgcagatggtgaaagaagttgcctctaaagcgaacgacgctgcaggcgacggtaccaccaccgcaaccgtactggctcaggctatcgttaacgaaggtctgaaagccgttgctgcgggcatgaacccgatggatctgaaacgtggtatcgacaaagctgtcgttgccgctgtggaagaactgaaagcgctgtccgtaccgtgctctgactctaaagccattgctcaggttggtactatctccgctaactccgacgaaaccgtaggtaaactgatcgctgaagcgatggataaagtcggtaaagaaggcgttatcaccgttgaagacggtaccggtctggaagacgaactggacgtcgttgaaggtatgcagttcgaccgtggctacctgtccccttacttcatcaacaagccggataccggcgctgttgaactggaaagcccgttcatcctgctggctgacaaaaaaatctccaacatccgcgaaatgctgccggttctggaagccgtagcgaaagctggcaaaccgctggttatcatcgctgaagacgttgaaggcgaagcgctggcgaccctggttgttaacaccatgcgcggcatcgtgaaagttgcagcggttaaagcgccgggcttcggcgaccgtcgtaaagctatgctgcaggacatcgcgaccctgactggcggtaccgttatctctgaagagatcggtatggagctggaaaaagcgactctggaagacctgggtcaggctaaacgcgttgttatcaataaagacaccaccaccatcatcgatggcgttggcgaagaagccgcaattcagggccgcgttgctcagatccgtaagcagatcgaagaagcgacctctgattacgaccgtgaaaaactgcaggagcgcgtggctaaactggccggcggcgttgcggtaatcaaagtcggtgctgctaccgaagttgaaatgaaagagaaaaaagcgcgcgttgacgatgccctgcacgcgacccgtgctgcggttgaagaaggcgtggtagctggcggcggcgtagcgctggtccgcgtggcggcgaaaatcgctggcctgaccggtcagaacgaagatcagaacgtcggtatcaaagttgcgctgcgcgcaatggaagcgccgctgcgtcagatcgtttccaacgctggtgaagagccgtctgttgttgccaacaacgtgaaagcaggcgacggtaactacggttacaacgcggctaccgaagagtacggcaacatgatcgacttcggtatcctggatccgactaaagtcacccgttctgcgctgcagtacgcggcatccgttgctggtctgatgatcaccaccgagtgcatggtgaccgacctgccgaaaggtgacgcgcctgacttaggtgctgctggcggtatgggcggcatgggcggtatgggcggcatgatgtaa

SEQ ID NO: 91572 - DNA, 294 bp, Enterobacter aerogenes
atgagtattcgtccgttacatgatcgtgtgatcgtcaaacgtaaagaagttgaaaccaaatctgcaggcggcatcgttctgaccggttctgcggcagctaaatcaactcgtggcgaaatcatcgctgtcggtaaaggccgcatcctggaaaacggaactgtgcagccgctggacgttaaagttggtgacatcgtgattttcaacgatggttacggcgtgaagtctgagaagatcgacaacgaagaagtgctgatcatgtccgaaagcgacatcctggcaattgttgaagcgtaa

SEQ ID NO: 91573 - DNA, 1248 bp, Enterobacter aerogenes
atgagtgggttaaaacaggagctggggttaggtcagggagtcgggttgctttcaacatcactactgggaaccggcgtgttcgccgtaccggcgctggcggcgctggtcgctggcgataacagcctgtgggcgtggccagcgctgattctcctggtctttcccatcgctatcgtgtttgccgtgcttgggcgccactttcccagcgctggcggcgtggctcattttgtggatatggcgtttggcccgcgtctggcgcgggtaaccggctggctgtttttatcagtcatcccggtgggtttacccgccgccctccatattgctaccgggtttggccaggcgttgtttggctggcacgatactcaactgctgcttgccgagctcggcacgctggcgatcgtctggtgggtgggctcgcgcggcgccagttccagcgctaatctacagacgctggtcgcggtaatgattgtcgcgctgatcgtcgccatctggtggcgcggcggcataaacccggcgcagatccctttcccgcagcctaaagacgtcgacacatcgcagctgtttgctgcgctatcggtaatgttctggtgcttcgtcggccttgaagcctttgctcatctggcatcagagtttaaacgtccggagcgcgacttcccccgggcgctgatgattggcttattgctggcaggaaccgtttattggggctgtaccgtggtggtactgcattttcgcgccttcggtacagaaatggcggcggcggcctcgctgccaaacatcgtagtacggctattcggcgtgcaggcgctgtgggtcgcctgcgtgatcggctatctcgcctgcttcgccagcctcaatatctatatccaaagttttgcccgcctggtctggtcgcaggcgcagttcaagccggaaggttatctggcccgcctgtcgccgcgtcaggtaccgcgcaatgcgctgaatgcggtcttaggctgctgcgtactcagtacgctgtgcatttactggctgaacattaatctcgatgcgctgatcgtctatgccaacggcattttcatcatgatttatctgctgtgcatgctggcgggatgccgactcctgcacggtaaataccgcgtgctggccattgtgggcagcgtgctctgcgttttgctattggcaatggtcggctggaagagcttgtacgccattattatgctggcggtgctgtggttcgccttacctgcacggtcatcctcagcaagccgataa

SEQ ID NO: 91574 - DNA, 471 bp, Enterobacter aerogenes
gtgcgttggatcccatttattgcctttttcttatacgtttacgtcgagatctcgatctttatccaggtcgcacacgtgcttggcgtgttgctgacgctgattctggttatctttagctcggtggtggggatgtcgctggtgcgcaaccagggcttcaaaaacctgatgctgatgcagcagaaaatggcggctggcgaaagccctgccgcagaaatgatcaaaagcgtgtcgctgattatcgccgggctgctgctgttgatcccgggcttctttaccgacttcctcggcctgctgctgctgttgccgccggtgcaaaagctgatgactttaaaactgatgccgtatttgcgctttagccggatgccgggcggcggttttagcgctggcgccggcaacggagacacctttgaaggggagttccagcgcaaagacgacgaacgcgaccgtctggatcacaaagacgaccgctaa

SEQ ID NO: 91575 - DNA, 1437 bp, Enterobacter aerogenes
atgttaaacaacattcgtatcgaagaagatctgttgggcaccagggaagttccagctgacgcatactatggcgttcatactctgagagcgattgaaaacttctacatcagcaacaacaagattagcgacatccctgagtttgttcggggcatggtgatggtgaagaaggccgccgcgctggctaacaaggaactgcaaaccattcctaaaagcgtagcgaacaccattgtcgccgcatgcgatgaggtgctgaacaacggtaaatgcatggaccagttcccggttgatgtgttccagggcggcgcgggcacctccgtcaatatgaacaccaacgaagtgctggcgaatatcggtctggaactgatgggccaccagaaaggtgaataccagttcctcaaccctaatgaccacgtcaacaaatgccagtccactaacgacgcctacccaaccggtttccgcatcgcggtctatgcttcgattctcaaattaatcgatgccatcaaacagttgggcgaaggcttccaggcgaaagccgtcgagttccaggacatcctgaaaatgggccgcacgcagttacaggatgcggtgccgatgaccctcggccaggaattccacgcttttaacgttctgctgaacgaagaaaccaaaagcattctgcgtaccgcagaactgctgctggaagtgaacctcggcgcgaccgctatcgggactcgcctgaacacccctgacggctaccagcagctggcggtacagaaactggcggaagtcagcaacctgccggtcgttccggcggaagacctgattgaagcgacttctgactgcggcgcgtatgtgatggttcacagttcgctgaaacgcctggcggtcaaactgtccaagatttgtaacgacctgcgcctgctctcttccgggccgcgcgctggcctcaacgaaatcaacctgccagagctgcaggccggttcctctatcatgccggcaaaagttaacccggtggtgccggaagtggttaaccaggtgtgcttcaaagttatcggcaacgatactaccgtaaccatggcctctgaagccggtcagctgcagttgaacgttatggagccggtgattggccaggcgatgtttgaatctatccatatcctgactaacgcctgctacaacctgctggaaaaatgcgtgaacggcattaccgccaacaaagcggtatgcgaaagctacgtctacaactccatcggtatcgtgacctacctcaacccgttcatcggccaccacaatggcgatatcgtcggcaagatttgcgccgaaaccggtaagagcgtacgtgaagtggtactggaacgcgggctgctgaccgaagccgaactggatgacattttctccccgcaaaacctgatgcatccggcttataaagcaaaacggtataccgatgaaagcgaacagtaa

SEQ ID NO: 91576 - DNA, 1302 bp, Enterobacter aerogenes
atgtttggtgcagagctcgtggttgtcctgctggcaatctatttgggggcccgactcgggggcattggtatcggctttgccggtggcctcggcgtcctcgtcctgaccttaatttttcaaattccacccggggcaatcccctttgacgtcattgaaatcatcatggcggttatcgccgcaatcgccgcgatgcaggtcgccggagggatggattatctggtcagcctcgccgaacgtatgctacgccgccatcccaagtacattaccttccttgcgccgctggtcacctggtttatgaccgtgctggcaggcaccggtcataccgcgttctctaccctgccagtgattaccgaagtggcgaaagaacagggtattcgcccttcccgcccgctctccatcgccgttgtcgcttcgcagattgcgattaccgcctcgccgatctccgcggcagtggtcttctttgccggtattctcgaaccgcttggcgtcagctacctgacgctgctggcgatctgcctgccggttaccctgattgccgtcatgctgaccgccgtggtctgtaacttcctcggctgcgagctgaaagacgacccggtctaccaggaacggctggcaaaaggggaagtgagcctgcgcggcagtcaggtcttcgaactgaagccgcatgctaaacgctccgtcctgctgttcctcgtcggcatcgtcgcggtcatgttctacgctacagccatcagcgacaccgtcggcctgatccagaacccggtactgccgcgtaacgaagcgatcgtagtcttcatgctgaccatcgccacgctgattagcatcacctgtaagatcgacactggcgaagtgctgaacgccagcacctttaagtccgggatgagcgcctgcgtctgcgtgctcggcgtcgcctggcttggagataccttcgtcaaagcgcacattgccgatatccagacggtagcgggcgatctgctgcacaactatccgtggctgctggcggtagtgctgttcttcgccgctacgctgctctattcacaggccgccaccactaaggcgttgatgcccgccgcgctgctgctcggcgtcaccccgctgacggcaattgcctcattcgccgcggtctcagcgctgttcgtgctgccaacctatccgaccctgctggccgcggttgaaatggacgacaccggctccacgcgtatcggcaaatatgtctttaaccacgccttcctgatcccgggcgtcatcgccattacgctttgcgtgatcctcggattcatcttcggcggcctcatgctgtaa

SEQ ID NO: 91577 - DNA, 324 bp, Enterobacter aerogenes
atgactacgcctgatgctgttgttgtactctgtaccgcgccggatgaagcgaccgcccaggatctggcggccaaagtgctcggggaaaaactcgccgcctgcgccaccatcctgccgggagcgacgtcgctctactactgggaaggaaagcttgagcaggagtatgaagtccagatgctgctcaaaaccaacctggcccatcagcaggcgttactggactgtctgaagtcccatcacccgtatcaaacccccgaactactggtcctgccggttactcacggagacaacgattacctctcatggctcaacgcatcattacgctga

SEQ ID NO: 91578 - DNA, 1725 bp, Enterobacter aerogenes
atggctcaacgcatcattacgctgatcctgctactgtgcagcgcatccgccagcgccgggttgtttgacgcccccgggcgctcaaacttcgtgcctgccgatcgggctttcgcctttgactttcagcagaatcaacacgacctcaacctgagctggcacatcaaggatggctactacctctaccgtaagcagattacgctgacgacaaaggacgctgcgatcgtcgacccttctctaccgcctggcgaatggcatgaagacgagttttatggcaaaagcgaaatttatcgtcagcgcctgacgttgccgattaccctcacgcaagccggcaaagcagccacgctgaccgtcacctatcagggctgtgccgacgccgggttctgctatccgccggagaccaaagtcgtgccgctcagcgcggtgctcgccgattccgacaaggcgcaagcggccaaaccatcagcgcccgccacgctcccggccagcggcagccaaaccggcgcggaacccgcgtcgctgccattttcggcgctatgggcgctgctgattggtatcggcatcgcctttacgccttgtgttttaccgatgtatccgctgatttccgggattgtcctcggcggtaaacagcgcttatcgacggcgcgcgccctgctgctggcatttatttatgttcaggggatggcggtaacctataccgcgctggggttgatcgtggccgccgccggcctgcaattccaggccgcgctgcagcacccttacgtattaattgggctgtcagtggtatttatcgcgctggcgctgtcgatgttcggcctgtttacgctacagctgccttcatcgctgcaaacccgactgacgctaatgagcaacaagcgccaggggggctcgccgggcggcgtgtttgcaatgggcgctatcgccgggcttatctgttccccttgcactacggccccgcttagcgccattctgttgtatatcgcccaaagcggtaacctgtggctcggcggcggcacgctgtatctgtacgcgctgggaatggggctgccactgatcctggtgaccgtgttcggtaaccgtctgctaccgaagagcgggccgtggatggctcacgtcaagaccgcgtttggcttcgtgatcctcgcgctgccggtttttttactggagcgcgttattggcgaagcctggggtttacgcctgtggtcgctgcttggcgtcgccttctttagctgggcgtttattacctcgcttggcgcgagcaaaccgtggctacggctggtgcaaatcgtcatgctgggcgctgcgctggtttgcgcgcgtccgctgcaggattgggcctttggcgcgccggccgtccagcagcaggcgcatctggaatttacccgcgtcagcaccgttgatgaactcaaccaggcgctggcgcaggccaaagggaaaccggtcatgctcgatctgtatgccgactggtgcgtggcctgtaaagagttcgaaaaatatacctttagcgctcctgaagtgcgacaggccctaaaagagaccgttctgctgcaagtggatgtcaccaagaacagcgcgcaagacgcggccctgctgaagcatttacaggtgctcggcttgccgacgattctgttcttcaacgcgcagggagaagaacagcccgcgcagcgcgtcaccgggtttatggatgccgcggcattcagcgcccatttgcgcgattggcaaccgtga

SEQ ID NO: 91579 - DNA, 591 bp, Enterobacter aerogenes
atggaggagactaccgtgcaacgtgaagatgtcctgggtgaagccatacaaattctcgaaatcgagggtatcgccaacaccacgctggaaatggtcgccgaccgcgtcgcatatccgcttgatgacctcaagcgtttttggcctgaccgcgaagcgttgctctatgacgccctgcgttatttaagccagcaggtagacgcctggcgtcgccagctattgctggatgagacgctgagcgcagaacaaaagctgctggcgcgctatagcgcactgaccaaatgcgtcagcaaccaccgttatcccggctgcctgtttatcgccgcctgtaccttttacccggatgcccagcacccaattcaccagttagcggaacagcagaagcaggcttcgctggcctacacgcacgagctgctcactcagcttgaggtggatgatccggaaatggtcgccaagcagatggaattaatcgtcgaaggctgcctgagccgcatgctgatcaaacgtagccaggccgacgtcgataccgcccatcgtctggcggaagatatcctgcgctttgcccgctgccggatgggcggcgcgcttacgtaa

SEQ ID NO: 91580 - DNA, 2088 bp, Enterobacter aerogenes
atgcgtccacttctctgggccgccatactggggctctgttcgacctcgctgatggccgcccctcctcgcggtttctctttcgcctacaaagattgggaagtcgcctgcgataataccggcacctgccgggcggcgggctatggcgcgacaatgggcgaagtcagcgttctgctgacccgtagcgccggccccgggcggcaggcaaccgcgcaggtcacgtttgcgcagaccgagcacgatattccgccagatgccagcgtaaatctgtttatcaacgataacgatcgcggagcgcttgaggctatcgacgacagccattttcattttgacagtacgcaaaccagcgcgcttattaccgccctggagcaaaacgctaaaatcgagctggcgctcaatggccagcgcaaacggctgtctaacgcgggcagcagcgcggtgttcctcaagatcgatgaattccagcagcggatcggtaccgccgatgcgctgttacgtaaaggcggcggtgacggcagcaccgtcctgcgcgccattcccgcaccggagatcctgagcgcgtcgtttattcacaacgcccagcccgttgcgctcaatgcgaaacaacagcagaaatggctgccgcaattggaaagcacgctcaacagccagtgtgatgactggcaaaacgccgatattccggccaacgaacggcagatcaccgtcgccccgctggataaaaatcactcgctgctgcagactctatgctggcgcgccgcctataacgacggctacgcgatgtgggttgtcgataacacacaggccgccaggccacagctgataaccactgatgcctccagctataacgatggcgtaatgaccttcttcaacaaaggacgcggcgtcgccgactgtgttaacggggaagaacgtgtgtgggatggcaaaacctttgtgcaaagcctcaagtacagtaccggcatgtgccgggaaatcaccccaggcggaacctggcagcttcccacctttgttagcaaagttatcccccgtcagcaacgagaggccgacatactcgcgctgaagacgttgcacgatgcggtactaaaagagcaaaaacgcaacccggaactcgcgctagagaacattgcggaacagttcccgctcacaggccacgtcactcactttaccctcacctatgccgacgacgcgccggtctcgacgaccaagccagcggcggatatcagcgacgatgaatggcaagcgtttttgcattccgatatcagcgccgattcggaaaacggcaaagtcagcttcacgcttatcgacctcgacggcgacggcaaacgcgatctcatcatcgatagctacgttggcggcaccggcctgttcagctataccggcgtgctgaaacgcggtgatagcgcctttgaatcggtgaacaatgccgacagcaatgacgacgataacttcgatgccggcgtgcccggcgccctttactctattaacgatcgcggagcgaaccagtggggccgctgggtcagaatcaacggccaggtttacgccctgtggtttaacggcgtgtttggggaagataatctgtatctgctgcgtccgttcaaccagagcgacctgacgccggccatcaccatccgctaccgctataacctcaatatcattaatgcagcggaaaacgagcaggcccccacccccgccttaaacgataaagatagagctggcttattgaagtcattggacgtcatgcaaggtagcctgctaaaggataaatctgctgacgataacgatgagccgatttgcccgatcccgccaggcactgcgaaagacgatgcggacagctactatggcggcgctgcaggacactatactgtcgaaacggtggcgtggatcccggtatggctcaacgataaatgctttatcggcacgattttcagccatcatggcgcttaccgccatggagtggatgcgatcttaaccatcagttcgccacgggatgacgaagagctcgttggcgattacgatatctccggaaaacgccatgccatcgccatcaccagcggctggaaagttcgcgaaggcgataacggagtgatgtga

SEQ ID NO: 91581 - DNA, 558 bp, Enterobacter aerogenes
gtgctgggtgacaatatctatttcggccagagtttcggtaagaagctggaagcggcggcggcgaagacgtcgggagcgacggtctttgggtaccaggtactggatccggaacgttttggggtggtggagtttgatgaaaacttcagggcgttgtcgatcgaagagaagccgctgaagccgaaatccgactgggcggtgaccgggctctatttttacgacaacaacgtggtggagatggccaaagaggttcgcccgtccgagcgtggtgaactggagatcaccaccctgaaccagatgtatctggagcgcggggatttgcaggtcgaacttttggggcgtggatttgcctggctcgacacgggtacgcatgacagtctgatcgaagcttcacagtttattcataccattgagaagcgccaggggatgaaagtggcctgcctggaagagattgcataccggaataaatggctgtcggcggaaggcgtggctacacaggccgagcggctcaagaagacggaatatggcgcctatcttaagcgtttgctgaatggagattaa

SEQ ID NO: 91582 - DNA, 1137 bp, Enterobacter aerogenes
atgagtgcgattaaaatattatctattttcggaacccgacctgaagcaattaaaatggccccggtagttgagaatcttaaaggcgataaccgattcgaaagcaaggtatgtgttaccgcgcagcatcgcgagatgctcgatcaggtcctgcagttattcaatattactcctgattatgaccttaatattatgaaatcaggtcaggatctcactgatataacatcttctattcttttagggttgcgctcagttcttcaggaatttaaacctgattatgttttggttcatggtgacacagccactaccttgtctgcaactcttgcaagctattatcagcaaatcaaagtcggacatgttgaagctggtttaagaaccaatgatatttattctccatggccagaagagggtaacagaaagttaactggcgcactggctaacttgcattttgcacctacgtcgacttccgctgacaacttacgtcgggagaatgtgccacaggagcgcattattattactggtaatacggtgattgatgctcttcttatggttaaagataagttagcgcaagatcctgttctggcaggtgagttaaaggccaagtttgattttattgatgatgaccgtaaaattgtattaattaccggacatcgtcgtgaaagttttggcggtggctttgaaagaatctgtaatgcggttctaaaattagctaaaacattcccggatgtcgatttcgtctatcctgtacacttaaatcctaacgtccgtggcgtggtaaactccgtactgcgtggacaggataatatttatctcattgaaccacttgattacctccccttcgtcttcttgatgaatgcatcaagcattattctgactgattccggcggtatccaggaagaagccccatcactcggcaagcctgtcctggtaatgcgtgatacaacagaaagaccggaagcggttgatgcgggtaccgtgaaactggtgggtaccgatgagaagtgtatatttgatgccgttgccgaacttttgacgaataaatctgagtatgaagcaatgagctttgcacacaatccgtatggagatggcaaagcatcatcgcgaattgctgatgctatagctcattctcttaacgtttaa

SEQ ID NO: 91583 - DNA, 816 bp, Enterobacter aerogenes
gtgaatatactagcttcacttgttctttataagcattctcttcaagaaattgagcttacactcaattcattattgaatgaaaagagtatcagtaaacttgttattgtagataatggctctttttgtcattggttgaatgattataagcatgataaagttgatgtaataaagctctctaataatcagggttttggcgcagggcataacaaggtttttgaaacctataaaaaccaatgtgactattttttgatctgcaatcctgatatttattatgcacaaggtgaagtcgataagttctttgctttttgtaaggaaagatctgtagatctttctgtgccaaagattacatatccaaatggtgcattgcagtacgcgactaaattactacctgcgccattccagctttttggaagacgttttctttcgtcatttttccctgatatcaacaatgattatgagcttcgtcatgccaattttaatacggcattctacgcgccatcaatgtcaggttgttttatgttggtgagcaataacgccattcgacaagttcagggatttgatcttcgcttctttatgtatttagaagatgttgatttctcgcgacgtatcagcgcgggtaattttaatgttgtgtattgtccggattccaccgtcgttcatttatcacaaagaaagtcctaccacagcctaaaatttcttttttatcatatgagttcagcgataaaatatttcaataagtggggatggttttttgataaaggacgtcggcaacttaacaaacgttgtctgtcatcactgcccacaaaatctgaatag

SEQ ID NO: 91584 - DNA, 600 bp, Enterobacter aerogenes
atgttgagtgaacagctggattggcaaaaaaccgacggcatgatgccggccatcatacagcacgctgaatctggcgaagtgttaatgctgggatatatgaatgaggacgcgctggcgaaaacgcaagaaagcggcaaagtgaccttctactcgcgcaccaaacagcgcctgtggacaaagggtgaaacctccggcaactttcttaatgtggtcagcatcaccccggattgcgataacgataccttgttagtgttggtcaacccgataggcccaacctgccacaaagggacgtcaagctgctttggagaaaccggacaccagtggctgttcctctatcaactggaacaactgctggccgagcgcaaacatgctgacccggaaagttcctacactgcgaaactgtatgccagcggcaccaaacgtattgcgcagaaagttggggaagaaggcgtggagaccgcgctggccgcgacggtaaatgacaagtttgaattgaagaatgaagcgtcggatctgatgtatcacctgctggtgctgctgcaggaccaggggctgaatttaggggaagtgattgataatttaagggcgagacataagtaa

SEQ ID NO: 91585 - DNA, 777 bp, Enterobacter aerogenes
atgctggcaaaacggataatcccctgccttgacgtccgcgacggccaggtagtgaaaggcgtacagttccgcaatcacgaaattatcggtgatattgtgccgctggcaaaacgctatgccgatgaaggcgcggatgaactggtgttctacgatatcaccgcctccagcgatggccgggtagtcgataaaagttgggtttcgcgcgtggcggaagtgattgatattccattctgcgtcgcgggtggaattaagtcgctggaagacgcggcacagatcctctccttcggcgccgacaaaatttcaattaactcgcctgcgcttgcggatccgacgttaatcacccgtctcgccgatcgctttggcgtgcagtgcatcgtggtaggtatcgatacctggtttgatgaacaaaccggtaaatatcacgttaatcagtacaccggcgatgagagccggactagcgtcacccaatgggagacgctggattgggtgcaggaagtacaaaagcgcggagcgggagaaatcgtcctcaacatgatgaaccaggacggtgtgcgcaacggttatgatctggaacagctcagaaaggtccgtgaagtgtgtaacgttccgttgattgcctccggcggcgccggaaccatggagcacttccttgaggccttccgcgacgccaacgtcgacggcgccctcgccgcttccgtgttccataaacagattattaatattggcgaattaaaaacgttcctggcagcccagggcgtggagatcagggtatgttga

SEQ ID NO: 91586 - DNA, 738 bp, Enterobacter aerogenes
atgatcattccagctttagatttaattgacggtaccgtggtgcgcctgcatcagggcgactacggccagcaacgcgactatggcaacgatccgttaccacgcctgcaatcctatgcagaccagggcgcggaagtattgcacctggtcgatctgaccggagcaaaagatccggcaaaacgccagattccgctgcttaagaccttagtcgccggcgttacggtaccggtacaagtcggcggcggcgtacgtacggaagaagacgttgccgcactgcttgacgccggcgtggcgcgcgtggtggtcggttcaacggcggtaaaatcgccggaggtggtcaaagcctggtttaaacgctttggccccgaacatctggtactggcgctggacgtacgcattgatgccgatggcaataaacaggtggcggtgagcggctggcaggaaaactctggcgtcactctggaagagctggtggaaagctatctgccggtcggcttgcaacatgtgctgtgtaccgatatctcccgcgatggcactctcacgggttccaacgtctcactgtatgaagaagtctgcgcgcgttatccgcaggtggcgttccagtcttccggcgggatcggcggtctcaacgatatcgccgcgctgcgcggaaccggcgttcgcggcgtgatcgtcggccgcgcgctgctggaaggtaaattcaacgtaacggaggctatccaatgctggcaaaacggataa

SEQ ID NO: 91587 - DNA, 591 bp, Enterobacter aerogenes
atgaacgtggtgatcctcgataccgggtgcgccaacctcaactcggtgaaatctgcggtgagccgccacggctatgagccagtggtcagccgcgagccggatgttgttctacgcgccgataaactttttctgcccggcgtcggcaccgcgcaggctgcgatggatcagctgcgcgaacgtgagctcattgatcttattaaagcttgtacccagccggtgctggggatctgtcttggcatgcagttactcgggagccgtagcgaagagacaaacggcgtcgagctgctgggcattattgatgaagaggtgccgaaaatgaccgatcacggactgccactgccgcatatgggatggaaccgggtgtatgccaaagccggcgatcgcctgttccgcggcattgaagaaggcgcttatttctatttcgtccatagctacgccatgccggtcaacccgtacactatcgcgcaatgcaactacggcgaggccttcaccgcggcggtacagaaagataacttctttggcgtacagttccaccctgagcgctcaggtagcgccggtgcgcagctgctgaaaaatttcctggagatgtaa

SEQ ID NO: 91588 - DNA, 1068 bp, Enterobacter aerogenes
atgacccagaagtttctctttattgaccgtgacggtacgcttatctctgaaccgccagttgattttcaggtagaccggtttgaaaaactggccttcgagccgcaggtgatcccggcgctgcttaagctgcagcaggaaggttacaagctggtgatgatcaccaaccaggacggccttggtaccgaaagcctgccgcaggaggaattcgacggcccgcacaacctgatgatgcaggtcttctcctcgcagggcgttaactttgaatccgtcctgatctgcccgcacatgcctggtgataactgtgactgccgcaagccgaagacccagatggtattgccgtggctggaagacggcgtgatggataaagcccacagttacgtcatcggcgaccgcgccaccgatatcgagttggcggataacatgggtatcaccggcctgcgctataacagtgaaacgctgaactggccggccatatgcgaacagctgacccgtcgcgaccgctatgctcacgttgagcgcatcaccaaagagacccaggttgacgttaaagtctggctggaccgtgaaggcagcagcaagatccacaccggcgttggtttcttcgatcacatgctcgatcagattgccacccacggcggctttcgcctggaaattaacgtcggcggcgatctttacatcgacgatcaccacaccgtagaagataccggcctggcgttaggcgaagcgttgaagctggcgctaggtgataagcgcggcattaaccgctttggctttgtgctgccgatggatgagtgcctggcgcgctgcgcgctggatatctctggccgtccgcacctcgaatataaagctgacttcacctatcagcgcgttggcgacctgagcaccgagatggtcgaacacttcttccgctcgctctcctataccatggcggtgacgctgcacctgaaaaccaaaggtaaaaacgatcatcaccgcgtcgagagcctgttcaaagccttcggtcgtacgctgcgccaggccattcgggtccagggcgacacgttgccatcgtcaaaaggggtattgtga

SEQ ID NO: 91589 - DNA, 1062 bp, Enterobacter aerogenes
atgagcattgaagacttagcccgcgccaatatccgcgcgctgacgccgtatcaatccgcccgccgtcttgggggaaaaggcgacgtgtggttgaacgccaacgaattccccacggccgtggaattccagctaaccgaacagacgctgaaccgctatccggagccgcagccgaaagcggttatcgaaaactacgcgcactatgctggcgtaacaccagagcaggtactggtgagccgtggggctgacgaaggtatcgagttattgatccgcgctttttgcgaacccggcgaggacgcggtcctttattgcccgcctacctacggtatgtatagcgtcagcgccgaaactatcggcgttgagtgccgcacggtgccgacgctcgccgactggcagctcgatttaccgggtatcgaagcgaatctcaccggcgtgaaagtggtgtttgtctgcagcccgaataatccgaccgggcagattatcaacccgcaagatttccgcgccctgctggaaatgacgcgcggtaaagcgatcgtggtagcggatgaagcctatattgagttctgcccgcaggcgtcgctcgctggttggctaaatgaatacccgcacctggttatcctgcgcaccttatcgaaagcctttgcgctggcggggttgcgctgcggttttacgctggctaacgcagaggtaattaatgtactgctaaaagtcatcgcaccttatccgctctcgacgccggtcgccgatatcgccgcccaggcgttgagcccggcaggaattgccgctatgcgcgcacgcgtggcgcagatcctggatgaacgcgcatacctggtcgatgcgctgcgcgagatcgcctgcgtcgaacaggtgttcgattccgagaccaactacctgctggcgcggataaccgcctccagcgcggtgtttaaatctttgtgggatcagggcattatcttacgtgaccaaaataaacaaccctcattaagcggctgtttgcgtatcactatcggtacccgtgcagagagccagcgcgtgattgacgctttgactgcggagaatgtatga

SEQ ID NO: 91590 - DNA, 1305 bp, Enterobacter aerogenes
atgagcttcaataccattatcgactggaatagctgcagcgccgcacaacagcaacaactattaatgcgcccggcgatttcagcttccgagagcatcagcaaaacggtagccgggatcctcgctaacgttaaagagaatggcgatgccgctttacgcgaatatagcgccaaattcgataaaaccaccgtcacggcgctgaaagtatctgacgaagaaattgccgctgccggcgcgcgtctcagcgacgaactcaaacaagcgatggcggtagcggtcaacaatatcgagacctttcacaacgcgcagcagttgcaggttgtcgatgttgaaacccagcccggcgtacgctgccagcagcttacccgccctatcgcctccgtcggcttatatattccgggcggctcggcgccgctgttttcaacggtgctgatgctggcaacgccagcacgcattgccggctgtcaggaagtggtgttgtgttcgccgccgccgattgccgatgaaattctttatgcggcgcagctgtgcggcgtgcgtaatatctttaacgtcggcggcgcgcaggctatcgcggcaatggccttcggcaccgaatcggtggcgaaagtcgctaaaatctttggccctggcaacgccttcgtcaccgaggccaagcgccaggtcagccagcgccttgacggcgcggctatcgacatgcctgccggcccgtctgaagtactggtgattgccgacggcggcgcgacgccggatttcgtcgcctccgatttactctcccaggcggaacatggcccggattcccaggttatcctgctgacccccgacgccgacatgggctcccgggtcgccgctgcggttgaacgtcagctagcggccctgccgcgtgccgaaaccgcgcgtgaagcgctttccgccagccgtatcattgtcgctcgcgatctcgcgcaatgtgtagagatctcaaatcagtacggaccggagcacctgattatccagacccgcaacgcccgtgaactggttgacggcattaccagcgctggttcggtattcctcggcgactggtcgccagaatcggcaggtgattacgcctccggcaccaaccacgtgctgccgacctacggctacactgccacctgttccagcctcggtctggcggatttccaaaagcgcatgaccgtacaggagctgacgcgtgaaggcttcgccgccctcgccccaactatcgagatcctggccgcagccgaactgctgaccgcccacaaaaacgccgtgacgctacgcgtagccgcccttaaggagcaagcatga

SEQ ID NO: 91591 - DNA, 900 bp, Enterobacter aerogenes
atgttagacaacacccgtttacgcatagctattcagaaatccggccgtttgagtgaagattcacgcgaactgcttggccgctgcggcattaaagtcaacctgcacacccagcgtctgatcgcccttgcggaaaacatgccgatcgatattctgcgcgttcgcgatgacgatattccggggctggtgatggacggcgttgtcgaccttggcattatcggcgagaacgtactggaagaagagctgctgagccgccgtgcgcagggcgaagacccgcgctactttaccctgcgtcgtctggactttggcggatgccgcctgtcgctggcgacaccggtagatgaaaactggaatggcccggcggcgctggacggcaaacgcatcgccacctcttacccgcacctgttaaaacgctatctcgatcagaaaggcatctcatttaaatcctgtctgctgaacggttctgtcgaagtcgccccgcgcgcaggccttgccgacgccatctgcgatctcgtttctaccggcgcaacccttgaagctaacggcctgcgcgaagttgaagttatttatcgttccaaagcctgcctgatccagcgtgacggcgagatggacgaggcgaaacagcagctgatcgaccgtctgctgacccgcattcagggggttatccaggcccgcgaatcgaaatacatcatgatgcacgcgccgaccgaacggctggaggaagtggtggcgctgctgccgggcgccgaacgaccaactattctgccgctggcgggcgataaacagcgggtagcgatgcacatggtcagcagcgaaactctgttctgggaaaccatggaaaaactgaaagcgcttggcgccagctccatcctggtgctgccgatcgagaagatgatggagtaa

SEQ ID NO: 91592 - DNA, 825 bp, Enterobacter aerogenes
atgaaaaaggtcgcgattgtcgggttagggtggctgggcatgccgcttgcgttgtcattgcgcgcgcgcggttggcatgtcaccggcagtaaaacgacgcaggacggcgtggaggcggcgcggatgtgcggtattgaaggatatccgctgcgtcttgaaccccagctgatctgtgaggctgaggatctggacgcgatgatgaacgtcgatgcgctggttatcacgttacctgcgcggcgcacgggccccggggaagatttttatctacaggcggtgcaggagattgttgataccgcgctctcgcggcatattccacgcattatttttaccagttcgacctcggtttatggcaatactgaagggacgatgaaggaaaattcgccgcgcaatccacaaaccgccagcggcagggtactgaaagagctggaagactggctgcatgcgttgccgggcacctcggtggatattctgcgtctcgccgggttggttgggccatcgcgccatccgggccgtttctttgccggtaaatcggcaccggatggccagcacggggtcaacctggtgcatctgcaggacgttattgccgcgattgagctattgcttcaggccccgaaaggcggacacatctataatatatgtgcgccgcagcatccggcgcgcggcgtcttttatccgcagatggcccgtgaacttgggctgccgttaccggtatttaccgataacccggaggggggtaaaggcaaaatcattgatggcaaccggatatgctatgagcttggctttgaataccagtaccccgatccgctggtgatgccaatggagtaa

SEQ ID NO: 91593 - DNA, 882 bp, Enterobacter aerogenes
atgaaaccactgctggatgttctcgttattcttgatgccttagaaaaagaggggagctttgccgcggcttcggcaaagctctataaaaccccctcggcgctgagctataccatccataaattagaaagcgatctgaatatccaactgctggatcgcagcggtcatcgggcgcgctttactggcaccgggcagatgctgctggagaaaggacgtgagctactccataccgctcgcgaacttgagctgcaggccatcaggctacatcagggctgggaaaataccctgaccatcagtgtcgatatgacttttcctttctctcttttaacttcactgatggaacagttttatcaacaacgcaacgtgacccgtttgcagttcactagcgctggtggttgggatgctctggcggcaggcgaggtcgacatggtgctgggcgcgcttaacgagccgccaacgctgttgggttatggttttagtctgcttggcgatgtggatctgtgttttgtggtcgcgattaatcatccgctggcgcaggctaaggaaccgttgaatttgcgggtgttacagcgatatcgggcgattatttgcaatgccgggttgctgcaaagcgaaaagcaggagagtgtgacggtttatgatatgaatagcctgctggagctggtttgcgccgggctgggctgggcttacctgccgcgctatctggcagaggcctggctggagaagggaaaagtggtcgagaaacgtattagcacacccgcgcggctgcatcgggcatggattggctggaatgaagacgtttttggccttgccgcgcaatggtggttacaagcgatattagcaaatagtgctattcgtcagatctacaatactaaaatagtatga

SEQ ID NO: 91594 - DNA, 1359 bp, Enterobacter aerogenes
atgtcgcataacgctactccaaatacctctcgcgtggaattacgtaaaacccttacgttagttccggttgtaatgatgggcttggcctatatgcagccgatgacgctgttcgatacgtttggtatcgtctctggtatgaccgacggtcacgtgccgacggcctacgcctttgcgttaatcgctattctttttactgcgctgagctacgggaagctggttcgccgttatccttccgcgggttccgcgtatacctacgcccagaaatccattagcccgaccgtaggcttcatggtgggttggtcctctctgctcgactacctgttcgcgccgatgatcaacatcctgctggcgaaaatctactttgaagcgctggtgccttcgattccatcgtgggtgtttgttatcgcgctggtcgcgttcatgaccgcctttaacctgcgcagcatcaagtccgtcgccaacttcaacaccgttatcgtggtgctgcaggtggtactgattgccgtgatcctcggcatggtggtgtatggcgtatttgaaggcgagggcgccggtacgctggccagcagtcgtccgttctggtccggcgatgcgcacgttatcccgatgattaccggggcgacgattctctgcttctcatttaccggctttgacggcatcagcaatctgtctgaagagaccaaagatgcagaacgcgttattccgcgcgctatcttcctgactgcgctgattggcggcctgatcttcatttttgccacctacttcctgcagctgtacttcccggatatctcgcgctttaaggatccggatgcctcacagcctgaaattatgctgtatgtggcaggtaaagccttccaggtaggcgcgctgatcttctccaccatcaccgtgctggcttccggtatggcggcgcatgctggcgttgcgcgtctgatgtacgtgatgggccgtgatggcgtattcccgaaaagcttcttcggctacgtgcatccgacctggcgcaccccggcgatgaacatcatcctggttggcgcgatcgcgctgctggcgattaactttgacctggtgatggcgactgcgctgattaacttcggtgcgctggtggcgttcaccttcgttaacctgtcggttatctcgcagttctggatccgcgagaaacgcaacaagacgctgaaagaccacttccagtatctgttcctgccgatgtgcggcgccctgaccgttggcgcgctgtgggttaacctggaagagagctcgatgatcctgggtctgatctgggccggtatcggtctgatttacctggcgtgcgtaaccaaaagcttccgcaacccggtaccgcagtacgaagacgttgcgtaa

SEQ ID NO: 91595 - DNA, 312 bp, Enterobacter aerogenes
atgatcgccaatcaccccgaacgtgaacaaattcgcctcgaaaatgttctttttgccctgggcaaccccttgcggctggaaatcattcgcacgctctccgacggcagcgagcagagttgtaacgcattgcgcaaagaagatatcgcgaaatccaccatgactcaccactggcgggtgctgcgcgacagcggcgtgatctggcaacgtcctcaggggcgggaaaatctcatttcgcttcgccgcgacgatttggatgcccgttttccagggctgttggatacgctgcttaatgtgatgcgacaggagaagtaa

SEQ ID NO: 91596 - DNA, 2103 bp, Enterobacter aerogenes
atgccccgacccatccccctcgaacgttatcgcaacatcggtatctccgcgcatatcgatgccggcaaaaccaccaccactgagcgcattctgttttacaccgggatgagccataagctgggtgaagtacacgatggcgcggcaactaccgactggatggcgcaggagcaggagcgtgggattaccattacttccgcagcggtaagctgcttctggcccgggatggaccgcagctttgagccccatcgtatcaatatcattgataccccggggcacgtggactttaccatcgaagtagaacgttcgatgcgcgtgctggacggcgcggtgatggtctatgactcggtcggcggcgtgcagccgcagtcggagaccgtctggcggcaggctaacaagtatcacgtcccgcggttggctttcgttaacaaaatggaccgcccgggcgccgatttcttccgcgtggtgcaaatgatgatcgatcgcctgaaggccaatccggtgccgattgttatccccattggcgccgaagagcatttcaccggcgtcgtcgacctgataaagatgcgggccattctgtgggatgatgcaacgcaggggatgacgttcagctatgcgcctgtgcctgatgacctgctgccgacggctcaggagtggcgggaaaaaatggtttcggccgcggcggaagccagtgatgagctgatggataaatatctcgaaagcggcgaactgagcgaagcggaaattgtggccgggctacgtaaacgcacggtcggcggcgaaatccagccggtgctctgcggcagcgcctttaaaaataaaggcgtgcagcggatgctcgatgcggtcgttgagttaatgccgtcgccgctggatattccggcgattcagggcattgatgacaaggggcaaccggcggagcgtcacccgagtgacgatgagccgctgtcggcgctggcgtttaaactcatgaccgatccctacgtcggccagttgacctttattcgcgtctattccgggacgttgaaaaaaggcgatgcggtctttaacccggtgaagggcaagaaagagcgtatcgggcgcatcgtgctgatgcatgccaacgatcgccacgaagtcgacgagctgcatgccggtgatattgccgcctgtgttggtctaaaagatgtcacgacgggcgatacgctgtgcgatccggatgcggtcattactcttgagcgtatggagttcccggaaccggtcatttcgctggcgattgaaccgaagaccaaggccgaccaggagaaaatgggcagtgcgctacagcggttggcttccgaagatccgtcgttccgcttgcataccgatgaagagtccgggcagacgattatctccgggatgggggagttgcatctggagattatcgtcgaccgtatgaaacgcgagttcggcgttgaggcgaatattggccgtccgcaggttacctatcgggaaacgatccgtaaaacggtgaaggatgtggaaggcaaatttgtgcgtcagtccggcggtaaggggcagtatgggcacgtcgtgctgaccctggagccattggcggcggggagcggctttgtgtttgaagatgccaccaaaggcggggtcgtaccgcgtgaatacatcccttctgtggaaaaagggctgcgtgaagcgatgggcaccggcgtgctggcgggctatccggttgtcgacgttaaagcgaccctgacgtttggttcgtatcatgatgtcgactcctccgaaatggctttccgtatggcggcgattttcggctttaaggaaggggcgcgaaaagcggacccggtgatcctggagccggtgatgcacgtcgaggtggagacgccggaagagtacgccggcaatattatgggcgatctctcttcccgtcgcggaatggtgcaggggatggaggagcgtttcggtagccagattattcgtgccgatgtgccgctggccgaaatgttcggttattccaccacgctgcgctcgatgtcgcagggtcgcgcgacctatagcatggagttccatcattacgcagaagcgccgcgtaacgtggccgacgatatcatcgccagccgcgcgaaaagttaa

SEQ ID NO: 91597 - DNA, 1422 bp, Enterobacter aerogenes
atgaaaaatggcgaacaacaatccttcctcttccacgactacgaaaccttcggtaccagcccttcgctcgaccggccggcgcagttcgccgccatccgtaccgatagcgatctgaatgtcattggcgaaccggaagtcttctactgcaagcctgcggacgactacctgccgcaaccacaggcggtgatgattaccggaattacgccacaggaagcgctggccaaaggcgacaacgaggccgctttcgcccgccgcatcaacgatctgttcacggtgccgaaaacctgtatcgtcggctacaacaatgtccgctttgatgatgaagtcagccgtaatattttttaccgcaacttttacgatccgtacgcctggagctggcagcatgataattcgcgctgggacctgctggatgtgatgcgcgcctgctatgccctgcgcccggaaggtatcaactggccgcaaaatgaagacggtctgccaagcttccgccttgagcatctgaccgtcgcgaatggcatagagcatagcaatgcccacgatgcgatggccgatgtgtacgccactatcgcgatggcgaaactggtgaagacccatcagccgcgcctgtttgactatctgtacagtcatcgaaataaacgcaagctggcgacgttaatcgacgtgccgcagttgaaaccactggtccacgtttccggtatgttcggcgccgcccgcggcaacactagcctggtcgcgccgctggcctggcatccggataaccgcaatgcggtgattatggttgacctggcgggggatatgtcgccgttgttggagctcgacgccgatacattgcgcgagcgcctgtatactccgcgagacgaactcggctatttaccggcagcgccaattaagctggtgcatttaaacaaatgcccggtgctggcgcaggccaatacgttgcgcccgcaggatgccgaccgtttaggtatcaatactcagcgctgtctggagaacgcccaactgctgcgcgcaaatccgcaggtacgtgagaaagtggtggccctgtatgccgaagccgaaccgttcgtgccatcggataatgttgacgcccaactgtacaacggattctttagcgatgccgatcgcgcggcgatgaagatagtgctggaaaccgaaccgcgtaacctgcctgcgctggatattacgtttgcggataaacgcattgaacgcctgctgtttaactaccgcgcgcgaaacttccccggtacgcttgatgaaaacgaacagcagcgctggttagagcaccgccgtaacgtctttacgccagagtttttgcaggcctatgccgatgaactgcaggtgatgtatcaacagtatgctgacgatagtgaaaaacaagccctgttgaaagcgctgtggcaatatgcgcaggaaatcgtttaa

SEQ ID NO: 91598 - DNA, 1626 bp, Enterobacter aerogenes
gtgactctaaagcatgtgattttttccagtatatttacggagaatttcctgctatggagcgaggatggttactttgataaggcttcaatatttaaacctactcttcacatctggagtctatccatagaagaacagttttatatattctggccattgattattacattgctggttaagaagaaatgcgaagttaaagggatactgatatttatcctggtttcttttttggtgaatatctatgatatatccaatcatcctgcagcagcctattactcgccgcttggtcgttcatgggaactaatggtcggtagtttgttttccgtaatctacacggatataaaaaacaaaaacaccaactttaaaggaaattctgcactggcagtatcggggttggtattagttatactgtccatttttctcatacccactcaaaaatacttccccggattttcagccatcccggtagtactcggttctgcgctaattattctctatggtgagaatacgatagtaagcagaattttatcaatgcgaaaagttgtatatgtaggcctgattagttatccgttgtatttggtacattggccactaatgagtttttcctcaattattattggccacgagtcgaataaagcaaacgcaatatgtctggtcatctcgtttgtgttggctatgctgatatatgttattgtcgagaaaccaataagcaaacaaaaattaagtatatcatattcactctttactgtcatggttgtcattccgatatcatcctttatgctaatgggaaccccttcacgtatcaatcagataaaattagctacagaaactgaatggacatttttaaaaaataatcataaagaattcggactcaatgagtttaataacaatggaaccggtatctataccattaatggaaatggtagcgagacatacttgtttttaggggactctcacgtggctaacatagctgaatatatttacgggcaagctcatgatatgaaaaacgcaccatcaataattctggcggctggtggagggtgtattcctgttccgaatgtgtataccgatgataaacgtcgtgatagttgctgggatatgcgtaaaacggttttggaaaaaataaagcaaggcaatattcagaatgttgttatcggtggtgcctggtacatgtacttctatagcaagaaagactatttttatgcggatgggaagggacgctattcaataaatagtcgggaaggtaaggatttggccctcgatagtattatggaaacaattaaacaactcactgctgcagggaaaaatgtgtacttcataaaagatgcgccgtatataattgatgtcaccccagggatatataaagtaagactacagccaattctatcttataatgatcatgaaaatataaatattaagatagataaagaacaggtgtctttcatttccttgttagcccagaaggctcaacaggctggggccaaaataattaatatctatgataaagtttgtaaggatgagaaatgtaagctcaaagttgatggcgagtatgtttatgccgatccggggcactttaatccatcatggctgagaaaaaacaaagacgttttaagtgatatccatctgtga

SEQ ID NO: 91599 - DNA, 1149 bp, Enterobacter aerogenes
atgcatcacaataaaaactggtccccggaacttgatgggctaaggggattcgcttcgctatgggtacttctcggtcatatatgtatattgacgcaatgtaacatccctattttaagtaacccgggactaggtgttgatctttttattctattgtctgggtatttaatgaccaagaattatatagaaagacagcataaagaaccatgggcttcatccagaacgatattttcattctgggcaaggcgttttttccggattgcgcctctttattatattttacttatagttgccttcctgttcggggaaaacatcggtcacttccgcgatgttattgctactgtatggcccgtcactcaaacagaaaccgcacgttatagagatagttcgataatcaatatcatcactcatatctcgtttacttttggtttattaccttattattcattccgcaccgtacttcccgattggagtatcggcttagaaatgcagtattatgctttatttccattcattatgttattaactatgagactgggattcgccactatatcactcattctgatgttattatgtgccgtagccgcttatgtactccctgagtactttagtgcgtttcccatgccgtcaatgatactcttcaaacttccattatttatagcaggaatgctgatatacaaagcagtatccgagcataaaaaaatatatatactgattgcgatgattgctccgtttattgcattagtcataaaattaagcatttcttataagcagcttattattgaagagatgctaatactgggaatgatgacattactcatcgagcacaaagccagctccccgttaaagaggatagtcgatgctgtaagaaatctgctctcgcttcctgtaagccagtttttaggtgatgtatcctattccgtatacctacttcatctgatgattgtgattccagtcatcggtgtgcttatccaatatactgattttgaaaacttatcggcaacattgcggtttgttatacccacagcaataatcactcctgtcacttatattataggggctaacttgtacaaatacattgagcgatcgggtatcgccatagggcgtaagcttatcagtcaacatagtaataaagagaaggaaatggcctaa

SEQ ID NO: 91600 - DNA, 1167 bp, Enterobacter aerogenes
ttgaaaggccgttttttatttgctgtaactttgctcgcttcgagcgtttcctgcgcatttgctgccgctgatttgcccgtcaccgtgacgccgccatcgatccaggccggctcctgggtgctgatggactacactaccggtcaaatcctgaccgccggtaatgaacaccaacagcgtaaccccgccagcctgaccaaactgatgaccggttacgttgtcgaccgcgccatcgacagtcatcgcattacctttgatgatatggtcaccgtcggtaaggatgcctgggccaagggcaatccggtgtttaacggttcttcgctgatgttccttaaagcgggcgatcgggttagcgttcgcgatcttagccgcgggctgatcgtcgattccggtaatgacgcctgcgtcgcgctcgctgactatgtcgccggcagccaaccgcaatttgtcgcgttgatgaatagctacgttgaaaaattgcatttgaaagacacccattttgaaaccgtccacggactcgacgcgcctggccagcatagctccgcctatgatttagcggtgttgtcgcgggcgattattcacggcgagccggatgtctatcacatgtatagcgaaaaaagcctgacgtggaacggtatcacccagcagaaccgtaacggtttgctgtgggacaaaaccatgaatgtcgatggcctgaaaaccggccatacctcaggagcgggcttcaatcttattgcctcggcggtcgatggccagcgccgtttgattgccgtggtgatgggggccgatagtccaaaagggcgagaagagcaggcggctaagctgctgcactggggtcaacagaactttgacaccgtgcaggtgctgcaaaaaggtaagcaggtcggcgtcgaacatatctggtatggtgacaaagagcagatcaagctcggcaccgatcaggacttctggctcgcgatcccgaaatcagaagttccacgtatcaaagcaaaatatgtgctggataccaaggatctggaagcgccgatcgccgctaaccaacgcgtgggcgaaatctcgctttacgatggcgacaaagtggtcgggcattggccgctggtgaccctggaaagcgttggcaagggcgggatgttttcccgcctgagcgattatctgcatcacggcatttaa

SEQ ID NO: 91601 - DNA, 474 bp, Enterobacter aerogenes
atgaactacagcattaaatctctcgatgcccgcaagattgccgggtttcatatggttggcccctgggagcagaccgtaaagcaggggtttgaacaactggcggcgtgggtcagtcaccaccaggtgcctgcgcaggagtgggtcgcggtttattatgataatccgcagcaggtaccggcggaaaaactgcgttgtgacaccgttgttaccgtggcggatgattacgtcatcccgccgaatagtgaaggggtcatcctcaccgcaattgccggtggcgattacgcctgcgccagcgcgcgggtcattaaccatgacttctccacgccgtggctgcagttctttgacagcctgctgcagagcagcgagttcgaaatcgcggataagccctgttttgaaatttatcttaacgatggcaaccaggatggtcactgggatattgagatgtatgtggcggtgaaccgtatcggctcgtaa

SEQ ID NO: 91602 - DNA, 1059 bp, Enterobacter aerogenes
gtgcgcgctgataaatcacttaagccatttgagatccgtctgtatcgtcattaccgaattgtacacggtatccgcatcgcgctggcttttgtcctgaccttcctgctggtgcgtctgctgaacgtgccggagggcacctggcctctgatcaccctggtagtggtgatggggcctatctctttctggggcaatgtggtgccgcgggccttcgaacgtattggcggcactatcctcggttcggtactggggctggtggcgctcaaactcgagcttatctcactgccaatcatggtgctgtggtgcgcggtggcgatgttcctttgcggctggttggcgctcggcaagcggccctatcaggcgctgctgattggcattacgctggcggtggtggtgggcgcgccgccgggcgatatgaacaccgcgctgtggcgaagcggcgatgttatctttggttcactgttggcgatgctgtttaccggtatctggccgcagcgggcgtttttgcactggcgcatccagatggcgaattatgtcacaacgtttaatcggctgtatcaggccggtttttcgccaaatctggttgagcgcccgcggctggaaaaacatcttcagaaagcgctcaatgacgtggtgaaaatgcgcgggttgataaccccggccagcaaagaaacgcatattcagaaagcaatcttcgaagccattcagaccgtcagccgtaatctggtatgcatgctggaactgcagatcaacgcttattgggcctctcgtcagggccattttgtgatgctcaacgcccagactttacgtgaaacccaacagatgacccagcaaacgttgctgactatcgcccatgccctgtatgagggaaacccgcagccggtacgcgccaacaccgagaagctcaacgagatcgtggtcgagttgcggcagcttatcaaagagcatcaggacgataatctgtcggaaacgccgattcacggctatgtttggctgaccattgagctggcgcgccagcttgagctgctgtcgcaccttatttgccgcgcgctgcgcaaataa

SEQ ID NO: 91603 - DNA, 324 bp, Enterobacter aerogenes
atggaaacaactaagccttctttccaggacgttctggagtttgttcgtctgttccgtcgtaagaacaagctgcagcgtgaaattcaggacgttgagaaaaagatccgtgataaccagaagcgtgtcctgctgctggacaacctcagcgactacatcaagccgggtatgagcgttgaagccattcagggtatcatcgccagcatgaaaaccgattatgaagaccgcgttgacgattacatcatcaaaaacgccgagttgtcgaaagaacgtcgcgacatctccaaaaaactcaaagtgatgggtgaagccaaagtcggcgaataa

SEQ ID NO: 91604 - DNA, 543 bp, Enterobacter aerogenes
atgatactgattaccggcggcgcgcgtagcggcaaaagccgtcacgccgaatctttactccaatccttcgcgtcggtgctctatatcgccacttcagccgctattgactatgaaatggccgcacgcattcaacatcaccgcaatagccgcccgccgcattggcgtactgcagagcgcagccgtgatctaacgccactcattacccccgataatgaacccgatgaagccattttgcttgagtgcgtcactacactggtcaccaatattctgttcgctgaaggtggggaaacggatcctgaagaatgggattacgctgcgatggaaaaggcagtcacgcaagaaatcactcagctgattgctgcctgccgcgcctgcccatcgccggtgctgttggttaccaatgaggtggggctgggaatcgtgccggacaaccggctggcgcggcattttcgtgatattgccgggcgcgtgaatcagatgctggccgcggctgccgatgaggtgtggctggttgtttcagggataggagtcaaaatcaaatga

SEQ ID NO: 91605 - DNA, 741 bp, Enterobacter aerogenes
atgattaaatcgttctttgccacgctttcttttatgagccgcttgccggttccggcccgctggtcgcaggggctggaaatcgatcaatatgagcgcgggattgttacttttccactggtggggttactactcggcgcgattgccgggctggtgatgctggcgcttcatgcctggtgcggcctgccgttggccgcgctgtttgccgtactggcgctggcgctgctgaccggcggttttcatcttgatggcctggcggatacctgcgatgggatcttttccgcccgccgccgcgagcggatgctggagatcatgcgcgatagtcggctcgggacgcacggcgggctggcgctgatctttgtgctggtggcgaaggtattcgtcattagcgaactggcgctgcgcggtacctcgatgctggcggcgttggctgccgcctgcgctgtggcgcgtgggatgtcggtgttgctaatgtaccgccagcgttatgcccgggagcaggggcttggtaacgtatttattggcaaggtgactttccgtcagaccgtcattaccctggcgctatccttggcgctggcaacgctgctgctgggcgtgcatggcctgctggctgcggttataacgctgctggtggtatcggcgcttggccaggcgctgaagcgcacgctgggcgggcagaccggcgatacgcttggggcggccattgaactgggcgaagttatctttttactggcgttgctatag

SEQ ID NO: 91606 - DNA, 1059 bp, Enterobacter aerogenes
atgaatacaataactgaatggttagcggccatcccgcgaccggacgaaagcgcgatgtcgcgggctcgtgagcatattgacggcttgttgaaacctcccggcagcctggggcgtctggaatcgctggcgattcagttagccggtatgccggggctacagggcgggctacattttgcacgcaaaactattgtggttatgtgcgccgaccacggcgtctggcatgaaggtgttaccgtctcgccacaaacggtgaccgctatccaggcggccaatatgacccgtaagaataccggcgtttgcgtgctggcagcgcaggccggggctgatgttcaggtagttgacatcggtattgacgccgaaccgatccctgggctggtaaatatgaaagtggcgcgcggcagcggcaatattgcctgtaccgcggcgatgagtcgcgagcaggctgaaacgctgctactggcgagcatgcgctacacccgccagcttgcggagcagggcgtgcgtctgttcggcgtgggcgagctggggatggcgaacaccacgcctgctgcggccgtggtcagcgtgctgaccggccatgatgccggcgatgttgtgggcatcggcgcgaaccttccagtatcgcagctggcgcataaggcggaagtggtacgccgggcgatagcggtcaatcaaccttcatcaggcgatggccttgatgtgctggcaaaagtgggcggttttgatttgctcgggatggctggggtcatgctgggcgccgcttcctgcggattgccggtgatactcgatggctttttatcgtacgcttcagcactggcggcctgccggatcgcgccacagttgcatccgtacctgataccgtcgcatctgtcggcggagaagggggcacgtattgcgctggaacacctgcagttgcaaccttatctggagatgggcatgcgcttaggcgagggcagcggcgcggcgttagccatgcatctggtcgaggcggcaggggcaatgttcaacaatatggggacgctggctgagagcaatatcgtgctgccggaaacccgttaa

SEQ ID NO: 91607 - DNA, 1110 bp, Enterobacter aerogenes
gtgaataataagacaaatttaacgaaagaagtggcatgggccagccagaatatgccgcgtaccctgcgtcaggtggcggcccttcctgacctcagcgaagtgcgcctggcctgctgtatgcatctggatatgaaaatgatcccgctggtgcaggggctccttgagaaaggggcgaaagtctttttgaccacctgtaatccaaccaccgtgcaggatgaggttgtctcctggctggtggagcgcggcgcggaagcctgcgcctggcgcaatatgagcgacgctgactggcaacaatcatgggaaaaagccatcgcctgggggccaactcacctttgtgaaatgggtgcggatattaccaccctgctccaccagcgcggcgagttcggcaatgtcgttgccggccttgaagccaccggctccggcgtcaatcgcctcggtgatattcgccccggctaccctatctttaactgggatgatctgccggtcaaagaagggctacataaccgccatatggttggcctgacggcctggcacacattcttccagactactcacctgaccctacatgagaaaaaagtgctggtgatcggctacggcctggtcgggcaaggcgtcgccgccgcggcaaaagccttcggcggccaggttatggtggcggaaatcgatcccgcgcgccgtttacaggccgcttatgacggctggcatgtcgtggatttacaggatgccatcgcatcagccgacgtcgtcgctaccgccaccggcggcaaaaaagtggtcaacagcctggcgctggacagcgctaaagatggcgtatttattctcaacgtcggccacgtggcggaagagattgactgcgaacacctgcgccagttcccgcatgaagaggttatgccctatatcaacgcttatcggatgccggggaaaacaatctatctaatggccgatggctcaatgctcaaccttaccgccggttttggcgatagcctgaatgcgtttgatgtcacccttgcggtgatggccagcggcattcgtcatatcgttaccgatggcatgcaggctaaagcggatgtttatctgctgccgcaaagcgtgtggcagcaggcgctgtaa

SEQ ID NO: 91608 - DNA, 738 bp, Enterobacter aerogenes
atgttacgcgttttacagcgcccgctattttctcgcgcgcgtatttttcttggccgtttaaaacctcatgccttacccgttgctaaaaagcatattgtgctgggatcgatcggtgcggggaccggactggcggtgaccagtatgttcagccactggctgttgggtgaggtgaatctgtggtttattgcgccgatgggggcctcggcggtattgctatttggcgtacccagcagcccgcttgctcagccctggtctatcgttggcggcaacgtgctttcggcgctgatcggcgtcaccgtcggactactggtgccggatacggcaatcgcctgcggcctggcggcggcgctggcgatcgctggaatgtactttttgcgttgtctgcatccgcctggcggcgcggtggcgctcacggccatacttggcggcgccggcgtacacagtgaaggctaccagtttgtgctgacgccggtattattgaactccatgatgttggcgctgctggcgatcgtcttcaacaatctggtcgggcgccgctatccgcatccgctggcggcggaagaggtgaagccgaatgtagtgccgatggggattgcagtcactcgcgaagatattcacgccgcgctgatggaagggcagttccttgatatcggcgaggacgatgtgcaggaactactggagaatatcgaacagcaggctcggctgcgtctcgccgccggtcaaaaagcgcgccagtga

SEQ ID NO: 91609 - DNA, 741 bp, Enterobacter aerogenes
atgcgcgaaccacataacgcaggctgtttgcccatccgcttcaatatcggcggattaccgattgtccaatgcgatgatcccacgctcgccgaacagcctctgttcgagcgcgcgcgccgcggcgaagccgtcgctcaactctggcaggcgccgcaagggttcgtggttcctggcagttaccggaaattcgccaatctggccaccgtcagtgaatcctttgccgcccgtggctggccggtgtggatgcgtcgatccggaggcgggctggtgccgcaggggcccgggatcctcaacctgagtcttgcctggccggtaatccagccattaggcgaagccgccgaacccatctatctgttgttatgtggaatattgcaacgcacgctttcgactcttggcgtcgaaagccattttcaggccgtcagcggttctttttgcgacggccgctataatctggcctgcggtgagggagaaaacgcgcgcaagattgccggtaccgctcaatactggcggcccatagccgaaagccagggtcacattgtcctggctcacgccgtgatattactggatgccgatctgcaggccgcgcatcaggcggccaatgatatcgaggcgctgctcggcagcggtaaggtctaccgcgcggacaaaacgattacgctcgccgaattattgcccggtgaacccgacctcatcgagcgattcaggctggcgctagctaaggcattgcaacgggtgtcttaa

SEQ ID NO: 91610 - DNA, 1320 bp, Enterobacter aerogenes
atggactcaacgcttatttctcccgactccggcaagggggttgcttctcttcatcgcgctcgtcgtgcggcatggggaagctttgccggcgccgtcgtcgactggtacgattttctgttgtacggcattaccgccgcactggtgttcaaccgcgaatttttcccacaaattggcccggcgatgggcacgctcgcagccttcgcgaccttcggcgtcggcttcctcttccgcccgctcggcggcattatcttcggccatttcggcgaccgtttaggccgtaagcgcatgctgatgatgaccgtgtggatgatggggatcgccaccgcctgcatcggcctactgccttcctttaaccagattggctggtgggccccggttttgttggttattttacgcgcagtgcagggcttcgccgtcggcggtgaatggggcggcgcggcattgctgtcggttgaaagcgcgccaaaaaacaaaaaggcgttctatagcagcggcgtgcaggtgggttatggcgtcggtcttttactctccactgggctggtatcgcttatcagcagtttcaccaccgatgagcagttccttagctggggctggcgcctgccattcctgtttagcgtagtgctggtactgggggcattgtggatccgcaacggcatgagcgagtcggcagaatttgaacagcagttgcagaaaacgccagccgcgaagaaaaaacgcctgccggtactggaagcgttggcgcgccatcccggcgccttcttattgatcaccgccctgcgcctgtgtgaactgttaacgatgtacatcgtgaccgccttcgccctcaactactcgacacaaaatctcggcctgccgcgtgaactgttcctcaatgttgggttgctggtgggcggtattagctgtattaccattccctgctttgcgtggctggcggataggtttggccgccgtcgtatctatattaccggggcgctgatcggaacattaagcggcttccccttctttatggcgctggagcagcactcgctgttctggatcctgttttttgccctgatgctggccaacatcgcccatgatatggtggtctgcgtacagcagccgatgtttaccgaaatgtttggcgccagctatcgttacagcggcgcaggcgtcggctaccaggtggccagcgtggtcggcggcggttttacgccatttatcgccgccgcgctggtcaccttctctggcgggtcatggcatagcgtggcgatttatctgacggtcggctgcctgctctccgccgttacggcgatgttgatgaaaaccctccatccggcataa

SEQ ID NO: 91611 - DNA, 498 bp, Enterobacter aerogenes
atgcgtctaatttttgcagttttattttatgttttggttttacccaatgctttcgcagaaaaactgcctgcgccaacaggcaaacccgttttaaccatttcaggaaagattaccaatacaaacgaaggtgataccgccgtatttgacattgccgcgctagaaaaattgggcaatgagacagtgatcaccaccactccgtggtattcagggaaagtgcgctttgatggtatttcacttagcaaacttatggacttagtgggcgcgcaaggtaagacggcgaaggtgatggcccttaacgattataccactgaggtaccagtggaggattttcataaattcccggtgattctggcgctgaagatgaatggtgaatatatgcgcattcgtgataaagggcccctttttattgtttatccctacgatagtagcgcggagttacaaaaccaaatctattattcccgctcagcatggcaggtttcaaagattataattgagtaa

SEQ ID NO: 91612 - DNA, 1917 bp, Enterobacter aerogenes
ttgaatcgaatactcactgccattattttgtcgctttttatcgtcaccggatacattacctatctggtgcatgagcggcagagtgagctgcaaaaattaacccgttataccgactcgtggtctgtgtctcagatggtctccgaatacatgcgtctcgaggctcgtttaagcgccctggcgctgaacgtgaaggggaccgaccgcgatgaggtacgcctgcgcctggaaataatgatgagccagatcgagctgctgcaacagggcgatcttggtcagtttatcagaaaaagcgagcagcggcaggcaacggtgaccagtctgattcagatcctcgatcaactcgatcggcaactggacaccatgacgcctgagcagatggtgactctgctgcataccatgagtaagttagatggtccgatgacctcactggcctccatgaccctggcgcaggactttgatgtcgttaatcttacgcacgataagattcagcatctctattacatctattcggtgatttcaatcttgctgattacgatgtgtatcactcttgggctattgatgcttcggcaaaataacaacttgcgccgcgctcatgtgcgcatgaaattgctcgcgaatgacttgcagctgtcgaaagagaaactgcaggtacagaaccgccggttgcaatatgatgcttatcacgattcgttaacaggcatgcctaatcgcctctctttctggcagaggctacaggaagtagtcaatcatgtgaaaccttataatggctgcgcagtggttatgttgttcgacctggataattttaaagatgttaacgataccctggggcatgatgctggtgacaaactgctgcaggagctcgccagccgcctgtcgttcttccgtaaaacatcagagacgctgtaccggcttggcggcgacgaatttgccctggtatcgcaggatctgagcgaagaaatggcgctggagcgggcggatgtgatccgcgagaaaatcagccagccgtaccagatctacgattcattaattaacatcggggcttgcattggcatcgtaatctccgatgctgaaagccgcactgattacttatacaaatgtgccgatctggcgttgtatgaagcgaaaaaatccggtgcgggacatgtggagattttccgtcccggcatgttgcaacgtttacaggacaacaaatcctttgaggacgatctgctgcatgcgctggaaaatgaccagttcaaggtttactaccagccgatcgccgacacggtgtcgcgtgaaatttatggttacgaagcgctggttcgctggtttcatccgctgcggggcatggtaccgcctacggaatttatcccggtggcggagaaaaccggcctgattaaccaacttggcgagtgggtgctgaagaccgcctgtgaggaagcggcccgctgggagcaaccactgaaagtttcggttaacgtctcaccgattcaacttatcaatacctcactcacagacacggtggttgcggtgctaaagaagacgggcctcgacccgcggcgccttgatcttgagattacggaatctgatgtatttaacgaaaatacgcgctcgctggagatcctcagccagttacgcgagcaggggattcagatttcgattgacgattttggcaccgggtattcgtcattgtcacggttaagttatttcccctttgataagatcaaaattgatcgctcgtttgtggtcaatatacctatgcaaaaagatgacctcgatattgtgcgcctgatcatcagtatggggaaaagcttacatatgcgcattgtcgccgaaggtgttgaaaccgaggaacaattaacctcgctgcaacaattgggttgcgatctcgttcagggctatttaattggcaagccggggcagttaaataacaactga

SEQ ID NO: 91613 - DNA, 333 bp, Enterobacter aerogenes
atgcaacgaatcattatacctacccattatgttcagacccgttccacccccatgtggaccaaagagaccgcgcccgcgtccatctggaagcgccatcttgatgccggtacgcgacagggcgtctacccgcgtttatcggtgatgcagggcgcaatacgctattatggttatgccgatgaaacgagcccagaccctgttgaaacgatgactattgaagcggggcagtttggtgtctttcctccggaaaaatggcactgcattgaggcattaactgacgatactgtatttaatgtcgatttttacgtcgaccctaaaattctgattgagggataa

SEQ ID NO: 91614 - DNA, 339 bp, Enterobacter aerogenes
atgaacagtgaaaataaaggttactcattagcgatagtcaataacaacaataatgaaaaacgagagaaaacttatctcaagccgatggcgctttatgtccctgatatcgcggttcaggcagtagcggaattgcttcaggatctttcaaccgataacgcacagggaaaagggttcagcctgatggtgacgaacaataataacggtgtatcggtagataaagattttgctgcaatcgaggcgcttcaggatccactgcatgccgctgatgcggtgaaagagctcatcaatattgtgcgcggttatgaatctgacgaagagactaacgtctgcggttggtaa

SEQ ID NO: 91615 - DNA, 891 bp, Enterobacter aerogenes
atgagaaaaaaccgtctacccccgctgggcgcgctacgcgcctttcatgccgttgcccgctgccgcagttttaaacgcgccgccgatatgctcggggtgagcgctaccgcagtaagtcatcaaatcaagctgctggaatctgtgctggagtgccgggtctgtgaacgcaatgcccttggcgtcagccttaccgaaagcggcgaaattctctatgtcggcacccagcgcgcctttagcgcgctggaagaggctaccgcgcaaattgttcgctcacaccagccgccgtcgctcaccgtcaccacgacttccaactttctgactcactggctggtaccgagactggcagcatttaaagcggaattccccgccattgacctgcggctacataccagcgtcgaacgggtggatctcaaccagcgcagcgtggatgtcgcgattcgctatcgtgagacgccggagcgcggactgcactgtaccttgctacatgaagaccgatttatcgtcgtcgccagccccgcgctaggtattacacggctggaggatttgcgtcacgcgaccctgttccacgttgaacatcgtcacgttccggcagattcgccgggctgggagaactggcaacgccgctacggacccccgcagctgaatatcgacgcagggttaaccttcagcgacgagacgcatgcgctacaggcggcggtggcgggacaaggcgtggtgattgccagcgaactgctggcgcacgatctgttgcaacgcggggtattaacggcaccatttgaaatgttcttaccgggagcaaactattatctggtggcgacacaagagctagcccagcgcgccgatatcagcgccttgcgggactggctactgcagcagatagcgatgagttga

SEQ ID NO: 91616 - DNA, 588 bp, Enterobacter aerogenes
atgagtattttcccgtccccgcgtgctgtggtagcgacatcctgtgctgaaccgcgtgcgcaagctatcgcgctaagcagcctattcgcggcaggcgcgctgttattgagcatttccgccattatcggcgctatcgccagtttggcgttgctattggcgctggcgggagcttttgctgttggctatgcaatcgggcgttggcagccgtggccagcgcattattgcgtgacaatatcgtgttatgcctttgtgctgtccgctataggttggttgctggttctggtgatatggaatagcgaacacggttggctggagctcattccgggaatcgtctttggtggattagggctgggcattgtctggcaaacccatgcggcagaaagagttttgttggggatgatgccgaacatcccgacgatagcgagtatcgtttttattaccctggcgattctgctaaccaatcactatgccgattcaggaaagggaggctttgtctacgctctggcggtgctggcagatctggcgttgctgggtgcgttgctggtgaaaatcaggctgcaggatgagcacagcatcaaatacgaatga

SEQ ID NO: 91617 - DNA, 1440 bp, Enterobacter aerogenes
ttgaacgtcacttcagcagtacgccaggccgtagcgcgcacgtcctggtttaaaaagcgcaagagctatcgtgtgctctactggcgtgaaatcagtccccttgccgtaccgatcctgctggaaaacgcctgcgtattattgatgggcgtgctgagtactttccttgtaagctggctcggcaaagaagcaatggccggggtggggttagccgacagctttaatatggtcatcatgtcgttctttgccgcgattgatcttggcaccaccgtggtagtggccttcagcctcggcaagcgcgacagaaaacgggcgagggcggctgcgcggcaatcgctggcgatcatgaccttgttttcaatcgtgctggcggcggttattcacgcctttggccagcagattatcgatatcgttgccggcgacgccacggttcaggttaaagcgctggccctaacctatctcgaactgaccgtgctgagctatccggcggcggccattgccttaattggtagcggcgcgcttcgcggcgcggggaccaccaaaataccgctgttgattaacggcgggatgaatattctcaatattattatcagcagtatcctgatttacggcatcttctcctggccggggctcggctttgtcggcgccgggttggggctgactattgcccgctatattggcgcgttggcaaccatttgggtattgatgacaggttttaacccggcgctgcgtatttcgctgaagagttactttaagccgtttaactttgccattatctgggaggtgatgggtattggtatcccggcgagcatcgaatcggtactgtttaacggcggcaagctgctgacgcagatgtttgttgccggtatggggaccaacgtcatcgccgggaactttattgccttctcggtggcttcgttaattaacctgccaggtaacgcgctgggatcggcttctaccattattaccggtaaacggctggggaaagggcaggttggtcaggcggaacgtcaggcctggttcgtgttctggctgtcgactattattctgacgcttattgcctggggcaccgcgccgttcgctggcctgatcgcttcgttctacaccagcgaagaagacgtaaaagtggtggttaaagagttattgtggctcaatgccctgtttatgccaatttggtcgctctcctggaccttgccctgcgcctttaaaggcgcgcgcgacgtgcgttacaccatgtgggtgtcgatgctgggtatgtggggctgccgggtggtagctggctatacgctggggattatgctgggcatgggcgtcatcggcgtctggctgggtatggtgctcgactgggcggtgcgtggcctgttgttctatcgccggatgatcaccgggcgttggttgtggaagtacccgcgattaaaggctcggctggaagaaaagtcatga

SEQ ID NO: 91618 - DNA, 450 bp, Enterobacter aerogenes
atgcaagagaataacggaataagaatggctctttctcccgtacaacttgccgccgttctggccgataaatccgtcagtgagggggaaacacttagtaatcgcctctggggtggtctaggattggccaacggtctggttgaaatgtttggtgccggagtcatgtgcatagcccccgaaccaacaatgctcactaaaatcgggtgtgtcatcgtgggaacccacagcctggatacgatacaggcttcctttcgtcaggtatggaccggtaggcaggtcagtaccgatacatacaattctgtagtatctctggccgaaagtctgggttccgatcaccaaactgccgttgaacgttggaatgactctggatcttgcgattcctatgggatttgcgctgacaatgggtgctatccgcgttgcttctatacgtggaggacggataaaactggctga

SEQ ID NO: 91619 - DNA, 327 bp, Enterobacter aerogenes
atgacaaaaatgaacctgaatgaacttaacagctttatcacggtttacttcgggcaggattatgaccttatcgatgatagtgatgagatcgcccccaaaattgacgcatttatcgccgatagtcatctcgccatgaagtatggtcttatcgcagacattgaccttctgctgaaagaagcagataacccggaagaggaattcaggatacgctatggttcagactttgaccctcacctgtggggaacagatgcccttagcttcctgaaacgggtaagagataaaattagtcattccctgaatgaggcggagccgacaggccgtcagtaa

SEQ ID NO: 91620 - DNA, 288 bp, Enterobacter aerogenes
atgatcaaggacagtatcgccgagtctctggaagcccgtggattgtaccgtcgggccgcttcgcgctgggtggatgtgatgcagacgtgcgtcgatgataacgaccgtgaatggattaggatgcaccgcaataaatgcctgaaaaaagcgaagctgccgccggcgcgtaaagaagagtttgctgacatccacaaggcagccagagagacgcagtatcgtatgggaattgctaaaccgaatggcgaagtgttccgccttcccgctaaaaagaaagcgacgcggcgctag

SEQ ID NO: 91621 - DNA, 579 bp, Enterobacter aerogenes
gtggcaacgacaatgtttttagttactcaggatcactatctctttgaaggggtaaggattttctttccagatatcatccagttacattcgattgagcataagctttttgagagtgatgccgaggagttttcggtgctggtggatagtcgggcgccgctttgtttttatgattatcttattcctggcgcagcggaagcgggtaaacgtatctgctgtattatgcttgatatgcgccatcgggaagagcatttgctgagcttaaagtggtttctcaacatgtctttgacgccgacggatatggctaatttatttagcctgtttcttgatgtgaagagtaagcggctgacccgagaatggctcaagaatttcagtctgaaaccacaggaacatatgacgttgactttgctcagggccggaatgaccatggatcaaattgctggggtgcttaatacttcagtgaaaagcctgtatcgtaaacgcattgagctttatgaacgtctggggctggccaactttaatgaggcctgtttgtttatctttaaaaatagactgctggagtgtcccgcacagaagcgataa

SEQ ID NO: 91622 - DNA, 2448 bp, Enterobacter aerogenes
atgggaagatcaacgcgtttcaataagttattcttttatcgccgcacgacattctcgttttcaattagtttattgttgttaacgcctattctggctcagggggctgagtcgatatatgatcagcatgtgctacaggcgcgtgaaggtaattactccccttttctcgattatcttcagcagtatcaacaacaacatgccttgacgcccgagcaagtcgccgactggctacaagttgcctcctgggctggacgtgatgaggaagttatccaggtttggcagcgctatcaggtttatatggcgctaccggcacgtggtacggcagcagcggcgcaggcttaccgtaatcaaaaacggtggtcttcggcgctggcgctttgggatcaagcgctcagccaacagccgatgaacgacgattatcttattggccggattaaaacgcttgccgatgcgcgtcatgacgggcaggcgctaagtgaagcccggcgcttagccgccaccacacccagcaccgctcacctgcagacgctctcctacgtctatttacgtcagggaaaaagctgggaccagttgctcaccgatatgcgcgcgcaggagcttgcgccacaaaacagagaaacgctcaatagcttgcttgagagcttgagcagcaatcgcatcagtactcccgcgctgcaatggtcagccaaaaccaccttaacgcccgcgcagcagcgaaagctggaaatggacgcggcggcggagtgggtacggctggcggacacccctacccgcggtgaacaggagcgctttcgcctggcgcaagcggcgctcaaccgctacgacgcgctgttcgcccgttggcgtcaggatccgcaggccgcagaggatcttgcccgcgcgcgtattgaccgcctcggtgcgctatacacccgcggcgattacccccaggtcatcaaagaatatcagtcgctgaccgccgctcagcagcccgttcctgactgggccatcggctgggtcatctcctcttaccttgcgcaacagaacgtcgaggccgcgctggcgatcgcccgccaacatcccctttatcgccccgatccgcaagatgatcggcatgagttattttacgcgctgctggacagcggccagtatcaggccgcccgcgactatctcgccatagtgactaacggtgtcccctacacccgccgcctttacggctcgccgacgccgcagccaaacgatccgtggctgaacgcccaatcgctgaaggtacagtatctactgagtactaatgcgctgccggaagccgagcgtctctcccgccggctggccgccaccgcgcccggtaatcaggggctgcgcattgactacgcggcgatactgcaggcgcgcggtctaccccgcgccgccgaacgggaactgaaagcggcggaagcgttggagccttcgaatatccccctcgaacgccagcaggcctacgtagcgatggatcttcaggagtggcggcagatggagctattaaccgatgacttgctggcgcgcagccctgaagacctgagcacgcaaaaattagtccgcgctcgcgaggtgcaccatatgtcggaattgcgtctcaacagtactcaggggatccactcggataacccggtcagcggtagccacgattttagctgggatgtggcgatttacggcccgccaatcgcggataactggcggcttttcgccggtaatcgcttcgccaaaggaaattttgatgaaggaaaaggctccagccgccagctctttggcggcatcgagtggcgaccgcgtgatgcctgggctgaactggaaatctccaataacagtttcgccggcgacaacaaacccggcgcccggctatccgcctggcaaagtttcaacgatcgctggcagattggcggcgaggtcgaacgcctgtcgcgccagacgccgctgcgcgcgctgcgcaatggtatcagcgccaaccgcggcgagggctgggttcgctggtatcaaaacgaacgacgcgaatatcgctttagcgccgccgccagccgcttctccgaccacaaccgtcgtcaggaatacaccttctccggcaaagagcggctctggcaatcgccaaccatcacgctcgatctggaacctgggctctccgccagcgccaacagcaggacggataccctctactacaacccgaaacgcgacttcgccgccacctcggcgctggtcgccgatcacgtcatgtatcagcactacgataccgtctggagccagcagcttgcggcaggcggcggtgcctactggcaaaaagcgtattcggccggggctatcgccatgcttggctacggccagcgtattcgctggaacaacgtgattgacaccggcgtgatgctgaactgggacaagcgcccttacgacggcaaacgtgaaagtaatctctccattgctcttgatgcgaatttacggttttaa

SEQ ID NO: 91623 - DNA, 2016 bp, Enterobacter aerogenes
atggtcaacaaaagtatccgcatcagcctgatggttatcggctggctcctgatgacctgcgcgcttcgcgcagagacgattccttttctgccgccggaggcgcggccgcagccggaggcgaataagccctggccgcagaataagtttctggtactggcctatcacgatgtggaagacgatgccgccgatcagcgctatctggcggtgcgtaccagcgcgctcaacgatcaaatcggctggctgctgcacaatggttataaggccgtcagcgtgcaaaatattctcgacgctaacgcggggttaatcaccctgccgccgaaggcatttctgctgagtttcgatgatggctacagcagtttttacacccgggtctggccgctgttaaaagcctggaatgtaccggctctgtgggcgccggtaggcagctgggtcgatacgccgggacagaaaaaagtcgatttcggcggtctgatgaccccgcgcgagcgtttcgccacctgggagatggtgcgcgagctcgcgcaatcgccgttggttgaaatcggtgcgcatacctgggcttcacactacggtattcaggccaatccgcagggcagccgcgaaccggcggttgccaaccgcttttatgataaagccagcgggcgctacgaaagcgaccagcagtttcaccaacgcatcgataccgacgtgcgcaaagtgagcgacaaaatcgccgatgtcaccggcaaagcgccgcgcgcctgggtatggccctacggcgccgccaacggcacatcgctggctatcgccaaaaatcgcggctatcaactggcgtttaccctcggcgatggtctgggcgacgtgcgcgatctggataatattccccgtctgcttatctccggtaatccgtcgatcaaggctttcgccagccaggtgacgcaaatccaggagcgtgaaccggttcgggtgatgcacgtcgatcttgattatgtctacgataaagacccggctcagcagcgcaaaaatatcgataagctgatccagcgcgtctacgacatgaaaatcactcacgttttcctgcaggccttttccgatccgctcggagacggcacggtgaaagcgctctacttccccaaccgccgcctgccgatgcgcgccgatctgtttaatttcgtcgcctggcaattgcagacgcgcggcggcgtcaaagtgtatgcgtggatgccggtgctggcgttcgatctggacagtgcgctgccgcgcgtacagcgctgggatgcgcagagcaacacgctgcgccaggccactcgcccctatgtacgtctgtcgccatggaatagccaggtgcgcgatgagatccgcgatatttatcaggaccttgcccgctacgcgacctttgacggcgtgctgttccacgacgacgcggtgctgacggattacgaagatgccggcaccggggcgatggccgcctggcgggcggcgggccatcgggaggatatcgcgcagatccgccaaaaccccgccgcgctgcacgcctggacgcggtttaaaagtcaggcgcttatcgacttcacccgcacgctcagccagagcgtgaaagcgattcgcggcccacaggtgagaaccgcgcgcaatatcttcgccctgccgatcctgcagccggaaagcgaggcctggttcgcgcagaatctggatgattttctggcggcctacgactggacggtgccgatggcgatgccgctgatggaatccgttccggtcgcggaaagcgatgcgtggctggctcgtctggtgcgcgccgtcagcgccaggccgggcgcgctgaagaaaaccatttttgagctgcaggctaaagactggaccctcccgcagcagaacgccatccctgaccaacagctggttgactggatgcggacattacagctcaacggcgtcaacaattacggctactaccccgacgatttccttaataatcagcctgatatctcgaaaatcaggcccctgttttcatcgtactggtatcccaacaatgactga

SEQ ID NO: 91624 - DNA, 1332 bp, Enterobacter aerogenes
atgactgatcgcattatcgcattttcgattttatgcctggttttcgggctgcctctgggcgtagccgccgttttcaccggcgagttgatactggatttcgtctttttttggccactgtttatgtcggtgctgtggataaccggcggactctacttttggtttcaactggagcgccactggccgtggggtaaagagaccccgccgccggagttggtaggtaatccgttgatctccattttgattccctgctttaacgaggagaaaaatgcccgcgagaccatcgaagccgcgctggcgcagcgctatcgcaacattgaggtaatcgccatcaacgacggatcctccgacgataccgccagggtgctgaatcaactggcggaagagtacgctctgctgcgggtgattcatctggccgaaaatcaggggaaagcggtagcgctgaaagccggcgccgccgccgcgcgcggggacttgctggtgtgcatcgacggcgatgccctgctcgatcgcgataccgccgcctaccttgtggcgccgctgattcagtatccccacgtcggcgcggtgaccggtaatccgcgtattcgtacccgctcgacgctgattggccgcattcaggtcggcgagttctcttcgataatcgggctgattaagcgtacccagcgtatttacggccgggtgtttaccgtgtccggggtgattgccgcttttcgtcgccaggcgctggcggacgtcggctactggagcccggatatgatcaccgaagatatcgatatcagttggaagctgcagctacgccattgggcgattttcttcgagccgcgggcgctgtgctggatcctgatgccggagacgctgaaggggctgtggaaacagcggttacgctgggcgcagggcggcgccgaggttttcctggtcaatctgcgccgcctgtttcgctgggagcatcaccggatgtggccgctgttcctcgaatatgccctctccacgctgtgggccttcgcctatgcggtcaccatttttctgttcatcgccagccattttgccccgctgccggaaaacctgaccgtccgcagcctttttccgccggaatttaccgggctactgctgggagtgatgtgtctgctgcagtttatcgccagcctgtacatcgaacggcgctatgaacgcggcgtcgccggctcgctgttctgggtgatctggtttccgatggtttactggatgatcggcctgttaaccaccatcgtcgccttccccaaagtcatgttgaaacgtaaacgcgccagggctcgctgggtcagccccgatagaggtaaaggaagaatgtcatga

SEQ ID NO: 91625 - DNA, 435 bp, Enterobacter aerogenes
atgaatgaacaaaccctgatcttaaccgagcatcgcgtgttgccgcgcatctttgacggcgtattaaccgctatcgcgtgggccggcttcgccttttttctgtatgccaacctgctgatgcagtttaccgagcgcggtaacgacagctgggacgcgattatggcgtcgtttaataccgtgctggtctatttactggtggcggcaattaacggctggctgctgattttgtggtatcagtacaatctacgccgttataacgcccggcggcacggcagcatggcctcgctgcgccatgaagagctggcagagagctttaatatcgcgccgcagatcatttccgagatgagccaatataacctgctgacggtataccacgaccagattggcagaatcattgatttaaaaatcaatcagaacgaggaagacgaaagctaa

SEQ ID NO: 91626 - DNA, 792 bp, Enterobacter aerogenes
atgtctggcatcaagaatctacttattctcgccctggcgggcgcttccctgctgccggcgctggccagcgccgctgacgcgccggccgcgactttcaccgcggagcaggaagcgcgtattggcaaaatcgccgctgactacctggtcgctcatccggaagtgctattgcaggccagccaaaagctgcagcaaattcaggcggaacagcaggccagcgccgctacccaggcggtaatcaagaatgccgacaagctgacgcaggataaggccacgccaacctacggcccggctaacggtaaagttaccgttatcgagttcttcgattatcaatgcatctactgtagccgcctcgcgccggttatggagcaggtaattaaagaccatccgcaaacccgctttgctttcaaagagtggccgattttcggcagccgctgggcaacctcgctggacgcggcgaaaaccggcctgcagatttatcagcagaaaggggccgaggcctacctgacttaccacaacggcgtttacgccaccgggcataacgaaggtaaactgacggcggcggatattcagcagcaggcgaagaaggtgaactttgacgccaaaaaagcggcggatgtcgaaccggcgctggaaaacattaaccagctggcgcaggagattggcttaagcggtacgcctggcgtgattgttatgccgactaccggcgcgaccgaagcgaccattaccgtcttcccgggactggctgacaaagcctcgctggatgcggcgattaagaaagccggcggtcagtaa

SEQ ID NO: 91627 - DNA, 684 bp, Enterobacter aerogenes
atgaacgaaatattgagtcagtgggacttcgccgtcattttgctacaaatcatcgccatcgatttgttattaggcggcgataacgcggtggtcatcgccatggcctgccgcaagctgccggcgcatctgcgcaccaaagccattgttatcggtactctcggcgcgattatcgccagggtcgcgctgctggcggtggcactctatttactgtcgttgccgtggcttaaaatcgtcggcgcgctactgctactgtggattggcattaagctggtcgccaacgaggaagaagagaacgatatcagcagctcaagcagcctatggcgcaccgccgtcaccatcaccgtcgccgatgtcatcatgtcgctggataacgtactggccgtggccgccgccggtaaaggccatctgttactggtggcgctaggggtattaatcagcattccgattattgtcgccggtagtaagctggtgttggcaatcctgactcgctttccctcggtcgtattactgggcggcgcgctgattggctggattgccggttcaatgatggtaaccgacccgacctttgttcagttgttcccccattccccgaattatctacattttgttgccggggccattggcgcggcgttggtgctgctggaaggatggcggcgcaactaccgctccggtaccccagaataa

SEQ ID NO: 91628 - DNA, 918 bp, Enterobacter aerogenes
atggaattaaaggattattataccattctgggggttaagccaacggacgatctgaaaaccatcaagaccgcctatcgccgtttggctcgtaaatatcaccccgacgtcagcaaagaacccgatgccgaagcaaaattcaaagatctcgccgaagcatgggaagttctcaaagacgatcagcgtcgcgccgaatatgatcaactttggcagcaccgcaacgatccgcagttcaaccgccagcagcacgcccacgaacaaagctacagccagcaggacttcgacgatatcttctcctcgatgttcggccagcaggcgcatcacgcccgccgccagcgcgccgagcgcggccacgatgtcgaaatcgaagtggcggtgttcctcgaagaaaccctcaccgaacagactcgtaccatcagctacaagctgccggtctataacgtcttcggcatggttgagagtgaaacaccgaaaaccctgaatgtgaaaattccggcgggggtcagcgatggccagcgtattcgcctgaaaggccaggggacaccgggcgaaaacggcggcccgaatggcgatctgtggctggtgattcatatcgcgccgcatccgctgttcgacatcaacggtcataacctggagatcgtactgccgctggcgccgtgggaagccgcgctgggggcgaaagtcaccgtaccgacgttaaaagagagcattctgctgacaattccagcgggtagtcaggcgggacaacggctgcgtatcaagggcaaagggttggtgagcaaaacccacaccggcgatttgttcgccgtcatcaaaatcgttatgccgccaaaaccagatgaaaaagcgcgtgagctctggcagcagctcgccgaaagcgaagccagcttcgatccgcgtaagacatgggggaaagcctga

SEQ ID NO: 91629 - DNA, 306 bp, Enterobacter aerogenes
atggctaaagtaacagtgacgtttaccatcaccgagttgtgcctgcgcaccggggtgtcggaagaggagctgacggaaatcgtcggcttagggatgattgagccgcaccagccgcaggctgaaacctggctgtttgacgacagcgcggtgacgattgtgcatcgcgctgtgcgcctgcgtaacgagctggagctggactggccggggattgcggtggcgttgacgctgctggatgaaaatgcgcgactcacccgcgaaaatcgactactgcagcagcgtctggcccgctttttgacccatagctaa

SEQ ID NO: 91630 - DNA, 372 bp, Enterobacter aerogenes
atgactctggatcgcagaaaggttctgatatacctgcgcccggatatcagcgccagcgagcgctttgcggacgcgaaaattgaggcccatcatcgcggcgatcgcggggatatgtcgcgtacggcgctgttggccgggttagcgttgggtgaagttgatagccggctgccgtcaatgctggcggcgctgctggcggaagatacgccaccggagacgctgcgcagaatgctggcctcgtttcttgagattcagccagcctcttccgctccggcatccgcgccagcggccgcgccggttaaggcacccgagccgcctgcaccggtgagcgagagcgtctccgcgcgtaatctcgccggctcgctgccggattag

SEQ ID NO: 91631 - DNA, 957 bp, Enterobacter aerogenes
atgcgcatttttatcgatgatggttcaaccaatatcaaaatgctgtgggagcaagatggcgaaactttcacccatatcagccccaatagttttaaacgaggctggtctgccaccttcggcgccgggaagccatttaactacaccgtggatgatgaaaagtactctttcgacctgatcacccccgatgcgttacccaccaacaatattgattggcaatacagcccgttgaactccatcgctgtccaccatgcgctgttgaccagcggtctggaaccgcaggatgtcgagattgtggtcaccctgccgctgaccgaattttatgatgaagatgcgcaatatcgtcttgataacattgagcgtaagaaaaagagcctgctgcgcgaagttaaattgaataaaggcgtggtgttcaacatcaccaaagtcaccgtgcgtccggaatccattccggcgggtatcagcctgtgcgatgagctgaaaccgtcgcattcggtgctgattgtcgatctcggcggcaccacgctggatatttcgatggtggccgggcaaatgacctcggtttcgcgcatttacggcgacccgaagctgggcgtatcgctggtgaccgacgccgttaagctggcgctggcgcgggcgaataccgatacctccagttataacgttgaccagataatcatcaaccgccacgacgaagagtatttgaccgataacatcaacgatccggatgcggtatcggaggtgaaaaaggttatctccaatagcatcgaacgcctgacgactcgcgttctgacggcgattgatagttttaaaggctattcgcatgccatcgtgattggcggcggcgcgccgctggttgccgatgcgattcgcgaacgcatggggctgcgcgaagatcgctttgtggtggccgacgagccgcagttcgccctcgtgcgtggtctgaaaattattggttaa

SEQ ID NO: 91632 - DNA, 1404 bp, Enterobacter aerogenes
atgacaacaaagctcagctacggatttggtgcttttggtaaagatttcgctatcggtatcgtttacatgtatctgatgtattactacaccgatattgttggcctatcggttggggtggttggcaccttgtttctggtggcgaggatccttgatgcgatagccgatccgatcatgggatggatcgtcaactgcacgcgatcgcgatgggggaaattcaagccgtggatcctgatcggaactatcaccaactcggtggtgttgtatatgctgttcagcgcccatcacttcagcggcggagcgctactggcgtgggtgtggctgacctacctgctgtggggcttcacctataccatcatggatgtgccgttctggtcgctggtgccgaccattacccttgataaacgcgaacgtgaacagctggtgccttacccgcgctttttcgccagccttgccgggtttgtgacggccggggtcacactgccgtttgtcagcgccgtcggcggcgccgatcgcggcttcggtttccagatgtttaccctggtgctgattgcctttttcgtaatttccaccctcgttaccttgcgcaacgtccatgaagtttactcgtcggatagcggcgtaagcgaggattccagccatctttcactgcgccagatggtggcgctcatctataaaaacgatcagttggcctgcctgttgggcatggcgctggcctataacacggcggcgaatattatcgccggcttcgcgatttattactttacctacgtcattggcagcgcggagatgttcccgtattacatgtcctacgcgggggcggcgaatttactgacgctgatcctgttcccacggctggtaaaagggctgtcgcggcgcattctgtgggcgggggcatcgatcatgccggtgctgggctgtggcgtgctgttgctgatggcgctgagcggcgtttacaacctcgcgctgatttcgctggccggagtgctgttgaatatcggcaccgcgctgttctgggtgctgcaggtcattatggtggccgataccgtcgactacggcgaatatacgatgaatatccgctgcgaaagcatcgcctactcggtgcagacgctggtggtcaaagctggttcggcgtttgcggcctggtttatcgccatcgtgctgggtatcattggctacgtgccgaatgttgtgcagtcgtcccacacgctgctggggatgcaggcgattatgattgcgctgccgacgctcttttttgccctgacgctgtttctctatttccgttattacaagctgaatggcgatatgttgcgacgtattcagattcacctgctggataaatatcgtcgggtaccggaaaatgtcgtcgagccggaacggccgattgtggtacccaatcaggtgtaa

SEQ ID NO: 91633 - DNA, 1353 bp, Enterobacter aerogenes
atgtccgccccaaaaattacctttatcggcgccggttcgacggtgtttgttaaaaatattctcggtgatgttttccagcgcccggcgttgaaatcggcgcatatcgcgctgatggatattgacgaaacccggctggaagagtcgcataccgtggtgcgaaagctgatggattccgtcggtgcgaatggcgaaattagctgccatcgcgatcgtaaaaccgccttgcgcgacgccgattttgtcgtcgtcgccttccagattggcggctatgaaccctgtactgtcaccgatttcgaagtctgtaaacgccacggccttgagcagaccattgccgatacgctgggaccgggaggcattatgcgcgcgctgcgcactatcccgcacctgtgggctatctgcgacgacatgaccgaggtctgcccaaacgccaccatgcttaactacgttaatccgatggcgatgaacacctgggcgatgtacgcccgctacccgcatatcaagcaggtgggtctgtgtcactcggtgcaaggcacagcagaagagctggcgcgcgatcttaacctcgacccggcggatttacgctaccgctgcgcggggattaaccatatggcgttctatctgtcgctggagaaaaagctcgcggacggcagctacgtcagtatctatcccgacctgctgcaggcctacgccgaagggcgggcgccgaaaccgaacctgcacggcaatccgcgctgcgaaaacatcgtccgctatgagatgttcaaaaagctgggctactttgtcaccgaatcgtcggagcatttcgccgaatacacgccatggtttatcaagccgggacgcgacgatcttatcgctcgctataaagtaccgctggatgagtaccctaaacgctgcgtcgagcagctggccaactggcataaagagctggagagctataaaagcggcgagcggatcgaggttaaaccttcgcgcgagtatgccagcaccatcatgaacgctatctggaccggcgagccaagcgtggtgtacggcaacgtgcgcaacgataatcttatcgacaacctgcctcagggctgctgcgtggaagttgcctgcctggtggatgccaacggcatccagccgacgaaagtgggcgcgctgccggcgcatctggcggcgctgatgcagaccaacatcaacgtgcagacgctgctgacgcaggcgatcctcaacgaagaccgggattacgtctattacgccacgatgatggatccgcacaccgctgcggtgctggggatcgaagagatctacgcgctggtggacgatcttatcgccagccacggcgactggctgccggcctggctgcaccgctaa

SEQ ID NO: 91634 - DNA, 942 bp, Enterobacter aerogenes
atgatggaacaccgcttcacttccctgccccccgacccgcacatgtgcagcagcgatgaaaagcagagccgcagcccgctggcgctctattccgagtatcagcgcatggatatcgaactgcgccctccgcacgccatggccaccagccactggcacggccaggtagaggtcaacgtgccgttcgacggcgacgtggagtatttgattaacaatgaagtggtgcgcattgagaaaggctatatcaccctgttttgggcctgtacgccgcatcagttgacccgccccggcgactgccagcagatggcgatattcaacctgccgatgcatctgtttctgtcgtggccgctggatcgcgaactgataaaccacgtcacccacgggatggtgattaaatctctcgccgcccagcagttaagcgcttttgaagtgcgccgttggcagcaggagttgaatcacgagaatgaacagattcgccagttggcgatcgatgaaatcgccctgatgctcaagcggctgagtctcgccggctggcagccgattctggtcaataagacctcgcgcacgcacaagaacagcgtctcgcgccacgcgcagttttacgttagccagatgctggaatttatcgccgcccattatgaccaggcgctgaccgtcgatgccgtcgccgagcacgttaaactcaacccgaactacgcgatgggcgtttttcagcgggtgatgcagcagaccatgaagcagtacattaccgccatgcgcatcaatcacgtgcgcgcgctgctgagcgataccgataagaccattcttgatatcgccctcaccgccgggttccgctccagcagccgcttctacagtaccttcacccgctatgtcggcatgccgccgcagcagtaccgtaaattgagccagcagcgccgccacagcctcgcgccgccgcagccataa

SEQ ID NO: 91635 - DNA, 1503 bp, Enterobacter aerogenes
atgcttaaaaggaaaaaaataaagccgattacgcttagggatgtcactatcatcgatgatagcaagctgcgaaaagccatcaccgcggcctcgctcggtaatgcgatggagtggttcgatttcggtgtgtatggttttgtggcttatgccctcggtaaagtcttcttccccgatgccgatcccagcgtgcagatgattgccgcgctcggtactttctcggttcctttcttgattcgtccgctcggcggcctgttcttcgggatgctcggcgataaatacggtcgacaaaaaatcttagcgatcaccatcgttatcatgtcgataagtacattctgtatcggtcttattccgtcgtatgccaccattggtatctgggcgccgattctgctgctgttgtgtaaaatggcgcagggcttctcggtaggcggcgaatataccggggcgtcgatcttcgtggccgaatactcgcctgaccgtaaacgcgggtttatgggcagttggctggacttcggttcgattgccggcttcgtaatgggcgcaggcgtggtggtactgatttccagcgtcgtgggcgaagagaacttcctcgactggggctggcgtattccgttcttcctggcgctgccgctggggattatcggcctgtacctgcgtcacgcgttagaagagacgccggcgttccagcagcacgtggatacccttgaacagggcgaccgcgaaggcctgcaggagggtccgaaagtctcctttaaagagatagccaccaaacactggcgcagcctgctgacctgtattggcctggtgatttccactaacgtgacctactacatgctgttgacctacatgccgagctacctgtcgcacaacctgcactactcggaagatcacggcgtactgattattatcgccatcatggtcggcatgttgtttgtccagccggttatcggcatgctgagcgaccgttttggccgtcgtccgtttatcctggtgggtagcgttgcgctgttcacgctgtctatcccggcctttatcatgattaacagtaacgtgattggcctgatcttcgccggtctgctgctgctggcggtggtgctgaactgctttatcggcgtgatggcctcatcgctgccggcgatgttcccgacccacatccgcttcagcgctctggccagcgcctttaacatctcggtgctgatcgccggtctgacgccgacgctggcggcatggctggtggaaaccacccagaacctgatgatgccggcttactatctgatggtgattgcggtgattggcctgattaccggcctgtcgatgaaagagaccgctaaccgtccgctgaaaggggcgacgccggcggcgtccgatatccaggaagcgaaagaaattctgggcgagcactacgataacatcgaacataaaatcgaagatatcgatcaggaaatcgccgacctgcaggaaaaacgcgcccgtctggtacagcagcatccacgtatcaacgactaa

SEQ ID NO: 91636 - DNA, 186 bp, Enterobacter aerogenes
atgaataagttcaatctctgtttcaccaccgatgtttatttctggactttattaacgtctgtttttcagcatattctccgcaaagccaaaataattaccctgcgttatttcctggaaaaaatacccgacaaaagtgcgggattgcgctataatcagccgcactttcggctcacagccgctgtttaa

SEQ ID NO: 91637 - DNA, 336 bp, Enterobacter aerogenes
atgcaacttccacactgcccaaaatgccattctgaatacacatatgaagataacggcatgtacatttgcccggaatgcgcccacgagtggaacaatgccgagccggccgacgatgccgacgcgctgattgtaaaagacgctaacggcaacttacttgccgatggcgacagcgtgaccgtggtgaaagatctgaaggtaaaaggcagttcttcaatgctgaaaatcggcaccaaagtgaagaatatccgtctggtcgaaggcgatcacaacatcgactgcaaaattgacggttttggcccaatgaagctgaaatctgaattcgtcaaaaagaactaa

SEQ ID NO: 91638 - DNA, 435 bp, Enterobacter aerogenes
atgtccctgagtccttacattgcttttagcggcaactgcgctgccgccatcgccttctatcagcaggcgctggcggcgcagcttatccaccaaatcacctacggcgaaatgccgcagagcgcccaggatgccgaagatggttgcgcctccgggcaacatcttgccgccgactgcatcgcccacgccagcctgcaggtcgccgacagtattttgatgttgagcgatagccccagtagcgacatggaacattacgcgggattcgtcctcgtgctggagccgaaagatattgctgaaggcaaacactggtttgaggcgctggccgatggcgggcgcatcgaaatggcatggcaggagaccttctgggcccacggtttcggcaaagtggtcgatcgtttcggcgtgccgtggatggttaacgtcgtcaaacaaccctaa

SEQ ID NO: 91639 - DNA, 726 bp, Enterobacter aerogenes
atgtacttatccagacatccgaccagttaccccacccggtatcaggaaattgccgccaggcttgaacaggagctgcgccatcactatcgctgcggcgactatttgcctgcggaacaacagctggctgcgcgctttgaagttaaccgccacaccctacgccgcgccatcgatcagctggtggaacgcggatgggtccagcgccgccagggcgtcggcgtactggtattgatgcgccccatcgactacccgctcaacgcccaggcgcgttttagccagaatctgctggaacaaggcagccacccgaccagcgagaaactgctgtcggtgctgcgcccggccagcagccacgttgccgaagcctttggcatcgccgaaggcgaaaccgtcattcatctgcgcaccctgcgccgggttaacggcgtggcgttgtgtttgattgaccactacttcgccgacctgcgcttctggccggtgctgcaaaccttcacccatggctcgctacacgacctgctgcgcgaccaactcgccatcgaactgacccgcgtacgcaccaaaatcagcgcccgccgcgcgcaggcgaaagagagcaagctgctggaaatccccaatatggcgccgctgctgtgcgtacgcacgctcaatagccgcgagggcgagactgtcacgacggagtactccgtcagcctgacccgcgccgacatgattgaattcaccatggagcactga

SEQ ID NO: 91640 - DNA, 453 bp, Enterobacter aerogenes
atgcacttcgataccgccacccgccagcgttggatgtccgtgctggcccacagtgaaccgcaggaccttctggcgcgcatgcaatcgctgcggctggcgccggagtatgaattaattcgcgccccggaaaccgggctggtacagctccaggcgcgtatgggcggcatcggcgatcgtttctttgccggtgacgccactctgacccgcgccgccgtacgcctggccgatggcaccctcggctacagctggattctgggccgcgaccgcccccacgccgaacgctgcgcggcgatcgatggcctgctgcaatcgcctcactattttcacaccttaatggaaaccctcattaccccgctggaagcacaacgcagcgcgcgcctcgacgcccgccgcgccgaagtcaacgccagccgggtcgacttctttactctggttcgcggagataacgcatga

SEQ ID NO: 91641 - DNA, 585 bp, Enterobacter aerogenes
atgacattacaaaccgcctttaccctaccggtgcaggatgcccaacacagtttccgccgcctgctgaaagcaatgagcgagccgggagtgattgtctccctgcagcagcttcagcacggctggcagccattgaatatcgcctccaccagcttgctgctgaccctggccgatcacgacaccccggtgtggatggccgccgcgctgcataacgatctggtcagccaaaatctgcgctttcataccggctcgacgctggtggaacagccgcagcaggcggtatttgccgtcgcctgcgacaccatcagcgccgaacagcttaatgtcctttccgctggtaccgtggcggcgccggaaaccggcgtcacgctgattgttcaactagccagcctgagcggcggacgcatgctgcgcctgaccggcgcgggcattgccgaggagcgaatgatcgccccccagctcccggactgcatcatcgacgaattaaccgaacgcccgcacccgttcccactgggcattgacctgatcctgacctgcggcgagcgcctgctggctatcccgcgtaccacccacgtggaggtgtgctaa

SEQ ID NO: 91642 - DNA, 1065 bp, Enterobacter aerogenes
atgtatgttgccgtcaaaggcggcgagaaggcgattagcgccgctcacgctttgcaagagcagaaacgacggggcgatggacggcttcccgaactgagcgtcgagcagataagcgaacagctcagcctggcggtggaccgggtgatgaccgaaggcggcatcgccgaccgcgaactggcggcgctggcgctgaagcaggccagcggcgataacgtcgaagccattttcctgctgcgcgcctaccgcaccaccctgccgcggctggcggtcagcgaaccggttgataccgccgggatgcgcctcgagcgccggatctccgcggtctacaaagatatccccggcggccagctgctgggccccacttacgactatacccaccgcctgctcgattttaccctgctggccaacggcgaaccgccgtcggtgcagaaagccggtagcgaaacgcagccgacgccgcacgtcttcaacctgctggcgcagcaggggctggccaaagctgaagcggactgcggcgcgccgcctgacgatatcacccgcaccccgccggtctatccctgctcgcgctcctcgcggctgcagcagctggtacgcggcgatgaaggctatctgctggcgctggcctactcaacccagcgcggctatggccgcaaccacccgtttgccggcgagatccgcagcggctacgtgcaggtggaaatcgtgccggaagagctgggttttagcgtcaatattggcgagctgctgctgaccgaatgcgaaatggtcaacggctttgtcgatccagaggatgagccgccgcacttcacccgcggctacggcctgacgtttggcatgagcgagcgtaaagcgatggccatggcgctggtcgaccgcgcccttcaggcgccggaatacggcgaagagataagcggaccggcccaggacgaagagttcgtgctggcgcacgccgataacgttgaagccgccggcttcgtctcgcatttgaaactgccgcactatgtcgatttccaggccgaactggcgctgttgaaacgcctgcaacgggagaacgaacgtggctaa

SEQ ID NO: 91643 - DNA, 849 bp, Enterobacter aerogenes
gtggctaacccactgactggctataactttgcttatcttgatgagcaaaccaagcgcatgatccgccgggcgatactgaaagcggtggccattcccggctatcaggtgcccttcggcggccgcgaaatgccgatgccctacggttggggtaccggcgggatccaactgaccgccagcgttatcggcgagaacgacgtactgaaggtcatcgatcagggtgccgatgacaccaccaacgcggtgtcgatccgccagttctttaaacgcgtaaccggcgtcgccaccaccgaacgcaccgaagacgccaccctgatccagacccgccaccggatcccggaaacgccgctggtggaagatcagatcctgatctatcaggtgccgatcccggagccgctgcgctttatcgaaccgcgcgaaactgaaacccgcaccatgcacgcgctggaagagtacggtgtaatgcaggtgaagctgtatgaggatatcgcccgcttcggccatatcgccaccacctacgcctatccggtgaaggtgaacggccgctacgtgatggacccttcgccgatcccgaaattcgataaccccaaaatgcacatgatgccggcgctgcagctgttcggcgccgggcgcgaaaaacgtatctacgcggtgccgccctataccgcagtcgaaagcctcgatttcgacgatcacccgtttagcgtgcaggagtgggatgaaccctgcgccatttgcggttcgcgtcacagctatcttgacgaagtggtgctggatgacagcggccagcggatgtttgtctgctccgataccgactattgccgccaacagagcgaggcgcagaaaaaatga

SEQ ID NO: 91644 - DNA, 759 bp, Enterobacter aerogenes
atgagccagccgttacttacagttaatcacctgacccatctctatgcgccgggaaaaggttttagcgatgtctctttcgagctgtggccgggcgaagtgctcggcatcgtcggcgaatccggctccggtaaaaccacgctgctgaaagcgatttccgctcgtctggcgccacaacagggtgaagtgcggtatcaacagcgctccctgtacgccatgagcgaagccgaacgccgccgcctgctgcgcaccgaatggggcgtcgtgcatcagcacccaatggacggcctgcgtcgccaggtctcggcgggcggcaacatcggcgaacggctgatggcgaccggcgctcgccactacggcgacattcgcgccaccgccgaacgctggctgcaggaggtggagatcccgccttcccgcatcgacgacctgccgaccaccttttccggtggcatgcagcagcgcttgcaaatcgcccgcaatctcgtgacgcagccgaaactggtgtttatggatgaacccaccggcggactggacgtctcggtacaggcgcgcctgctcgatctcctgcgcgggctggtagtggagctgggtctggcggcggtgatagtcacccacgatctcggcgtcgcccgcctgctggcgaaccgtctgctggtgatgaaacaaggacaggtggtggaaagtggcttaaccgaccgggtgctcgacgatccgcaccatccttacacccagctgctggtgtcgtcggtgttgcagaattga

SEQ ID NO: 91645 - DNA, 681 bp, Enterobacter aerogenes
atgatccgcgttgaaaacatccataaaacctttgttctgcaccaacagcacggcgtacgcctgccggtgctcgccgacgcttcgctcaccgttaacgccggggagtgcgtggtgctgcacggccattccggcagcggcaaatcgacgctgctgcgctcgctgtacgctaactatctgccggacagcggtcatattcatatccgccacggcgacgaatgggtagatctggtgaccgccacgccgcgcaaggtgctggaagtgcgtaaaaccactatcggttgggttagccagtttctgcgggtgatcccgcggatatccgcactggaagtcgtcatgcagccactgctcgacctcggtacgccgcgcgaagagagcgccgctaaagccgcccgcctgctgacccagctcaacgtgccggagcgtctgtggcatctggcgccgtccaccttttccggcggcgaacagcagcgggtcaacatcgcccgcggttttgcggtcgactatccgattttactcctcgatgaacccaccgcctcgctggatgccaacaacagcgccgcggtggtggcgctgatccagcaggctaaagcgcgcggcgcagctatcgtcggtattttccatgatgaaacggtacgcggccaggtcgccgaccgcctgcaccaaatgggtatcacagtatga

SEQ ID NO: 91646 - DNA, 1137 bp, Enterobacter aerogenes
atgataatcaataacgtaaagctggtactggaagacgaaaccatcgacggttcgctggaagtgcaggagggacgaatttacgcctttgccgagagccagagccgactgcccggcgccctcgatggcgaaggcggctggctgctgccggggcttatcgaactccataccgataacctggataaattcttcaccccgcggccaaaggttgactggcctgcacactcggcgatgagcagccacgatgctttgatggtcgccagcggcatcaccaccgtactcgacgccgtggcgattggcgacgtgcgcgacggcggtgaccgccttgagaacctggaaaagatgatcaacgcggtggaagagacgcaaaaacgcgggcttaaccgcgccgagcaccgcctgcatctgcgttgtgaactgccgcaccacaccaccttgccgctgtttgaaaagttggtcgaccgcgagccggtcactctggtgtcgctgatggaccactcgccgggtcaacgccagttcgccaaccgcgaaaaatatcgcgaatattatcagggcaaatatcagctcagcggcgagcagatgcaacgctttgaagaggagcaaatggcgctggcggcggcctggtcgcagcctaatcgccaggctatcgccgcaatgtgtcgggagcgccaaatcgctctcgccagccacgacgacgccactcatgaacatgtcgccgaatcccaccagcttggcagcgtgattgccgaatttcccaccacgttggccgccgcgcaggcttcgcgccagcacggaatgaatgtgttgatgggggcgccgaatatcgtgcgcggcggctcgcattccggcaatgtcgccgcgcatcaactggccgccagcggcctgttggatattctctcttccgactactaccccgccagcctgcttgatgccgctttccgcatcgccgatagcgacgacaacgctttcacgctggcgcaggctgtccgtctggtcagcaaacatcctgcgcaggcgctgggcctgcatgaccgcggcgtcatcgccgaaggcaaacgcgccgatctggtgctcgcgcaccgccgcggccagcacgtccatatcgatcacgtctggcgtcagggaaagagggtcttttaa

SEQ ID NO: 91647 - DNA, 564 bp, Enterobacter aerogenes
atgcctggaaaactgatttggctggtcggcccctcggggtcgggaaaggatagtctgctggccgcgctgcgccagcgtgagcatccgcaactgctggtcgcgcatcgctacatcacccgcccgcacctggtgggctgcgagaaccatattgcgctcagcgagcatgagtttttcacccgcgccgagcgtaatcttttcgcgctaagctggcatgccaacaataattactatggcgtcggcatagagatcgacctctggctgcatgccggttttgatgtggtcgccaacggctcgcgcgcgcatctggcgcaggcgcgggaacgttacgatgacgtactggtaccgatttgtctcgaagtttcgccaacggtgttgcgccagcggcttgaacagcgcggtcgggaaaatgccgtggaaatcgcccaacgcctgcaacgcgccgcgcgctataaaccggccgattgcctgacgttgaataacgacggcagcctcgggcaatcggtagagcgtttcttccagctgttgcgccagcacgccggacgtgaagagaatcagcatgcctga

SEQ ID NO: 91648 - DNA, 759 bp, Enterobacter aerogenes
atgagcctgacgatccgcctgaccggcaccggcggcgcccagcaggtgccggtcttcggctgcgactgcgccgcctgccagcgcgcccgcgtcgatgcacgctatcgccgccgcccctgcagcgcggtggtgcgctttaaccatgcggtcacgctgctcgacgccgggctggcggatctggcggaacgccagcccgctggcagcttccagcagattttattgacgcattaccatatggatcacgtgcaggggctgttccccctgcgctggggggtgggcgatccgattgcggtgtacggcccgccggatgacatcggctgcgacgatctgtttaaacatcccggcatcctcgattttagccacaccgttatccccttcacggtatttgaattacaggggctacaggtcacgccgctgccgttaatccactcgaagctgacctacggctatctgctggagtcggcgcacagccgggtggcctggcttgcggataccgccgggctgccggagaagacgctgaagtttttacttaataatcagccgcaggtgattgtcatcgattgcagccacgagccaagaacagagacgccgcgcaaccacagcgacttgaataccgtgcgcgcgctgaaccaggtacttggctgcccgcgggtgatcctcacccatatcagccatcagttcgaccagtggatgatggataacccgctgccaaaaggtttcgaggcgggatacgacggcatggagatcgtgctggagtaa

SEQ ID NO: 91649 - DNA, 354 bp, Enterobacter aerogenes
atgaaacgttacgcaaccgctctgtttttttgcacgctggcgctgagcagccaactggcccatgccgatattattgacgacgctattggcaatattcagcaagccatcaacgatgcctacaatccgggcagcagccgttccgacgacgacgacgggcgctatgacgacggacgctacgatgacggcagctatcagggcagccgccagcagcgtagggataaccagcagcaatataacgatcgccagcgccagcttgacgaccgccgtcgccagctggatgaacgccagcgccagcttgatagcgatcgtcgccagctggagagcgaccagcgccgtctcgacgacgattactga

SEQ ID NO: 91650 - DNA, 2286 bp, Enterobacter aerogenes
atgccttctcgccatccgtactttttcgttagcgcccgcggtcgcctgctgtcatttaacttgttgatggtggcggtgacgttaatggtcgccggagtggcgattttcggttttcgccatgccagtcagttgcaggagcaggtgcagctgcaaacgcttagcgacatgaacggcagtatgaatctggcgcgtgataccgctaacgtcgctaccgcggcggtgcggttgtcgcaggtggttggcgcgctggagtataaaagcgaagcgcaacggctgctggaaacccaacaggcgctgaagcattcgttgggccagttggcctcggcgccgttggcccggcaggaactggcgctggtagcgagcattattcgccgtagcaacgagctgcagcagagtgtcgccggcatgctggaacgcgggcaacgccgccatctgcagcgcaatgaactgctgagcgcgctgtatcaaaaccagagctatttgcgccatttgcaggatctcaacgatcgcgatggtaaaccggcgatcgatcctcagcgtttaaacgagatggaccggttgatcgtcgccgcgatacacactgcgacgccgcgctcgatcgtcctgcagctcgatgacatcagacgctttttaccgcgcaacgatagcgattctgcgctggcctttatcctgccggatttcaacgccgaactggcgcggctggcgccgctatcggcgcagcttgaagagagcgatctggcgatcggctggtatatgtttcatatcaaagcgctggttgcgctgcttaatggcgatattaatcaatatgttgccagagtcgctcaagcttcggaggcgcgagcggcgcaaagccaccagcagttgcgctccatcagcacgtttatcctgctggccgcgctgctggcgctggcgatcaccgggtgcgctggctggtatatctatcgtaatcttggcctcaatctgaacgcgatatccggcgcgatgtcgcggctggcgcacggcgagcagaacgtgacggtgccggccctgcaacggcgtgatgagcttggcgaactggcgcgcgcctttaacgttttcgcccgcaataccgcttcccttgaacacaccacccgcctgctgcgggagaaaaccacccagatggagattgaccgcattgagcgacaggggctggaggaggcgctgctgcatagccaaaaaatgaaagccgtcggccagcttaccggcggcctggcccacgattttaacaacctgctggcggtgattatcggcagcctcgaactggtacagccggatgagcgcgatgcgccgcggatatcgcgggcgctgaaggctgccgaacgcggcgccttgcttactcagcggttgctggccttttcgcgtaaacaggcgctgaacccgcaggcggtggcgctgcagccgttgctggagaatgtctgcgaactgatgcgtcattcgctccccgcatcgttgcgtctcgaaatagaagcgcagtcgcctgcctggccggcgtggatcgatgtcggacaactggaaaacgcgattatcaacctggtgatgaacgcccgcgacgctatggaggggcggtcaggcgttatcgcgctacgaacctggaaccagcgggtcacccgtagcgatggacggcgtcaggatatggtggcgctggaggtgattgaccacggctgcggcatgtcgcaggagataaaagcgcaggttttcgagcccttctttaccaccaaacagaccggtagcggcagcggtcttgggctgtcgatggtgtacggttttgtgcgccagtcgggcgggcgcgtggcgattgaaagcgcgccggggcagggcaccaccgttcgtttgcagctaccgcgagccacggcagcggcggaggatgaacgaacgccgttggttagcgaaccgatggtgagcggcgagcggctggcgttggtgcttgaggatgaagccgatgtgcgccagacgctatgcgagcagctgcatcagctgggttggatgacgctggaggcacaaagcggcgagcaagcgctgcagatgctggcggcctccggggatatcgcgttgttgatcagcgatttaatgctccctggggggctgagcggcgccgaggtcattcacgaagcgcaacgccgcttcccggcggtggcgctgctattgattagcggccaggatttgcgccctgcgcataatccggcgttgcctgaggttgaacgactgcgcaagcctttcacccgcacgcagctggcgcaggcgttgcgtgcggcgatggtgcggatttga

SEQ ID NO: 91651 - DNA, 1521 bp, Enterobacter aerogenes
atgcagggaacaccggtgctatccatgcgcaacatcgccaaagttttcggcaaattttatgcgctgaaaggggtggatctgacggtctggcccggcgagatccacgcgctgatgggcgaaaacggcgcgggaaaaagcacgttgatgaagatcctcgccggcgcctataccgcctccagcggcgagatcctgatcgacggacaaccgcagacgatcagaggcccgaaagatgcgctggcggcagggatcacgcttatctatcaggagatgcagctggcgccgaatctcaccgtcgcggaaaacattttcctcggcagcgagctttcccgcggcggtctggtacagcgcaaagagatggagtcccaggcgcaggcggttatcgaccggctcggcgcgcagttcaaagccagcgaccgagtgatgaagctgactatcgccgaacagcagcaggtggaaatcgcccgcgcgctgcatcgcaacagccgcattctggtgatggatgaacctaccgccgccctctcctcgcgagaaacgcagcgcctgtttgagctgattttacgcctgcgcgatgaagggatggcaatcatctatatcagccaccgcatggccgaagtgtatgaactctccgaccgggtcagcgtgctgcgcgatggccagtatgtcggcagcctcacccgcgaccaccttagcgcccccgaattagtgcgcatgatggttggccgcccgctcagcgatctgttcaataaagagcgcgatatcccgcgcggccagccgcgcctgtgggtgcaggatctcagcgacggcggcaaagtgcatcccagcagcctggtggtgcacgccggggaaatcgttggcctcgccgggctggtcggcgccgggcgttccgagctggcgcaactgattttcggcgtccgcaaagcgacgggcggcgtcattgaaatcgacggcgaaccggtggttattcactcgccgcgcgaagcgattgacctcgggatcggctttctgaccgaaaaccgtaaagaacaggggctgtttctcgaactggcggcgcaggagaacatcaccatggcgacgcttgagcgcgacgccaactggggaatgctcgaccggaagaaggcgcaagccatctccgatgacgccatccagctgctgaacatccgcgtcccgcatgctcaggtacgcgccggcgggctttccggcggcaatcagcaaaagctgctgatttcacgctgggtggcgatcggcccgcgcattctcatcctggatgaaccgacccgcggcgttgacgtcggcgccaaaagcgagatttaccgcatcatgaatcagatggcccgccagggcgtcgccattttaatgatctccagcgaattgccggaaatcgtaggcatgagcgaccgggtatacgtgatgcgcgaaggcgctatagccggcgagttgcaggttggcgagatcagtcaggaaagcattatgacgctggcgaccggcgtgaacgattctcacctaaaggcaggacaagcatga

SEQ ID NO: 91652 - DNA, 999 bp, Enterobacter aerogenes
atgagcataccgaaagagacctccgcgccggcggcgaaatccgcctcggcaaaaaaaatgctgatgggcgacctgatgcaaaccgtcggcatcctgccgattttaatcctgatcgtcgcggtgttcggcttcgtcgcgccgaacttctttaccgaaagcaacctgctgaatattacccgccagtcctccatcaacatcgtgctggcggcggggatgacctttattattcttaccggcggtatcgatctgtcggtggggtcaatactcggcaccaccgcggttgcggcgatggtggtatcgctcatcccgccattcgcgatgctgtcgattccggcggcgctgatgctcggcctgctgctcgggctgttcaacggcgcgctggtggccttcgccggactaccgccgtttattgtcacccttggcacctacaccgcgctgcgcggcgccgcctatctgctggccgacggcaccacggtgattaactccgatattagttttgaatggatcggcaataactatctcggcccggtaccgtggctggtggtgatagcgctggcggtcgtggcggtgtgctggtttatcctgcgccgcaccaccctcggtattcatatttacgccgttggcggcaacatgcaggcggcgcggctgacggggattaaagtctggctggtgctgctgttcgtctacggcatgagcgggctgctttccgggctcggcggggtgatgagcgcctcgcggctgtacagcgccaacggcaacctcggcgtcggctatgagctggacgccattgccgcggtgatcctcggcggcaccagtttcgtcggcggtataggcaccatcaccggtacgctggtgggggcgctgattatcgccaccctcaacaacggcatgacgctgatgggcgtctcctacttctggcaattggtgatcaaaggggcggtgatcatcatagcggtgctgatcgacaaataccgtacccgacaccatcaaagtgcataa

SEQ ID NO: 91653 - DNA, 942 bp, Enterobacter aerogenes
atgcgtttaaaaccgatagtgaccgcgctgtgtgccggcgcgctgctggccgcctccccttttgcgtcggccaaagatctacaagcgataggcgtgacggtgggcgacctcgccaacccgttcttcgtgcaaatcaccaagggggccgagctggaagcgcgcaagctggcgggggataaagtgaaggtcacgctggtgtcgagcggctacgacctggggcagcaggtagcgcagatcgataactttatcgccgccaaagtcgatatgatcatcctcaacgccgctgattcaaaaggtatcggcccggcggtgaagcgggcgaaagaggccgggatcgtggtggtggcggttgacgtcgccgccgaaggcgccgatgccaccatcacctccgataacacccaggccggcgcgatggcctgtaaatacattagcgatcgcctgaacaacaaaggcaacgtggtgattatcaacgggccgccggtttccgcggtgcagaaccgcgttgaaggctgcgaaaccgaattcaaaaaacatccggatatcaaaatcctctctgccaaccagaacgcgaaaggcagccgcgaaggcgggctggaggtgatgacgtcgctgctggcggcgaatccgaagattgacggcgtgttcgcgattaacgatccgacggcgattggcgccgatctggcggcgaaacaggcgcaacgtaatgagttctttatcgtgggcgtcgacggcagcccggacggcgaagaggcgctgaagcgtaagaattcgctgttcgtcgccacgccggcgcaggacccgcaggtcatggcggcgaaggcggtggaaatcggttatgacattctgcagggcaagcccgcgccagccgcgccggtgctgatcccggtgaagatgatcgataaaaataacgtcagcagctacaagggctggacggtgaaataa

SEQ ID NO: 91654 - DNA, 735 bp, Enterobacter aerogenes
atgaaaccggtcattttagtgattgatgatgacgtcgcgatttgcgagctgctgagcgacgtgctcggcgcccacgcgttcgaggtggtggcctgccagaacggcggcgaagcgctggcgacggtcgcccggcgcgcagatatcgcgctggtgctgctggatatgatcttgccggataccaatggattgctggtgttacaacagctgcagcgcacgcggcctgagctaccggtgataatgctttccgggctgggaagcgaatcggatgtggtggtcgggctggaaatgggcgctgacgattacatcgccaagccgtttaacgcacgggtagtggtggcgcgcgtaaaggcggtgctgcggcgcagcggggcgatcggcgtggaaagcctcgtgccgggcggggagcatgggctgttgtttaacggctggcggctggatacccgccgctgtgagctgtttaatccccaacagcagagcgtggcgttaacccagggggagtatggattgttgctggcgctggcgcaaaacgcccgccgggttctgaaccgtgaacagctgctggcgctgacccataatgagagcatggaagtattcgaccgcacgatcgatgtgctgatcatgcgcctgcggcgtaaagttgaggtcaatccgcatcagcccaccttgattaaaaccctgcgcgggctgggctacgttttcgccgctgacgttatccataacgacaaagcggcgtag

SEQ ID NO: 91655 - DNA, 1590 bp, Enterobacter aerogenes
atgcaacaacgtcgtccagtccgccgcgctctgctcagtgtttctgacaaggccggtatcgtcgaattcgcgcaggcgctttccgctcgtggtgtcgagctgctgtccaccggcggcaccgctcgcctgctggcagataaaggcctgccggttaccgaagtctctgactacaccggtttcccggaaatgatggatggacgcgtgaagaccctgcatccgaaagtacacggcggcatcctcggtcgtcgcggtcaggatgacggtatcatgcagcaacacggtatcgcgcctatcgatatggttgtcgttaacctttatccgtttgcccagaccgtcgctcgtgaagagtgttcgctggaagacgcggtggaaaacatcgatatcggcggcccgaccatggtgcgctctgcggcgaagaaccataaagacgtcgccatcgtggttaagagcagcgactacgacgccatcattaatgagatggacgccaacgaaggttccctcacgctggacacccgcttcgacctcgccattaaagccttcgaacacaccgccgcttacgacagcatgatcgctaactacttcggtagcatggttccgtcctatcacggcgaaagcaaagaagccgctggccgcttcccgcgtaccctgaatctgaacttcattaagaagcaggatatgcgctacggcgaaaacagccaccagcaggctgccttctatatagaagagaatgtaaaagaagcctccgtggctaccgccacccagctgcagggcaaagcgctctcctataacaatattgccgataccgatgcggcgctggaatgcgtgaaagagtttaacgagccggcctgcgttatcgttaagcatgccaacccgtgcggcgttgccgtcagcgactcgatcctcgacgcctacgatcgcgcatacaaaaccgacccaacctccgcgttcggcggcatcatcgcctttaaccgcgagctggatgctgaaaccgcgcaggcgatcatctctcgccagttcgtcgaagtgatcatcgcgccatccgctagcgaagaagcgctgaaaatcaccgccgctaagcagaacgtccgcgtactggtctgcggccagtgggatgctcgcgtcgcgggtctcgatttcaaacgtgtcaatggcggcttgctggttcaggaccgcgatctcggtatggtcaccgcgggcgaactgcgcgtggttagcaaacgtcagccgagcgagcaagagctgcgcgatgcgctgttctgctggaaagtggcgaaattcgtcaaatccaacgccatcgtttatgccaaagataatatgaccatcggtataggcgccggtcagatgagccgcgtctactcagcgaaaattgccgggattaaagccggtgacgaaggtctggaagtgaaaggttccgccatggcctctgacgctttcttcccgttccgcgatggtattgatgccgcagccgcagtaggcatcacctgcgttatccaaccgggcggttctatccgcgacgaagaagtaattgccgccgcggacgaacatggtatcgccatgatcttcaccgacatgcgccacttccgccattaa

SEQ ID NO: 91656 - DNA, 1296 bp, Enterobacter aerogenes
atgaaagtattagtaatcggcaacggcgggcgcgaacacgcgctggcctggaaagcggcccagtcgccgctggttgataccgtctatgtcgcgccgggcaatgcgggtaccgcgctggagccggcgctgcaaaacgtcgccatcggcgtcaccgatattccggccctgctacgcttcgcgcaggatgagaaaatcgatctgacgatcgtgggtccggaagcgcctctggtcattggcgtagtagacgcattccgtgccgcagggctcgccatcttcgggccaaccgaaggcgccgcgcagctggaaggttcaaaagccttcaccaaagatttcctcgctcgtcatcatatcccgacggcggaataccagaacttcaccgaagttgagcctgcgctggcttatctgcgggagaaaggcgcgccgatcgtcatcaaagccgacggtctggcggcaggtaaaggcgttatcgtggcgatgacccttgaggaagccgaagcggcggtcgaagatatgctggccggtaacgcctttggcgatgcaggccaccgcatcgtgattgaagagttcctcgacggcgaagaagccagctttattgtcatggtcgacggcgagcacgtcctgccgatggccaccagccaggatcacaagcgcgtcggcaacggcgataccggcccgaacaccggcggtatgggcgcttactccccggcgccggtggttactgatgaagtccatcagcgcaccatggagcgaattatctggccaaccgttaaaggtatggccgctgaaggtaacacctataccggtttcctgtatgccggtctgatgatcgacaagcagggcaatccgaaggttattgagttcaactgtcgctttggcgatccggaaacccagccgatcatgctgcgcatgaaatccgatctggtagagctgtgcctcgccgcctgcgcgggcaagctggacgagaaaacttccgagtgggataaccgcgcttcgctgggcgtcgtggttgccgccggtggctatccgggcagctacaacacgggcgatgagatccacggcctgccgcagcaggaagccgcagacggtaaagtcttccatgccggcaccaaactggcagacgaccagcgcgtggtcaccaacggcgggcgcgtgctgtgcgtgaccgcgctgggtgacaccgtggctcaggcgcagcagcgcgcctatgaactgctgaccgatattcactgggacggcagctttagccgtaacgatatcggctggcgcgccatcgcgcgtgagaaaactaacggctga

SEQ ID NO: 91657 - DNA, 1332 bp, Enterobacter aerogenes
atgagcagcgataaagtacagattctggttgtcgatgatgacgtcagccactgcacgattctgcaggcgctgctgcgtggctggggctatcaagtggcgttagcccacaacggcctgcaggcgctggagcagatccatcagcaggtcttcgacctggtgctatgcgatatccgcatggcggagatggacggtatcgcgacattaaaagagatcaaagcctataacccggcgattccggtattaatcatgacggcattctccagcgtcggcacggcggttgaggctattaagtccggcgcgttggattatctggtcaagccactggattttgacaccctacagcagacgctggttcaggcgctggcgcacacccggcagagcgagggcgatttcagcgccgcgacggattcgcaatggggcatgattggcgaaagcccggcaatgcaggcgcttatcaacaatattacgctggtggcgccctcggacgcgacggtgctgatctgcggcgaatcgggaaccggtaaagaactggtagcgcgcgccattcacgcctgcagcgagcgccgcgacaagccgctggtgacgctaaactgcgcagcgctcaatgagtcgctgctggaatccgagctgttcggccatgaaaaaggggcttttaccggcgcggaacggcggcgggaagggcgttttgtcgaggcggatggcggcacgctgttccttgatgaaattggcgatatctcgccgctgatgcaggtgcgtctgctgcgggcgattcaggaacgcgaagtgcagcgcgtgggcagtaatcagacgctttctgtcgatgtgcggctaatcgccgccacccatcgtaatctggcggaggaggtgagcgccgggcgttttcgccaggatctctattaccgcctgaatgtcgtaactattgatatgccgccgctgcgtcagcggcgtgaagatattccgcaactggcgcagcattttcttaagcgctacgccgaacgcaatcgtaaaacggtgcagggatttacgccgcaggcgatggacctgttgattcactacgactggccggggaatatccgcgaactggaaaatgcggtggagcgggcggtggtactgctgaccggagactacatttccgagcgtgaactgccgttggcgatagcgggcgcgccgctgccggtcactggcaacgatgaggcgttgattcagccattagtggaagttgaaaaagaagtcattctctcggcgctggaaaaaacgggcggcaacaaaactgaagccgcccgtcagttaggcattacgcgtaaaacgcttctggcaaaactcagccgttag

SEQ ID NO: 91658 - DNA, 1386 bp, Enterobacter aerogenes
atgctgcgcattacttcatgcttccgggacgccctgagctggttactgaccggcacggtcgtcctgttagttcttctgttttccgcgatgatcgtccgcgattatggtcgggagaccgccgccgcccggcaaaatatcgaagaaaaggggagtgtgctgatccgcgccctggagtccggcacgcgtgtcggaatggggatgcgaatgcatcacgcgcagctgcaggcgttgctggaggagatggcatggcagcccggagtgctgtggttcgcggtgaccgatgaaaacggtaagattatcgcccacagcgacccgcaacaggtggataccgcgctgtacagtcctgcgcaaatgcgtgaactcaaggtgggcgaacaggagcgctggcgtcggcttgccgagccgcaaccggcgctggagatttatcgccagttccgcccgctcaaccctgctcgtggtcaccatatgggaatgatgaagcgctgcaacagcgcgctggctcagcctaatgttccacaggtgatttttatcgcctttgatagccgcgagctggatgcggcgcaggctcgcggcttgcgtaacatgatgatcatgctggtggccgcggcgctggtcatcgtcgcgacgatcctcgctcagttctggttccgccgctaccgtcgttcacgtcagcagctacaggaggcgatggcccgcaaagaaaaactgatggcccttgggcatctggcggctggcgtcgcgcatgagatccgcaacccgctctcttcgattaaaggactggcaaagtattttgccgagcgtacgccgccgggcggcgaggcgcaggagttagcgctggtgatggcgaaagaggccgaccgcctgaaccgggtcgtcagcgaactgctggagctggttcgccctgcccatttaaactaccagccggtcgatattaacgcgcttatccatcactcattgcagctggtaagccaggatgcgcagagtcgcgggatcgaactgcaatttactccgcgccctgaattaacctcgattaaagccgaccccgaccgtctgaaccaggtgctgttgaatctgtatctgaatgcgatgcaggctattggccgcgacggcgtcattcacgtatcggcaagcgaagccgatcggcaacgtgtgaaaattgtcgtcaaggatagcggtaaggggatgagcgatgaagagctgcaggccatcttcactccttatttcaccaccaaggcggacggcacagggctggggctggcggtagtacagaatattatcgaacaacatggcgggacaatccgcgctgaaagtcagccgggagccggagcgatatttacgctttggctaccagtagatgctcaacggagggaagatgagcagcgataa

SEQ ID NO: 91659 - DNA, 438 bp, Enterobacter aerogenes
atgaaacggaaaccgactttatccctcatcttcgcggcgcttgccgctctgacctttggcagtcacgcggcctgggccggacatcactggggctacaataacgggatgggcgcgcagggttacagccagctcacccaggaacagcaagcgaccgtgcagaagctacatgacaattactatgcgcaaaccagcgccctgcgccagcagttacagtccaaacgctacgagtacaatgcgctgcttactgcgccaaaaccagaaagcggaaaaattgaggccgtggcgaaggaaatggaaacattaagccagcagctggatcagcagcgggtaaaatttgatatcgcccttgcggaagcaggcgttcctcgcggcgcgggtatgggttacggcggctgccgcggtaatggcggtggtcatatgggcatgaaccactggtaa

SEQ ID NO: 91660 - DNA, 693 bp, Enterobacter aerogenes
gtgtccagttttaacgaaggggcttttaagccccttttgtctaactggcgtcgcacgctgacgctggcaggggcgctattgctcactgcctgcagccacgattcctcacttcctcctttcaccgccagcggctacgccgataaccagggcgccatgcgcatctggcgcaaagatgccggcgatgaagttcacctgcttgccgcttttagtccatggcaccgcggcgacacctcaaccagcgagtaccgctggcaggatggccaactaacgcttattgagctcaacgtatacggtaaaccgccggaacatattcgcgcccgctttgacgcccagggcgagctgagctttatgcagcgggaagtcgacgggcagaagcagcagctttccagcgaccaggttgcgctgtaccgctaccgcgcacagcaaatccgtgaaaccagcgatgcattgcgtcagggacgggtagttttacgccaggggcgctggcatgccgatcgtaccgtgactacctgtgaaggccagaccgtgaagcctgaccttgatgagcgggcattagcgcatattgaacgccgccagaatcactcttccgtagaagtgagcgtggcgtggctggaagcaccggaaggcgctcagctgctgctggtggctaacgaaaacttctgtacctggcagccgaacgaaaaatcgttctga

SEQ ID NO: 91661 - DNA, 273 bp, Enterobacter aerogenes
atgaacaagactcaactgattgatgtaattgcggacaaagctgacctgtctaaagcacaggcaaaagctgccctggaatccaccctggctgcaattaccgagtctctgaaagaaggtgatgctgttcaactggttggtttcggtaccttcaaagtgaaccaccgtgctgagcgtactggccgcaacccgcagaccggtaaagaaatcaaaatcgctgcagctaacgtgccagcatttgtttctggcaaagcgctgaaagacgcagtcaagtaa

SEQ ID NO: 91662 - DNA, 591 bp, Enterobacter aerogenes
atgttacaaaacccgattcacctgcgcctggagaaactggagagctggcagcacgtcacctttatggcctgcctgtgcgagcgtatgtaccccaactacgccatgttctgcaagcaaaccgagttcggcgacggccagttatatcgtcgtatccttgacctgatctgggaaacgctgacggtaaaagatgcgaaggtgaatttcgacagtcagctggaaaagctggaagaggcgattccgtccgcggatgactacgacatgtacggcgtctatccagctatcgatgcctgcgtcgcgctgagcgaattaatccactcacgcctgagcggtgaaacgctggaacatgctatcgaggtcagtaagacttccattactaccgtcgcgatgctggaaatgactcaggaaggtcgcgaaatgaccgatgaagagctcagagccaacccggcggttgaacaagaatgggacattcagtgggagattttccgcctgttggccgactgcgaagaacgcgatattgaactgattaaagggctgcgtgcagacctgcgagaggccggcgagagcaatattggtataaattttcagcaatga

SEQ ID NO: 91663 - DNA, 672 bp, Enterobacter aerogenes
atggatttagctgcgctacggacccaacagcaatctttagccgcgtcggtagaacgtgcggaccgattggatcgcgacccgccggtgctgatcggcggcgccgatgtggggtttgagcaggagggggaaattacccgggctgctatggtgctgctaacttatccggggcttgagctggtggaatatcaggtggcgcgcgtcgccaccacgatgccgtacatccccggcttcctctcctttcgcgagacccccgcgctgctggcggcgtggcaacagctatcgcaaaagcccgatctgttgttcgtcgacgggcacggtatttcacatccccggcggcttggcgtcgccagccattttggcctgatggttgatgtgccaacgattggcgtagcgaaaaaacgtttatgcggcaagtttgaaccgcttggcgccgagcccggcgcgctggcgccattaatcgacaaaggcgatcagctggcctgggtctggcgcagcaaagcacgctgcaacccgctgtttatcagtaccggccaccgcgtgggtatcgatagcgcgttaatgtgggtggaacgttgtatgcagggctatcgtctacccgagccgacgcgctgggccgatgccgtggcatcccgtcggccttcctttgtgcgttggcaagcaaatcacggctga

SEQ ID NO: 91664 - DNA, 1065 bp, Enterobacter aerogenes
atgaccgaactgaaaaacgatcgttacctgcgcgcgctgctgcgccagccggttgatgtcaccccggtgtggatgatgcgccaggcgggccgctatctcccggaatacaaagccacccgcgcgcaagcgggcgatttcatgtcgctgtgtaaaaatgccgagctggcctgcgaagtaacgctacagccgctgcgccgttacccgctggatgcggcgatcctcttttcggacatcctgacgattccggatgcgatggggctggggctgcactttgaagctggcgaaggcccgcgcttcacctcgccggtgaaatgcaaagccgacgtcgacaaactgccggtgccggacccggaacaagaattaggctacgtgatgaacgccgtgcgcaccattcgccgtgaactgaaaggcgaagtaccgctgattggtttttccggcagcccgtggacgctggcgacctatatggtcgaaggcggcagcagcaaagcctttaccgtcatcaaaaagatgatgtacgccgaaccgcaggcgctgcacgcgctgctggataagctggcgaaaagcgtcaccctgtatctgaacgcgcagatcaaagcgggcgcgcagtcggtgatgattttcgacacctggggcggcgtgttgaccggccgcgactatcagcagttctcgctctactacatgcataaaatcgtcgatggcctgctgcgggaaaacgaaggccgtcgcgtaccggtaacgctgttcaccaaaggcggcggacaatggctggaagcgatggcggagaccggctgcgatgcgctgggtctcgactggaccaccgatattgccgatgctcgccgtcgcgtaggccacaaagtggcgctgcagggcaatatggacccgtcgatgctttatgcccctgccgcccgcattgaagacgaagtggcgaacattctcgccggcttcggccagggcgaaggccatgtctttaaccttggccacggcatccatcaggacgtcgacccacagcatgcaggagtctttgttgaggcggtgcatcgtctctccgcgcaatatcaccaatag

SEQ ID NO: 91665 - DNA, 774 bp, Enterobacter aerogenes
atggatcgtattattgaaaaattagatcgcggctggtggatcgtcagtcacgaacaaaaattatggcttcccgcaggggaattaccacatggcgaagcggtaaattttgatcttgtcggtgaacgcgcgctacatctcggcgagtggcaaggcgaagcggtgtggctggtgcgtcaggatcgtcgccgtgatatgggatcgctgcgccaggtattggatcaggatcctgggcttttccagttagcagggcgcgggatccagttggccgagttttatcgatcgcataaattctgcggctactgcggccacccgatgcatgtcagtaaaaccgagtgggcgatgctgtgcggccactgccgcgagcgctattatccgcaaattgccccctgcattatcgtcgccattcgtcgcgacgattcaattctgctggcgcagcatacccgccatcgtaatggtgtccatacggtgttggccgggtttgtcgaagtgggtgaaacccttgagcaggcggtcgcccgcgaagtgatggaagagagcggcattaaggtgaaaaacctgcgctatgtgacctcccaaccgtggcccttcccgcaatcattgatgaccgcctttatggctgaatacgatagcggcgatattgtcgtggataagaaagagctgctgagcgcagagtggtatcgctatgacgatttgccgctactgccgccgccgggcacggtggcgcgacgcctgatcgaagatacggtggcgatgtgtcgggcagagtacgagtga

SEQ ID NO: 91666 - DNA, 498 bp, Enterobacter aerogenes
atgttaaaccagctggaaaacctgacggaacgtgttggaggcaataacaaactggtcgatcgctggctgcttgtgcgtaagcatttgctcgtggcttactacaacctggttggcctgaaacccggcaaagagtcctttatgcggcttaatgaaaaggcgctggatgacttttgccaaagcctggtggattacctctcatccggtcattttaatatttatgaacgtattatcggagaaatggaagggagtacccctcttttagccgctaccaaaatctacccgcagctggaagccaatacccagcagatgatggactactacgatacctgcctcgaaaacgccatcgatcatgataactatctcgaatttcagcaggcgctgtcagatatcggcgaatcgctggaggcgcgcttcgcgcttgaggacaagctgctggcgctggtcgtcgctcacgatcagaaagacaacgttggcgacaatatcgcgccgaccgcttga

SEQ ID NO: 91667 - DNA, 351 bp, Enterobacter aerogenes
ttgtcagacgacggatggagtaacagatgcgaccagcccgtaacgggcaggtgcgaccagcagtttactcttgttcccttcgcaggtattagcctgatcaggttccgcggatcccgaataaacggtctcagccttttccacttcagcgttcgcgtggaaaataggcactccgacaagatgaaatccctccgcagagggataatgtatgtaaattactcgttaacggttcacaactcaagcggtcggcgcgatattgtcgccaacgttgtctttctgatcgtgagcgacgaccagcgccagcagcttgtcctcaagcgcgaagcgcgcctccagcgattcgccgatatctga

SEQ ID NO: 91668 - DNA, 1896 bp, Enterobacter aerogenes
atgtctactaccaaactgacccgccgggaacaacgcgaacacgcgcagcgattcattgatacgctggaaggtaccgcttttcccaattcgcgccgcatttacattcaaggctcacaggctgatatccgcgtcccgatgcgtgaaatccagctcagcccgacgctcatcggcggtgataaagataacccccaatacgaagccaacgaaccgatatcggtgtacgacacctccgggccatacggcgacccggagatcaacatcgatgtccgccaggggctggcaaaactacgccaaccgtggatcgacgcgcgtaacgactgcgcgccgctcaacgaacgcagctcggcttacactaaagcgcggctggccgacgatggccttgatgaactgcgcttcggcggcctgctgacgcctaaacgcgccgtcgctggcaaatgcgtgacgcaactacactatgcccgccaggggatcgtcaccccggagatggaattcatcgccattcgcgaaaacatgggccgcgagcgtatccgcagcgaggtgctgcgccagcagcatcccggagaaagctttggcgcacgcctgccggacaacattaccgccgaattcgtccgcgatgaagtcgctgccgggcgagccatcatcccggccaatatcaatcacccggaatccgagccgatgattatcggccgcaacttcctggtgaaagtgaatgccaatatcggcaactcggcggtgacctcttccattgaagaagaggtcgagaagctggtctggtcaacccgctggggcgccgacacggtaatggacctctccaccggccgctatatccacgagacccgcgaatggatcctgcgcaacagcccggtgccgattggtaccgtcccgatttaccaggcgctggagaaggtcaacggcattgccgagaacctgacctgggaagccttccgcgataccctgctggaacaggccgaacagggcgtcgactacttcacgattcacgccggggtgctgctgcgttacgtgccgatgaccgcgaagcggctgaccgggatcgtctcgcgcggcggttccatcatggccaagtggtgcctgtcgcatcatcaggaaaacttcctctaccagcacttccgagaaatctgtgaaatctgcgccgcctatgacgtgtcgctgtccctcggcgatggtctgcgccccggctcgattcaggatgccaacgacgaggcgcagttcgccgagctgcatacgctgggcgagctgactaaaatcgcctgggagtatgacgttcaggtgatgattgaaggccccggccacgtgccgatgcagatgattcgccgcaatatgaccgaagagctggagcactgccacgaagcgccgttctacacgctggggccgctcaccaccgacatcgcgccgggctatgatcatttcacttccggtatcggcgcggcaatgattggctggtttggctgcgccatgctgtgctacgtcacgccaaaagaacatctcggcttgcccaacaaagaggatgtaaaacaggggctgattacctacaaaatcgccgcccacgccgccgacctcgctaaaggccacccgggggcgcagatccgcgacaacgcgatgtcaaaagcgcgtttcgaattccgctgggaagaccagttcaacctcgcgctcgatccctttaccgcgcgggcctatcacgatgaaaccctgccgcaggagtccggcaaagtcgcccacttctgctccatgtgcgggccgaaattctgttcgatgaagatcacgcaggaggtccgtgactacgccgcaaagcaaaatatcgaagccggcatggccgatatgtcgaataacttccgcgcccgcggcggtgaaatctacctgaaaaaggaaaatgcctga

SEQ ID NO: 91669 - DNA, 636 bp, Enterobacter aerogenes
atgtaccagcctgactttccgcccgtaccgtttcgtctcgggctttatccggttgtcgatagcgtggcgtggattgagcgcctgctggaagccggcgtacgcactattcaattgcggatcaaggaccagcgcgacagcgaggtagaggatgatgttatcgccgccatcgcgcttggccgccgctatcgcgcgcgtctgtttatcaatgattactggcaactggcgattaagcaccgggcgtatggcgtacatctgggtcaagaggacctggaaaccaccgacctgagcgccatccgtaaagccggactgcgccttggcgtctccactcacgacgacatggaaattgacgtcgcgctggcggcgcgcccttcctacatcgcactgggacacgtcttcccgacgcaaaccaaacagatgccttcggcgccgcagggcctcgaacagcttgccgggcatattcagcggctggccgattatccgacggttgcgataggcggcatcagtctggaaaaagcaccgggcgtactggccaccggcgttggcagcatcgcggtcgtcagcgccattacccaggctgctgactggcgggctgccactgcacaactgttaacgctggcgggagcaggcgatgaatga

SEQ ID NO: 91670 - DNA, 756 bp, Enterobacter aerogenes
atgaatgatcacgatttcatgcgctatagccgccagctgctgctggaagatatcgccatcgaggggcagcagaaactgttagccagccgggcgctgattattggcctgggcggcttaggttcgccggcggcgctatatctggcgggggccggcgtcgggacgctgacgctggccgatgacgacgcggtgcatctcagcaacctgcagcggcaaattctgttcaccagcgacgatatcgaccagccaaaagccgcggcggcaaagacgcggctcaaccaactcaatccgcaaatccgcctcgtggcgctacagcagcgtttaagcggcgaggcgctgcgcgctgaagtggcgaaagccgacgtggtgctggactgtaccgataacatgatcgcccgccaggcgattaacgccgcctgcgtcgcccttgagacgccgctggtgaccgccagcgccgtcggcttcggcggccagttgatggtgctgacgccgccctgggcgcaaggctgctatcgctgcctgtggccggacaccgccgaaccgcaacgtaactgccgcaccgcggggatcgtcggtccggtcgtcggcatgatggggacgctgcaggcgctggaggccataaagctccttagcggcatggcgacgccgcgcaacacgctacggctgtttgacgcccgcaccagcaactggcgcaacctcgcgctgcaaaaggcccagggctgcccggtatgcggaggccatgatgcaagtctggtttaa

SEQ ID NO: 91671 - DNA, 201 bp, Enterobacter aerogenes
atgcaagtctggtttaacgacgaaccgctggagtgcgcggacaacctcagcgtaagcgccctgctcagccaactggagcagctccagcccggcgttgcgctggcgctcaatcaacacatcctgccacgcgaacggtgggaagatcatctcttgcaggaaggcgatcgggtcctgctttttcaggttatcgccggaggctga

SEQ ID NO: 91672 - DNA, 771 bp, Enterobacter aerogenes
atgttacgtattgctgataagacttttgaatcccacctttttaccggaaccggcaaatttgccgccccggaggtgatggtcgaggcgattcgcgcctcgggaagccagctggtgacgctggcgatgaagcgcgtcgatttacgccagaacaatgacgcgattctcgcgccgctgttggcggcgggcgttaacctgctgccgaatacctcgggcgccaagacggcggaagaagcggtatttgccgcccgcctggcgcgggaagccttaggcacccactggttgaaactggagatccacccggacgctcgctggctgctgcctgaccccattgaaaccctgaaggcggcggagctactggtgcgcgaagggtttgtcgtcctgccctattgcggcgccgacccggtcctgtgcaaacggctggaagaggctggctgcgcggcggtaatgccgctgggcgcgccgataggctccaaccaggggctggaaaccaaagccatgctggagattattatcgaacaggcgacggtaccggtggtggttgatgccgggatcggcgtgccgagccacgcggcgcaggcgctggagatgggcgctgatgcggtgctggtcaacaccgccattgccgtcgccgacgatcctgtcgccatggctcgcgccttccgcatggcggtcgatgccggattgctggcgcgtcaggccggaccgggaacgcgcagtactcaggcgcaggccaccagcccgctgaccggctttctggaggcgctggcatga

SEQ ID NO: 91673 - DNA, 1134 bp, Enterobacter aerogenes
atgaaaacttttagcgatcgctggcggcagctggagtgggatgacatccgcctgcgcatcaacagcaaaaccgccgccgacgtcgaacgagcgctggcggcaaagcagctcacccgcgatgacatgatggctctgctctctcctgccgcggccgattaccttgaaccgctggcccagcgcgctcagcgcctcacccggcagcgcttcggcaacaccgtcagcttttacgtaccgttgtatttgtccaacctgtgcgccaacgactgtacctactgcggcttctcaatgagtaatcgcattaagcgcaagacgctggatgaagcagagattgcccgcgaatgcgccgcaatccgcaatttaggctttgagcatttgttactggtcaccggcgaacatcagagtaaggtcggaatggattatttccgccagcatctgccatccatccgccgccagtttgcctcgctgcatatggaagtgcagccgctggcgaccgaagagtatgccgaactaaaaacgctggggcttgatggggtgatggtctaccaggagacctaccatgaaggcatgtatgcccagcaccacttgaaaggtaaaaagcaggatttcttctggcgccttgatacgccggatcgcctgggcgaagcggggatcgacaagatcggcctcggcgcgctcattggtctttccgacagctggcgggtggactgctttatggtcgccgaacatctgctgtggctacagcagcactactggcgcagccgttactctatctccttcccgcgtttacgcccttgtgccggagggattgcgccagcctcgctgatggacgaacgtcagctggtgcaaaccatttgcgccttccgcctgctggcgccggaggttgagctgtcgctctcgacccgtgaatcaccgtggttccgcgaccgggtgatccctctggcgattaacaacgtcagcgcgttctccaaaacccagcccggcggctacgccgatgatcatccggagcttgagcaatttgcgccacacgacgatcgccgccctgaagaggtcgccagcgcgctggccgcccgtggcctgcagccggtatggaaagactgggatagctggctgggacgcgcctcgcaatcatcatga

SEQ ID NO: 91674 - DNA, 1533 bp, Enterobacter aerogenes
atggcacgccacaacagaaagctctcttttactacgccgatcgtagtggggtttgcggggattttgctcagttttttactgatcgcaatctttgttaccgcgacgcagaagaaaaactttcttgaagattatcaccatattaaccgcaactttacccataaccttgcggtgaactacaccgaatcgctgctgcgcgaaaatgactacattctggcgcgcgcgacgaaatactttgcccgcgacgatgcgctcaatagcgccgtaaatctcaatccgcaaaagggtctggacgatttgatgcgtctgcaggagctgatgccgacggtctcctccatttcgcttgccgatactcttggtcattatctgcgcgcccccgaagtgatggaaggcgatgagagccgcacgtttgatccaaaaacgcgcccctggtttattcgccaggcggaagccagtaccttcagcctctataccagtccctatctggattacttcacccaccaccctaccgttaccgtctaccggcctgtcatttcaccgcagggaaggctcaaaggtagtctggcatttcatatggatctgacctcaatgggctacgcgttacggcagattgtctcgccggtacagggcgagttttttgtcgtgcaacgcgacggcaaagtggttatccatcccgataccggcgcgctatttaaaacctacgttagcgcggaactgatggacaaaatgaccagcgcggaaggccaactttatgatgaggaacataaggcctggtactactactattcctttaccaaccctgactggttcgttattttccgcgtcaccgatgccacccttgatgacctgacgcgctatgaaaccgatattgtcgcctggggattcgccctcgccgccattgtcatcgtcctgttcgggctatatctgcgccacgcttcgcgtaccgtactgatgaacatcattaacgccattaagaccggcgacgtcaaacgcgcgccgcggctggaagccatgctcagcaaagcgatcgagagcaataaacagcgtgagctcacctatgtccgccaggccaccatcgatgcgctaaccggctgcaaaaatcgccgcgccttcgacagcgatatcgccgccctgatgaacgatcaccagcctttcgccctcgcgttggtcgatatcgacaactttaaatcaattaatgatacctggggccacctcaatggcgacatcgtgctgcgcaacgtcgcgcgtgaagggatacagatcctgcagccgcaggagatctcgctttaccgctacggcggcgaagagtttgccgttatcttccctgccgaacatatcgacaacgcgctcaccattctggagagctggcgccttaacgttgccagccgaacctggcgcgaagaaggattaaccgtcacctttagcgccggcctcggggaatggaatatggagccgctggaaaaactggtcgttagcgtggatgaagcgttgtataaggccaaacagcagggcaagaatcgaatcgttcgcgcctga

SEQ ID NO: 91675 - DNA, 261 bp, Enterobacter aerogenes
atgctggtgcaacgcatgaaagaggccgcgcaaaagaaaggcatcgaagtctcgatcaaagctgtgccggtagcggagttcaaggataacctggccgcggcggatattatcctgctcggcccacaggtgaagtacgagcaggcgaaactacaggcgctagccgacccggtcggtaaaaaggtcgccgttattgacatgatggattacggcatgatgaaaggcgatgccgttctggataaagccctgaagctgatggagtaa

SEQ ID NO: 91676 - DNA, 318 bp, Enterobacter aerogenes
atggaagatttagagacgattatcatggagctgctggtcaacgccggctccgcacgcagttctgccctcaccgccctgcagcaggcgcgtaaaggcgatttcgccgccgccgaacaggctatggccgactcccacgaattcgtgaagcatgcgcataaaatccagacccagcttattggcctggacgaaggcagcggcaagctgccggtgaacctgattaccgtgcattcccaggatcatctaatgaacgcgatggtgattcaggatttagcaaccgatatgatcgaactgtatcgccgcctgccgcccgcacaataa

SEQ ID NO: 91677 - DNA, 1341 bp, Enterobacter aerogenes
atggaatttgctatacagctcatcattatcttaatttgtctgttctacggcgcgaaaaagggtggcattgcgctcggccttttaggcggcattggcttagttatcttagtttttgtctttcatcttaaaccaggaaaaccgccggttgatgtcatgctggtgattatcgcggtggtggccgcctcggcgacgctacaggcatccggcggtttagacgtgatgctgcagattgccgagaagctcctgcggcgcaaccccaaatacgtttctatcgttgcgccattcgtcacctgtacgctgacgatcctgtgcggtaccggccacgtggtgtatacgatcctgccaattatttacgacgtagctatcaaaaataatattcgcccggagcggccgatggcggcgagctcgattggcgctcagatggggatcattgccagtccggtttcggtggcggtggtctcgctggtggcgatgctcgggaattttacctttaacggtaagcaccttgagtttctcgatctactggcgataaccattccgtcaacgctactggggattttggcgattggcatcttcagctggttccgcggtaaggaccttgataaagacgagaccttccaggcgtttattgcagtaccggaaaaccgtcattatgtttatggcgatacggccacgctattggataaaaagctgccgaccagcaactggatcgcgatgtggatcttccttgcctcaatcgccgtagtggcgctgcttggcgcgttttccgaactgcgcccggcgttcgatggtaagcctctctcaatggtactggtgatccagatgttcatgctgctctccggggcgcttatcatcatcattaccaaaactaacccggcgtcgatttcaaaaaatgaggttttccgctcggggatgatcgctatcgtcgcggtgtacggtattgcatggatggcggaaaccatgtttggcgcgcacatgaccgagattaaaggcgtgctcggagagatggtgaaggagtacccgtgggcctacgctatcgtgctgttattggtatcgaagttcgtcaactctcaggcggcggcgctggcggcgattgtcccggtagcgctggcgatcggcgttgacccggcctatatcgtggcttccgcgcccgcctgctacggctattacatcctgccgacttacccaagcgatctggcggcgattcagtttgaccgttcaggcacgacccatattggccgcttcgtcataaaccatagctttatcctgccgggattaattggcgtgagcgtttcttgcgtctttggctgggtgttcgcggcgatgtacggttttctgtaa

SEQ ID NO: 91678 - DNA, 4224 bp, Enterobacter aerogenes
gtgaaagacttattaaagtttctgaaagcgcaaactaaaaccgaagagtttgatgcgatcaaaattgctctggcatcgccagacatgatccgttcatggtctttcggtgaagttaaaaagccggaaaccattaactaccgtacgttcaagccagaacgtgacggtctgttctgcgctcgtattttcgggccagtaaaagactatgagtgcctgtgcggtaagtacaagcgcctgaaacaccgtggtgttatctgtgagaagtgcggcgttgaagtgacccagaccaaagtgcgtcgtgagcgcatgggccacatcgagctggcgtctccgactgcccacatctggttcctgaagtctctgccgtcccgtatcggcctgctgctggatatgccgctgcgtgatatcgaacgcgtactgtactttgaatcttatgttgttatcgaaggtggcatgaccaacctcgaacgcaaccagattctgactgaagagcagtacctggacgcgctggaagagttcggtgacgaattcgacgcgaagatgggcgccgaagctattcaggccctgctgaaaagcatggacctggagcaagagtgcgagcagctgcgtgaagagctgaacgaaaccaactccgaaaccaagcgtaaaaagctgaccaagcgcattaagctgctggaagccttcgttcaatctggcaacaagccggagtggatgatcctgaccgttctgccggttctgccgccagatctgcgtccgctggttccgctggatggtggtcgttttgcgacttctgacctgaacgatctgtatcgtcgcgtcattaaccgtaacaaccgtctgaaacgtctgctggatctggctgcgccggacatcatcgtacgcaacgaaaaacgtatgctgcaggaagcggtcgacgccctgctggataacggtcgtcgcggtcgtgcgatcaccggttccaacaaacgtcctctgaaatctttggccgatatgatcaaaggtaaacagggtcgtttccgtcagaacctgctcggtaagcgtgttgactactccggtcgttctgtaatcaccgtaggtccatacctgcgtctgcatcagtgcggtctgccgaagaaaatggcgctggagctgttcaaaccgttcatctacggcaagctggaactgcgtggcctggccaccaccatcaaagccgctaagaaaatggttgagcgcgaagaagctgtcgtttgggatatcctggacgaagttatccgcgaacacccggtactgctaaaccgtgcgccaacactgcaccgtttgggtatccaggcgtttgaaccggttctgatcgaaggtaaagccattcagctgcacccgctggtttgtgcggcatataacgccgacttcgatggtgaccagatggctgttcacgtaccgctgacgctggaagcccagctggaagcgcgtgcgctgatgatgtctaccaacaacatcctgtccccggcgaacggcgaaccaatcatcgttccgtctcaggacgttgtactgggtctgtactacatgacccgtgactgtgttaacgccaaaggcgaaggcatggtgctgactggcccgaaagaagcggagcgtatttatcgcgccggtctggcctctctgcatgcgcgcgttaaagtgcgtatcaccgaatacgaaaaagacgacaatggtgaattcgtcgcgaagaccagcctgaaagacacgaccatcggccgtgccattctgtggatgatcgtaccgaaaggtctgccgttctctatcgtgaaccaggcgctcggtaagaaagcgatctccaagatgctgaacacctgttaccgtattctgggtctgaaaccgaccgttatttttgcggaccagacgatgtacaccggctttgcttatgcagcgcgttcaggtgcatccgttggtatcgatgacatggtcatcccggagaaaaaatacgaaatcatcagcgaagcggaagcggaagttgctgagattcaggaacagttccagtctggtctggtcaccgcgggcgaacgctacaacaaagttatcgatatctgggctgcggcgaacgatcgtgtatccaaagcgatgatggataacctgcaaaccgaaaccgtgattaaccgtgacggtcaggaagagcagcaggtttccttcaacagcatctacatgatggccgactccggtgcgcgtggttctgcggcacagattcgtcagctggctggtatgcgtggtctgatggcgaagccggatggctccatcatcgaaacgccgatcaccgcgaacttccgtgaaggtctgaacgtactccagtacttcatctccacccacggtgctcgtaaaggtctggcggataccgcactgaagactgcgaactccggttacctgactcgtcgtctggttgacgttgcgcaggacctggttgtcactgaagacgactgtggcaccctggaaggcatcactatgacgccggttatcgaaggtggcgacgttaaagagccgctgcgcgatcgcgtattgggtcgtgtgactgctgaagacgttctgaagccgggtaccgcggacatcctggttccacgcaacacgctgctgcacgagcactggtgtgacctgctggaagagaactccgttgactccgtcaaagttcgttccgttgtatcctgtgacaccgactttggtgtatgtgcgcactgctacggtcgtgacctggcgcgtggccacctcatcaacaaaggtgaggctatcggcgttatcgcggcacagtccatcggtgagccgggtacacagctgacgatgcgtacgttccacatcggtggtgcggcatctcgtgcggctgctgaatccagcatccaggtgaaaaacaaaggtagcatccgtctgagcaatgcgaagtcggttgtgaactccagcggtaaactggttatcacctcgcgtaacaccgaactgaagctgatcgacgaattcggtcgtaccaaagaaagctataaagtgccttacggctccgttatggctaaaggcgacggcgaacaggttgctggcggtgaaaccgttgcaaactgggatccgcataccatgccggttatcaccgaagtgagtggtttcgtccgcttcactgacatgatcgacggccagaccattactcgtcagaccgacgagctgaccggtctgtcttcgctggtggttctggattccgcggaacgtacctccggtggtaaagatctgcgtccggcgctgaaaattgttgatgctcagggcaacgacgttctgatcccaggcaccgatatgcctgctcagtacttcctgccgggtaaagcgattgttcagctggaagatggcgtacagatcagctctggtgacaccctggcgcgtgttccgcaggaatctggcggtaccaaggatatcaccggtggtctgccgcgcgttgcggacctgttcgaagcacgtcgtccgaaagagccggcaatcctggctgaaatcagcggcatcatttccttcggtaaagaaaccaaagggaaacgtcgtctggttatcaccccggtagacggtagcgaaccgtacgaagagatgattccgaaatggcgtcagctgaacgtgttcgaaggtgaacgtgtagaacgtggtgacgtggtttccgacggtccggaagcgccgcacgacattctgcgtcttcgtggcgtacacgcggtaacgcgttacatcaccaacgaagtgcaggacgtttatcgtctgcaaggcgttaagattaacgataagcacattgaggttatcgttcgtcagatgctgcgtaaagcgaccatcgaaagtgctggtagctccgacttcctcgaaggtgagcaggttgaatactcccgcgttaagatcgctaaccgcgagcttgaagcgaatggcaaagttgcggcaacctattcccgcgacctgctgggtatcaccaaagcgtctctggcaaccgagtccttcatctccgcggcatcgttccaggagaccactcgcgtgctgaccgaagcagccgttgcgggcaaacgcgacgaactgcgcggtctgaaagagaacgtcatcgtgggtcgtctgatcccggcaggtaccggttatgcgtaccaccaggatcgtatgcgccgtcgcgcagcgggcgaacagccagctgcgccgcaggtgagcgtagaagaagcctctgccaacctggcagaactgctgaacgcaggcctgggcggttctgataacgattaa

SEQ ID NO: 91679 - DNA, 4029 bp, Enterobacter aerogenes
atggtttactcctataccgagaaaaaacgtattcgtaaggattttggtaaacgtccacaagttctggatgtgccttatctcctttctatccagcttgactcgttccagaagtttatcgagcaagatcctgaagggcagtatggtctggaagcagccttccgttccgtattcccgattcagagctacagcggtaattcagagctgcagtacgtcagctaccgtctgggcgaacctgtttttgatgttaaagaatgtcagatccgtggcgtgacgtattccgcaccgctgcgcgtaaaactgcgtctggtgatctacgagcgcgaagcgccggaaggcaccgttaaagacattaaagaacaagaagtctacatgggcgaaatcccgctcatgaccgacaacggtaccttcgttatcaacggtaccgagcgtgttatcgtttctcagctgcaccgtagcccgggcgtcttctttgacagtgacaaaggtaagactcactcttccggtaaggtcctgtataacgcacgtatcatcccttaccgtggttcctggctggacttcgaattcgacccgaaagacaacctgttcgttcgtatcgaccgtcgtcgtaaactgcctgcaaccatcattctgcgcgcgctgaattacaccactgagcagatccttgacctgttcttcgagaaagtggtctttgaaattcgcgacaacaagctgcagatggagctggtaccggagcgtctgcgcggtgaaaccgcctccttcgatatcgaagccaacggtaaagtgtacgttgagaaaggccgtcgtattaccgcgcgccatattcgccagctggaaaaagacgatatcaaacatatcgaagttccggttgagtacatcgcgggtaaagttgcttctaaagactacatcgacgaagcgaccggcgaactgatctgcccggcgaacatggagctgagcctggatctgctggctaaactgagccagtccggccacaagcgtatcgaaacgctgttcaccaacgatctggaccacggtccgtacatttctgaaactgtacgcgtcgacccgaccaacgatcgtctgagcgcgctggtagaaatctaccgcatgatgcgcccgggtgagccgccgactcgtgaagcggctgaaagcctgtttgagaacctgttcttctccgaagaccgctacgatctgtccgcggttggtcgtatgaagttcaaccgttctctgctgcgcgacgaaatcgaaggttccggtatcctgagcaaagacgacatcatcgaagtgatgaagaagctcatcgatatccgtaacggtaaaggcgaagtcgatgatatcgaccacctcggcaaccgtcgtatccgttccgttggcgaaatggcggaaaaccagttccgcgttggcctggtgcgtgtagagcgtgcggttaaagagcgtctgtctctgggcgatctggataccctgatgcctcaggatatgatcaacgccaagccgatttccgcggcagtgaaagagttctttggttccagccagctgtcccagtttatggaccagaacaacccgctgtctgagattacgcacaaacgtcgtatctccgcactcggcccaggcggtctgacccgtgaacgcgcaggcttcgaagttcgagacgtacacccgactcactacggtcgcgtatgtccaatcgaaacgcctgaaggtccgaacatcggtctgatcaactccctgtccgtgtacgcacagactaacgaatacggtttccttgagaccccgtaccgtaaagtgaccgacggtgttgttaccgacgaaattcattacctgtctgctatcgaagaaggtaactacgtcattgctcaggcgaactccaacctggatgacgaaggccactttgttgaagatctggttacctgccgtagtaaaggcgaatccagcttgttcagccgcgaccaggttgactacatggacgtatccacccagcaggtggtatccgtcggtgcgtccctgatcccgttcctggaacacgatgacgccaaccgtgcattgatgggtgcgaacatgcaacgtcaggcggttccgactctgcgcgctgataagccgctggttggtaccggtatggaacgtgctgttgccgtcgactccggtgttactgcggtagctaaacgtggcggtaccgttcagtacgtggatgcttcccgtatcgttatcaaagttaacgaagacgagatgtacccgggcgaagcaggtatcgacatctataacctgaccaagtacacccgttctaaccagaacacctgcatcaaccagatgccttgcgtgtccctgggcgaaccaattgaacgcggcgacgtcctggccgacggcccgtccaccgacctcggtgaactggcgctgggtcagaacatgcgcgtagcgttcatgccgtggaacggctacaacttcgaagactccatcctcgtatccgagcgtgttgtccaggaagaccgtttcaccaccatccacattcaggaactggcgtgcgtgtcccgtgacaccaagctggggccggaagagatcaccgctgacatcccgaacgtgggtgaagctgcgctctccaaactggatgaatccggtatcgtttatatcggtgcggaagtgaccggcggcgacattctggttggtaaggtaacgccgaaaggtgaaacccagctgactccggaagagaaactgctgcgcgcgatcttcggtgagaaagcgtctgacgttaaagactcttctctgcgcgtaccgaacggtgtctctggtaccgttatcgacgttcaggtctttacccgtgacggcgtagagaaagacaagcgtgcgcttgaaatcgaagagatgcagctgaagcaggctaaaaaagacctgtctgaagaactgcagatcctcgaagctggtctgttcagccgtatttacgctgtgctggttgccggtggcgttgaagctgacaagctcgacaaactgcctcgcgatcgctggctggaactgggcctgaccgacgaagagaaacaaaatcagctggagcaactggctgagcagtatgacgaactgaaacacgagttcgagaaaaaactcgaagcgaaacgccgtaaaatcacccaaggcgacgatctggcaccgggcgtgctgaagattgttaaggtatacctggccgttaaacgccgtatccagcctggtgataagatggcaggtcgtcacggtaacaagggtgttatctctaagatcaacccgatcgaagatatgccgcacgatgctaacggtacgccggtagatatcgtactgaacccgctgggcgtaccgtctcgtatgaacatcggtcagatcctggaaactcacctgggtatggctgcgaaaggcatcggcgataagatcaacgccatgctgaaacagcagcaagaagtcgcgaaactgcgcgaattcatccagcgtgcttacgatctgggcgctgacgttcgccagaaagttgacctgaataccttcagcgatgaagaagttctgcgtctggctgaaaacctgcgtaaaggcatgccgatcgcaacgccggtattcgacggtgcgaaagaagctgaaatcaaagagctgctgcagctgggcgatctgccgacttccggtcagatcactctgtttgacggccgcaccggtgaacagttcgaacgtccggtaaccgtaggttacatgtacatgctgaaactgaaccacctggtcgacgacaaaatgcacgctcgttccaccggttcttacagcctggttactcagcagccgctgggtggtaaggcgcagttcggtggtcagcgcttcggtgagatggaagtgtgggcgctggaagcatacggcgcggcctacaccctgcaggaaatgctcaccgttaagtctgatgacgtgaacggtcgtaccaagatgtataaaaacatcgtggacggcaaccaccagatggaaccgggcatgccggaatccttcaacgtactgttgaaagaaatccgctcgctgggcatcaacatcgaactggaagacgagtaa

SEQ ID NO: 91680 - DNA, 366 bp, Enterobacter aerogenes
atgtctatcactaaagatcaaatcattgaagcagtatccgctatgtccgtaatggacgttgttgagctgatctctgcaatggaagaaaaattcggtgtttccgctgctgctgctgtagctgtagctgctggcccggctgaagctgctgaagaaaaaactgaattcgacgtaattctgaaagctgctggcgctaacaaagttgctgttatcaaagcagtacgtggcgcgactggcctgggtctgaaagaagctaaagacctggtagaatctgcaccggctgcactgaaagaaggcatcagcaaagacgacgctgaagctctgaaaaaatctctggaagaagctggcgctgaagttgaagttaaataa

SEQ ID NO: 91681 - DNA, 498 bp, Enterobacter aerogenes
atggctttaaatcttcaagacaaacaagcgattgttgctgaagtcagcgaagtagccaaaggcgcgctgtctgcagtagttgcggattcccgtggcgtaactgtagataaaatgactgaactgcgtaaagcaggtcgtgaagctggcgtttacatgcgtgttgttcgtaacaccctgctgcgccgcgtcgttgaaggtactccgttcgagtgcctgaaagacacgtttgttggtccgaccctgattgcatactctatggaacacccgggcgctgctgctcgtctgttcaaagagttcgcgaaagcgaatgcaaaatttgaggtcaaagccgctgcctttgaaggtgagctgatcccggcgtcgcaaatcgaccgcctggcaactctgccgacctacgaagaagcaattgcacgcctgatggcaaccatgaaagaagcttcggctggcaaactggttcgtactctggctgctgtacgcgatgcgaaagaagctgcttaa

SEQ ID NO: 91682 - DNA, 705 bp, Enterobacter aerogenes
atggctaaactgaccaagcgcatgtccgtgattcgtgagaaagttgatgcaactaaacagtatgacatcaacgaagccatctctctgctgaaagaactggcgaccgctaagttcgttgaaagcgttgacgttgctgtaaacctgggcatcgatgctcgtaaatctgaccagaacgtacgtggtgcaactgtactgccgcacggtactggccgttctgttcgcgttgccgtatttgcacagggcccgaacgctgaagctgctaaagctgcaggcgccgagctggtaggtatggaagatctggctgaccagatcaagaaaggcgaaatgaactttgacgttgttattgcttccccggatgcaatgcgcgttgttggccagctgggccaggttctgggcccgcgcggcctgatgccaaacccgaaagttggtactgtaactcctaacgttgctgaagcggttaagaatgctaaagcaggccaggttcgttatcgtaacgacaaaaacggcatcatccacaccaccatcggtaaagtggactttgacgctgacaaactgaaagaaaacctggaagctctgctggttgcgctgaaaaaagcaaaaccgactcaggctaaaggcgtgtacatcaagaaagttagcatctccaccaccatgggtgcaggtgttgcagtagatcaggctggcctgaacgcttctgcaaactaa

SEQ ID NO: 91683 - DNA, 429 bp, Enterobacter aerogenes
atggctaagaaagtacaagcctacgtcaagctgcaggttgcagctggtatggcaaacccgagtccgccggttggtccagcactgggtcagcagggcgttaacatcatggaattctgcaaagcgttcaacgcaaaaactgaatccatggaaaaaggtctgccaatcccggttgttatcaccgtttacgctgaccgttctttcactttcgttaccaaaactccgccggcagcagttctgctgaaaaaagcggctggtatcaagtccggctctggtaagccgaacaaagataaagttggtaaaatttcccgcgctcagctgcaggaaatcgcgcagaccaaagctgccgacatgactggtgccgatattgaagcgatgactcgctccatcgaaggtactgcacgttccatgggcctggtagtggaggactaa

SEQ ID NO: 91684 - DNA, 546 bp, Enterobacter aerogenes
atgtctgaagctcctaaaaagcgctggtacgtcgttcaggcgttttccggttttgaaggtcgcgtagctacgtcgctgcgtgaacatatcaaattacacaacatggaagagttgtttggcgaagtcatggttccgaccgaagaagtggttgaaatccgtggcggccagcgtcgcaaaagcgaacgcaaattcttcccaggctacgttctggttcagatggtcatgaacgacgcgagctggcacctggtgcgcagcgtcccgcgcgtgatgggcttcatcggcggtacttccgaccgtccggcgccgatcagcgacaaagaagtcgatgccatcatgaaccgtctgcagcaggttggcgataagccgcgtccgaaaacgctgtttgagccgggcgaaatggttcgcgtcaacgatggtccgtttgctgactttaacggcgttgttgaagaagtggactacgagaagtcccgcctgaaagtttccgtttctatcttcggtcgtgcgactccggtagaactggacttcggccaggttgagaaggcgtaa

SEQ ID NO: 91685 - DNA, 384 bp, Enterobacter aerogenes
atgagtgcgaataccgaagctcaagggagcgggcgcggcctggaagcgttgaagtgggttatcgttgccgtgctgctgattgtagccatcgtaggcaacttcctttatcgcgacattatgctggcgatccgtgcgctggctgtggtgattcttatcgctgctgccggtggtgtcgctctgttaacgacaaaaggtaaggcgacagtcgctttcgcccgcgaagcgagaaccgaagtccgcaaagtgatctggccgacccgccaggaaacgctgcacaccacgctgattgttgctgccgtaactgcagtaatgtcactgatcctgtggggactggatggtattctggttcgcctggtatcctttatcactggcctgaggttctga

SEQ ID NO: 91686 - DNA, 957 bp, Enterobacter aerogenes; identical to SEQ ID NO: 74997

SEQ ID NO: 91687 - DNA, 888 bp, Enterobacter aerogenes; identical to SEQ ID NO: 74996

SEQ ID NO: 91688 - DNA, 483 bp, Enterobacter aerogenes; identical to SEQ ID NO: 74995

SEQ ID NO: 91689 - DNA, 222 bp, Enterobacter aerogenes; identical to SEQ ID NO: 74994

SEQ ID NO: 91690 - DNA, 1224 bp, Enterobacter aerogenes; identical to SEQ ID NO: 74993

SEQ ID NO: 91691 - DNA, 207 bp, Enterobacter aerogenes; identical to SEQ ID NO: 74992

SEQ ID NO: 91692 - DNA, 1650 bp, Enterobacter aerogenes; identical to SEQ ID NO: 74991

SEQ ID NO: 91693 - DNA, 1131 bp, Enterobacter aerogenes; identical to SEQ ID NO: 74990

SEQ ID NO: 91694 - DNA, 1383 bp, Enterobacter aerogenes; identical to SEQ ID NO: 74989

SEQ ID NO: 91695 - DNA, 453 bp, Enterobacter aerogenes; identical to SEQ ID NO: 74988

SEQ ID NO: 91696 - DNA, 1200 bp, Enterobacter aerogenes; identical to SEQ ID NO: 74987

SEQ ID NO: 91697 - DNA, 423 bp, Enterobacter aerogenes; identical to SEQ ID NO: 74986

SEQ ID NO: 91698 - DNA, 936 bp, Enterobacter aerogenes; identical to SEQ ID NO: 74985

SEQ ID NO: 91699 - DNA, 561 bp, Enterobacter aerogenes; identical to SEQ ID NO: 74984

SEQ ID NO: 91700 - DNA, 867 bp, Enterobacter aerogenes; identical to SEQ ID NO: 74983

SEQ ID NO: 91701 - DNA, 810 bp, Enterobacter aerogenes; identical to SEQ ID NO: 74982

SEQ ID NO: 91702 - DNA, 828 bp, Enterobacter aerogenes; identical to SEQ ID NO: 74981

SEQ ID NO: 91703 - DNA, 861 bp, Enterobacter aerogenes; identical to SEQ ID NO: 74980

SEQ ID NO: 91704 - DNA, 822 bp, Enterobacter aerogenes; identical to SEQ ID NO: 74979

SEQ ID NO: 91705 - DNA, 915 bp, Enterobacter aerogenes; identical to SEQ ID NO: 74978

SEQ ID NO: 91706 - DNA, 1953 bp, Enterobacter aerogenes; identical to SEQ ID NO: 74977

SEQ ID NO: 91707 - DNA, 852 bp, Enterobacter aerogenes; identical to SEQ ID NO: 74976

SEQ ID NO: 91708 - DNA, 1347 bp, Enterobacter aerogenes; identical to SEQ ID NO: 74975

SEQ ID NO: 91709 - DNA, 1023 bp, Enterobacter aerogenes; identical to SEQ ID NO: 74974

SEQ ID NO: 91710 - DNA, 336 bp, Enterobacter aerogenes; identical to SEQ ID NO: 74973

SEQ ID NO: 91711 - DNA, 1185 bp, Enterobacter aerogenes; identical to SEQ ID NO: 74972

SEQ ID NO: 91712 - DNA, 255 bp, Enterobacter aerogenes; identical to SEQ ID NO: 74971

SEQ ID NO: 91713 - DNA, 1251 bp, Enterobacter aerogenes
atgaagaaacgcttattatctacttcaatctcaacgctgcttttgggcctttctgtgatgcctgctttcgcagatgaagacgtaaccgcatggcgtctgttcatcgccgatcatgataaacccgttgtgaatgttattgatgcactggatggagataagctcgcaacatttaatgttaaaggccctgcaaatttatctcgcagcgaaagtggtgccacaattttcgctatccagggtagtgctggcgtagtatctacaatcgcttcaggcattgctttccatgatcacggagatcatgcagacattgatattgacgctcccaaattattaccgctggaactaacgggtaaaaaacctggtcattttgttgaacgtcagggcaaaattgcccagtggtttgacggggaagatagcgcgcaaatcctgggtgaaagcgccgttcttaaaggtcagaagaatataacgaaagtaaatgttgttgcgccacatcacggcgttgctgttccttacgataattatgctgtcgtatccattcccaaccctgatgatgcgtcaaaacgacctgtcggcgctcgcgtggtggacctgcaaggtaaaaaagtgggtgatgatgccttatgccccggacttcacggctcagccggctcgggtgatacttttgccctatcatgtgagactggcctcctgctgattacgcaaaaaaatgcggcaccggttatcaggcaccttccctacgcgaaaacgttgccagagggaagcacatccaccttgatcggtggtaagggaatgcaatattttatcggtaattatgggccagaccggattattctggtcgatcctaccgaatcggatagcttccgtttgattcagttgcctacccgtcgagtccatttcgttgtagacccggtacgcgcgaaattcgcctatgtgtttacagaagacggaaagcttaatcaaatagatgtcctgaaaggggaaatttcgcagtcagtgcgtgtcactgatccctattcaatggatggccactggaatgatccacggccgagaatcgcagtagctgacaataaaatttacgtcaccgatccgttgaaaagtaaaattattgtgttagacgctacttcttttaaaaagaccagtgaaattagcgtcgaagggcagccatttaatattgttgcagtcggcggttcaggaaaagtacatggtgaacatcacgatcatgaagctcatcatcatgatgatcacgctcattaa

SEQ ID NO: 91714 - DNA, 951 bp, Enterobacter aerogenes; identical to SEQ ID NO: 74969

SEQ ID NO: 91715 - DNA, 738 bp, Enterobacter aerogenes; identical to SEQ ID NO: 74967

SEQ ID NO: 91716 - DNA, 1974 bp, Enterobacter aerogenes; identical to SEQ ID NO: 74966

SEQ ID NO: 91717 - DNA, 744 bp, Enterobacter aerogenes
atgcgccatgcggttcatcaggggttaatcgatacgaacccggcagcaaatcttggcggcgtgaccacacctcctgtcagacggcactatcctgccctgccactggagcggctgcctgaactgcttgaacgtattgaggcatatcatcagggccgtgaactgacgcggttggccgtcctgctgatgctgcatgtgttcattcgctccagtgaactgcgtttcgcccgctggtcagagattgatttcacaaaccgagtctggacgatacccgcgacgcgagaacccattattggcgtgcgttattccggccgcggggcaaaaatgcgaatgccgcatatcgtccccctctcagaacagtccatcgccattctgaaacagattaaggatatcaccggtaataatgaactgatcttccccggcgaccataacccgtataagccaatgtgtgaaaacacggtcaataaggcactgcgggtgatgggctacgacacgaaaaaggatatctgtggccacggctttcgggcgatggcatgcagtgcgctgatggaatcgggtttatgggcaaaggatgcagtagaacgccagatgagtcatcaggagcgcaataccgtgcgcatggcttatattcacaaggcagaacacttggaagcccgcaaggcgatgatgcagtggtggtcggactatctggatatatgcagaaaagcatatgtgtcgccttatatgatggttcaggagaaccgctga

SEQ ID NO: 91718 - DNA, 927 bp, Enterobacter aerogenes; identical to SEQ ID NO: 71822

SEQ ID NO: 91719 - DNA, 2022 bp, Enterobacter aerogenes
atgaaaatgacacggctttatcctctggccttggggggattattgctccccgccattgctaatgcccagacttcacagcaagacgaaagcacgctggtggttaccgccagtaaacaatcttcccgctcggcatcagccaacaacgtctcgtctactgttgtcagcgcgccggaattaagcgacgccggcgtcaccgccagcgacaaactccccagagtcttgcccgggctcaatattgaaaatagcggcaacatgcttttttcgacgatctcgctacgcggcgtctcttcagcgcaggacttctataaccccgccgtcaccctgtatgtcgatggcgtccctcagctttccaccaacaccatccaggcgcttaccgatgtgcaaagcgtggagttgctgcgaggcccacagggaacgttatatggcaaaagcgctcagggcgggatcatcaacatcgtcacccagcagccggacagcacgccgcgcggctatattgaaggcggcgtcagtagccgcgacagttatcgaagtaagttcaacctgagcggccccattcaggatggcctgctgtacggcagcgtcaccctgttacgccaggttgatgacggcgacatgattaaccccgcgacgggaagcgatgacttaggcggcacccgcgccagcatagggaatgtgaaactgcgtctggcgccggacgatcagccctgggaaatgggctttgccgcctcacgcgaatgtacccgcgccacccaggacgcctatgtgggatggaatgatattaagggccgtaagctgtcgatcagcgatggttcaccagacccgtacatgcggcgctgcactgacagccagaccctgagtgggaaatacaccaccgatgactgggttttcaacctgatcagcgcctggcagcagcagcattattcgcgcaccttcccttccggttcgttaatcgtcaatatgcctcagcgctggaatcaggatgtgcaggagctgcgcgccgcaaccctgggcgatgcgcgtaccgttgatatggtgtttgggctgtaccggcagaacacccgcgagaagttaaattcagcctacgacatgccgacaatgccttatttaagcagtaccggctataccaccgctgaaacgctggccgcatacagtgacctgacctggcatttaaccgatcgttttgatatcggcggcggcgtgcgcttctcgcatgataaatccagtacacaatatcacggcagcatgctcggcaacccgtttggcgaccagggtaagagcaatgacgatcaggtgctcgggcagctatccgcaggctatatgctgaccgatgactggagagtgtatacccgtgtagcccagggatataaaccttccgggtacaacatcgtgcctactgcgggtcttgatgccaaaccgttcgtcgccgagaaatccatcaactatgaacttggcacccgctacgaaaccgctgacgtcacgctgcaagccgcgacgttttatacccacaccaaagacatgcagctttactctggcccggtcgggatgcagacattaagcaatgcgggtaaagccgacgccaccggcgttgagcttgaagcgaagtggcggtttgcgccaggctggtcatgggatatcaatggcaacgtgatccgttccgaattcaccaatgacagtgagttgtatcacggtaaccgggtgccgttcgtaccacgttatggcgcgggaagcagcgtgaacggcgtgattgatacgcgctatggcgcactgatgccccgactggcggttaatctggtcgggccgcattatttcgatggcgacaaccagttgcggcaaggcacctatgccaccctggacagcagcctgggctggcaggcgactgaacggatgaacatttccgtctatgtcgataacctgttcgaccgtcgttaccgtacctatggctacatgaacggcagcagcgccgtcgcgcaggtcaatatgggtcgcaccgtcggtatcaatacgcgaattgatttcttctga

SEQ ID NO: 91720 - DNA, 1578 bp, Enterobacter aerogenes
atgaattcttcctttaaatctctgattgaacagtatcccttacccattgccgaacagttgcgccactgggcggcccgttatgcctcgcgaattgccgtcgttgatgcaaaggggtcgttaacctacagcgcgcttgatgcacaagttgacgaacttgccgcaggtctgtcatcactgggtttgcgttcgggggagcatgtaattgtgcagcttcccaacgacaacgcgtttgttaccctgctgttcgccttgttaagactgggcgttatccccgtgctggcgatgccctcgcaacgggcgctggatatcgacgcgctgattgagctggcgcaacccgtcgcttacgttattcacggggaaaaccacgcagagctggcccgacagatggcgcacaaacacgcctgcttgcgtcatgttctggtcgctggagagaccgtgagcgacgattttacgccgttcttctcccttcacggtgagcgacaggcatggccgcagcctgatgtttccgccaccgcgttgttgttgctctcaggcggcacaaccggcacgcccaaactcatcccgcgccgacatgccgactatagctataacttcagcgcttctgctgaactgtgcggcatcagccaacagagcgtgtatctcgccgtcctcccggtggcgcataactttccgctggcctgccccggtattctgggaacgcttgcctgcggcggaaaagtggtgctgaccgacagcgccagctgtgatgaggtgatgcctttaatcgcgcaggaaagagtgactcacgtcgccctggttccggcgctggcgcaattatgggtgcaggccagggagtgggaagacagcgacctttcgtcgctgcgcgtcattcaggcaggcggcgcccggctcgacccgacgcttgctgagcaggttatcgccacctttgactgtaccctgcaacaggttttcggtatggcggaaggcctgctctgttttacccggctggacgatccgcatgccaccattctccacagccaggggcgcccgttgtcccctctggatgaaatccgcatcgttgatcaagacgagaacgacgtcgcgccgggcgaaaccgggcaattgttaacgcgcggcccttataccatttcgggctattaccgcgcccctgcccacaacgcgcaggcctttaccgcgcaagggttttaccgcacaggcgacaatgtcaggctggatgaggtggggaacctgcacgttgagggacgcataaaagagcagatcaaccgcgccggagaaaaaatagccgcggctgaagtggaatcggcactgctgcgtttagcggaagtgcaagattgcgcggtggtcgccgcgccggacacgctgcttggcgagcggatttgcgcgtttatcatcgcgcagcaggtgccaactgactatcagcagttgcgtcaacaactgacccgtatggggctcagcgcgtggaaaattcctgaccaaatcgagtttctggaccactggccgctcaccgccgtcggcaagatagacaaaaaacgcctgacggctctcgccgtcgaccgttatcgccattctgcccaataa

SEQ ID NO: 91721 - DNA, 804 bp, Enterobacter aerogenes
gtgacgcaatctgcaatatgcatcccgctgtggcccgcccggaacggcaatactgcgcatctggtcatgtgccctttcgctggcggcagcagtagcgcgtttcgccactggcaagctgagcaactggctgattgcgcgctttctctggtgacctggccggggcgcgatcgccttcgccatctggaaccgctcagaagcattacacaactggcggcactgctggcgaacgagctggaagcatccgtatcgcctgacacgccgcttttactcgccgggcacagcatgggggcgcaggtggcgtttgaaacctgccgacttctggagcaacgggggcttgcgccacaaggactgattatttccgggtgccatgccccgcatctgcattctgaacgccagctcagccatcgcgatgatgccgactttatcgctgagctgatagacattggcggatgttctcctgaactgcgggaaaaccaggaattaatgtcgctgtttcttcctcttctgcgcgctgatttttacgccaccgagagctatcactacgactcgcccgacgtctgtccgccgctgcgcacgcctgcgctgttattgtgcggcagccacgatcgcgaagcctcctggcagcaggtcgatgcctggcgtcagtggctgagccacgttacaggcccggtggtgattgacggcgatcatttctatcccattcaacaagcccggtccttttttacgcagattgtccgccattttccccacgcattttctgcaatgaccgcgttgcaaaaacagcccagtacttcagaaaggtga

SEQ ID NO: 91722 - DNA, 1101 bp, Enterobacter aerogenes
atgatgccgtccgcctccccaaaacaacgcgtactgattgtgggcgccaaatttggcgaaatgtacctgaatgcctttatgcagcccccggaggggctggaactggtcggcctgctggcgcagggaagcgcccgttcaagagagctggctcatgcgtttggcattccgctgtatacctcgccggaacagataaccaagatgccggatatcgcctgtattgtcgtgcgttcgaccgtcgccggaggaaccggtacgcagcttgccagacactttctgacgcgcggcgtacacgtcattcaggagcatcccctccacccggatgacatcagttccttacaaacgctggcgcaggaacagggctgctgctattgggtaaacacgttttatccgcatacgcgcgcgggacgcacatggcttcgcgatgctcagcagctgcgtcgctgcctggctaagacgccgccggtagtccacgccaccaccagccgacagttgctctactccactctggatttgttgttgctggctctgggcgttgatgccgccgccgtggagtgcgacgtggttggcagctttagcgattttcactgtctgagactcttctggccggagggagaagcctgcctgctgcttcagcgctatctcgatcctgacgatccagatatgcatagccttatcatgcaccgcctgctgctgggctggccggaaggtcatctttcgctggaggcgagctacggccccgtcatctggtcatccagcctgtttgtcgcagaccatcaggagaacgcccacagcctctaccgcagaccggagatcctgcgcgatctgccgggtctgacgcgcagcgcggcgcccctgagctggcgcgactgctgcgaaaccgtcgggccggagggcgtcagctggttgctacaccagttgcgcagccatctggcgggcgaacatccaccagcggcctgccaaagcgtacatcagatcgcgttatcacgtttatggcagcagattttacgtaagaccggcaatgcggagatcagacgcctgacaccgccgcaccacgaccggttagccggtttctacaacgatgatgataaggaggcgctgtga

SEQ ID NO: 91723 - DNA, 9492 bp, Enterobacter aerogenes
atggataacttgcgcttctcttctgcgccgacagcagattccattgatgcatcgatcgctcaacactacccggactgcgaacctgtcgcggttatcggctacgcctgccattttcctgaatcgccggatggcgaaacgttctggcaaaatctgctggaaggtcgtgaatgcagccgacgctttacgcgcgaagagcttctggccgtcggtctggatgccgccatcattgacgatcctcattatgtcaatatcggtacggtgttagacaacgccgactgcttcgacgccaccctgtttggctattcgcgacaggaagcggagtcgatggacccgcagcagcgcctatttttgcaggcggtctggcatgcgctggaacatgccggttatgcccccggcgccgtcccccataagaccggcgttttcgcctcttcccggatgagtacctaccccggtcgcgaagcattgaacgtgacagaagtcgcgcaggtaaaaggtctgcaatctctgatgggcaatgataaagactatattgccacccgcgccgcgtacaaactcaacctgcacggcccggcgttatcggtacagaccgcctgctccagctcgctggttgccgtgcatctggcctgtgaaagcctgcgcgcaggcgaatccgatatggcggttgccggcggcgtggcgctctctttcccccagcaggcaggctaccgctaccagcccggaatgattttctctcctgatggtcactgtcgtccctttgacgcctcggctgagggcacctgggccggtaacggtctcggctgcgtggtgctgcgtcgcctgagagacgcgctgctgtcaggcgatccgattatctcggtgatcctctccagcgcggtcaacaacgacggcaacagaaaggtcggctataccgccccttccgtcgcagggcaacaggcagtcatcgaagaggcgttaatgctggcggccatcgacgacaggcaggtaggttacattgaaacccacggcaccggcacaccgctgggcgacgcgattgaaattgaagcgttacgcaacgtctatgcgcctcgcccgcaggatcagcgctgtgcgctcggttccgtgaaaagtaacatgggccatctggataccgcggcgggcattgccggactgctgaaaaccgttctggcagtcagtcgcgggcaaattcctcccttactgaattttcacacccccaacccggcgctgaaacttgaagagagcccctttaccataccggtgtcggcacaggcatggcaggacgaaatgcgctatgcgggcgtctcctcctttggtattggcggcaccaactgccatatgatcgtcgcctcgctgcccgacgcgctcaacgcgcgcctccccaatacggatagcggcagaaaaagtaccgcgctgctgctcagcgccgccagcgacagcgcgttgcggcggctggcgacggattatgccggggcgctgagagagaatgcggatgccagctctctggccttcacagccctgcacgcgcgccgtctcgatctccccttccgcctggcggcgccattaaaccgtgaaaccgccgaggcgctcagcgcctgggccggtgagaaatcgggggcgctggtttacagcggccacggcgccagcggcaagcaggtgtggctgtttaccggccagggctcgcactggcgcactatgggtcaaacgatgtaccagcactcaacggcgtttgccgacacgctggatcgctgtttttccgcctgtagcgaaatgctcacgccgtcactgcgcgaagcgatgtttaaccccgattcggcgcaactggacaatatggcctgggcgcagccggcgattgtcgcgtttgaaatcgcgatggcggcgcactggcgtgctgaaggactgaagccagacttcgccattgggcattccgtcggtgaatttgccgctgctgttgtctgcggacactatacgattgaacaggtcatgccactggtttgtcggcgcggcgcgctaatgcagcagtgcgcaagcggcgcgatggtggcggtatttgcagacgaagacacgctgatgccgctggctcgccagtttgagctggatctcgccgccaataacggtacgcaacatacggtattttccgggccggaagcccgtctcgcagtattttgcgccacgctctcgcagcatgacattaactatcgtcgcctgagcgtaaccggtgcggcgcactccgctttactggagccgatactcgatcggttccaggacgcctgcgcgggactgcacgcggagccggggcaaataccgattatttccacgctcaccgccgacgtcattgatgagtcaacgctcaaccaggcggattactggcgccgacacatgcgccagccggtgcgttttatccagagtattcaggtggcgcatcagctcggcgcccgcgtttttctggagatggggcccgatgcccagttggttgcttgcgggcagcgcgaataccgcgataacgcatactggatagccagcgcccggcgtaacaaagaggcgagcgatgtcctcaatcaggccctgctccagctttacgctgccggcgtcgccctaccgtgggccgacctgctggcgggcgatggacaacgtatcgctgcgccatgttatccgtttgatactgagcgttactggaaagagcgcgtctccccggcctgcgagcctgccgacgcagcgctgtctgccgggctggaggtggcgagtcgcgccgcgacagcgctcgatctccctcgcctggaagcgcttaaacagtgcgccacgcgactgcacgccatctacgtcgatcaactggtacaacgctgtaccggcgatgccattgagaacggcgtggacgccatgaccatcatgcgccgtggacgtctgctgccccgctaccagcagctactccagcgcctgctgaataactgcgtggtcgacggcgattaccgctgcaccgacgggcgatacgtccgcgcccgccccattgaacatcaacagcgggaatcactgctgacggaacttgccggttattgtgaaggttttcaggctattcccgacaccatcgcccgtgccggcgatcggttatatgaaatgatgagcggcgcggaagaaccggtggcgattatcttcccgcaaagcgcctccgacggcgtggaagtgctgtatcaggaattcagctttggccgctatttcaaccaaatcgccgccggggtattacgcggcattgtccagacgcgtcagccccgccagccgttgcgtattcttgaagttggcggcggaaccggcggcaccaccgcgtggctgctgccggaactcaacggcgttccggcactggagtaccatttcaccgatatctcggcgctgttcacccgtcgcgcccagcagaaattcgccgactatgattttgtgaagtatagcgagctggatctcgaaaaagaggcgcagtctcagggtttccaggcacagtcttacgatcttatcgtggcagcgaacgtgattcacgccacccgccatattggccgcacgctcgataatctgcgccccctgctcaagccgggcgggcgcctgctgatgcgcgaaatcacccagccaatgcgtctgtttgacttcgttttcggcccgctggttcttccgctacaggatctcgacgcccgcgaaggtgagttattcctcaccaccgctcagtggcaacaacagtgccgccacgccggattcagcaaagtggcgtggctaccgcaggatggcagcccgaccgccgggatgagcgaacatatcattctcgccacgctgcccggtcaggcggttagcgccgtaacattcaccgcgccatcagaacccgtgttggggcaggcgctgacggataacggtgattatctcgccgactggtctgattgcgcaggtcagcccgaacggtttaacgcccgctggcaggaggcctggcgtctgctttcacagcgtcatggcgacgctctgcctgtggaaccgccccccgtcgccgccccggagtggctggggaaggttcgcttaagctggcaaaacgaagccttttcccgcggtcagatgcgcgttgaagcccgtcatcctgctggcgagtggctgccgctatcgcccgccgcgcctcttcctgcgccgcagacgcattatcaatggcgctggacgcccctcaacgtcgccagcattgaccaaccgcttacctttagcttcagcgccggtacgcttgcgcgcagcgacgagctggcgcaatacggcatcattcacgatccgcacgcctcttcgcgactgatgattgttgaggagagcgaggatacgctggccttagcggagaaagtgatagcagcgctcaccgccagcgcagccggattgattgtggttactcgccgcgcgtggcgagtcgaggaaaatgaagcactctctgcatcccatcacgcgctatgggccttgcttcgcgtcgcggccaacgaacagccggaacggttgcttgccgccatcgatctcgccgaaaaccccccgtgggaaacgctgcatcaagggttgagcgcagtctcactatcacagcgctggctcgccgcacggggtgacaccctttggctcccttcactggcgcccaatacgggatgcgccgctgaattaccggcaaacgtgtttaccggcgatagccgctggcatctggtgaccggagcgtttggcggattaggccgccttgccgtgaactggctcagagaaaaaggggcgcgacgcatcgccctgctggcgccgcgcgtggatgagtcatggctacgcgatgcggagggcgggcagacgcgcgtctgccgttgtgatgtgggcgatgccgggcaactggccacggttcttgacgatctggcggccaacggcggcattgccggagcgattcatgccgctggcgtattggctgacgcgcccttgctggagcttgacgaccaccagctggccaccgttttcgcggtaaaagcgcaggcggcaagccagctgttgcaaaccctgcgcaaccacgacggacgctatcttattctctactcttccgctgccgccaccctcggcgcgccgggtcagagcgcccatgcgctggcctgcggctacctggacgggctggcccagcagttttccacccttgatgcgccgaaaacgctctctgtcgcctggggcgcatggggagaaagcggtcgggcggccacgccggaaatgctggcgacgctcgccagccgtggtatgggcgcgttaagcgatgccgaaggctgctggcacctggaacaggcggtgatgcgcggcgccccgtggcgactggcgatgcgcgtttttaccgacaaaatgcccccgttacaacaggctctgtttaacatcagcgccacagaaaaagccgcaacgcctgtcattcctcctgctgatgacaacgcctttaacggcagcctgagcgatgaaacggcggtgatggcatggctgaaaaagcggattgcggttcagctaaggctgagcgatccggcgtcactgcgtccaaaccaggatctgttgcaactcggcatggactcgctgctcttccttgaactcagtagcgatattcagcactacctgggcgtacgcatcaatgcggaacgggcgtggcaggatctgtctcctcatggactcacgcagcttatctgttctaagccagagacgacgcctgccgcttcgcagccggaagtgttgcagcacgacgccgacgagcgttatgcgcccttccctttgacgcccattcagcacgcctactggctggggcgaacccacctcattggctatggcggcgtcgcctgtcacgttctgtttgagtgggataaacgccacgatgagttcgatctcgccatactggagaacgcatggaaccagcttatcgcacgccacgacatgttgcgcatggtggttgatgccgacgggcagcagcgagtcctggcgacaacgccggagtatcacatccagcgcgacgatctgcgcgcgctttccccggaagaacagcgcatcgcgctggaaaaacggcggcatgaactgagctatcgcgttttgcctgccgaccagtggcctctttttgagctggtggtcagcgaaatcgacgattgccattaccgcctgcacatgaacctcgaccttttgcagttcgatgtgcagagttttaaagtcatgatggacgatctggcgcaggtctggcgcggtgaaacgctggcgccgctcgctatcaccttccgtgattatgtaatggctgaacaggcgcgccgacagacatcggcatggcacgatgcctgggattactggcaggaaaaactgccgcaattgcctttagcgccagagctgccggtggttgaaacacccccggaaacgccacacttcaccaccttcaaatcgacgatcggcaagacagaatggcaggccgtgaaacagcgctggcagcagcaaggcgtcacaccgtctgccgcgctgctcacgctgtttgccgccacccttgagcgctggagccgcaccacggcatttacgctgaacctgacgttcttcaatcgccagccgatccatccgcaaatcaaccagttgattggtgattttacctccgtcacgctggttgattttaacttctcagcgccggtgacgttgcaagagcagatgcaacagacccaacagcgcctctggcaaaacatggcgcacagtgaaatgaacggtgttgaggtgatccgtgagctgggccgcctgcgcgggtcacaacgtcaaccgctaatgccggtggtgtttaccagtatgctggggatgacgctggaaggcatgactatcgatcaggcgatgagccatctgttcggcgaaccctgctatgtgttcacgcaaacgccgcaggtctggctggatcatcaggtcatggagagcgacggcgagttgatgtttagctggtactgcatggacaacgtgctggaacccggcgctgccgaggcgatgtttaatgactattgcgccatcctgcaagccgtcatcgccgcccctgaaagcctgaagactctcgccagcggcatcgccgggcacattccccgtcgacgctggccgctgaacgcgcaggcggactacgacctgcgggatattgagcaggcgacgctcgaataccccggcatccggcaggccagagcggaaataaccgaacagggcgcgttgacgctggatatcgtaatggccgacgatccgtcgccatcagcggcgacgcctgatgagcacgaactcacccaactggcgctgccgttgcctgagcaggcgcagcttgatgagctggaggcgacctggcgctggctggaggcgcgtgcgctacaggggatcgcggctacgctaaatcgtcacggcctgtttaccacgccggagatcgcccatcgctttagcgcaatagtacaggcgctgtccgcgcaagcgtctcaccagcgtctgctgcgccagtggctacagtgtctgacggaaagagagtggttaatccgcgagggtgaaagctggcgctgccgcgttccgctcagcgagattcctgagcctcaggaagcgtgcccgccaagccaatggagccaggcgctggcgcagtatctggaaacctgcatcgcccggcacgacgccctcttctccgggcagtgttctccgctggaattgctgttcaacgagcagcatcgcgtgactgacgcgctgtatcgcgacaaccccgccagcgcctgtctgaatcgctataccgcgcagattgccgccttgtgcggcgcagaacggattctggaggttggcgccggaaccgcagccactaccgcgccggtgctgaaggccacgcggaacacgcgacagtcgtaccacttcacggacgtctccgcgcagttcctcaatgacgccagagcccgtttccatgatgaatcgcgggtgtcttatgccttgttcgacatcaaccagccgctggatttcaccgcccacccggaggcgggttacgacctgatcgttgccgtcaatgtgctccacgacgccagccatgtcgtccagacgttgcgcagattaaaactgttgctgaaagccggcggacgtttgctgatcgttgaagcgacggagcgaaacagcgtattccagctggcgagcgtgggctttattgagggattaagcggataccgcgatttccgccgccgggatgagaaaccgatgctcacccgctccgcatggcaggaggttctcgttcaggccgggtttgcaaacgagctggcgtggcccgcgcaggaatcgtcgccgctgcgccagcatctgctggtggcgcgttcgcctggcgtaaatcgcccggataaaaaagccgtgagccgctatttacagcagcgctttggcaccggtctgcccattttacagatccggcaaagagaagcgttatttacgccgctgcatgccccgtctgatacgccgactgagccagccaaacccacgccagttgccggggggaatccggcgctggaaaaacaggtggctgaactctggcaatcgctgctgtctcgccccgtggcaaggcatcacgactttttcgaactgggcggcgacagcctgatggcgacaaggatggtcgcgcagctaaaccggagagggattgccagggctaaccttcaggatctgttcagccattcgacgctgagcgacttctgcgcccatctacaggcggctacgtcaggagaggacaacccgatacccctttgccagggcgacggtgaggaaaccctgtttgtcttccacgcttcagacggcgatatcagcgcctggctgccgctcgccagcgcgttgaacaggcgcgttttcggcctgcaagcaaaatcgccgcagcgctttgccacgctcgaccagatgatcgatgagtatgtcgggtgcatccgtcgtcagcagcctcacggcccttatgtgctggcgggttggtcgtatggcgcgtttcttgcggcgggcgccgcacagcgcctgtacgccaaaggcgagcaggttcggatggtgttaatcgatcccgtgtgccgacaggatttctgttgcgaaaaccgggcggccctgctgcgcctgttagccgaaggacaaacgcctctggcactgcccgaacatttcgaccagcagacgcccgacagccagcttgccgactttatcagcctcgctaaaacggccggtatggtgtcgcaaaacctgacgctgcaagcggcagaaacgtggctcgacaacatcgcgcatctgctgcgtttactgactgagcatacgccgggcgaaagcgttccggtcccctgtctcatggtgtatgccgccgggagacccgcgcgctggacgccagcagaaaccgagtggcagggctggataaacaacgccgacgacgctgtgattgaagccagccactggcaaatcatgatggaagccccccacgttcaggcttgtgcgcaacacattacgcgctggctttgcgcaacctcaatgcaaccggagaacacgttatga

SEQ ID NO: 91724 - DNA, 6108 bp, Enterobacter aerogenes
atgatttctggcgcaccatctcaggattcgctgttaccggacaaccgccacgcggctgattaccaacaattacgcgagcggctcatacaggaactgaatttaacgccgcagcagttacatgaagagagcaacctgatccaggccggcctggattccataagattgatgagatggttacactggtttcgtaaaaatggctaccgccttacccttcgcgagctgtatgccgcccccacgctggcggcatggaaccagttaatgctcagccggtcgcctgagaacgcggaagaagaaacgccgcccgacgaatcatcctggccgaacatgaccgaaagtacccccttcccattgacgccagtacagcacgcctacctgacgggccgcatgccggggcagaagcttggcggcgtgggttgccacctgtatcaggagtttgaaggccattgtctgacggcgtcgcagttggagcaggccatcacgaccttgctgcaacgccacccaatgctgcatatcgcctttcgccccgacgggcagcaggtctggctaccgcaaccttactggaacggcgtcaccgttcatgatttacgccataacgacgctgaaagccgccaggcctatctggacgcactgcgccagcgcctgagccaccgtcttttacgcgtggaaatcggcgaaacgtttgattttcagctgacgctcttgccggacaatcaccaccgcctccatgtcaatattgacctgctgattatggatgcctccagctttacgcttttcttcgatgagcttaacgccctgctggccggagaatcgctgccggctatcgacacccgctatgatttccgctcgtatttgctgcaccagcagaagatcaatcaaccactgagagacgacgcgcgcgcttactggctggcgaaagcatcgacgcttccccccgcgcccgtcttgccgctggcctgcgaacccgccacgctacgtgaagtccgtaatacccgacgccgcatgattgtcccggcaacacgctggcacgcctttagcaaccgggccggcgagtatggcgtgacgccgacaatggcgctggcgacctgtttttctgccgtgctggctcgctggggcggcctgacgcgtctgctgcttaacatcaccttattcgaccgccagccgctgcacccggcggttggcgcgatgcttgccgacttcaccaatattcttctgctggataccgcctgcgatggcgataccgtcagcaacctggcgcgtaaaaaccagctcacgtttacggaggactgggagcatcgccactggtccggcgtcgaattactccgtgaactcaaacgccagcagcgctacccccacggcgccccggtggtatttaccagcaatctggggcgttctctctacagcagccgcgcagaatcgccgttgggcgagccggaatggggcatctcgcaaacgccgcaggtctggatagatcatctggcgttcgagcatcacggcgaggtctggctacaatgggacagcaacgacgcgctgttccctccggcgttagtcgaaacattgttcgacgcctactgccagttgattaaccaactctgcgatgacgaaagcgcctggcaaaagccgttcgcagatatgatgcccgccagccagcgcgcgatacgcgaacgggtcaacgccaccggcgcccccattcccgaaggcttgctgcatgaaggcattttccgtatcgctctgcaacagccgcaggcgttggcggtaacggacatgcgttatcagtggaattatcatgagctgacagactatgcccgccgttgcgcgggcaggttaatcgagtgcggggttcagcccggcgataatgtggctatcacgatgtcgaaaggcgcaggacaacttgttgcggttctggccgtcctgctggccggggcggtttacgttccggtttcgctggatcagcctgccgcacggcgcgagaaaatctacgctgacgccagcgtccggctggtgctcatttgtcagcacgacgccagcgccgggtcagacgatattcccgtccttgcctggcagcaggccattgaggcggagccgatcgccaacccggtagtacgcgcccccacgcaaccggcctacattatctacacctccggctctaccggtacgccgaaaggggtagtcatttctcaccggggagcgcttaacacctgttgcgatatcaatacccgctatcaggttggcccgcatgacagggtgctggccctctccgccctacattttgatttatcggtttacgacatttttggcgtactgcgcgcgggcggcgcgctggtgatggtgatggaaaatcaacggcgcgatcctcacgcatggtgtgagctgatccagcgccatcaggtcacgctctggaacagcgtcccggcgctgttcgatatgctgctgacctggtgtgaaggtttcgccgacgccacgccggaaaacctgcgcgcagtgatgctttccggcgactggatcgggcttgacctccccgcccgttatcgggccttccggccacaaggacaatttatcgcgatgggcggcgccaccgaggcgtctatctggtctaacgcctgcgaaattcacgacgtccccgcccactggcgttccatcccttacggttttccgctaaccaaccaacgctaccgggtggtggatgaacagggccgggactgccctgactgggtgccgggtgaattatggattggcggcattggggtcgcggaaggctatttcaacgatcccctgcgtagcgagcagcaatttttgacgctcccggacgagcgctggtatcgcaccggcgatctcggctgctactggccagatggcacaatcgagttcctcggtcgtcgcgacaagcaggtcaaagtcggaggatatcgcatcgagctgggcgaaatcgaaagcgcgctcagccagctggcgggggtgaaacaagcaaccgttctggcgatcggcgaaaaagaaaaaacgctggcggcatacgttgttcctcaaggcgaggctttttgcattaccgatcatcggaacccggcactgccgcaggcgtggcacacgcttgcgggaacgttgccctgttgcgccatctcgccagagatctccgcagaacaggtagccgatttccttcagcatcgcctgctaaaactgaagccgggtcacaccgctggcgccgatcctctccccctgatgaactcactcgctatccagccgcgctggcaggccgtggtggaacgctggttagcatttctggtgacacaacggcgactgaagcccgctgctgaaggttatcaggtctgcgctggtgaagaacgcgaggatgagcacccgcacttcagcggacatgatttaacgttatcgcaaattcttcgcggtgcccgtaacgaactgtcgttactgaacgacgcgcagtggtcgccggaaagcctggcctttaaccatccggccagcgccccgtatattcaggaactggcgacaatttgccaacagcttgcacagcgcttacagcgcccgatacgcctgcttgaggtgggaacccgcactggccgcgccgcagaatcgctgttagcacagctcaacgccggacagattgagtatgtcgggcttgagcagagccaggagatgctgctgagcgcccggcagaggctcgccccctggcctggcgcccgtctgtccctctggaatgcagacacgctggcggcgcacgctcactcggcggacattatctggcttaataacgccctgcatcgtctgctgccggaagatcccgggctccttgcgacattacaacagcttgccgttcccggcgcgctgctctacgtgatggagtttcgccagttaacgccgtccgccctgctcagcacgctcctgttaaccaatgggcagccggaggccttgctgcataacagcgccgactgggcggcattatttagcgcggccgccttcaactgtcagcatggcgatgaggtcgcggggttacaacgcttcctcgtacaatgtcctgacaggcaggtgcgccgcgatccccgtcaacttcaggccgccctcgctggacgtctgccggggtggatggtgccgcaacggatcgtcttcctcgacgccttaccgctgacggctaatgggaaaattgactaccaggcgctgaagcgtcgtcatacccctgaagcggaaaacccggccgaagcggatttaccccagggcgacattgaaaaacaggttgccgccctctggcagcaactcttatcaactggcaatgtcaccagagaaaccgacttcttccagcaaggcggcgatagcctgctggcgacccgtctgaccgggcaacttcatcaggcaggttatgaagcgcaattaagcgacctgtttaatcatccccggctggcggattttgccgccacgctgcggaaaaccgacgtcccggtcgaacaaccattcgtccactcccctgaagatcgctaccagccctttgcgcttaccgacgtgcagcaggcttacctggtggggcgtcagccgggctttgccctgggcggcgtcggctcacatttctttgttgaatttgaaattgccgatctggacctcacccggctggagacggtctggaaccgattaatcgcccgccacgatatgctgcgcgccatcgtgcgtgatggacagcaacaggtgctcgaacagacgcccccctgggtgatacccgcacacaccctccatacgcctgaagaggcgttgcgggtgcgcgaaaaactggcgcatcaggtactcaaccccgaagtgtggccggtattcgatctccaggtcggatacgtggacgggatgcctgcccgcctgtggctgtgtctggataacctgttgcttgacggtctgagcatgcagatcctgctggcggagctggagcacggctaccgctacccgcaacagctgcttccgccgctgcccgtcaccttcagggattatctgcaacaaccctcgctacagtcgcccaatccagattctctggcatggtggcaggcgcagcttgatgatattcctccggcgcctgcgttgccgctgcgctgcttgcctcaggaggttgaaacaccgcgcttcgcccgcctgaacggcgcgctggacagcacgcgctggcatcggctgaaaaaacgggcggctgacgcccatctcaccccgtcggccgtactgttgtcggtgtggtcaacggttctctctgcatggagtgcacagcctgagttcacgcttaaccttacgcttttcgacaggcgaccgctgcacccgcaaatcaaccagattctgggcgatttcacctcgctgatgctgctgagctggcatcccggcgaaagctggctgcacagcgcgcagtcactacagcagcggctgagccagaacctcaaccaccgcgatgtgtcagccatccgcgtgatgcgtcaactggcgcaacagcaaaacgtgcctgccgttccgatgcccgtcgtctttaccagcgcgctgggctttgagcaggataacttcctcgcccggcgtaatctgctcaaaccggtctggggcatctcccagacgccgcaggtctggctcgatcaccagatttatgaatccgaaggcgaactgcgctttaactgggattttgtcgccgcgctgtttcctgccgggcaggtggagcgccagtttgaacagtattgcgcattgctaaaccgaatggccgaggatgaaagcggctggcaactgccgctcgccgcgctggtgcctcccgttaaacacgcagggcaatgcgcagagcgctcaccgcgcgtatgccctgagcaatctcagccacacattgcggcggacgagagcaccgtcagcctgatttgcgacgccttccgcgaggtggttggcgagtctgtcacgcccgcagaaaacttctttgaggcgggcgcaacgtcgctgaatctggtgcaactgcacgttttgttacaacgtcacgaattttccaccctgacgttgcttgacctcttcacccacccttctcctgctgccctggccgattatctggccggcgtcgccacggtggagaaaacaaaacgacctcgccctgttcgccgtcgtcagcggcggatatag

SEQ ID NO: 91725 - DNA, 960 bp, Enterobacter aerogenes; identical to SEQ ID NO: 78605

SEQ ID NO: 91726 - DNA, 1713 bp, Enterobacter aerogenes
atggcgctggcggggctggcggcattaaccagcctgggggcgctcctttttctggcgtggagcctgcgtgacattcgcgcgacgcctgacgctattccggcctggccgctgggcggcgtgatcggctgcgtggtcttaacttttgttctgcgcttacaggcgttcaacacctctcattacgcggcttttcatctggagaacattctgcgcagcaggttagcccgtaaagcattgcagcttccgcctggcgtgttacagcaaatgggcagcgggtcagtggcgaaagtgatgctggatgacgtgaagtcgttacatatttttgtggccgacagcacgccgctctatgcccgcgcgatcatcatgccgctggcgacaatcgttatcttgttctggctggactggcggctggcaatcgcgacgctgggggtactggcgtttggatcggttgttctcgtgctcgcccgccagcgttcggaagatatggctcagcgttatcataaggcgcgcgagcaggttagcgcggcggtgattgagttcgtgcaggccatgcccgtggtgagaacgtttgatagcggcagcaccagttttttgcgctatcaacgcgcccttgaagagtgggtcgatgtgctcaaaacctggtatcgcaaagccggtttttcagcgcgtttttccttctcgattctgaatcctctcccgaccctgtttgtcctgatctggtcgggatacggcctgctgcactatggcagtttcgattttatcgcgtgggtggccgttttactgctgggcagcggaatggccgaagccgtaatgccaatgatgatgctcaataacctggtcgcgcaaacgcgtttaagcattcagcgtatttatcaggttctcgcgatgccggagttatcgctgccgcagtctgaccagcagccgcaagaggcgagcattacctttgagcaggtgagctttcattatccgcaagcgcgtactggcgccgcgttgcaggaggtgagctttcatgtgcctgccgggcaaattgtggcgctggtcgggccaagcggcgccggaaaaagcaccgtggcgcgcttgctgctgcgttacgccgacccggacaaaggccatatccgtattggaggcgtggatctgcgtgatatgcagacggacaccctgatgaagcaactctcgtttgtgtttcaggacaacttcctttttgccgacacgatagccaataacattcgtctgggcgcgccggatacgccgctggaggcggtaatagcggcggccagagtggcgcaggcccatgattttattagcgctctgccagaaggttacaacacacgagtcggggaacgtggggtatttctctccggcggccagcggcagcgcattactatcgcccgggcgcttttgcaggatcgccccatcctggtgctcgatgaggcgacggcgtttgctgacccggaaaacgaagcggcgcttatcaaggcgctcgcggcggccatgcgtggccggacggtcatcatggtcgcgcatcgtctctcaatggtgactcaggccgatgtgatattgctgttttccgacggacagctcagggaaatggggaaccatacgcaactgttggcgcagggcggcctgtatcaacggctctggcaacactatcagcaggcgcagcattgggtgccgggtggaacacaggaagaggtggtggaaaatgaaagacaataa

SEQ ID NO: 91727 - DNA, 1803 bp, Enterobacter aerogenes
atgaaagacaataatcctgcggataacctggcctggcgcgtcaactggcgccagcttatctccagcgttggcagtcaggccaggatgctgcgacgcagtatgctggcgctgttgctggcggcattcatgcaggggatcgcctttgcctgtctttatccgatcattgatgcgctgttacggggagacgcgccgcaacttcttaactgggctatggccttcagcgtcgccgcaattgtgacgctggtgctacgctggtatggcctgggctttgaataccgtggtcatctggcgcaggccacccatgagttgcgcctgcgacttggcgagcagttacgccgcgtgccgctggagaagctccagcgcggcagggcgggtgaaatgaacgccttgctgctgggcagcgtggatgaaaacctcaattatgttattgcgatagccaatattttgctgctcaccattgtcacgccgctgacggcgtcgctggcgacattgtggatagactggcggctggggctggtgatgttgctgatcttccctctgctggtgccgttttattactggcgccgcccggcgatgcggcgacaaatgcagacgctgggggaagcgcaccagcgtctgagcggcgatatcgttgaatttgctcaggggatgatggtattgcgcacctgcggcagcgatgccgataaaagccgggcgctgctggcgcatttcaatgcgctggaaaacttacagacccgcactcaccgtcagggcgctggcgcgacgatgctgatcgccagcgtcgtggagttgggcctacaggtggtggtgttatccgggatcgtctgggtagtgacgggcactctgaacctcgcctttttgattgccgccgtcgcgatgattatgcgcttcgcagaaccgatggcgatgtttatcagctacacctcggttgtggaactgatcgccagcgccctgcaacggattgagcggtttatggcgatagcaccgcttcccgtcgcagagcaaagcgagatgccggaacgttacgatatccgctttgacaacgtcagctatcgctacgaagaaggcgacggccacgcgcttaatcatgtttctttgacgttcccggcagccagtatgagcgcgctggtgggtgcctccggcgcaggcaaaactacggtcaccaaactgttaatgcgctatgccgatccgcagcaagggcagatttctattggcggcgtcgatattcgccgcctgacgccggaacagctcaatagcctgatttctgttgttttccaggatgtctggctgtttgatgacacgctgctggcgaatatccgtatcgcgcgcccacaggcgacgcggcaggaggtagaagaggccgcccgcgcggcgcagtgccttgagtttatttcccgtcttccgcaaggctggctgacgccaatgggagagatgggcggccagctatcgggcggcgagcgccagcggatttccattgccagagcgttattgaaaaacgcgccggtcgtcattctcgatgaaccgactgccgcgctggatattgaaagcgagctggcggtgcaaaaagcgatcgataacctggttcacaaccggacggtgattatcatcgctcaccgtttatccaccatcgccggggccggaaacattctggtgatagaagagggacaggtggttgagcagggtactcatgcgcaattgctctcacatcatggacgttatcaggcgctgtggcaggcgcaaatggccgcgcgcgtgtggcgcgacgagggggtttccgcgtctggagagtgggtgcatgagtga

SEQ ID NO: 91728 - DNA, 1281 bp, Enterobacter aerogenes
atgagtgatgttcagtcgaatgtgaaaccgctgacgttgacgaccgggcgggtgatttttgctattgccggcgtctatgtgacgcagagtctggtatcggcgctgtctatgcagtccttacccgcgctggtgcgcgctgctggcggatcgctggcgcttgccggtgcgacaaccctgttcatgctgccctgggcgctgaagtttatttgggcgccgtggatcgaacgctggcggcttccgcccggtagccaggaacgccgttcgcggatgttaatcctgcgtggtcaggtcgcgctagcggcgatcctgatgattgccgcagcgattggctggtttgggcgagaaggaggatttcccgatacgcaaatcgtcgcgttatttgttctgtttatggtggcaggcacggtcgcttccaccattgatatcgccagcgacggcttttgcgtcgatcaactgactcgcgcgggttacggctggggaaacagcgtgcaggtcggcggcagctatctgggaatgatgtgcggcggcggggtgttcctgatgttgtcggcagcatccggctggcctgtcgccatgctgatgatggcgatgctgattatggcgctgtcattcccgctgtggcgcattacggagccgacgcgaacagcgcctatcccgcatgttccggcgttaggttatgcgctaaggaggaagcaggcgcgcctgggcttactgctggtattaatgctgaattcaggcatgcggtttgtgctgcctcttctggcgccgctgttgttggatcatgggttgagcatgtctgcgttgggcgcgctgttcagcggcggcaatattgcagcgggcatagcaggaacgctggccggcggattactgatgaaatacacctcacccggcagagcgctgttgacggcttatggcgtccaggggatcgcgctgctggcggtggtgatgacgttcatgatggcgccgggtcatctgttgctgccgattctccagtgtctggtcattgtccagtccatttcgctggcctgcgcgctggtctgtctttacgccacgctgatgtcgctttcatcgcctttgcaggccggtgtcgacttcaccctctttcaatgtactgacgcggcaatcgccatcctggctggtgttatcggcggcgttgttgctcaacattttggctatgcggcctgcttcctgtttgccggggtattcacgttgctggcggcgtgggttgcttatatccggctgcattcggcaagagaactgatgacaagcgcaattgattga

SEQ ID NO: 91729 - DNA, 1305 bp, Enterobacter aerogenes
atgaaaatcagtgaatttttacacctggcgttaccagaggaacaatggctgccgacgatttctggcgttttacgccagttcgcagaagaagagtgttatgtctatgagcgtcaaccctgttggtatttaggcaaagggtgcctggcacggttgcacattaatgccgacggaacgcaggcgacatttattgatgatgccggggagcaacaatgggcggtggattccattaccgactgcgcgcgtcgttttatggcacatcctcaggtcaaaggacgtcgggtttatggacaggttgggttcaactttgcggcgcatgcgcgggggattgcctttaacgccggggagtggccgctgctgacgttaaccgttccccgtgaagaacttatttttgaaaagggaaatgtcaccgtttatgcggactccgccgacgggggccgacgtttgtgtgagtgggtaaaagaggccagtacaacgacgcagaacgcaccactggcggtggataccgccctcaatggcgaggcgtataaacaacaggttgcacgcgccgttgcggagatccgccgtggcgagtatgtcaaagtgattgtctcgcgcgctattcccctgccatcgcggattgatatgcccgccacgctgttatacgggcggcaggcaaatacacctgtgcgctcgtttatgttccgtcaggaaggacgcgaagcgctgggctttagcccggaactggtgatgtcagtgacgggcaataaagtggtcactgaaccgcttgcgggcacccgcgatcgcatgggaaacccggagcataataaggcgaaagaggcagaactgctgcacgacagtaaagaggtgcttgagcatatcctttctgtcaaagaagcgattgctgaactggaggccgtttgcctgccgggcagcgtggtggttgaagatttaatgtcggttcgccagcgcggcagcgttcagcatctggggtccggcgtgagcggtcagcttgcggaaaacaaggatgcctgggatgcgtttaccgtgctgtttccgtcgattaccgcctcaggtatccctaaaaacgctgccctgaacgcgattatgcaaattgagaagacgccgcgagagctctattccggcgcaattctgctgctggacgatatgcgcttcgatgcggcgctagttctgcgttccgtatttcaggacagccagcgctgctggatacaagcgggggcgggaatcatcgcgcaatctacaccggaacgcgaactgacggaaacccgggagaaattagcgagcattgcgccctatttaatggtgtag

SEQ ID NO: 91730 - DNA, 750 bp, Enterobacter aerogenes
atgcgccatgcggtccatcaggagttaatcgatacgaaccctgcagcaaaccttggcggcgtgaccacacctcctgtcagacggcactatcctgccctgccgctggagcggctgcctgaactgcttgaacgtattggggcatatcatcagggccgtgaactgacccggcatgccgttctgctgatgctgcatgtgttcattcgctccagtgaactgcgtttcgcccgctggtcagagattgatttcacaaaccgagtctggacgatacccgcgacgcgagaacccattattggcgtgcgttattccggccgcggggcaaaaatgcgaatgccgcatatcgtccccctctcagaacagtccatcgccattctgaaacagattaaggatatcaccggtaataatgaactgatcttccccggcgaccataacccgtataagccaatgtgtgaaaacacggtcaataaggcactgcgggtgatgggttacgacacgaaaaaggatatctgcggtcacggcttccgggcaatggcatgcagtgcgctgatggaatcgggtttatgggcaaaggacgcagtagaacgccagatgagtcatcaggagcgcaataccgtgcgcatggcttatattcataaggcagagcacctagaagcccgcaaagcgatgatgcagtggtggtcggattatctggaagcatgccgagaatcttatgcaccgccttatacaattggtaaaaataagtttatcccatag

SEQ ID NO: 91731 - DNA, 555 bp, Enterobacter aerogenes
atgtccagttatttacgtccttataaagaattattccctcaaatcggtctgcgggtgatggtggatcccagcagcgttgtgatcggcgatgtcagaattgccgatgacgtcagcatttggccgctggtcgccatccgcggcgacgtgaattatgtgtctatcggcgcacgttcgaatattcaggacggtagcgtcctgcatgtcacccataagtcttcttataaccctgagggtaatccgctactcataggagaagatgtcaccgtcgggcataaagtcatgctgcacggctgcactatcggcaatcgcattcttgtcggaatggggtcaattctgctggatggcgtggtggtagaagatgacgtgatgatcggcgccggcagcctggtgccgcaaaacaagcgtctggaaagcggttatctctattttggcaacccggtaaaacaaatccgccccctgacggaggcggaatatgcagggctgaagtattcagccaacaactatgtgaagtggaaagacgactacctggatcaggaaagccagagccaaccctga

SEQ ID NO: 91732 - DNA, 258 bp, Enterobacter aerogenes
gtgaaccaggcgatccaatttcccgatagagaagagtgggacgctgaacggcagtgcatcgttttccccgcgttggtcaatggcatgcagttaacttgcgcgattcggggtcagacactgcagcaacggttcggtggcgatgagccagcgcgatggctggctctctttagcgaacatcgctgggatttggaagatgaagcggaagcgttgattcgcgatcggcaagaagaccatcagggttggctctggctttcctga

SEQ ID NO: 91733 - DNA, 819 bp, Enterobacter aerogenes
atggaaacttatgccgtttttggtaaccctatagcccatagcaagtcgccttctattcatcagctgtttgccaaacagttagatattgcgcacccctatggtcgggtactggcgccattggatgattttgtgaataccctggatgctttcttcaacacgggcggtaagggcgctaatgtgaccgtccctttcaaagaagaagcgtttgcccgcgccgacgaactcaccgagcgcgctgcgctagccggcgcggtcaatacgttaaagcgtcttgaggatggtcgtctgcttggcgacaatacggatggcattgggttattaagcgacttagagcgtctgggctttatcaagcctggtatgaggattttattgattggcgcaggcggcgcatctcgcggtgtattgttaccgctgctctctttagattgcgcggtcaccatcgttaaccgtactttttcccgcgctcatgagctggcaacgctatttgctcataccggcagcgttagcgcgttatcgctggataaattggaaggtcatcagttcgatctcattattaacgcgacgtccagcggaataagcggcgatatcccggcaataccttcctcgttaattcatgccgacgtttactgctatgacatgttttatcagaaaggaaatacgccatttctgcattggtgccaacagtatggcgctaaaaaaatggcagatggattaggtatgctggtggctcaggccgcacatgccgttctgctgtggcacggtagactaccggaaattgccccggtgattgccgttttacatcaggaactgaatgcgtga

SEQ ID NO: 91734 - DNA, 573 bp, Enterobacter aerogenes
gtgaataaaaacctgccctcagagaccgtcgcccaggctgtcgcggtactgaataatgaacatgtcatcgcctatccaaccgaagctgtgtttggtgtcggttgcgatccggatagcgaaacggccgtgatgcgcctactggcgttaaagcaacgccctgtggaaaaggggctgatacttatcgccgccagttttgaccaactgaaaccgtatattgatgattcccgattaagcgacgcgcagagagcggttatctttgccagttggcctgggccggtgacgtttgtgttcccggcgcgtccggatacgccacgctggctgacggggcgctttgattcgcttgccgtgcgcgttaccgatcacccactggtaattgaattatgtgaagcctacggaaagccgctggtctcgacgagcgccaacttaaccggtcagccgccgtgccggactactgctgaagtacgcgcccagtttggcgatagtttcccggtggtggatggcgcaacgggcgggcggcaaaacccatctgaaatccgtgatgccctgacgggtgaacagttccgccaggggtaa

SEQ ID NO: 91735 - DNA, 555 bp, Enterobacter aerogenes
atgaccaaatcagcactgttttcggtgcgtaaaaacgagccctgcccgcagtgcggggccgaactggtgattcgttccgggaaacatggcccgtttctcggctgttctcactatccggactgtgactatgtccgtcccctgaaaagtcaggcggatggacatatcgtcaaggtgctggaggggcaagagtgcccatcttgcggcgctgtcatggtgttacgccaggggcgttttggtatgttcatcggctgcagtcgctatcccgaatgcgaacataccgagttgattgataaacctgatgagaccgctatcgcgtgtccgcaatgcggacagggtcatctggtgcagcgtcgctcccgtttcggtaaaacctttcattcctgcgatcgctaccctgattgccagttcgtaattaattttaaaccggtggcgggcgaatgccctgaatgccattacccgctattaatagaaaagaaaacggcacagggtgttaaacgcttttgcgccagtaaacaatgtggaaagccgatcccggcggaacaaataagtgaataa

SEQ ID NO: 91736 - DNA, 474 bp, Enterobacter aerogenes
atgttcgacgtactcatgtatttgtttgagacttatatccataacgaagcagaaatgcgcgtggatcaggacaaactgacgcgggatctgaccgatgcaggttttgagcgggaagatatctataacgcgttaatgtggctcgagaaactggctgattatcaggaaggtctcgttgaacccatgcagctcgcctccgacccgctctctcttcgggtatacaccgatgaagagtgccagcgtctggatgccagctgtcgaggatttttactcttcctcgagcagatccaggtgttgaacctcgaaacgcgagaaatggtgatagagcgcgtactggcgctggatacggcagagtttgaactggaagacctgaaatgggtgatcctgatggttctgtttaatattccaggctgtgaaaacgcctatcagcaaatggaagaattactcttcgaagtaaatgaaggtatgctgcattaa

SEQ ID NO: 91737 - DNA, 1125 bp, Enterobacter aerogenes
atgacgcccacggagatttggttgcgcctgatgcgggtgaataatctgtacggcgatgaaatggtattgattgcgcgacggctgggatgtgcaggccagttggatactgaaacgttgtgggctgcgggtttaactaaagcgcaggcaacacagttttttgccctcaaccaacagcaaattgatgtttcactgcaatggttagagcaaccagaacatcatctgatcacggcggatcacgcactctatccgccgcagctacgcgctatcggtgattatcccggcgcgctgctggtctgcggtaacgtcgatctcctgtgtagccggcagctggctatcattgggagccgtgcacactcgtggtacggcgcgcggtggggaaaagcattcagtgaagcgcttgctcagtatggcttgacccttaccagtggtctggcgttggggattgatggcatcgcccaccgcggggcattggcggcaaagggaaaaaccatcgccgtattaggcaacggtctctctgatatctacccgcaccggcatcgggctttagcaaagcagatcgtggaaagcggcggcgcgctactttccgaatttcctctctctgcgctaccgttaccagggaatttcccgcgccgcaaccggattatcagcgggttaagcgctggggttctggtgatagaggcggccttgaaaagcggttctctggtaactgtccgttgcgcgctggagcaggggagagatgtttttgccctgcctgggccaattggcaatcctggctctgaagggccgcactggctaataaagcagggagcagttccggttaccgtgccggaagagatccttgagtattggcaatatgagctttcagtgcgggaagagaccgctgatttgctaaataattacgcagatcggcctcctgtagcattgccatttccagagctcctggctaacgtaggagatgaggtaacacctgttgacgttgtcgctgaacgtgccggccaatctgtgccagtaaccgtagcccagctacttgaactggagttagcaggctggatcgcagctgtacccggcggctatgtccgattaaggagggcaagccatgttcgacgtactcatgtatttgtttga

SEQ ID NO: 91738 - DNA, 510 bp, Enterobacter aerogenes
atggcagttttgcaagtgttacatattccggacgagcgccttcgcaaagtcgccgagccggtcaaagaagtcaatgcagaaattcagcgtatcgtcgatgatatgttcgacacgatgtacgctgaagaaggtattggtctggccgccacgcaggtggatatccatcagcgcattatcgttatcgatgtctcggaaaaccgtgaagagcgtctggtgctcatcaacccagagctactcgaaaaagacggcgaaaccggcattgaagaaggttgtttgtcgattccggaacaacgtgcgctggttccacgagccgaaaccgtaaaaatccgcgcgctggaccgtgaaggtaagactttcgaactggaagctgatggcttgttggctatttgtatccagcatgaaatggatcacctggtcggtaagctgttcattgactatctgtcgccgctcaaacagcagcgcatccgccagaaagttgaaaaactggatcgtttacgcgcccgtgcctga

SEQ ID NO: 91739 - DNA, 948 bp, Enterobacter aerogenes
gtgtcacaaacactacgtatcattttcgccggaacccccgactttgcagcgcgtcaccttgacgcgctgttgtcgtctgaacatcaggttgtcggcgtatttactcagcccgaccgccctgctggtcgcggcaaaaaattgatgccgagcccggtaaaagtgctggctgaagccaataatctaccggtcttccagccatcttccctacgtccgcaggaaaatcagcaattagttgccgaccttaacgccgatgttatggtcgtcgtggcttatggactgatcctgccgaaagcggttcttgaaatgccgcgtttgggctgcattaacgttcacggctccctgcttcctcgctggcgtggcgcagcgccgattcagcgttcgctatgggctggcgatgccgaaaccggtgtcaccatcatgcagatggacgtcggtcttgataccggtgacatgctgtataaactctcctgcccgattaccgcggaagataccagcggcagcctgtacgataaactggccaaccttggaccagagggtctactggcgaccttagcgcagctggcggatggtagcgcagagcctgaagttcaggacgaatcgcgggtcagctacgccgagaagctgagtaaggaagaggcccgtattgattggtcgctttccgcagaacagctcgaacgctgcatccgcgcatttaatccctggccgatgagctggctggaaatcgatgaacaaccggtgaaggtatggcgcgcatccgttattacggagtccgccaacgctgagccaggtacgatcgtcgcagcaaccaagcaagggatccaggtcgccaccggcaacgggattctgaatctggaatcgctgcagccggcagggaaaaaagcgatgagtgcccaggatttactgaactctcgccgggaatggtttatccccggaaaccgtcttgcctga

SEQ ID NO: 91740 - DNA, 1296 bp, Enterobacter aerogenes
atgaaaaagaatagtaatttacgcagcctggcagcccaggccattgagcaggtcgttgagaaaggccagtctttaagcaatgttctgccgccgctgcagcaaaaagtgagcgagaaagacaaagcgctgctgcaggagctgtgcttcggcgttttgcgcactctcagccaactcgagtggctaatcggtaagctgatggcccgcccgatgaccggcaaacagcgtaccgtacatttcctgatcatggtcggcctgtatcagctactttatacgcgaattcccccgcacgccgcgctggcggaaacggtggaaggcgcggtggcaattaaacgacctcagcttaaagggcttatcaatggcgtattacgccagtttcagcgtcagcaggaagagctgctggccgaattcgcccagcacgagaaccgttatctccatcctaaatggctgcttaaacgtctgcagcaggcctggccgcaacaatggcaggatattgtgtcagccaataatctacgtccgccaatgtggctgcgtgtgaatcgcaatcatcattcgcgagatgaatggatctctctgctggaagaggctggtttacagggtttcgctcacccggactatccggatgccgtccgtcttgcgtccccagccccggtccatgcgttaccgggatttgatgaaggctgggtaaccgttcaggacgcctcagcccagggctgcatgcgctacttacaaccggaaaacggcgagcgcattctcgatctctgcgcggcgccgggcggcaagacgacgcatattctggaagtcgcgcctcaggcgaatctgatggcggtcgatatcgaccagcagcgcctgtcccgtgtctatgacaacctgaaacgtctgggtatgaaagcggaagtgaaacagggcgatggccgctatcctgaacagtggtgcggcgatgagcagttcgaccgtattttgcttgatgcgccatgttcggccaccggcgttatccgtcgccatccggatattaaatggctgcgccgggatcgcgatatcgccgagctagcgcaattacaggcagaaattctcgatgccacctgggctcatcttaagcctggcggtacgctggtctatgcgacatgctctattttgccggaagagaacagccaacaaatcgccgctttcctgacccgtacccgagatgccgaactccatgagacgggaacgccggaaaccccgggtcagcaaaatctgcctggggcggaagaaggcgatggcttcttttacgctaagctaatcaaaaagcgcaattaa

SEQ ID NO: 91741 - DNA, 1377 bp, Enterobacter aerogenes
atgaagattattattcttggcgccggacaggtaggcggcacgctggcggaaaatctcgttggcgaaaacaacgatattaccctggtcgataccaacggcgaccgtctgcgcggcctgcaggataagttcgatctccgcgtcgttcagggccacggttcgcatccgcgcgtgctgcgcgaagctggcgccgatgatgccgatatgctggtcgccgtaaccagttcggatgagaccaacatggtagcctgccaggtcgcctattcgctgtttaatacgccgaatcgcatcgcccgtattcgttcgcccgattacgttcgcgatgccgataaactttttcattcagaagcggtgccaattgaccatctgatcgctccggagcagttagtcatcgataatatctaccgcctgatcgaatatccaggcgcgctgcaggtggtgaacttcgcagaagggaaagtaagcctggccgttgtgaaggcttattatggcggcccgctggtcggtaatgcgctttccacgatgcgcgaacatatgccgcacatcgacacgcgcgttgcggcaattttccgccacgaccgaccgattcgcccgcagggatcaaccatcgtagaagcgggcgacgaagtcttctttatcgccgcgtcgcaacatattcgcgcggtaatgagcgaactccaacgtctggagaaaccctacaaacgcattatgctggtcggcggcggcaacatcggcgcgggcctcgctcacaggctggagaaagactacagcgtgaagttgatcgagcgcgatcaacagcgtgccgctgaacttgccgaaaagctgcagaatacgatcgtcttttatggcgatgcatcggatcaagagttactggcggaagagcatatcgatcaagtcgatctctttattgccgtcaccaacgatgacgaagccaatatcatgtcggcaatgctagccaagcggatgggcgcgaagaaggtcatggtgctgatccagcgtcgcgcatatgttgatctggttcagggaagcgtgatcgatattgcgatatcaccgcaacaagccacgatttctgccttgctgagccacgtacgtaaagctgatattgtcggtgtttcgtcgctacgccgcggcgttgccgaagccattgaggccgtcgcgcatggcgatgaaagcacctcgcgggtagtcggccgttcaattgatgaaattaagctgccgccaggcacgattattggcgcggtggtgcgcgggaatgacgtaatgatcgccaataataatttacgtattgagcaaggcgaccacgtaattatgttcctgaccgacaagaaatttatctccgatgttgagagactattccagccgagtccgttcttcctgtaa

SEQ ID NO: 91742 - DNA, 411 bp, Enterobacter aerogenes
atgggtatgttaaaagaattccgcgaattcgcgatgcgcgggaatgttgtcgatttggcagtgggtgtcatcattggtgcagcatttggtaaaattgtatcgtctttagtggccgatattattatgcctccgctgggtttgctcattggcgggatcgactttaaacagttcgccgttacgctacgcgatgcgcagggggatgtcccagccgttgtcatgcattatggtgtgtttattcagaacgtcttcgatttcatcatcgttgccttcgcgattttcatggcgatcaaactgatgaataaactgaaccgtaagaaagaagaagcgcctgccgctccggcaccgagcaaagaagaagtgctactgagtgaaattcgcgatctgttaaaagaacaaaacaaccgttcttaa

SEQ ID NO: 91743 - DNA, 216 bp, Enterobacter aerogenes
atgagtcgctatcagcataccaaagggcaaattaaagataatgcgattgaggcattactgcatgacccattattcagacagcggattgagaaaaataagaaagggaaaggaagctatcaacgtaaagacaaacatgcagggcggaatgaccgggaggccagtggcaagcaagcgaatcgcttttttaccactggccttctgctttctgtatgctga

SEQ ID NO: 91744 - DNA, 426 bp, Enterobacter aerogenes
atgtatcggattggcgaactggccaaattggctgatgtcaccccggataccatccgctattacgaaaagcagcaaatgatggatcatgatattcgtactgaaggcggttttcgcctctattcggataacgatctgcagcggctgcgctttatccgttatgccaggcaattaggcttcactctggagtcgatccgcgaattattatcgatccgcatcgatccagaacatcatacttgtcaggagtctaaagggatcgtccaggcccgcctaagtgaagttgaagcgcgtatcaaagaactggaaacgatgcggcgttctctacagcggctgaatgatgcctgctgtggcacggcgcacagtagcgtttactgctcaattctcgaagccttagagcaaggcgccagcggtagccatgccgggcgttga

SEQ ID NO: 91745 - DNA, 369 bp, Enterobacter aerogenes
atgtggttactggaccagtgggcagaacgccacatcctcgacgcacagtctaaaggcgagtttgataatctgaccggcagcggcgaaccgctggcgctggatgatgattcacacgtgccccctgaactgcgcgccggttatcgcttattaaaaaatgccggctgtttgccaccggagcttgagttacgtagagatgccatggcgttgagcgacttactcaagaccgtagagcatgatgatccgcggtataccgaattaaatcgtcgcttgactctgtttgaactgaaattacgtcaggcgggtatgaataccgattttctactcggtgattatgccgacagactgtggcacaaaattaacgaggagtag

SEQ ID NO: 91746 - DNA, 387 bp, Enterobacter aerogenes
atgcgccatcgtaagagtggtcgtcaactgaaccgcaacagcagccatcgccaggctatgttccgtaacatggcaggttcgctggttcgtcatgagatcatcaagacgaccctgccgaaagcgaaagaactgcgtcgcgtagttgagccgctgattactcttgccaagactgatagcgttgctaatcgtcgtctggcattcgcccgcactcgtgataacgagatcgtggcaaaactgtttaacgagctgggcccgcgtttcgcgagccgcgccggtggttacactcgcattctgaagtgtggcttccgtgcaggcgacaacgcgccgatggcatacatcgagctggttgatcgtgctgagctgaaagcagaagctgctgcagagtaa

SEQ ID NO: 91747 - DNA, 990 bp, Enterobacter aerogenes
atgcagggttctgtgacagagtttctaaaaccgcgcctggtcgatatcgagcaagtgagttcgacgcacgccaaggtgacccttgagcctttagagcgtggcttcggccatactctgggtaacgcactgcgccgtattctgctctcatcgatgccgggttgcgcggtgaccgaggttgagattgatggtgtactgcacgagtacagcaccaaagaaggcgttcaggaagacatccttgaaatcctgctcaacctgaaagggctggcggtgagagttcagggtaaagatgaagtcatccttactttgaataaatctggcattggccctgtgactgcagccgacattacccacgacggtgatgtcgaaatcgtcaagccgcagcacgtgatctgccacctgaccgatgagaacgcatctattagcatgcgcatcaaagttcagcgcggtcgcggttatgtgccggcttctgcccgaattcattcggaagaagatgagcgcccaatcggccgtctgctggtcgacgcctgctacagccctgtagagcgtattgcctacaatgttgaagccgcgcgtgttgagcagcgtaccgacctggacaagctggtcatcgaaatggaaaccaatggcacaatcgatcctgaagaggcgattcgtcgtgcggcaaccattctggctgaacaactggaagctttcgttgacttacgtgatgtacgtcagccggaagtgaaagaagagaaaccagagttcgatccgatcctgctgcgccctgttgacgatctggaattgactgtccgctctgctaactgcctcaaggcagaagctatccactatatcggtgatctggtacagcgtaccgaggttgagttgctgaaaacgccgaacctgggtaaaaaatctcttactgagattaaagacgtgctggcttcacgtggtctgtctctgggcatgcgcctggaaaactggccgccggcaagcattgctgacgagtaa

SEQ ID NO: 91748 - DNA, 621 bp, Enterobacter aerogenes
atggcaagatatttgggtcctaagctcaagctgagccgtcgtgagggcactgacttattccttaagtctggcgttcgcgcgatcgataccaagtgtaaaattgaacaagctcctggccagcacggtgcgcgtaagccgcgtctgtctgactatggtgtgcagttgcgtgaaaagcaaaaagttcgccgtatgtacggtgtgctggagcgtcagttccgtaactactataaagaagcagcacgtctgaaaggcaacaccggtgaaaacctgttggctctgctggaaggtcgtctggacaacgttgtataccgtatgggcttcggcgccactcgtgctgaagcacgccagctggttagccacaaggctatcatggtaaacggtcgtgttgttaacatcgcttcttatcaggtaaaagcgaatgacgttgttagcatccgtgagaaagcgaaaaagcaatctcgcgtgaaagccgctctggagctggctgagcagcgtgaaaagccaacctggctggaagttgatgctggcaagatggaaggtacgttcaagcgtcagccggagcgttctgatctgtctgcggacattaacgaacacctgatcgtcgagctttactccaagtaa

SEQ ID NO: 91749 - DNA, 381 bp, Enterobacter aerogenes
atgagggatcggagtcacatcagtaatattagtgatgcggaaaccagcggcgttcagtgcacgaatagtagattcgcgacctggacccggacctttaaccataacttccagattcttgatgccgtattcttttacggcttctgcgcaacgctctgctgcaacctgagctgcaaacggagtggatttgcgagaaccacggaaaccggaaccaccggctgttgcccaacccagcgcgttaccctgacgatcagtgatggtaacgatggtgttgttaaaagaagcatggatatgagccacgccatcagagacttgttttcttacacgcttacgtgcacgaactggtgcctttgccattattcaatcaccccgattatttcttga

SEQ ID NO: 91750 - DNA, 357 bp, Enterobacter aerogenes
gtggcccgtatagcaggcattaacattcctgatcagaaacataccgtaattgctttaactgcaatttttggtatcggcaagacccgctctaaagccatctgcgctgaaacgggtatcgctgaaaatgttaagatcagtgagctgtctgaagaacagattgattctctgcgtgaagcagtaggtaaatttgtcgttgaaggtgatctgcgccgtgaaatcaccctgagcatcaagcgtctgatggaccttggttgctaccgtggtttacgccatcgtcgtggtcttccggttcgcggtcagcgtactaagaccaacgcacgtacccgtaagggtccgcgtaaaccgatcaagaaataa

SEQ ID NO: 91751 - DNA, 1332 bp, Enterobacter aerogenes
atggctaaacaaccgggattagattttcaaagtgccaaaggtggaattggcgaactgaaacgcagacttctgtttgttatcggtgcgctgattgtgttccgtattggctcttttattccgatccctggtattgatgccactgtacttgccaaactgcttgagcaacagcgaggcaccatcattgaaatgtttaacatgttctctggtggtgctctcagccgtgcttctatctttgctctggggatcatgccgtatatttcggcgtcgatcattgtccagctgctgaccgttgtttatcaaccgctggcagaactgaagaaagaaggggagtctggtcgtcgtaagatcagccagtacacccgctacggtactctggtgctggctatattccagtcgatcggtattgctaccggtctgccgaatatgcctggtatgcagggcctggtgattaatccgggctttgcattctatttcaccgctgttgttagtctggtcacagggactatgttcctgatgtggctcggcgaacagatcaccgaacgcggtatcggaaacggtatctcgatcctgatcttcgccgggatcgttgcgggactcccgccggccatcgcccatactatcgagcaagcgcgtcaaggcgacctgcacttcctcctgttgctgttggttgcagtattagtatttgcagtgaccttcttcgttgtattcgttgaacgtggtcaacgccgcattgtggtaaactacgctaagcgtcaacagggtcgtcgtgtctatgctgcacagagcacacatttaccgctgaaagtgaatatggcgggggtaatcccggcaatcttcgcttccagtattattctgttcccggcgaccatcacgtcatggttcgggggcggtactggttggaactggctgacaacaatttcgctgtatttgcagcctgggcaaccgctttatgtgttactctatgcgtctgcaatcatcttcttctgtttcttctacacggcgttggttttcaacccgcgtgaaacagcagataacctgaagaagtccggtgcatttgtaccaggaattcgtccgggagaacaaacggcgaagtatatcgataaagtaatgacccgcctgactctggtcggtgcgttgtatatcacttttatctgcctgatcccggagttcatgcgtgatgcaatgaaagtgccgttctacttcggtggaacctcgctgcttattgttgtcgtcgtgattatggactttatggctcaagtgcaaactctgatgatgtctagtcagtatgagtctgcattgaagaaggcgaacctgaaaggctacggccgctaa

SEQ ID NO: 91752 - DNA, 435 bp, Enterobacter aerogenes
atgcgtttaaatactctgtctccggccgaaggctccaaaaaggcgggtaaacgcctgggtcgtggtatcggttctggcctcggtaaaaccggtggtcgtggtcacaaaggtcagaactctcgttctggcggtggcgtacgtcgcggtttcgagggtggtcagatgccactgtaccgtcgtctgccgaaattcggcttcacttctcgtaaagcaatgatcactgcagaagttcgtctgtctgatctggttcacgtagaaggcgatgtggtagacctgaacacgctgaaagcggctaacattatcggtatccagatcgagttcgcgaaagtgatcctgtctggtgaggtaactcgtccggtaactgttcgtggcctgcgcgtgactaaaggcgctcgtgctgctatcgaagctgctggcggtaaaattgaggaataa

SEQ ID NO: 91753 - DNA, 180 bp, Enterobacter aerogenes
atggcaaagactattaaaattactcaaacccgcagtgcaatcggtcgtttgccgaaacacaaggcaacgctgcttggcctgggtctgcgtcgtattggtcacaccgtagagcgcgaggatactcctgctgttcgtggtatggtcaacgcggtttccttcatggttaaagttgaggagtaa

SEQ ID NO: 91754 - DNA, 504 bp, Enterobacter aerogenes
atggctcacatcgaaaaacaagctggcgaactgcaggaaaagctgatcgcggtaaaccgcgtatctaaaaccgttaaaggtggtcgtattttctccttcacagctctgactgtagttggtgacggtaacggtcgcgtaggttttggttacggtaaagcgcgtgaagttccagcagcgatccagaaagcgatggaaaaagcccgtcgcaatatgattaacgtcgcgctgaatactggcaccctgcagcacccggttaagggtactcacacgggttctcgtgtattcatgcagccggcttccgaaggtaccggtatcatcgccggtggtgcaatgcgcgccgttctggaagtcgctggggttcgtaacgttctggctaaagcatatggttccaccaacccgatcaacgtggttcgtgcaactattgatggcctggaaaatatgaagtctccagatatggtcgctgccaagcgtggtaaatccgttgaagaaattctggggaaataa

SEQ ID NO: 91755 - DNA, 354 bp, Enterobacter aerogenes
atggataagaaatctgctcgtatccgtcgtgcgacccgcgcacgccgcaagctccaggagctgggtgcaactcgcctggtggtacatcgtaccccgcgtcatatttacgcacaggtaattgctccgaatggttctgaagttctggtagctgcttctactgtagaaaaagctatctctgaacaactgaagtacaccggtaacaaagacgcggctgcagctgtgggtaaagctgttgctgaacgcgctctggaaaaaggcatcaaagatgtttcctttgaccgttccgggttccaatatcatggtcgtgtccaggcactggcagatgctgcccgtgaagctggccttcagttctaa

SEQ ID NO: 91756 - DNA, 534 bp, Enterobacter aerogenes
atgtctcgtgttgctaaagcaccggtcgttgttcctgccggcgttgacgttaaagtcaacggtcaggttattacgatcaaaggtaaaaatggcgagctgactcgtactctcaacgatgctgttgaagttaaacatgcagataatgcactgaccttcggtccgcgtgatggttacgtagacggatgggctcaggctggtaccgcgcgtgccctgctgaactcaatggttatcggtgttaccgaaggcttcactaaaaagcttcagctggttggtgtaggctatcgtgcagcggttaaaggggatgtagtaaacctggctttaggtttctctcatcctgttgaacataagctgccggccggtatcactgcagaatgcccgactcaaactgaaatcgtgctgaaaggcgctgataagcaggtgatcggtcaggttgcagcagatctgcgcgcctaccgtcgtcctgagccttacaaaggcaagggtgttcgttacgccgacgaagtcgtgcgtaccaaagaggctaagaagaagtaa

SEQ ID NO: 91757 - DNA, 393 bp, Enterobacter aerogenes
atgagcatgcaagatccgatcgcggatatgctgacccgtatccgtaacggtcaggccgcgaataaagctgcggtcaccatgccttcctccaagctgaaagtggcaattgccaacgtgctgaaggaagaaggctttattgaagattttaaagttgaaggcgacatcaagccggaactggaactgactcttaagtatttccagggtaaagctgttgtagaaagcattcagcgtgtcagccgcccaggtctgcgcatctacaaacgtaaagatgagctgccgaaagttatggcgggtctgggtatcgcagttgtttctacctctaaaggtgttatgactgatcgtgcagcgcgccaagctggtcttggtggcgaaattatctgctacgtagcctaa

SEQ ID NO: 91758 - DNA, 306 bp, Enterobacter aerogenes
atggctaagcaatcaatgaaagcacgcgaagtaaagcgcgtggctttagctgataaattcttcgctaaacgcgctgaactgaaagctatcatctctgatgtgaacgcaaccgacgaagatcgttggaacgctgttctcaagctgcagactctgccgcgtgattccagcccgtctcgtcagcgtaatcgctgccgtcaaacaggtcgtccgcatggtttcctgcggaagttcgggttgagccgtattaaggtccgtgaagccgctatgcgcggtgaaatcccgggtctgaaaaaggctagctggtaa

SEQ ID NO: 91759 - DNA, 540 bp, Enterobacter aerogenes
atggcgaaactgcatgattactacaaagacgaagtagtcgctaaactcatgactgagtttaactacaattctgtcatgcaagtccctcgggtcgagaagatcaccctgaacatgggtgttggtgaagcgatcgctgacaagaaactgctggataacgcagcagctgacctgacagcaatctccggtcaaaaaccgctgatcaccaaagcacgcaaatcagttgcaggcttcaaaatccgtcagggctatccgatcggctgtaaagtaactctgcgcggcgagcgcatgtgggagttctttgagcgcctgatcactattgctgtaccgcgtatccgtgacttccgtggcttgtccgctaagtctttcgacggtcgtggtaactacagcatgggtgtccgtgagcagatcatcttcccagaaatcgactacgataaagtcgaccgcgttcgtggtttggatattaccattaccactactgcgaaatctgatgaagaaggccgcgctctgctggctgcctttgacttcccgttccgcaagtaa

SEQ ID NO: 91760 - DNA, 315 bp, Enterobacter aerogenes
atggcagcgaaaatccgtcgtgatgacgaagttatcgtgttaaccggtaaagataaaggtaaacgcggtaaagttaaaaatgtcctgtcttccggcaaggtcattgttgaaggtatcaacctggttaagaaacatcagaagccggttccggccctgaaccaaccaggcggcatcgtagagaaagaagcagctattcaagtctctaaccttgctatcttcaacgcggcaaccggcaaggctgaccgtgtaggctttagattcgaagacggcaaaaaagtccgtttcttcaaatctaatagcgaaactatcaagtaa

SEQ ID NO: 91761 - DNA, 372 bp, Enterobacter aerogenes
atgatccaagaacagactatgctgaacgtcgccgacaactccggtgcacgtcgcgtaatgtgtatcaaggttctgggtggctcgcaccgtcgctacgcaggcgtaggcgacatcatcaagatcaccatcaaagaagcaattccgcgtggtaaggtcaagaaaggtgatgtgctgaaggcggtagtggtgcgcaccaagaagggtgttcgtcgcccggacggttctgtcattcgcttcgatggtaatgcatgcgttattttaaacaataacagcgagcaacctatcggtacgcgtatttttgggccggtaactcgtgaacttcgtaacgagaagttcatgaaaattatctctctggcaccagaagtactctaa

SEQ ID NO: 91762 - DNA, 255 bp, Enterobacter aerogenes
atgaccgataaaatccgtactctgcaaggtcgcgtagttagcgacaaaatggagaaatccattgttgttgctatcgaacgttttgtgaaacacccgatctacggtaaattcatcaaacgtacgaccaaactgcacgtacatgacgagaacaacgaatgtggtatcggcgacaaggttgaaatccgtgaatgccgtccactgtccaagactaagtcctggacgctggttcgcgttgtagagaaagcggttctgtaa

SEQ ID NO: 91763 - DNA, 192 bp, Enterobacter aerogenes
atgaaagcaaaagagctgcgtgaaaaaagcgttgaagagctgaacgctgagctgctgaacctgctgcgtgagcagttcaacctgcgtatgcaggctgcaagtggccagctgcaacagactcatctgctgaagcaagtgcgtcgtgatgttgcacgcgttaagactttactgactcagaaggcgggtgcgtaa

SEQ ID NO: 91764 - DNA, 411 bp, Enterobacter aerogenes
atgttacaaccaaagcgtacaaaattccgtaaagtgcacaaaggccgcaaccgtggtctggcgcagggtacggatgttagcttcggcactttcggtctgaaagctgttggccgtggtcgtctgactgcacgtcagatcgaagcagcacgtcgtgctatgacccgtgcagttaagcgtcaaggtaagatctggatccgtgtattcccggacaaaccgatcaccgagaagccgctggaagttcgtatgggtaaaggtaaaggtaacgtggagtactgggttgccttgattcagccgggtaaagtcctttatgaaatggacggcgtaccggaagagctggcccgtgaagcattcggcctggcagcagcgaaactgccgatcaaaaccacctttgtaactaagacggtgatgtaa

SEQ ID NO: 91765 - DNA, 699 bp, Enterobacter aerogenes
atgggtcagaaagtacatcctaatggtattcgcctgggtattgtcaaaccatggaactctacctggttcgcgaacaccaaagaattcgctgacaacctggacagcgattttaaagtacgtcagttcttaactaaagagctggctaaagcgtctgtatctcgcatcgttatcgagcgtccggctaagagcatccgtgtgaccattcacactgctcgcccgggtatcgttatcggtaagaaaggcgaagacgtagaaaaactgcgcaaggtcgtagcggatatcgctggcgttcctgcacagatcaatattgccgaagttcgtaagcctgaactggacgctaaattggttgctgacagcatcacttctcagctggaacgtcgcgttatgttccgtcgtgctatgaagcgtgctgtacagaacgcaatgcgtctgggcgctaaaggtatcaaagttgaagttagcggccgtctgggcggcgcggaaatcgcacgtaccgaatggtaccgtgaaggtcgcgtaccgctgcacactctgcgtgctgacatcgactacaacacctctgaagcgcacaccacttacggtgtaatcggcgttaaggtatggatcttcaaaggtgagatcctgggtggtatggctgctgttgaacaaccggaaccggctgctcaacctaaaaagcagcagcgtaaaggccgtaaataa

SEQ ID NO: 91766 - DNA, 333 bp, Enterobacter aerogenes
atggaaactttagctcaacatcgccatgctcgttcttctgctcagaaggttcgccttgtagctgacctgattcgcggtaagaaagtgtcgcaggccctggatattctgacctacaccaacaaaaaagctgctgtactggtcaagaaggtactggaatctgccattgctaacgctgaacacaacgatggcgctgacattgatgatctgaaagttgcgaaaattttcgtagacgaaggcccgagcatgaagcgcattatgccgcgtgctaaaggtcgtgcagatcgcatcctgaagcgcaccagccacatcactgtggttgtgtccgatcgctga

SEQ ID NO: 91767 - DNA, 279 bp, Enterobacter aerogenes
atgccacgttctctcaagaaaggtccttttattgacctgcacttgctgaagaaggtagagaaagcggtggaaagcggagacaagaagcccctgcgcacttggtcccgtcgttcaacgatctttcctaacatgatcggtttgaccatcgctgtccataatggtcgtcagcacgttccagtctttgtttccgacgaaatggttggtcacaaactgggtgaattcgcaccgactcgtacttatcgcggccacgctgctgataaaaaagcgaagaagaaataa

SEQ ID NO: 91768 - DNA, 822 bp, Enterobacter aerogenes
atggcagttgttaaatgtaaaccgacatctccgggtcgtcgccacgttgttaaagtggtcaacccagagctgcacaagggcaaaccttttgctccgctggttgaaaaaaacagcaaatccggcggtcgtaacaacaatggccgtatcaccactcgtcatatcggtggtggtcacaagcaggcttaccgtattgttgacttcaaacgcaacaaagatggtatcccggcagttgttgaacgtcttgagtacgatccgaaccgttccgcgaacatcgcgctggttctgtacaaagacggtgagcgccgttacattctggccccgaaaggcctgaaagctggcgaccagattcagtctggcgttgatgctgcaatcaaagcaggcaacaccctgccgatgcgcaatatcccggttggttctaccgttcataacgtagaaatgaaaccaggtaaaggcggtcagctggctcgttccgctggtacttacgttcagatcgttgctcgtgacggtgcttatgtcaccctgcgtctgcgttctggtgaaatgcgtaaagtcgaagcagactgccgcgctactctgggcgaagttggcaatgctgagcatatgctgcgcgttctgggtaaagcaggtgctgcacgctggcgtggtgttcgtcctaccgttcgcggtactgcgatgaacccagtcgatcacccacatggtggtggtgaaggtcgtaactttggtaagcacccggtatccccgtggggcctgcagaccaaaggtaagaagacccgcagcaacaagcgtactgataaattcatcgtacgtcgccgtagcaaataa

SEQ ID NO: 91769 - DNA, 303 bp, Enterobacter aerogenes
atgattcgtgaagaacgtctgctgaaggtgctgcgcgcaccgcacgtttctgaaaaagcgtctactgcgatggaaaaaaccaacaccatcgttctcaaagttgctaaagacgcgaccaaagcagaaattaaagctgctgtgcagaaactgtttgaagtcgaagtcgaagtcgttaacaccctggtagttaaagggaaagttaaacgtcacggacagcgtatcggtcgtcgtagcgactggaaaaaagcttacgtcaccctgaaggaaggccagaatctggacttcgtcggcggcgctgagtaa

SEQ ID NO: 91770 - DNA, 606 bp, Enterobacter aerogenes
atggaattagtattgaaagacgcgcagagcgcgctgactgtttccgaaactaccttcggtcgtgatttcaacgaagcgctggttcaccaggttgttgttgcttatgcagctggtgcgcgtcagggtactcgtgctcagaagactcgtgctgaagtaactggttcaggcaaaaagccatggcgccagaaaggtaccggccgtgcgcgttcaggttctatcaagagcccgatctggcgttccggtggcgtaaccttcgctgctcgtccgcaggaccacagtcaaaaagttaacaagaagatgtaccgcggcgcgctgaaaagcattctgtccgaactggtacgtcaggatcgtctgatcgttgtcgagaagttctctgtagaagcgcctaaaactaagctgctggctcagaaactgaaagacatggctctggaagatgtgctgatcatcaccggtgagctggacgagaacctgttcctggccgcacgtaacctgcacaaggttgacgtacgcgatgcgactggtatcgacccggttagcctgatcgccttcgacaaagtcgtaatgactgctgatgctgttaagcaagttgaggagatgctggcatga

SEQ ID NO: 91771 - DNA, 630 bp, Enterobacter aerogenes
atgattggtttagtcggtaaaaaagtgggtatgacccgcatcttcactgaagatggcgtctctatcccagtaaccgttatcgaagttgaagcaaaccgcgttactcaggtcaaagatctggctaacgatggctatcgcgctattcaggttaccactggtgctaaaaaagctaaccgtgtaactaagccggaagctggtcactttgctaaagctggcgtagaagctggccgcggcctgtgggagttccgtctggcagatggtgaagaatacaccgttggtcagaacattagcgttgaactgtttgctgacgttaaaaaagttgacgtaaccggtacctctaaaggtaaaggtttcgctggtaccgttaagcgctggaacttccgtacccaggacgctacccacggtaactccttgtctcaccgcgttccgggttctatcggtcagaaccagactccgggcaaagtgttcaaaggcaagaaaatggcaggtcagctgggcaacgaacgcgttactgttcagagcctggacgtagtacgtgttgacgctgagcgcaacctgctgctggttaaaggtggtgttccgggtgcaaccggctgcgacctgatcgttaaaccagctgtgaaggcgtaa

SEQ ID NO: 91772 - DNA, 312 bp, Enterobacter aerogenes
atgcagaaccaaagaatccgtatccgccttaaagcgtttgatcatcgtctgatcgatcaatcaaccgcggaaatcgtcgagactgctaagcgcactggtgcgcaagtccgtggtccgatcccgctgccgacccgcaaagagcgtttcaccgttctgatctctccgcacgtcaacaaagatgcgcgtgatcagtacgagattcgtactcacaagcgtctggttgacatcgttgagccaactgaaaaaaccgttgatgctctgatgcgtctggacctggctgccggtgtagacgtgcagatcagcctgggttaa

SEQ ID NO: 91773 - DNA, 483 bp, Enterobacter aerogenes
atgcttaccgtcctccccttcttagtttgttattgtggattaaccctggcgttatgccggcaggacctgcttcgcggtcttcttcctgacagcctcacctgtcccctgctgtggagcggttttgttttttacctgtgtctggcgccgcagcggctagaggatgccgtctggggggcaattgcaggctatctcatttttgccctgctctactggctatatagggtgtttcgcggctatgagggattaggatacggcgacattaaatatcttgccgccctcggcgcctggcacggctggcagaggttgccgcaactggtgttggccgcatcgctgcttgccgggatggcatgggtgatattggcgttgttcaggaggagtaagcaacaacgatggggtttgaacaacccgctgccgtttgggccatttctgactgcagcgggtttttggtgcgggtggcagacgttcgctagtctgacactttga

SEQ ID NO: 91774 - DNA, 477 bp, Enterobacter aerogenes
atgaaaggtgatgtcaaaatcataagttatctcaataaattattgggaaacgaactggttgctattaaccagtattttcttcatgcaagaatgttcaagaactggggcctgatgcgcctcaacgatattgaatatcatgaatctatcgatgagatgaaacacgccgataagtacatcgagcgtattttgtttcttgaagggctgcctaacctgcaggatcttggcaaacttggcatcggtgaggatgtcgaagagatgctgcagtctgacttacggctggagctcgaaggcgcgcaaaacctgcgtgaggcaatcgcctatgccgacagcgttcatgattatgtcagtcgcgatatgatgattgaaatccttgccgatgaggaaggccatattgactggctggaaaccgagttagatctgatcggcaaaatcggtctgcaaaattaccttcaatcgcagatcaaagtgtcagactag

SEQ ID NO: 91775 - DNA, 195 bp, Enterobacter aerogenes
atgtacgtttgtttgtgcaatggcgtaagcgataaaaaaatccgtcaggttgtgcgtcaatttcaaccgcaatcttttcaacaattacgcaagtttattcccgttggaaatcaatgcggtaagtgcgtccgcgcggcacgtgaagtgatggaagatgaattaaccagcatgccggaattcaaagaaatcgcctga

SEQ ID NO: 91776 - DNA, 1122 bp, Enterobacter aerogenes
atggcttatcaactcaacattaactggcccgagttcttagagaagtactggcaaaagcagccggtcgtattaaagaaggcgttccctaacttcatcgaccccattacgccagacgagctggccgggttagccatggaaccggaagtcgatagccggctggtcagcctggtcaacggtaagtggcaggccagtaacggtccttttgaacatttcgatgggctgggtgaaaacggctggtccttgctggcccaggcggtaaaccactggcatatgcctgccgccgaactggtgcgcccattccgcgtactgccggactggcgtttagacgatctgatgatctccttctccgttccaggcggcggcgttggcccacatatcgatcagtatgacgtctttattattcagggcatgggcagccgccgctggcgcgtgggtgacaagctgccgatgcgtcagttctgtccacatccggcgctgctgcacgttgatccgttcccgccgattattgatgaagatctggagccgggcgacatcctctatattccgcctggattcccacacgacggcgtgacccacgaaacggcactgaactactccgtcggcttccgtgggccaaacggccgcgacctgatcagcagcttcgccgactatgtgctggaaaacgacctcggcggggaacactacagcgatccggacctcacctgccgcgaccatccgggccgggttgaagagtatgaactcgaccgtctgcgcaacatgatgatcgacatgattcgccaacccgaagacttcaagcagtggttcggcagtttcgtcaccacgccgcgtcacgaactggatattgctccggcggaaccggcatatgaagaagaggaagtggtcgatgcgctgctgggcggcgaaaagctttctcgcctgagcggcctgcgcgttctgcatatcggcgacagcttcttcgtgcatagcgaacaactcgacactaccgatgccggcgcgctcgatgcgctatgtcgctatacctcgttaggtcaagaagagctcggcagcggcctgaaaaatccggcgttcgttagcgaactgacgcgcctgattaatcagggctactggtatttcgaagagtaa

SEQ ID NO: 91777 - DNA, 1443 bp, Enterobacter aerogenes
atggccgctaagcgccccttttcgttggccacccggctgaccttctttattagcctcgccaccatcatcgctttctttgccttcacctggatcatgatccattcggtgaaggcccactttgaagagcgcgacgttcacgatctcaagcagctcagcaccacgcttgagacggtgctcaaccacgccgactatccgcaggagcggcggctggagatcttaaaaaacgtgattggcggctacgctaacgtctttatctgtctggatgatgccgagggcaatatcttatttcagtcgccagacggcccggaactcagccatattatgagtacgccgggtctggcgatgaagttgcgcgatggtaatgtgatttcatggaccgacccgcagccgcgggaaatggttcatgataatcatcaaatggagacccgctcctggcggctaatcatgttgccgctgggcaagcaggcagatggcaaaccggcctggcatctgctgatggccttatcgatcgactttcacctgcactatattaatgagctcaaagcaaagctgatttccgcggcgtcgataatcagcctgctgattatcgccatcgtgctgtttgtggtctatcaggggcataagccgattcgccaaatcagccgccagatccagaatattacctcgcgggatctcgatgtacgccttgacccacaggcggtgcccatcgagctggagcggctggcgctgtcgtttaaccatatgctggagcgcatagaggatgtctttactcgccagtcgaacttttccgccgatatcgctcatgaaatccgtacgccgattaccaacctggtcacgcaaaccgaaatcgccttaagccagagccgcagccagcaggagctggaagaggtgctctattccaatctcgaagagttcttgcgcatgtcgcggatggtcagcgatatgctgttccttgcccaggcggataataaccagctgatccctgaacagcgggcgctggatctggccgaggaagtgaataaggtatttgagttctttgaagcgtgggcggaagagaaagaggtggcgctgcgttttgtcggtagccactgccgggtgattggcgacccgctgatgctgcggcgggcaatcagcaacctgctgtcgaacgcgattcgctatacgccggccgggcaggcggtgaccattcagttgagcgaaagcgccgagaagattcgcctggtggtggagaaccccggcgcgccgattgccgccgcgcatctgccacgcctgtttgatcgtttctatcgcgtcgacccctcgcgccagcgcaaaggcgagggcagcggcatcggtctggcgattgtaaaatcgattgtcagcgctcaccacggcagcgtagcggtgcagtccgatctgcgctccactcgctttattatcgtgttgccgaaatatgcgcaataa

SEQ ID NO: 91778 - DNA, 684 bp, Enterobacter aerogenes
gtgaagattttgattgtcgaagatgagaagaaaaccggggagtatctgaccaaagggcttaccgaagccggattcgtcgtcgacctggccgacaacggccttaacggttatcacctggcgatgaccagcgactacgatctgctgatcctcgatatcatgctgccggacgtcaacggctgggatatcgtgcgcatgctgcgcgccgccaataaagggatgccgatcctgctgctcaccgcgcttggcactatcgagcatcgggtgaaggggctggagctgggcgccgacgactatctggtaaagccctttgcttttgcggaactgctggcgcgggtgcgcactctgctgcgtcgcggggcggcggtaatagtagaaagccagtttcaggcggccgatctcagcgttgatttggtgagccgcaaggtgacgcgtggcgcgactcgtatcaccctgaccagcaaagagtttaccctgctggagttcttcttgcgccatcagggcgaggtgctaccccgctcgctgatcgcgtcgcaggtgtgggatatgaatttcgacagcgacactaacgccatcgacgtggcggtgaagcggctgcgcgccaaaatcgataacgacttcgagccgaagcttatccagaccgtgcgcggcgtcggctatatgcttgaggtgccggatggccgctaa

SEQ ID NO: 91779 - DNA, 1386 bp, Enterobacter aerogenes
atgcgcccaataaagcttcttactctcagcgtgatattcgccttaaccggctgtttgtcacttgctccggactaccagcgccccgccgcgccggtaccacagcagttctctctcagccagaacaaactggttaccgcgacggcgggctaccaggagaccggttggcgcacctttttcgtcgacccgcaggtgaaaagcctgattagcaccgcgctgaccaacaaccgcgatctacggatggcgacgctgaaagtgcaggaagcccgcgcccagtaccgggtgaccgacgccgaccgctacccgcagcttaacggcgacggcagcaccacctatggcggcaagctcaaaggcgacaccatcaccaacagcgattatgccgccggcttgaatctcagctacgacctcgacttctttggccggttgaaaaaccttagcgaggccgaccggcagaacttcttcgccagcgaagaagcgcggcgcgcggtgcatatcctgttgattgctaacgtttcacaaagctacttcaaccagcggctggcggcggcgcagctgcaggtggcgaacgacaccttgcagaactatcagcagtcttacgccttcgttgaaaaacagctgctgaccggcagcaccaccgttctggcgctggaacaggcgcgcggcatgatcgaaagcacccgcgccgatatcgccaaacggcaaggccagctggcggaggccaataacgccctgcagctactgctcggcagctatcaacggctgccggacgataacgccagcagcgcggtggacctgaaaggcgtaaccctgccgccgtcgctctcctcagagatcctgctgcagcggccggatattttagaggccgaacacagcctgctggcggccaacgccaacatcggcgccgcgcgggcggccttctttccgtcgattaccctgaccagctcgctctccggcagcagcagcgagctctccagcctgtttaacgccggcagcgcgatgtggaacttcatccctaaaatcgaactgccgattttcaacgccgggcgcaatcaggccaaccttgacctggcggagatccgccagcagcagcaggtggtcaactatgaacaaaagattcagtctgcctttaaagaggtggccgacgcgctggccctgcgccagagcctggccgatcagattgccgcccagcagcgctatctcgcctcgctgaatatcactctgcaacgcgccaccgcgctctatcgtcacggcgcggtcagctacatcgaagtcctgagcgcccagcgcgacatttttaccacccgacaaaccctgctggaactcaactattcccgtcaggcgaatgaaatcaccctgttcaccgccctcggcggcggctggatggaataa

SEQ ID NO: 91780 - DNA, 345 bp, Enterobacter aerogenes
atgaattcactttctaaaatcgccctgttcaccctgttctctggcgcagtgttcgcggcccaggccgccgacccgcacgccggtatggcaatgcacgagcagcccgctggcgcgcagacgcaaagcatcactggcaaaggcgtcattaaagccattgatatggatagtaaaaaaatcactatcgcccacgaggccatcccggcggtgaactggccgccgatgaccatgcgcttcaccatcacctcgcaaacgcagctcaacaatgtgaaggacggcgacagcgtggacttcaccttcgttcagcagggcaatctgtcgctgttacaggatatccgcgcccaataa

SEQ ID NO: 91781 - DNA, 1263 bp, Enterobacter aerogenes
atggcatccctgacactgaaaaatacggcgctgatcctcggcagcatggtaattggcggcgcgcttaccgcggcgctgtatacccgactgacgccgacaatggatagcgctccggcggccgagcagcagcgtaaagtgctgttctggtacgacccgatgtacccgaatactcgctttgataaaccgggtaaatcgccgtttatggatatggacctggtgccgaaatacgctgatgaggagagtgccgccgccggtgcgccgggggtacgtatcaacccgacgcagacccaaaacctcggcgtaaaaaccgccgcggtcacccgcgggccgctgcgctacgcccagaccttcccggccaacatcagctataacgagtaccagtacgtgattatgcaggcgcgggcggcgggctttatcaataaagtctctccgctgaccgtaggcgacaaagtcaagcaaggcacgccgttactcgagctgaccatcccggactgggtggaagcgcagagcgaatatcttttattgcaggagaccgggggcaccgctacgcaggtcgaggggatcctcgagcgtctacgcctcgccggaatgccggatgatgatgtccgccgcctgaaaaccacacgtaaaatccagacccgctttaccctcaaagcaccgatcgatggcgttattaccgccttcgatctgcgcgcaggaatgaatatcgccaaagataatgtggtggcgaaaattcagggcatggacccggtgtgggtcaccgtggcggtgccggaatccatcgcctggctaattaaagacgcctcgcagttcaccattcaggttcccgcctggccgggaaaaaccttcagtatcaacaaatggaccattctccccagcgtcgatagcgccacccgtacgctgcagctacgcctgcaggtcaacaacccggatgaagcgctgaagccggggatgaacgcctatctgaaactgaccagcgaaagcgcgccgatgctgctaatcccatcaaaagcgttgatcgacagcggcagcgagcagcgagtgattaccgtggataacgagggccgcttcgtgccgaaaatcgtgcaggcattccatgaatccaatggagtcacggccattcgcagcggtctgcaggagggcgaaaaagtcgtcgccagcggcctgttcctgatcgactcggaagccaatatctccggcgcgctggagcgcatgcgcgcgcaggctcctgatgtcacggctcctaccgcccactcgcactga

SEQ ID NO: 91782 - DNA, 3150 bp, Enterobacter aerogenes
atgattgaatggattatccgccgctcggtggccaaccgcttcctggtgatgatggcggcgctgtttctcagcatctggggaacctggaccatcatccacaccccggtagacgccctgccggacctctccgacgtgcaggtaatcgtcaaaaccagctacccgggacaggcgccgcagatcgttgaaaaccaggtcacctggccgctgaccaccaccatgctgtcagtccccggcgccaaaacggtgcgcggcttctcgcagtttggcgactcctacgtgtacgtgatttttgaagacggcaccgatccttactgggcgcgctcgcgggtactggagtatctcaaccaggtgcagggcaaactgcccgccggggtcagcgccgaaatgggccctgacgccaccggcgttggctgggtcttcgagtacgcgctggtcgaccgcagcggcaaacatgacctcgccgaactgcgctcgttgcaggactggttcttaaaatatgagctgaaaaccattcctaacgtctcggaagtggcttcggtaggcggcgtggtcaaggagtatcagattgtcgtcgacccgatgaagctgacccagtacggcatcagcctcggcgaggtgaaatcggcgctggatgcgtctaaccaggaagccggcggttcttccgtcgaactggcggaagccgaatatatggtgcgcgccagcggctacctgcaaacgctcgacgacttcaaaaatatcgtgctgaaaaccggtgacaacggcgtgccggtgtatctcggcgacgtcgcgcgggtgcagatcggcccggagatgcggcgcggtatcgccgagcttaacggcgaaggcgaagtggccggcggcgtggtgatcctgcgctccggcaagaacgcccgcgaggtgatctcggcggtcaaagagaagctggcgtcgctgcaaagcagcctgccggaaggggttgaagtggttaccacttacgaccgcagccagcttatcgaccgcgccatcgacaacctcagctacaagctgctggaagagtttatcgttgtcgcgctggtctgcgcccttttcctgtggcacgtgcgctcggcgctagtggcgattatctcgctgccgctcggcctgtgcttcgcttttattatgatgcatttccaggggcttaacgccaacatcatgtcgctgggcgggatcgccattgcggtgggggcgatggtcgatgccgccatcgtgatgattgagaacgcccataagcggctggaagagtgggaacatcagcaccccggagagaagctaagcaacgacatccgctggaaaatcattaccgatgcgtcggtggaggtcggcccggcgctgtttatcagcctgctgatcattactctgtcgtttatcccgattttcaccctcgaaggccaggagggcaaactgttcggcccgctagccttcaccaaaacctggtcgatggccggggcggcgctgctggcgatcgtggtgatcccgatcctgatgggcttctggatccgcggcaagatcccggcggagaacagcaacccgctgaaccgctttttgatccgcatttatcacccgctgctgctgaaggtactgcactggccgaagactaccctgctgatcgcgctcctgtcgatcctgacggttatctggccgcttaaccgggtcggcggcgagtttctgccgcagattaacgaaggcgatctgctgtatatgccgtcaacgctgccggggatctccgctgcgcaggcggcggatatgctgcagaaaaccgataagctgatcatgacggtgccggaagtggcgcgggtgttcggcaaaaccggcaaggccgaaaccgccaccgactcggcgccgctggagatggtagagaccacgattcagctcaagccgcaggatcagtggcgaccggggatgaccatggagaagatcgtcgaggagctggataaaaccgtgcgtttgccggggctggcgaacctgtgggtgccgccgatccgcaaccgcatcgacatgctctccaccggcatcaagagcccgatcggcattaaagtttccggcaccaacctggccgatatcgatgccatcgccgaacaaattgaagtggtggcgcgcaccgtgccgggggtcacgtcagcattagccgagcggctggtcggcgggcgctacctcaacattgatattcggcgtgagaaggcggcccgttacggcatgaccgtcggcgatgtgcagctgttcgtctcgtccgccatcggcggcgcgatggttggcgaaacggtagagggcgtcgagcgatatccgatcaacatccgctacccgcagagctatcgcgacagcccggagatcctccgccagttgccgatcctcacgccgctgaagcagcagatcgtgctcggcgacgtcgccgaggttaaagtcgttaccgggccatcgatgctgaagaccgagaacgcccgcccgaccagttggatctacatcgacgctcgcgaccgcgatatggtctcggtggtgcgcgatctgcagcaggccatcagcaaagaggtgaagctgaagccgggtatcagcgtctcctactccgggcagtttgagctactcgagcgcgccaatcagaagctgaagctgatggtgccgatgacgctaatgattatctttgtgctgctgtacctggcgttccgccgcttcggcgaggcgctgctgattatcaccagcgtgccgttcgccctcgtcggcgggatctggttcctctactggatggggttccatttgtcggtggccaccggtaccggctttatcgccctggccggggtagcggcggagtttggcgtggtgatgctgatgtatctgcgccacgccattgaggcggagccatcgctggagaacccgcagaccttcagcgccgataagctcgatgaagcgctgtatcagggcgcggtactgcgcgtgcggccaaaggcgatgaccgtggcggtgattatcgccggcctgctgccgattttatggggcactggcgccgggtcagaagtgatgagccgtatcgccgcgccgatgattggcgggatgatcaccgcgccgctgttgtcgctgtttatcattccggcggcatataagctgatgtggttgtaccggcatcggggcaagcgcggagaataa

SEQ ID NO: 91783 - DNA, 813 bp, Enterobacter aerogenes
atgaacctgaatccttctccaccctgtttatttttgctgttattactttccaccctgagcacgatatccccctgccatgccacgacagtaaaggtggataattgcgaagttggctgcccaaccggcggcagccaacagacgcttttccgcgcggcctacacgctgaacaataaccccagtcgtaaactggccaactgggtagcgtataaaatcacccgtgccagcgaggccagcaaccgggcaagagtgtggaagcaggaccccgatttacccgcagccgataccctggcgcccgccgactatcgccgggccaacactttactggcggtcgatcgcggccatcaggcaccgctggcgagcctcggcggcgtggaggactggcctgcgctgaactatctgtcgaatatcactccgcaggaagcggcgctgaatcagggggcatgggctcggctggaagacgcggagcgcgcgttggccgagcgcccggaggtgacggcggtttatgcggttaccgggccgctgttcgagcggcatatcgccaccctgcccgccgcgccgggtgtggagatccccagcggctactggaagattattttcctcgataatggtccgcagagcggccagtacgcggcatttgtgctggaccaggcaacgccgcgcgatgctaatttttgcgaccatcaggtgacggtggcggagattgagcgccgaaccagtccgcatttgacgctgtggtcggcactgccggcggccattgccacaacgctaaagactttgccggggacgctggcgcgggaaatgggttgccggtaa

SEQ ID NO: 91784 - DNA, 345 bp, Enterobacter aerogenes
atgaagctcggttatttttgttacttcctgctggcccttgccgccgtcggcagcgtgttactgccctattccatcgccatgtggttcctgctggcgaacgtgctgacctggcttatctacggcatcgacaaattagccgcccgtaaagcctggggccggatcccggaatccaccctgctggccttcggcctgcttggcggatggccgggcgcgattgccgggcagcagtgttttcgccacaaaacccagaagcagccattcagaacatatttcattattagcatcgtactgaatgttgtggtgctggttggcgggtattggctgtaccgggattatggggtgtag

SEQ ID NO: 91785 - DNA, 264 bp, Enterobacter aerogenes
atgcgactaatcggcaagcaaaggcttcaagtgctaagtggtactaaccctgaaacggatgtttggctttccgcttgggttgcagagctcactaacgcttactggaaagatgctaagggagttttagatgctttccccagagcacaacagattgataatttgtgctatgtgttctttgttcgaggcattaaatcgcagggcataaaagtaacatttcagtttgaaaggagcattgcggtgattaaccaggtggtatctaaatga

SEQ ID NO: 91786 - DNA, 1230 bp, Enterobacter aerogenes
atgagtaaacttactgaagttcgggttattcgaactgaagaacaatatcatgcggccctttcagaagttgagagattactcagattggaacttcctgcaggttctgaagaatcagaacgtcttgatttacttatagttgttattgaaaattatgaaaatgctaactatccagtaacaccggtagatccaatcgaggcaatcaaattccgaatggacgaacagggcttacgccaagcggatctgaccccatattttggaacaaaaagtcgtgtatcagaggtgttatcgggaaaacgtcctttaaccgttgctatgatcaaagccttatcaataggtttaggtatgtctcctcaaacgttattgggcttagaaacagaaactggatatgcaaatcgttctccagttgaggaggttaattggtcaaaatttcctataaaagaaatgctttccaaaggttggatagaaaatgttgtctcgcaaacaaagacgacaacagaagaaaaagtcaaaaatttcattgagggtttgggagcgaatttttctacagcagccttcaagcgaacacttaacggagagtcttactcacctacaactgtttataaattacatgcatggattgcaagagttgtccagaaagctagggaaaaaaacctcgctactaaatttaggcaagatggcataactaaagattttttaaaagagatcgcacatttaagttggtccgaatatgggcctctattagcggtggagttcttagaaaaaaatgggatttgtgtgatcattgaaccttgtctgactggtactgctgttgatggggctgctctgagggatattgacggtagaccaattattgcactcactttaagacaagatcgtttagataatttctggtttacacttttacatgagttagtccatatctggaaacatgcagattctactaacacatttatcgatgatattgaaacactcaagaatagtacagacaaaatggaagcagaggctaatcggatagccagagatactctcattcctcgcgtcatttggaaacggagttcagcttacttaaatcccagcacaatcacgatagatgagctttcaagagaattaagaattcatcctgcaataatagcaggaagaattagaagagaaactggaaaatacaatcaattttctgatttagttggtcaaggtgaagtaagaaagcatttccctaatcatatttggtag

SEQ ID NO: 91787 - DNA, 747 bp, Enterobacter aerogenes
atgtaccctaaatatatgccgattttaaaagctaagaaaggtgagttagatgccattgagtctatgcttccttatccccacgttataagggacatgcttccgatttttgaaatcccatatctgtcgaaaaaacagagagcaaataaaaaatattctaacataggtaatcctgttgagttttttctaaacaatacaattaaaacattgtccgaaagaatgcaaaagctccctatggggattgacataagcagatggcctccaaactcttctcttgaaacaggggagcatattttaagtcatctcaccagtgccttaagaaatgctgggtgcaatatcattcctgtcgtcggttatgaccgatgggaagatgatgagtatgcaactactttgcaacaattaggtacaagctatactgactttgtaattcggttaaactcttttgcttttgaagatatgatcgaagaagaaccgtttattgaaacaatagaaggtattttaacctcgctgggtgcaatgccagaaaattgctctgtcatgatagatttagaagatattactaaaacatcaatagttgatctaaatgaaacagtacagagagcactggattcattgtacaagtataattttaaatttatttcaattgcgggaagttcaataacaagtgatattaatggaatggttcctacccacaattcagaaggtatagttattcgtaaagaagctaaggtatggaaagcattcaaataa

SEQ ID NO: 91788 - DNA, 219 bp, Enterobacter aerogenes
atgcaagatttatgtaaaatactggtttcatccccccattataaaggtgagcaatttagctggggtgataaaaagatttatgaatgtgccaatgaagaatttgttggtaatactacgaattgggtatcaattgatactacacatcatgtaactcatgtagttgcagaagttagagagttcgaattgattatccagtatcaaagagagcatcaaaattaa

SEQ ID NO: 91789 - DNA, 1650 bp, Enterobacter aerogenes
atgtcagtgagttataatatttacaggatgccatgtaagctcttgactgagttgacaaagaaaataactaaagaaggacttgttgagcaaaaaactatatcgcataaggcttatcaacttaagttttatttctctgataaattaaaagggaatgaagtttggtggtgggaagtttttagtgatttctttaacgaaaaaactaaaaagccacataatatattttattttggtctgctaataggatttaaagaaaaagaccctgaaaattgttatcttattagtcttggtaagtcgcatttttatcttagcaaatttatagaagctgacttcggactaaatgtagcaatgcgtatagctaatgatgagaacatcttgctgaagaaaagcagattcttttgtggaggtaagagtcaggaggcgtcatcatattcaaaatttgtgcaaggatcatattttcctggtgaatcaattgaacatcttaaaacgaaggcgaaagagactgataagtggggaagtaataacattactttttcagactcaatccaactaagtttagatggagatcctactgcattggttgatgtattcgacgatatagattcttcattagcaactaaggaaataattgaatttcctaaatccgaaaaaataactgacgaattaaaaatagaagagcttgacaagtgccttctgaattcaattctcacaggtgacgcaaatgttattatagatgaaattcagtcttttggtgcctctattataataaataacgctttgacacactttaaattgcacacaaaaattgagggaagtagcaagtatgatcaatcaacaaataaagtaaatgatataaaaatgacagatataaaggagtttttcgataaaaatgccataaaagatattaataaagtttatgttaaaataaccaatgatgctaataatggacacactgcatccctgaaagaaattcttagcattacttacactgaaggcagcgagcactacttccttaaaagaggtaattggaataaatttaatgctgcttttatgaaatacctttctaattccttaaaaaacataacttttgaaattaaagatgatcttaaggaagttgaattcaatacatggcaatcaattaaagcacagcaaatcactcaaggtaattctaaagataaattggattacagggagtattggttcaatgagaaaatggccaatgagcaaggctataagctattagacagacagcttacaaaaatcacttcaataagtgaggtagggaaagattataatgtcgaggttgcagacctatataaaaatggggagttaattgccgtaaaaatatccgataaacctcatgatctaatatataatattcagcagtctataacaaccatccaaactatacaaaggggggcaatagaatttaaaagctccattaccgatgttgtgttatggatttccactacaaaaaaagttaaaaatttaatagatattaattctattcagtttttattagctatacaaacttggaaagaaattattgaagggtttaatttaaagccaaaaatatattactcccatcacgaaaaacccaaacctccccaaaaaaaccaaaaagcaaagaaaaagacaggggggaaagcatag

SEQ ID NO: 91790 - DNA, 654 bp, Enterobacter aerogenes
atgaaaaaatttaatttcgctgctctgcttccgggatttttagcactcaataattctgtatgggcaagtgattcttccactggagcgagtgatttgccaggcatgactcttaatgagcatgatttagtcatagctccacttaacacggaagtacctttctacattgcagggcaccgtagtcatagctcccatcgaagccatagttctcatagatcttcgtctggtggtgggtactatggtggaagcactccttattatcctaaaacatacagttcaccaagctcatcaggttcatccagttcagggacaagttcgtcatcgtcttcttcatctattcgttcgcttcgctctaatgacatggatacctctacgaccacaaactctaatggaacgaatggaacgaatggaacgaatggaaataaccgttcaagtagtggggtggcttctgatactgaaaagcgtaaacgtttaatcatgcgagtacagtttgcgttactcgataaggggttctataacggcaatatagacggaagcatgggacctgcgacacgaactgctatcaagaattacagaattgcaaacggactccccacaccggcaagggaaaccttggatacacagttgctaaattcattgaatatattggctcgataa

SEQ ID NO: 91791 - DNA, 1113 bp, Enterobacter aerogenes
atgtctgaggtgctgagaaacgacattttcagatttacggcagatctgccagttcagcaaggtttctatcgcttgtgcaaatctaagcccgaaaatcctcaattctatctgccaaatttactggtcagtgaaactgaactcgattccagacttcctgcatattttgcagactacgttgtgagcactaatcttttcaattccatagaagatggtgatatagggattgttaacaacggaaacatgattagggtgattttgtcacggagagcaaaccataacactgttctggtaactgaaaggtgcaataacagttgccttttttgttctcagcctcctaagacaggaaacgatgactggcttcttaaccagtcagcacttgccatcgcctctttctccctgaatggtgtagtaggagtgagtgggggagaacctctactgtatggcgaagatttcctgcaatttctggacttcataatcgaaaactcacctgagacagctttgcatgttttgacaaatggacgaaagtttgcagatgtcagttttactgaacagatgaaagagcgaagcgaaaagctcaaaataactttcggtattccgctttattcttcaaggtcgtcagttcatgactatctggttggaagcgagggggcatttgatgagacagttagggggcttatcaatgccggtaactcaggaatcaacattgagttaagaatcattcctacactggctaactatatggaactggacaaaatcatagagttcgctggtcgcgtgttctccaatatcaaccagatttctcttatggggttagaatccattggctgggcacgtaaaaactggtcatcaatcttcattgagcatgatagctatagtgagaaaattctctctgccataggaacagcacaaaggtcaggtatccccctgacaatcttcaattacccattgtgccatcttcctgaaagagcttggagatttgctactcagtcaatttctgactggaaaaattactatcccaaagaatgtgatgaatgtactcagaagtcttactgtgctggttatttcagttcatcaaaaggccgttttcatcaaccaccgagaccaattttatga

SEQ ID NO: 91792 - DNA, 1389 bp, Enterobacter aerogenes
atgagactcatgccttttaacttcgacaggatgcctgacggccgggtattcatcagcaacctcgctggctttcatcattttgtaggtgagcaagaatttttcgatctcgtaaacggtcatatcagcctggagcagtcctcatcgcttgaaagcaaacttttcgtttgcggagaggaatcttcatctgttacccctcatgcactaagttcggcttttgccaaacgactcatgaatgaactggcggtcaggccaatcttcatgattgtacctactcttcgttgtgatcatacttgcaaatattgccaggtcagtagggcatcggtcacaacttatggttatgatctcaatcctgaactgataccgcaaattgtcaacactataaagaaactgggtacacctccctataaaatagaagtacagggcggtgaaccacttctccggttcgatcttgtccagtcaatctatcacgagtgcgagatttcattgggtagtggtgctttcgaaatggtaatagctacaagtctgtcattactcgatgaaagcatcctctcatgggttaaagagcggaatatcaccttctctgtctctcttgatgggaatgaagccgtccataacaagaatcgccttcttactgactttcaggctcacaacaaagcagtaacaggtattcggaaaatcacagaagagcttggagcaaaccgggttgcaactgtcaccactgttactaaggaactgacaaaggagccagcttccatagtagatgctcatctgtctctgggtcttacagacatgtttatcaggcctgttagcccttatgggtttgctcagaagcagagcttcactttttcaatgccagagtattttgctttttataaagagttgatgcaggaagtgttgattcagaatgaaaagggaatacctgtcattgagcactcggctgctattcatctcaagcgaattttcaatccaggcttcagtggttatgctgatctaaaatcgccaagcggagtcgtgctgaactgcatcctgttcaattatgacggtaaagtctacggtagtgatgaaagtcgtatgcttcagaaagtaaacccggaagcagatttcagtgcaggagagtttgcctcactctcatttattagcaacgaattctaccgttccgctctctcatcttcatttaacttcgccatgccaggttgtgacacctgtgcataccagcctttctgtggagcagatccttgccagaacattagtgttcatggcgaacctgttggtgacaagagtcgttctactttctgccagtatcacaaaggtatgttccgcttccttctgaatgaaatctctcaggatggaccgatggcaaagatgcttaaagggtgggtttatgtctga

SEQ ID NO: 91793 - DNA, 276 bp, Enterobacter aerogenes
atgtgggaaaagatattacaaaaaaatctttattctgaatgggttatccgaaacaccctatactggatgactcctgtaagtccatggaaacttgaagaaaacacatcctcgtggattatcttctttgagatagaagatcctgaatgtgagtttgaattcgaaaggctgttaaacgattttagcctgcgtgagaaacttcaccatcaaactggtcagttgcgtgatgccattatcagcaaggttctccgaagcatagatgacaggcttgcaaaatga

SEQ ID NO: 91794 - DNA, 999 bp, Enterobacter aerogenes
atggataatattgtaaaattaatatcaccaaagagattaaatgtttataaaacatacttcaatgcaactacagaagagcaatgccttggtctatacatttggaatcaaaaattaagcaatgtattcaattcaatcattcatataattgaagtttcattaagaaattctattatgaatacaatcaatgaaaaaaaaccaaccttgagtggtgagggttttatatcctactttcgaagtcttgatgaaaataatgaatctaggaaacagattgaatacgcatacggcaaatgtcataaaaaaaacaattacactactgacgatttaattgcattacttccgtttggattttgggcaaatatttgctcacaagaacacaatgaatcgaacgaaggctcgctacaactatggccgacatataaagatgatatatttccagatacagatttatcaattggggaaatatataaaaacatatcagtagtaaatatactcagaaatagaatatcccaccacgaagtcatatggaaagataaaaatgcattaaaccaagacggactaataaataaagtcattgataattataaatcatgtcttgaagtagcaaaaagcatacacattgataacttaaaacttatagaattaattgaaggtaaagttttattagaggatttatgcaaaacctctacaatagataattatacaaaactaataacagacattacaaaagtcagcgtcatcgacattccagaatttgtaaaagcaaatagaaaagaaacaattttcaaaggggaagtgacatctgtcaactctaatgcaacatatattaaaaacaataaattaagagattccgacgataaaaagataaaatttagaatggataacgaaattagaataaaaataggcccacttaaagttggcgatatagttacctttgaaccattcgtgataagaaatgacaaaggaaagttttacattgcaaaaaaagtaacattattataa

SEQ ID NO: 91795 - DNA, 321 bp, Enterobacter aerogenes; identical to SEQ ID NO: 5987

SEQ ID NO: 91796 - DNA, 450 bp, Enterobacter aerogenes
atgaaaaaattgatactcgccgccgctgtggcaggggctgttttattgtcgtccgccgcgcaagcgcagacaacgccggaaggttatcaactgcaacaagtgttgatgatgagccgacacaacttgcgcgcgccgttggccaataatggcagcgtgctggagcagtccacgccgaatcagtggccggagtgggatgtgcccggcgggcagctcaccacgaaaggcggtgtgctggaaatttatatgggccactacatgcgagaatggctggcggagctggggatggtcacgtcaggcgaatgcccgacgccggacacggtatatacctatgccaacagtctgcaacgcaccgttgcgacggcacaattctttatcaccggcgctttccctgggtgcgacattccggtacatcatcaggaaaaaaatgggcacgatggacccaacgtttaa

SEQ ID NO: 91797 - DNA, 486 bp, Enterobacter aerogenes; identical to SEQ ID NO: 5988

SEQ ID NO: 91798 - DNA, 486 bp, Enterobacter aerogenes; identical to SEQ ID NO: 5989

SEQ ID NO: 91799 - DNA, 696 bp, Enterobacter aerogenes; identical to SEQ ID NO: 5990

SEQ ID NO: 91800 - DNA, 1131 bp, Enterobacter aerogenes
atggccgctaaacgtaccatgctctggctgctggtgtggcgggcgctgcgtctgcgttttcagcgggtcagcgtggtgtttgccgcgctgatggtgggagcgaccatcgtgacggcgctttttgccgtctggttcgacattaacaccaaaatgagcgaagaactgcgcaccttcggcgcgaatttttacatcgggccggggcacggttccagtatgccgcagcaggagttgcagagcattctcgatcaggcgccgcaggggctggtgcatggcgccagtccgtggttgtacggcatggcgcgtaccgagctggaaaaagtggtgatggttggcgtgtggttcgagtcgctgcaaaaactggtgccgtactggcaggtcaccggtagctggattggcgttagttttgacgaccgtaatgcgatgatcggcgtcaaactggcggaacgcctcaacgtgcagccgggcgacagcatcacgctggtggatcacaatcagcgtaagaatttgcagattaaaggcattgtggagtctggcgatgcgacggacaacatgctgatcgtcagcctcgacgtggcgcaggcctggctgcatcagccgggcaaaatcagccacggcttgctgagcgtcagtaacgatgtcggccaggtggagaactatgccagccggttgcaggcgcagtatcctgacctggagattcgtccggtgcgtaaggtctctgcttccgaagggcaggtgctggataaaattaaaggtctgatgggactggtctcgatcgtgattctggcgctctcttcgctgtgcgtgaataccacgctgatggcgattgtcggcgagcgggcgcgcgagtttgcgctgcaaaaagcgcttggttccagcaacggcgatatcgtgcggcaaattctgctggaaaccagcatcatcgcgctggcggcggtggcgtgcggctgggtgctgggatatttgctggcgcaactgttgggattaacggtgtttaatgccgccatttcactgcgtctgccggtgttgcccattactctggtgttgtctttactggtcgccattctggcggcgattgttccggtgcgacgcgcggtaagcgtcgagcctgctaaagtgctgaaaggagagtag

SEQ ID NO: 91801 - DNA, 1284 bp, Enterobacter aerogenes; identical to SEQ ID NO: 5992

SEQ ID NO: 91802 - DNA, 1380 bp, Enterobacter aerogenes; identical to SEQ ID NO: 5993

SEQ ID NO: 91803 - DNA, 528 bp, Enterobacter aerogenes; identical to SEQ ID NO: 5994

SEQ ID NO: 91804 - DNA, 1941 bp, Enterobacter aerogenes; identical to SEQ ID NO: 5995

SEQ ID NO: 91805 - DNA, 762 bp, Enterobacter aerogenes; identical to SEQ ID NO: 5996

SEQ ID NO: 91806 - DNA, 507 bp, Enterobacter aerogenes; identical to SEQ ID NO: 5997

SEQ ID NO: 91807 - DNA, 159 bp, Enterobacter aerogenes; identical to SEQ ID NO: 5998

SEQ ID NO: 91808 - DNA, 129 bp, Enterobacter aerogenes; identical to SEQ ID NO: 14369

SEQ ID NO: 91809 - DNA, 1965 bp, Enterobacter aerogenes; identical to SEQ ID NO: 76504

SEQ ID NO: 91810 - DNA, 732 bp, Enterobacter aerogenes; identical to SEQ ID NO: 75878

SEQ ID NO: 91811 - DNA, 531 bp, Enterobacter aerogenes; identical to SEQ ID NO: 14377

SEQ ID NO: 91812 - DNA, 180 bp, Enterobacter aerogenes
atgacaaaacaggaaaaaacagccctcaatatggctaaatttattaaggagcagtcgctgctattgctcgataaactgaacgagctggatatggataccccggccgacatgtgcgagcggctacacgaggatgcggaaacactctggcaggtgatgcgggataagctcggggaggaataa

SEQ ID NO: 91813 - DNA, 378 bp, Enterobacter aerogenes; identical to SEQ ID NO: 14375

SEQ ID NO: 91814 - DNA, 300 bp, Enterobacter aerogenes; identical to SEQ ID NO: 14374

SEQ ID NO: 91815 - DNA, 264 bp, Enterobacter aerogenes; identical to SEQ ID NO: 14373

SEQ ID NO: 91816 - DNA, 420 bp, Enterobacter aerogenes; identical to SEQ ID NO: 14372

SEQ ID NO: 91817 - DNA, 1686 bp, Enterobacter aerogenes; identical to SEQ ID NO: 26170

SEQ ID NO: 91818 - DNA, 258 bp, Enterobacter aerogenes; identical to SEQ ID NO: 14370

SEQ ID NO: 91819 - DNA, 480 bp, Enterobacter aerogenes
atgacaacaagtgatgccatcgctttagctgcgcttgtagtatcgatttacactatcatatcgtcagaaatgaaatcgagaaaaagcgatagagaacaaaaggttataaaggatgagcaagacaggttacgtaagttgcttctggaaaaagaaacaaagtcagcaattaatgagatgaaagctgagcttggtgctcgcctcgtaaaaatagccaaaaacaactataggctcaagatatttaatagagggagagttgaggctaaaaatatagagattcatttccctgataacgatggaaatgaatatctttcaatgcatgatgtagaagataaatttccatatgaggtattacacccgcaacatggaattgaaattttagcgggaataagctttggaagtaaaactaaataccgaataaaactcatatgggatgacaattataaaagaagaaatgaagaggagtttttcatttctatataa

SEQ ID NO: 91820 - DNA, 276 bp, Enterobacter aerogenes
atgaaactgaatcctgagaaatacaatagaaacattaccctgctatgtcctgtgtgcggaaatacagagatggaacacgaggaagagtctgaagtcgttagatgtgtaggctgcgggaaagaatttactaatgatgagttaatccaagaaaacggggtgagtattgacgctcatgtagatgaaataaaagaagagttaacaaaagacattcaaaaacagtttaacgacatgctcaaaaaggcatttaagggaagtaagaatataaggatcaaataa

SEQ ID NO: 91821 - DNA, 429 bp, Enterobacter aerogenes
atgagtagaaataacgaaacaagcggcgttgaactggttgttgtaggcgtatttgctttctgtctggcagttgttgcctggctaatgaaaactttcgatgttgaatggcaaacagcactggaaactgcgcctggcctgatagtctggctgcttgttgtcggtgcggggatctttttcgggatcaaaatggaaactggccttattcgctggggtgctccactggcgatcgcccttctgattccggtattcaagccaattcttaaggaagctgccggagttcgtgaaacgggtgggctggttttcgatgatatggtttcgtggtatggaactggctggggaatgtctctgatgttcttcgggattcttattgtcggatatggcctgctttatggtggcacagaagaaattcatattactggtaatcaataa

SEQ ID NO: 91822 - DNA, 183 bp, Enterobacter aerogenes; identical to SEQ ID NO: 11598

SEQ ID NO: 91823 - DNA, 1053 bp, Enterobacter aerogenes
gtgatcgattggcttaccgggattttcccttgcacacacaaaccgcttccggcggggagtgttgtcagcgttgatgctgacggtgcaattgagtgggaaaccgttaagcgactgactgttcgcggttcgcatgaagcaacgatgaaagtacgatcgataggatctaatggcgaaggtaaagcgacacatttgtacattgatggtaatccttccaagtttctgcaggggcattctgttgttgggtcggatgatatacaagggctcatgttgacggtctatgccaggattttatccttattgaatattcctcatgatttagcgtcttataaagccgttatggcaggtcagtataaaatttcacgtgttgacattaattacatgtattcattatctacgctggaaaatgtcagatcatggctttatgccgccgaatttaaagctaaaacacgccatggtcgcgcatgtgggaaaggcggtacagtttatttaggtaaaaactcccgtcgatggagtctgaaattttattcaaaatatgatgaacacgtttctggtaaaaaagggcaccagatagccgaagagtttgtacgagccgggttactggactggacgaaagataaattacgtattgaattaacattaagaacaactgagcttattgatttaaatttaacgcttggcgctaactggaatatgaaaacaccacgtcaattattctctgaatatgtagggagaatagaaatgaatcagaatgctattttaagtgatgaaaaaataacgaaactgccaagaaaaatacagtcaacttatttactttggaaacaaggggctaacatgaaagaaatgttacctcataacactttttatcgccatagaagagaattgctttcgttcggtatcgatattaatttctattgtgattcaccagactctaataacgttgttccgctaataagaacgctggaagccaagccagcggaaatccccttatggatttatgagaaaggttttattttcgattacaaccgtatttcgcacgccagtagctggcattaa

SEQ ID NO: 91824 - DNA, 318 bp, Enterobacter aerogenes; identical to SEQ ID NO: 28470

SEQ ID NO: 91825 - DNA, 243 bp, Enterobacter aerogenes
atgaaaattctgtctactgttaaatataaaattgctctggcttcaactgcgctttttatttctgcaagttcttttgcggctgaaggcgctacaggtggtactgattatgcaggtcaggcaatggatgctttgttgactcaggcaaatgatctcattggtaaagtatggcctgttgttgttgctgtggttggcgctgggcttgccattcgtattttcaaaaaattctcttcaaaagcggtttga

SEQ ID NO: 91826 - DNA, 1248 bp, Enterobacter aerogenes
atgagaaggaaaatattaattctttccgctgtcctcatttctcctttttcacatgctgagtcatgggaaagcattactaaatccacttatcaaagttctgcctacgctgaaagtaagcaaataaccaatcaggatggctctaagataacggtttactatattgatgctgctatgcaggcctccgcttgtcagggtgctaaatccagtgctcagagtgtatttactcggattaaaccaacttatgagggtatctggcctgattctgaattccgtcttgtttttactggcgattgtacttacagcgattcaccagggcagaaggataaatattggtctttaacggcttatattgttggtaatattcagcgttctgttcctgatgaaaaacctactgacccgacaccagaagaaatttgtgaagcgaagccgccagaagaaggtgtatttaataatgttgattcatatgatggtggtcgctatatctactataacggctgtgaatatgaggctactggtgtcattgtttgtcagggtgatggtactgtttgcgctgcaacatggaagcctacaggtgctgtagctgacccctctgataaaccctcaaccccccaaaatggtggtggtgagtctggcggtggtgagtccagcggtggtgagtctggcggtggtgagtccggtggcggtagttctggcggtagttctggcggtggctctagtggttccagtctttctaaaggtgatattcagtctgcgatcgaaggtgcttcacccaaaatagccagcgatattcatgataaattaacggagaaagacacttcatcagatgataaaaaaaatgccgatgaacaaaccaggaataatataaatcgtcttgacgattccattaacaatcttacgcggggggctggccgttttgctgacccttcaggtggtgattctcgttatggaaagggcgactctgaattagatggcgcttctactttggctgattctgaattgggaattgaaaaggattctcacggtgctttatgggaagcgtttttaaataaaggtgctatgctgcctaatttacccaatggtaacggctgctctgattttattatttttcccggtgaggtttatcagattgatattggttgcgataaattactgactattaaagatgttctttcatgggttttttattgccttacgttctggtatgtctttacttctttaacttcattgcttcgcaaagggggtgagtga

SEQ ID NO: 91827 - DNA, 1095 bp, Enterobacter aerogenes; identical to SEQ ID NO: 86251

SEQ ID NO: 91828 - DNA, 1266 bp, Enterobacter aerogenes
atgcgctctgttattgttgcttttttatttgcctattcattctgcgtttctgctgaaactgttaatttaaataattcatctgttcgctcatttgttcagtggtattcttcaaaaactggcaagcctgttattgttaatcctgatattaaaggaaacgtaaccgtatttaatgctgatgttaatccaacaaatattgatgatttctttaagtctgttctgaatgctaacggttttgtcatgctttctggcaatcctgcggtagtctctttgccgtctaaattaccttcacagatggtttcggattccgatgattctgataaccagtcttatgatacttttccttctgagccatcttaccagccagtacctgtggcgcttacggtcagaaattttaagctgacaaaagttagatcgtccgatgttcagcaactgattaaaatttatcttgattctaatggtggtggtaatgtcgtggattatccaggcaataactcgctgattgtttctgcgcctgacgagctgctgccggttctgtccgattttatcaattctgtggatgttgcccgcgatcaggttctcattcagtcgctgatgtttgaaaccagcttgtctgatggcgttgatttatcgtttgcggcaggttctgcatccggtcataaggttgcggggggctttaatacttctgcactgggtagcgctctttctacggcgggcggttcttttggtatttttgatggtaacgtgttggcgctgtctctgcgtgctgtccagagtaattcacgctctaaggtgatttcaacgccgcgtattcttactcagtctggtcagactggttacatttccgtaggtaagaatgtgccgtttatcaccggaaaggtaacgggcgaatctgccggggtaaataatccgtttcagactatcgagcgtcatgatgttggcgtttctctcaaggtaacgcctgttgtcatgggtaacgggcaactagttctgactatcgacactcgcgctgattcaatcagcaatgatgatcaggcatccgatattattactaatcagcgccagattcagacgacagtccagattaaggatggtcagacgttgttattgggggggcttatcgattcatcgttcagcaatgccgagcgttcagttccagttataagtaaaattcctcttataggctggattttcagtagcaaggcagacagcaatgaacagcgtattatgtatattttgcttacagcacatatcattcgtccactttga

SEQ ID NO: 91829 - DNA, 234 bp, Enterobacter aerogenes; identical to SEQ ID NO: 11589

SEQ ID NO: 91830 - DNA, 648 bp, Enterobacter aerogenes
atgactgctgttatcgcactggctaacgggaaaggcggggtgaaaaagtcctcaatgtcacgggctatcgccaccgagtatacaaaggcaggatggggggttcttgggctggatatggatattgatcaggggtctttcctggactgggggcaacgtcggttgcgaaatggttttgaacctccggtgacaattcagggatgcgggacggtttcacaggcgaagaaacagatcgaatccgggcaatgggatttgattgtcatcgacagtgcggcgtatgccacgaaatcgttactcagcctgattgatattgtcgatttgctggtactgccgacagggtttagcgtggatgatctacgaacgaccgttacgaccgtaaacgcgctgcgtaacaaaggacattcgacagataaaatggcggtggtgtttgcgggggtaagtgaaagtgagagtgaatatcgtgcggcgctggaatacctgcaaccctgcggcgttcccatcattccgggcgctattccttttctgacatcgttcagccaggcgcaggataaagggcttgctcttacggagtcgcctttccctggcccacggcagaaagctgatgatgttgtgcagggtgtgatcgatcgactgacaacgcttacgcagtag

SEQ ID NO: 91831 - DNA, 234 bp, Enterobacter aerogenes
atggcgaacgtcccagcaaaaccgcgcaataccaaaggtgagccgccaagccaggcggatacggaacacggctttaatcctacccggaaaagtgctgatggccgtaaggcacagcttaacttatacattgatatggagctgaaacgtgagttccgctccattgctgcggccaacgatatgaaacatggggagctgttcgaggcgtaccaggaattctggaaaaaacatcattaa

SEQ ID NO: 91832 - DNA, 342 bp, Enterobacter aerogenes
atgatattcgctaaatttcagtcactgacccataagatagacacaatggttattcgtgacattaaacgggagatgccgttgaaatactggtcattcaaagtggcggaatggatcgccagagtcggaatgattggctttgtttgtacctttcttacgtatttcggactcggcctcatcatgcagcactcaggccaaaacctgccggaatcgtttactgagggatgcgctcaagccatcgttgcattgatcgctattgccctggtcggtttcctggtcagaggcggattgtacgtcgatctggaaaaaagaatactggataagtggcagagctacgttcagtga

SEQ ID NO: 91833 - DNA, 474 bp, Enterobacter aerogenes
atgaaatgccgatctcgtttgcttgtgtttctgcccctgcttttccccgccctttgcctggctgacttttctggccgtgttgttcgggtcgtcgatggtgatactgtccaggtactcgccgatggcaaaatgatgaaagttcgccttaacggtatcgatgccccggaatcggggcaaccgttcggccagcgctcaaagcaaaacctgttaaagctggccgtccagaaacagacggtggtcatagccaacaatacagatcgttatggccgctggctgggaacattgatgattgacggtatcgatatcaacgcagagcaggttaaagcgggtatggcgtgggcttatcgatatcatggccgtgccagtgacgaaacaatgctacgccttgaagaagaagccagacggcataaaatcgggctgtggtcgtcatctgatccagtggagccgtggaagtggcgcaaacagaataaatag

SEQ ID NO: 91834 - DNA, 756 bp, Enterobacter aerogenes
atgcttattcataacgttgcagaaaggaaagaagccgcaaacagaaaaatgcttgcattgctgacattccttaaagaagaaacatactccgattttaaaacgctgaaaaaggttgttgggttcaagggtaaaagtcaccgcccaacgtatgcgctactgaataaggcggttgcattggggtttctgataaaacatgaatacccggtaatagccggaaaaaaatcactatgggggatcaccatgcaagggctggcgatggtggttaaacccgatgataaagtattccccggttattttgagccggggaaactcaaatactggacactggaacaccggctcctgaatcatcgggtcagaattgcactggaagagaaaggcgggcaaggctggcttaatggtgatcggggggagtttattgcgcgttatcctggcgttcgccatcgtcctgacgggattatcacgttagatagcggcgcaatcgtcgccgtcgaaactgagcgctcaatgaaaacccgcgcacgctatatcaacatcattaacagccatctggcggccagcgatgccggacgctggcactacgcgatgtatgtcatgccggatgacaaaaccaaaacatcgttaatccgactgtttgactccatcaaaacggtaatgaggaacaacgttccggtgccgttcgacgcgaaaaaccgcgaaatgtttcttttccgcaccattgatgaactggagcaagcagccgccagcggaggccagtga

SEQ ID NO: 91835 - DNA, 1737 bp, Enterobacter aerogenes
atgggttcccacctgatgcaaaggctgaatgcctttgccgatgcattttccttttttcttttatggctgcaaaacagccctgtcatattatccctgctcgcaggtcttacattaccttttatattccaccttccccgcgaggaaagaaagaacgccccgttctggttaaagtcggtggcgtgcgtgtccattttcttttttatattcggcaccatatcaccgctaactattcaggggttgagctacttttttaagtcactcgacaacaacatactgtttagagttaccctatggatcatgaccataatatttacggcagcaggattaatatttcatattgcagcccgacgacttttagcaggagaaattgacaacctaaaacatcgaatgattaagaaaagcaagctggagagaaatacccgaaccgatgtacgcaaagtaaaagagctattacccgaccccatagaatataacccactcgattacattgatttaaagaaaggcgtttttattggcttaaacaaagatgaccagccgcaatatataactataaaagaattcaaaacccaacacgcagcaattatcggtacaacaggttccgggaaaggcgtaactgcgaccgttctactttatcaggctattcttttaggtgaggctgtttttgtagaagatccaaaagatgatgaatgggcaccacacgtacttagggaagcatgtaaaaaagcaggcaagaaattcacacttataaatttaaacaagctaaattcccagcttgatttactggctgatatctctcatgaacaactggaagaattatttaacgctggctttagcctggctaagaaaggggaggcgtcagatttttatcgtatatctgaccgtcgcgcagccagaaatacatctgcaatttatgaaaaaggaatgacgcttcgtgatttatttaacactgactttgttcagtcattacgtgaagatgttcccgcattttgtggcgagctggaagaaattgctttagttaactcaattaatgccaaaaatggattttcattaaaagaggtttttgatgaaggtggttgttgctacattattggttcaacgcgaaatcaaaagataatttccgcacaaagaatgattctgacccggctgatacaaatagcagagactagggacagaataaacagtaccccgcgtactgttgctattttcctcgacgagttgaaatatcatctttctcgccctgctcttgaaggacttggaacggcacgagataaaggcgtgcatatattcatggcttttcaggcgatagacgatctgcgtgactgcccgtctgatttaaatggtgattcagttattggcgctatcattgaaaacgccaaattcaaattgatttataaaatccagaatcccgaaacagcagaatgggcggcaaaaatgacaggttctatcctggtcgatgatgagatgagaaaagtacggactgatttatcattaacggaaaaagtggatacagaccgaatgataagacaggcagaaagttactacgttgacagtaatatgtttttaaatctccctgaaaaagttggttttgtatttacgtcaaccgaactaccaagagctacaaagatgtttcaggttcaggtcaaaaaagaaaacatcgaacttctttcatttgagtataaacaagccacaccggaaaaaaatgaaagccaggaacataagccatcaatcaatctgtga

SEQ ID NO: 91836 - DNA, 306 bp, Enterobacter aerogenes
atgataaacgaagatttattcattaataatctacactcaaaaaatcaggacagaatatctgtagccctggtatatgacacgttatcaaaagaagcccacagaggttgtgggctgtattacgaaatatacgaaagctgttttatcggtcttttgcgcgatcatctttcagaacttaatgaagctgacgcaaataaattacgacgctatgccgaaagcaaaggcacgaaaattgatgatgcgtcctacagtgaagcactggaagctgaaagggagtgcagggctgaaatataccgcgagcaaatgtaa

SEQ ID NO: 91837 - DNA, 306 bp, Enterobacter aerogenes
atgaaaaaaaccgttatcgcggcggctgtattatgcctgaccgcaggaacaccgttttattcctttgccgctgacccgtgcgaagttgttctttgcatgtacggaaaagctacgggtaatagtggtgggagtgaatgcagttcagcagaacgcgcattttttaaaatcaacgcctttaaaaaacaccatcgttttaatccgggtaaaacattcgatatgcgaaaagaatttttaggcgaatgtaaagccgcagaccctgaatcaataagcaaaatcctttcaaagtttggcagagtgaaaggataa

SEQ ID NO: 91838 - DNA, 1026 bp, Enterobacter aerogenes
atgaccgctaagaatatttccctcgaccgctataaacagcgtttctttggcgactttctggagcttcccggcctgacggaggtcgccgtcaaccgtccaggtgagctgtataccaaaatcaacggcgtatggaagcagcacgccgttcctttgtcctatgaggattgctacaactttgcccggtgcctggcaaagcaccacggcgacaatatcgaagatattaagccggggctgtcagccacgctggaatctggcgaacggtgccaggtgattgttcccccggcctgtgagcgcgatacggtgtctatcaccatccgtaagccatcgaaggtacaaatcccgcatcagtcatacatcgatgcgggattttataaccgggtaacaggcgaggaaaaaacggagacgcacgacgaggaattaattgcattgtacaatacaaaaaatattcctctgtttatggagaaatgcgtcgagtacggtaaaactctcgcggtcgccggggaaaccagtaccgggaaaaccacctatatgaaaatgttgatagggtatattcctgtacatcttcggatatcaaccattgaggacaacccggaaatcacgttctttatccataaaaactacgtccatcttttttatccgtcagaatcatcagatgaaaaaggttctatcgttaccccggcgagccttttacgctggaattaccgtatgaaccctgaccgcattttattaacagaggttcgcggtgcggaagcctgggacttccttaaaataacaggttccggccatgaagggagtatgacctccattcatgcaggatcagcgaaagaagctatagatgggtttattacccgttgctatgaaaatccacagtgcgcccagctcccctatacatttatgttacgtaaggttctggatagcctggacgtgattgtgagcattgatttagacggaaatgtccgccgtatgaatgacatttatttccgtccaattcatcgaaaccagtattttgaggaaatgaaagcatga

SEQ ID NO: 91839 - DNA, 1464 bp, Enterobacter aerogenes
atgtatttaggtatcgatctcggcacttcggaagttaaagcgctggtgctggatgaaaataatacggtcgtcgccagccatagcgcgccgctgaccatccaacggccgcatccgcaatggtctgaacaatcgccgcaggcgtggtgggaagcgacggaatacctgattgccactctgcgcgagaagtgcgcgagccattggtcggcaattaaagccatcggcctttccggacagatgcacggcgccgtactgctggatgccagcggcgaagtgattcgcccggcgattttatggaatgatacccgctgcgcgcaggagtgcgccgagcttgaagagatggcgccggagctgcatcaggtggccggtaatctggcaatgccggggtttaccgcgccgaaactgctgtgggtgcggcgtcacgaaccgcagcatttcgcccgtaccgcctgcatgctgttgccgaaggattttctgcgctacaagatgaccggcaaaaaagtctccgatatgtcggatgccgccgggacgctgtggctggatgttgcgcggcgggactggtccgacgcgctgctgcagaagtgcggcctgacgcggcaacaaatgccggaactggtggaaggatgcgacgtttccgccacgctggcggcagacattgccgaacgctgggggcttaatccttcggtgctggtggcggggggcggcggcgataatgcggtcagcgcgattggcgttggcgcggtgtcgccgggagacgcttttatctcgctggggacctccggcgtactgtttgtcgtcaccgatcgctatcgtccggcgccgcagtcggcggtgcatgctttctgtcatgtgctgccgaacctgtggcaccagatgagcgtgatgctcagcgccgccagctgtctgcagtggttctgtcgtctgaccggcaccaccgaagtggcgctgctggaggaggtcgcccagttaagcgaagacgaaaaagccaatgcgccatacttcctgccttatctttccggcgagcgtaccccgcataacgatcctctggcgcgcggtatgttctggggaatgacccatgccagcctgcgcgctcaactgggatatgcggtgctggagggagtgagcttcggtattgctgacggcctgcgcgtgttgcaggagagcggaacccgtatcgaccagtgctcactggttggcggcggcgcccgcagtccgttctgggcgcaactgctggcggatatcctggcgatgccggtggtgacgcataaaggcggagaaaccggcggcgcgctcggagcggcgcggctggcctgcctggcggcgggcaagccgctggccagcgtttgtcataagccggaaatctggcaaacctggcaggcggatccgcagcgtcatcaggcgctgatgcagcgttacgcccatttccagtctctgtacctcaacgaccgacattttcgacagcaataa

SEQ ID NO: 91840 - DNA, 1386 bp, Enterobacter aerogenes
atgaatacgcaattcacatggcttcacatcggtctcggttcttttcatcgcgcccatcaggcgtggtacctgcatcgactgcgggtttccggcgattcgcgctggcatatcgcggcgggaaatattcgtaacgacgccgagcatgtggtgcaggcgctggcggagcagagagggcgctacgtcctcgagacggtgagcccggaaggggagcgcgaatatgaagagatcgcctcaattcaaaaattactgccgtggcaggcgggactgcagccgctgattgatgaaggcgcgaacccgcagactaaagtcattgctttcacggtgacggaagggggttattacctcaatacgcagcatcgcctggaaaccagcaacgccgatctgcaggccgatttgcagggggattgcaaaaccatttatggcaccatcacccggattcttgaaaaacgcatcgccgacgacgcgggtccgctgacgctgctcaactgtgacaacgtgcgccacaacggcgaacgtttccatgatgggctggtggagtttctgcaactgaccggtaaacagcaggttattgactggctggcggcgaacgcgacctgcccaaacaccatggtcgatcgtattacgccgcgcccggccgccgatctggcgccacgtatcaaagcgcaaaccggcatcgatgataaagcgccggtgatgggcgaaacctttattcaatgggtagtggaagataatttccgcgctgagcgcccggcgcttgagacggtgggcgtggagatggtggcgtcggttatcccctatgaagaggcgaagattcgcattcttaacgcgtcacatagctgtattgcctgggcgggaaccctgttgggccagcaatatattcacgagagtacgcttaccgatgccatctacgccattgctgagcgttacgtcagcgaagatgtgatcccgtgtctgggtgataacggcatcgacctggcaacctatcgcgacgtggtactcaagcgttttaccaacccctatatccaggacaccaaccagcgggtggcagccgatggattctcaaaaatcccggcgatgattgccccaaccctgcaggagtgctaccagcgcggcgtgcgcccgcaggctaccgctatgttgccggcgctgttttttgtctttatgcagcagtggcataaaggggctttaccgtatcagtaccaggacggaattctcgatgaggccgcggtgcatgccatgtttaattcgcctgatccgatcgcccggtacgctgctgataaagccttatttggcgagctggcggaatcggcggattttcaggcgctgctgcgtgagcaaatcgccgccgtctacgcgttgacccagcaggaggcgctatgtatttag

SEQ ID NO: 91841 - DNA, 1038 bp, Enterobacter aerogenes
atgaccaaagcagagcaaaagcttgcctgtttggaaaaccgcagccaaaatgcgggtatctgcgctactgcgcccgcgtatttaaggcaggacaccgtgagtaaagaagacgacatcaggctggatcagaaggtccgcgccgcatggatgtactacattgccggtcagaatcagagcgaaatcgccagccaccttggcacctcaaggccggtggtccagcgcctgatcgccgcggcgaaggaagaaggcatagtgtcgattggcttgcatcatcctgtggcgaactgcctcgattatgcgcagttgttgcaggaaaagtatcaactcatcgagtgcaatatcgtgccgacctacaacgaagagagcacgctggatagcgtttctttcggctgttatcagctgatggcccgctacctgcagagcgataacgccaaaataatcggcattggttctggattaacgctgaaaaaaaccatccagcgcattgatttcgatagcccaaacagccgttgcgtggcgctgattagcgcaatgaacgatgaggggaaatgcaactactacgatgatgtgccgttgctgctggcgcggaaaattcaggccaactactatcagtggcccgcgccgcgctacgcgcaaacccgtcaggaacacgagatgtggtgcggcagccgcctgttcagcaatgtttctgccgcagcgcaacaggcggacgttattttcgtcggtatcggcccgttgggtacccaaagcccgatcttcaaagacgggtttattaataaagtccaactggatgaactgacggcgcgcggcggcatcggcgagatcctcggccgctttatcgatgccgacggcggcgtcgtcgacagcgaaattaatcggctgatcaccagctacgatatccgccaaaaccagtgcccgcgaatagccgtcgcctgcggcgagaacaagcgcccggcgatcctcgcggcgttaaaaggcggctggattaacggcctggtgaccgatgaacataccgcccgctggctgctgacgcgctag

SEQ ID NO: 91842 - DNA, 1014 bp, Enterobacter aerogenes
atgaaaaaaatcactatctacgatctggcggaattatccggcgtttcggcaagcgcggtgagcgcgatcctcaatggcaactggaaaaaacgccgtatcagcgccaaacttgcggaaaaagtgacgcggattgcgcaagagcagggctacgcgattaatcgccaggccagcatgttgcgcagtaaaaaatcgcatgtcatcgggatgattgtccccaaatacgacaaccgctattttggttccgtggcggaaggctttgaagagatggcgcgtgagcgcggcctgctgccgattattacctgtactcgccgtcgtccagaactggaaatcgaagcggtgaaagcgatgctctcctggcaggtggactgggtggtggcgaccggggcgactaatccggataaaattaccgagctatgtcagcaggcgggggtgccgacggtcaaccttgacctaccgggctccaccgcaccgtcggtgatctccgacaactacgcgggcgcccgcgcgttgaccgataaaattcttgataacagtctcaatcgccacggcaaactggcgccgctgttttttgtcggcgggcgcagcagcgaccacaacaccctggagcgtttgcgcggatttcgcgatgctcatgaggcgcgcggcatgagcgtgccggaagagaatattctttctccgggctattcaaaaggcaaagtggaagcctgcatgcaggcgcgtttcaaaagcgccgatgaacatctgcaggggttcttcgttaactcgaccatctcgctggaaggggtggtgagatggctggcgcagttggggctgaccggcgtcgagcagccgccgatgggctgttttgactgggacccatttgtttatctattgggtcacgatattgacatggtgcagcagaacgtcccggcgatgctggaagcggtattcaatatcatcgacgcaggtgaagccagccagcagcgggtagagatcccgccgctgctgattagcagccgtgagcatctggcgtga

SEQ ID NO: 91843 - DNA, 750 bp, Enterobacter aerogenes
atgaaccactccgtatcctctatgaatacttctcttagcggcaaagtcgccgcggtcaccggcgccgcttccggcataggtcttgaatgcgcgaaaaccctgcttggcgcgggcgcgaaggtggttctgatcgaccgtgaaggcgaaaagctcaacaagattgtggcagagcttggcgaaaacgcttttgccttacaggtcgatctgatgcagggcgagcaggtcgataagatcattgacggcatcctgcagcttgccgggcgtctcgatatcttccacgccaacgccggcgcttatatcggcggcccggtcgccgagggtgacccggacgtctgggatcgcgtgctgcacctcaatactaacgccgccttccgctgcgtgcgtagcgtgctgccgcatatgatcgcgcaaaaatccggcgatattattttcaccagctccatcgccggcgtggtaccggttatctgggaacctatctataccgcgtcaaaattcgccgtacaggcgtttgttcataccacccgccgccaggtttcccaacacggcgtccgcgtcggcgcggtactgcctggcccggtggtcaccgccctgctcgatgactggccgaaagagaaaatggaagaagcactggccaacggtagcctgatgcagcctatcgaagttgccgaatcggtactgtttatggtcacccgttcgaaaaacgtcaccgtacgcgacctggttattttgcctaacagcgttgatttataa

SEQ ID NO: 91844 - DNA, 1608 bp, Enterobacter aerogenes
atgaatggcgagactcaaaccattatcggcgtcgatgtcggctccggcagcgtgcgcgccggggtatttaacctcagcggcgaactactggcccacgccacccgggagatcaccctcttccgcagcgccggcagcgtggtagaacaatccagccgcgaaatctggcaggcggtttgcgactgcattaaatgcgcggttgaaaaggccgccgtctctccgcactcggttgccggtatcggcttcgacgctacctgctcgttggtggtaatcggtgagaatgacgcgccgctggccgtcggccccagcgaagaggcggaccgcaatatcatcgtctggatggatcaccgcgccaccgaacaggcggaacgcatcaatgccacccgccatccggtgctgcagtacgtcggcgggactatctccccggagatggaaacgccgaagctgctatggctgaaagaaaaccgtccacagatttttgccgccgcgcgccatttcttcgacctggccgactatctcacctggcgcgcgaccggcgatctggcccgctccgtctgtaccgtcacctgtaaatggacctatctggcccatgaaaaacgctgggatgccgactactttcgccagattggcctcgcagagctggcggaggaagacttcgctcgtatcggccagcgcattgtcgatccgggtacgccctgtggtgatgggttaaccgcggcggcggctgaagagatgggcctgcctgtcggtacgccggtggcggtcgggatgatcgacgcccatgcaggcggcatcggcaccgtcggcgtactcaacggcgcggtgaataatatggcctacgtcttcggcacctcctcctgcaccatgactaccaccgagaaagcggtgttcgttcctggcgtctgggggccttactattcggcgatggtaccgggttactggctgaacgaaggcggacaaagcgccgccggcgcggctatcgaccagttactgagcttccatccggcagcggcagaagcgcgtgaacaggccaaagccgccgccgttccgctgccggtctggctggcggatcgcgtgctggcgcaggttgcctcgccgtcggaggcggtgcagctggctgatggactgcatgtcgtgccggagtttctcggcaatcgcgcgccgcttgccgacccccacgcgaaagcgctgattgccgggctggggatggagcgggatcttgataatctgaccgcgctgtacgtcgccggattatgcggaattggctacggcctgcggcagatcctcgatgcccaacgcgcctgtggtattgagaacgaaaatatcgttatcagcggcggcgcgggtcagcacccgctggtacgccagctgttggccgacgcctgcggcgtgaccgtggtcagcacagccagtagcgaacccgtattgctgggttccgccatcctcggcgccgtcgcgggcaacgtcgccgcctcgctgccggacgccatgaagcggttcaccagagtggataaaacctatcgtagcgaaacggcgtttagctcgctacatcaacgcaggtatgaggcctacaaagcgctacaacaggccggtcggctaatccgcgaataa

SEQ ID NO: 91845 - DNA, 492 bp, Enterobacter aerogenes
ttgcaacagtgccatcgcgcttttagcgacaaggcatccggcaaggatgtcaagcgtccgcaactggaagcgctgataagcttcgcccgcaccggcgacaccgtggtggtgcatagcatggatcgcctggcgcgcaatctcgatgatttgcgccggatcgtgcaaacgctgacacaacgcggcgtgcatatcgaattcgtcaaggaacacctcagttttactggcgaagactctccgatggcgaacctgatgctctcggtgatgggcgcgttcgccgagttcgagcgcgccctgatccgcgagcgtcagcgcgagggtattgcgctcgccaagcaacgcggggcttaccgtggcaggaagaaatccctgtcgtctgagcgtattgccgaactgcgccaacgtgtcgaggctggcgagcaaaagaccaagcttgctcgtgaattcggaatcagtcgcgaaaccctgtatcaatacttgagaacggatcagtaa

SEQ ID NO: 91846 - DNA, 1770 bp, Enterobacter aerogenes
atgccccgccgttcgatcctctccgccgccgagcgggaaagcctgctggcgttgccggacaccaaggatgagttgatccgtcactacacgttcagcgaaagcgacctctccatcatccggcagcggcgcggcccggccaatcggctgggcttcgcggtgcagctctgctacctgcgctttcccggcgtcatccttggcgctgatgagccaccgttcccgccattgctgagactggtcgccaaccagctcaaggtcggcatcgaaagctgggacgagtacgggcagcgtgagcagacccgacgcgagcacctggtcgagctgcaaacggtgttcggcttccagccgttcacgattggccactaccggcaggctgtccagttgctgaccgagctggccatgcaaaccgacaagggcatcgtgctggccagagccttgatcgagcacctgcggcggcagtcggtcattgtgcccgccctcaacgccgtcgagcgggcgagcgccgaagcgattacccgcgccaaccggcgtctctacgacgccttggctgagccgctgacggacgtgcatcgccgtcgcctcgacgatctgctcaagcgccgcgacaacggcaagacgacgtggctggcctggctgcggcaatccccggtcaaaccgaactcgcggcacatgctggaacacatcgaacgcctcaaggcgtggcaggcgctcgacctgccctccggcatcgagcggctggttcaccagaaccggctgctcaagatcgcccgcgagggcggccagatgacgcccgccgacctggcgaagttcgagccgcagcggcgttacgcgaccctggtggcgctcgccatcgagggcatggccaccgtcaccgacgaaatcatcgacctgcatgaccgcatcctgggcaagctgttcaatgccgccaagaacaagcatcagcagcagttccaggcatccggcaaggcgatcaatgccaaggtgcggctgttcgggcgcatcggccaggcgctgatcgaggccaagcaagcgggccgcgatccgttcgccgccatcgaggccgtcatgtcctgggatgctttcgccgagagcgtcaccgaagcgcagcggctcgcgcaacccgaggacttcgatttcctgcaccgcatcggcgagagctacgccacgctgcgccgctacgcgccggaatttctcgacgtgctcaagttgcgggccgcgcccgccgccaaggacgtactcgacgccatcgaggtgctgcgcagcatgaacagcgacaacgcccgcaaggtgcccaccgacgcgccgaccgagttcatcaagccgcgctggcagaagctggtgatgaccgacaccggcatcgaccggcgctactacgaactgtgcgcgctgtcggagctgaagaacgcgctgcgctccggcgacatctgggtgcaaggctcgcgccagttcaaggacttcgaggactacctggtgccgcccgcgaaattcgccagcctcaagcaggccagcgaattgccgctggccgtggccaccgattgcgaccagtacctgcatgaccggctgacgctgctggaaacgcagctcgccaccgtcaaccgcatggcgctggccaacgagctgccggacgccatcatcacggagtcgggcctgaagatcacgccgctcgatgcggcggtgcccgataccgcacaggccctgatcgaccagacggcgatgatcctaccgcacgtcaagatggggtccgcttggaaaagggaaaataacctacgctaa

SEQ ID NO: 91847 - DNA, 714 bp, Enterobacter aerogenes
gtgcgggcgggtgtgactgataagagtctctctctcaaatcgtccgtatcacctacgggcgtcgcaaagcaaagcccctgttataacgttgcctcgcgcaagcgtcgccggttcctcaatcggtggattaagtcgctggcgaccgaagccgggcgtatcaaaatcaaaaacgaacttcggcgccgcatccggcacaacaagtattgggtcaatgaagcgaacaagttcgggcttgaggctctttgcgagctgatgttggccatccttgacgatctggatttaagggactggcaaaccatacataaccttgaaacgctggccgaacgtgccggacttgcgacgcgcagtgatgcgggtcacaagtctatttcacgtgccagccggggatgtgatcgcctctcctggctcaatgccattatctcagaaaaagcccccttcaatccttatgatgcccgttgcgcctgcaagcacatcgaggttacagaggatttctttgccattctcggcgttccgctgaaacaggtctaccgggaacgcgccaggctacttaaggccgacccgaatgaaatcatatcctccggggatgtccggttaatcgctatcaaggttgagaactggacgcgtaaagccgctgccgggttagccaggatgaaagcgaagcgtgaagtagctcgccagcgtaaacaggaatactactccctaacctttgcctga

SEQ ID NO: 91848 - DNA, 456 bp, Enterobacter aerogenes
atgtatgaatggtacgttttatactgcaacaatcaggatgttgaacgcatcacccgaagagtcgagggactggatgtcgaggtgttttgcccccgctatatcaaagtaacgccacgtaaggattgccgggcggtacgtcaggaagagaaggtgctgtttcctaattatcttttcctctgctttgacgtcaacataacgcatacatcgactatcacatcaattccgggcgcgcatggttttgtcagcttcggttcaacaccctgcaccgtccccaaatcagtgataacagcgattgaatgcgcccgtctgatggcgctcaatcctgatgaagatgctatcgagtgtcgaaatattgccccggacttgctggcaaaaattcaagaactctctctgataaggtctccgctccaacgccaggtagccttttcaaaactactccagaaccaataccactaa

SEQ ID NO: 91849 - DNA, 216 bp, Enterobacter aerogenes
atgccgaaaagcgtaccaggcaaatcaagcacggctgttatttacatcgggcaaaagcgctatcaggagttagcaaagcaagcccgtgaaatcagctacctgtctgaatcaaatatccggccaagcacctttctccagttcctgatggatgaatttggtgagcaagcccgtaccgagctgctccggcagctactcgcagagaaacaaaaggagtaa

SEQ ID NO: 91850 - DNA, 219 bp, Enterobacter aerogenes
atgagaaaacccacctataacgtgtacgtcacgcaggaaacccagcccgacgagaacggcgaaaaaaatacgtactggacgaaagtcggtgcggccttcgcacacaacggcaagccggggctgaacatcatgatcacgcccggtatttccgtttccggcaagctggtactcctcgaacctaaagatgacgcagcgccgcaggctgctcctgtgagttaa

SEQ ID NO: 91851 - DNA, 711 bp, Enterobacter aerogenes
atgctttccaccactgcttttctggcggtggctatgcagtgtgccgccaccgttcacccttctacatccctcgatgtggcaagagtggagtccggttacaacccctatgccatcgctgagatcgtgcctaagcccgaacgaaaacccggcgataaaggctttattactcacatgccaaaaagtaaggaggatgcagtcagcatcaccaatcagattgaggcgaaaggtcgccgctactctgttggcctgatgcagataaccagcaccaattttaagcgttacggcgtcaccgctactgaccttttcaatccctgcatcaatctttccgtctatgaaaaaatcatcaccgactgctaccagcggggcggcaccctgaaaagggcgttgagctgctactactccggcaatttcagtaccggacaacagcaggaacccgctttttcaaagacgagctatgtacagcggattggctactccccggcggatacccgctatgccgttcccggcacccgcgatgatatcgcaaccccagcggccaccctgaaagctacgcctgtggacgcgccgacgcgcccgcgcgtggtgtggccgggggcgatcgttcgcggcgttccggctcaactccgccagaaaaaggcggccaccgtctattaccccgcgcaggttgtgcgcggaaatcgcgatgtaacaacgaaagaggaagaaaaatga

SEQ ID NO: 91852 - DNA, 501 bp, Enterobacter aerogenes; identical to SEQ ID NO: 80748

SEQ ID NO: 91853 - DNA, 1014 bp, Enterobacter aerogenes
atgaaaaccgccactgcgccgttaccaccgctgcgttcggtcaaggttctggaccagttgcgtgagcgcatacgctacttgcattacagtttacgaaccgaacaggcttatgtccactgggttcgtgccttcatccgtttccacggtgtgcgtcacccggcaaccttgggcagcagcgaagtcgaggcatttctgtcctggctggcgaacgagcgcaaggtttcggtctccacgcatcgtcaggcattggcggccttgctgttcttctacggcaaggtgctgtgcacggatctgccctggcttcaggagatcggaagacctcggccgtcgcggcgcttgccggtggtgctgaccccggatgaagtggttcgcatcctcggttttctggaaggcgagcatcgtttgttcgcccagcttctgtatggaacgggcatgcggatcagtgagggtttgcaactgcgggtcaaggatctggatttcgatcacggcacgatcatcgtgcgggagggcaagggctccaaggatcgggccttgatgttacccgagagcttggcacccagcctgcgcgagcagctgtcgcgtgcacgggcatggtggctgaaggaccaggccgagggccgcagcggcgttgcgcttcccgacgcccttgagcggaagtatccgcgcgccgggcattcctggctgtggttctgggtttttgcgcagcacacgcattcgaccgatccacggagcggtgtcgtgcgtcgccatcacatgtatgaccagacctttcagcgcgccttcaaacgtgccgtagaacaagcaggcatcacgaagcccgccacaccgcacaccctccgccactcgttcgcgacggccttgctccgcagcggttacgacattcgaaccgtgcaggatctgctcggccattccgacgtctctacgacgatgatttacacgcatgtgctgaaagttggcggtgccggagtgcgctcaccgcttgatgcgctgccgcccctcactagtgagaggtag

SEQ ID NO: 91854 - DNA, 600 bp, Enterobacter aerogenes
atgcctcgggcatccaagcagcaagcgcgttacgccgtgggtcgatgtttgatgttatggagcagcaacgatgttacgcagcagggcagtcgccctaaaacaaagttagccattaagggagttaaattgaaaatatcattgatttctgcagtgtcagaaaatggcgtaatcggtagtggtcctgatatcccgtggtcagtaaaaggtgagcaactactctttaaagcgctcacatataatcaatggctccttgtcggaagaaaaacatttgactctatgggtgttcttccaaatcgcaaatatgcagtagtgtcaaagaacggaatttcaagctcaaatgaaaacgtcctagtttttccttcaatagaaaatgctttgaaagagctatcaaaagttacagatcatgtatatgtctctggcgggggtcaaatctataatagccttattgaaaaagcagatataattcatttgtctactgttcacgttgaagtcgaaggtgatatcaaattccctataatgcctgagaatttcaatttggtttttgaacagttttttatgtctaatataaattatacataccagatttggaaaaaaggctaa

SEQ ID NO: 91855 - DNA, 789 bp, Enterobacter aerogenes; identical to SEQ ID NO: 6025

SEQ ID NO: 91856 - DNA, 348 bp, Enterobacter aerogenes; identical to SEQ ID NO: 6026

SEQ ID NO: 91857 - DNA, 840 bp, Enterobacter aerogenes; identical to SEQ ID NO: 6027

SEQ ID NO: 91858 - DNA, 204 bp, Enterobacter aerogenes; identical to SEQ ID NO: 6028

SEQ ID NO: 91859 - DNA, 1206 bp, Enterobacter aerogenes; identical to SEQ ID NO: 6029

SEQ ID NO: 91860 - DNA, 435 bp, Enterobacter aerogenes; identical to SEQ ID NO: 10324

SEQ ID NO: 91861 - DNA, 351 bp, Enterobacter aerogenes; identical to SEQ ID NO: 10325

SEQ ID NO: 91862 - DNA, 276 bp, Enterobacter aerogenes; identical to SEQ ID NO: 10326

SEQ ID NO: 91863 - DNA, 423 bp, Enterobacter aerogenes; identical to SEQ ID NO: 10327

SEQ ID NO: 91864 - DNA, 1695 bp, Enterobacter aerogenes
atgagcactctcaaaatcaccggcatgacttgcgactcgtgcgcagtgcatgtcaaggacgccctggagaaagtgcccggcgtgcaatcagcggatgtctcctacgccaagggcagcgccaagctcgccattgaggtcggcacgtcacccgacgcgctgacggccgctgtagctggactcggttatcgggccacgctggccgatgccccctcagtttcgacgccgggcggattgctcgacaagatgcgcgatttgctgggcagaaacgacaagacgggtagcagcggcgcattgcatatcgccgtcatcggcagcggcggggccgcgatggcagcggcgctgaaggccgtcgagcaaggcgcacgtgtcacgctgatcgagcgcggcaccatcggcggcacctgcgtcaatgtcggttgtgtgccgtccaagatcatgatccgcgccgcccatatcgcccatctgcgccgggaaagcccgttcgatggcggcatcgccgctaccacgccgaccatccagcgcacggcgctgctggcccagcagcaggcccgcgtcgatgaactgcgccacgccaagtacgaaggcatcttggagggcaatccggcgatcactgtgctgcacggctccgcccgctttaaggacaatcgcaacctgatcgtgcaactcaacgacggcggcgagcgcgtggtggcattcgaccgctgcctgatcgccaccggcgcgagcccggccgtgccgccgattcccggcctgaaagacactccgtactggacttccactgaagcgctggtcagcgagacgattcctaagcgcctggccgtgattggctcatcagtggtggcgctggagctggcgcaggcgttcgcccgactcggagcgaaggtgacgatcctggctcgcagcacgctgttcttccgcgaagacccagctataggcgaagccgtcacggccgcattccgcatggagggcatcgaggtgagggaacacacccaggccagccaggtcgcgtatatcaatggtgaaggggacggcgaattcgtgctcaccacggcgcacggcgaactgcgcgccgacaagctgctggtcgccaccggccgcgcgcccaacacacgcaagctggcactggatgcgacgggcgtcacgctcaccccgcaaggcgctatcgtcatcgaccccggcatgcgtacaagcgtggaacacatctacgccgcaggcgactgcaccgaccagccgcagttcgtctatgtggcggcagcggccggcactcgcgccgcgatcaacatgaccggcggtgacgcggccctgaacctgaccgcgatgccggccgtggtgttcaccgacccgcaagtggcgaccgtaggctacagcgaggcggaagcgcaccatgacggcatcaaaactgatagtcgcacgctaacgctggacaacgtgccgcgcgcgctcgccaacttcgacacgcgcggcttcatcaaactggtggttgaagaaggcagcggacgactgatcggcgtgcaggcagtggccccggaagcgggcgaactgatccagacggccgcactggcgattcgcaaccggatgacggtgcaggaactggccgaccagttgttcccctacctgacgatggtcgaagggttgaagctcgcggcgcagaccttcaacaaggatgtgaagcagctttcctgctgcgccgggtga

SEQ ID NO: 91865 - DNA, 363 bp, Enterobacter aerogenes; identical to SEQ ID NO: 39670

SEQ ID NO: 91866 - DNA, 237 bp, Enterobacter aerogenes; identical to SEQ ID NO: 10330

SEQ ID NO: 91867 - DNA, 708 bp, Enterobacter aerogenes; identical to SEQ ID NO: 10331

SEQ ID NO: 91868 - DNA, 1269 bp, Enterobacter aerogenes; identical to SEQ ID NO: 80762

SEQ ID NO: 91869 - DNA, 558 bp, Enterobacter aerogenes
gtgctgggtgacaatatctattttggccagagcttcggtaagaagctggaagcggcggcggcgaagacgtcgggagcgacggtcttcgggtaccaggtactggatccggaacgttttggtgtggtggagtttgacgagaacttcagggcattgtcgatcgaagagaagccgctgaagccgaaatccgactgggcggtgaccgggctctatttttacgacaacaacgtggtggaaatggccaaagaggttcgcccgtccgagcgtggtgaactggagatcaccaccctgaaccagatgtatctggagcgcggggatttgcaggtcgaacttttggggcgtggatttgcctggcttgacacggggacgcatgacagtctgattgaagcttcacagtttattcataccattgagaagcgccaggggatgaaagtggcctgcctggaagagattgcataccggaataaatggctgtcggcggaaggtgtggctacgcaggccgagcggctcaagaagacggaatatggcgcctatctgaagcgtttgctgagcgagagctaa

SEQ ID NO: 91870 - DNA, 891 bp, Enterobacter aerogenes
atgaagattttactgattggcaaaaacggccaggtggggtgggagctacaacgttcgctgtccactctcggtgaggtggtcgcggtggactactttgataaagaactgtgcggcgacctgacgaatctcgaaggtattgctgagaccgtgcgtaccgtccgcccagacgtagtggtgaatgccgccgcgcatacggctgtggacaaggcagaaagtgagcgtgagctttcggatctcctgaatgagaaaggagtggcggttctggctgaagaatcggctaagctgggtgctctgatggtgcattactccactgattacgtctttaatggcgaaggcagtcactatcgcctggaggatgagccgacggggccgctgaatgtctacggcgaaaccaagcgagcgggtgaaattgcgcttgagaaagctaatccccgtcatctgattttccgtaccagttgggtgtatgccacccgcggcgccaattttgccaagaccatgctccgcctggcaggggagaaagagactctctccatcattgacgaccagcacggggcacccaccggggcagaattgctggcagactgtacagcgatagccatccgcgaagaaatgcgtaataagtcggtagccggaacttatcacctggtggccagcggtgaaaccagctggcgtgactacgcatgttttgtttttgatgtggcgaggaagcatggcgcagagttagctatccaggaagtgaagggcattccgacaaccgcttatccgacaccggcaaaacggcctttaaattcacgattgtcgaatgagaaattccagcaggtgtttggtgtgaggctcccggactggcgtcagggtgttgagcgtgtagtgaccgaagtgttgggtaagtaa

SEQ ID NO: 91871 - DNA, 555 bp, Enterobacter aerogenes
atgaatattattaagaccgacattcctgacgtactgatttttgaaccgcgggtctttggcgatgcgcgaggatatttttttgaaagcttcagcagtaaggtttttgatgaagctgtcggacgtaaagtcgagttcgtgcaggacaatcactcccagtcgcagaaaggggtgttacgtggcctgcattaccagctggatccgcatgcgcagggcaaactggtgcgttgtgttgaaggtgaggtgtttgacgtggcggtagatattcgccgcagttcgccgacctttggtaaatgggtcggggtggtgctcagcgcagaaaacaaacgccagttgtggatcccggaaggctttgcgcatggctttatggcgttgagcgataccgtgcagtttgtctacaaagcgacaaactactatgcgccgcagtcagagcggagcattatctggaacgatcccgagattggaattcagtggccagaattgtcgaatggggttccttctctgtcagaaaaggatctacaggcatttaccttgtcaactgcagaagtgtataagtag

SEQ ID NO: 91872 - DNA, 1167 bp, Enterobacter aerogenes
atgaaaattactatttccggtacaggatatgtaggattatccaatggggtactgatcgctcaacaccacgaagtggttgcgttagatatcgtacaagctaaagttgatatgcttaaccagaagatctctccgattgttgataaagaaatccaagagtatcttacagataaaccacttaacttccgtgccactacggataagcatgatgcatatcgtgatgctgattatgtcattatcgctaccccgactgactatgatccaaaaactaattatttcaatacgtctactgtcgaagccgtaattcgcgatgtcactgaaatcaatcctcaagcggtaatgattataaagtcaacaatacctgttggttttactcgcgacatcaaggagcgttttggtatcgacaacgtcattttttctccggagtttttacgggaggggagggctctatatgacaacctgcatccgtcgcgcattgttatcggtgagcgctctgcacgggccgagcgtttcgctgaactcttaaaagaaggggcgatcaagcaggaaattcctactctgttcaccgactccacggaagcggaagcgatcaagctgttcgctaatacctacctggcgctgcgggtggcctatttcaatgagctggacagctatgctgaaagtcaggggctgaatagcaaacagatcattgaaggggtttgcttggatccacgtatcggtaaccactacaacaatccgtcttttggctatggcggttactgtttaccgaaagataccaagcaactgctggcgaactatgagtccgtaccgaacaatattatttctgctattgtcgatgccaaccgaactcgtaaagatttcattgctgattctattctgtcacgcaaaccaaaagtggttggtgtataccgcttaattatgaagagtggttctgataacttccgggcatcttccattcagggaatcatgaaacgaattaaagcgaaaggaatccctgttattatctacgaacctgtaatgaaggaagatgatttctttaactcgcgggtagttcgcgatttgaatgctttcaaacaagaagctgacgttatcatctctaaccggatggcagatgagttagcggatgtacaagacaaagtgtatacacgtgatctctttggtaatgactga

SEQ ID NO: 91873 - DNA, 1005 bp, Enterobacter aerogenes
atgaaatttttggtcactggagctgcaggcttcatcggtttccatgtcagccaacgccttcttgcagctggccataccgtagtcggcatcgacaacatgaatgactactacgatgtaaacctgaagcaagctcgtctggaacttctggactccccattattcagcttctccaggctggatattgccgaccgtgtagggatggaaaaactttttgctgatgaaaagtttgaccgcgtcatacaccttgcagcgcaagcaggtgtgcgttattcgctggaaaacccacacgcctatgccgatgccaacctgatgggttttttgaatatcctcgaaggctgtcgtcatactaacgttcaacatttagtctatgcctcatccagttcggtttatggcttaaaccgtaagatgccattttcaaccgatgattcggtagatcatccggtatctctttatgcagcaaccaaaaaagccaacgagttgatggcgcatacctatgcacatctttatggcatcccgacgactggcctgcgtttctttaccgtctacggtccatggggacgtccggatatggcacttttcaaatttacgaaagccatgctcgaaggtaaaagtatcgacgtatacaactacggtaagatgaaacgtgacttcacttatattgatgatattgtcgaagcagttgttcgtgttcaggagactattccacaaccggatccggaatggactgttgaagccggttcaccagcaaccagttccgctccgtatcgggtatataacattggcaatagctcaccggttgaactaatggactacatcaccgctcttgaagaagctatggggatggaagcgaagaaaaacatgatgccgatgcagcctggtgatgttctggagacaagtgctgaaacccgaccgctgtataaccttgttggtttcagaccgcaaactccggtcaagcaaggagtgaagaacttcgtggagtggtataaagcgtactataagtcctga

SEQ ID NO: 91874 - DNA, 498 bp, Enterobacter aerogenes
atgttttacatgcgaaagctcaacaagaagggcgagagtcaatatttgatttttacaaaattagtattgctcatattactcgcgaatattcatttaaaaaggacaaggataatgtttgatgttcacgttgttttagataatcaaataggacaattagcattactaggaaaaacattaggtaataaaggtattggattggaagggggagggatatttacggttggtgatgaatgccatgctcattttcttgttgaacaaggaaaggaagctaaaatagcgctagagcaagctggactgttagtacttgcgatccggacaccattaattcgtaagttaaaacaggaaaaaccgggggaacttggcgaaatagcacgagtattggcggagaataacattaatattttagtgcaatacagtgaccatgctaaccaactgatattaataacggacaatgatagtatggctgcatctgttacgctcccttgggcaataaagtga

SEQ ID NO: 91875 - DNA, 624 bp, Enterobacter aerogenes; identical to SEQ ID NO: 10353

SEQ ID NO: 91876 - DNA, 624 bp, Enterobacter aerogenes; identical to SEQ ID NO: 10352

SEQ ID NO: 91877 - DNA, 1206 bp, Enterobacter aerogenes; identical to SEQ ID NO: 10351

SEQ ID NO: 91878 - DNA, 594 bp, Enterobacter aerogenes; identical to SEQ ID NO: 10350

SEQ ID NO: 91879 - DNA, 417 bp, Enterobacter aerogenes; identical to SEQ ID NO: 10349

SEQ ID NO: 91880 - DNA, 888 bp, Enterobacter aerogenes; identical to SEQ ID NO: 10348

SEQ ID NO: 91881 - DNA, 282 bp, Enterobacter aerogenes
gtggtaaataattcactctacctgatcaagcctgatgatacggtgatagtacagatgcagaatgagtatggtactgataaactgagaataaggttcacctataactctaatgaatacttgctaacgactacagatatgggaatacagaactatttcagagatgaaaacaacaggttgaatgatggcgaagaggaagaacttgatggagtctcctatcttactatcagtctagccgaaccactgaatggaaacttatataaagtagtagctggagtattttag

SEQ ID NO: 91882 - DNA, 567 bp, Enterobacter aerogenes
atgagtgtactttttttagaatatagtaaagagttcaattgctttagtaaatttaaaaggaaattggactttttgactaaaaaaataagcatatcagagataattttcatctctgaccctagaggatttatcagaaaaatttctgaagataagcaatttcgaattcgtgaggtgaattctgccgaagatgctgaatatgcaattatttttagagacaaacgtcaagatattggtgattttaaattacctgagaatgcaaaagtaaaagttgtacttttaaatctgacgctggttgtcaataaagacagaggtgataaatttgatgtatatataggcagaggtacgatatggggaaatccttatcaaataggcgtagatggggatagggatgaagtaataagaaaattcaaatatgattttgataaagaatttttaaaaccctttgataatattgataaaaatgcatcatctcttaagggaaaggttattgcgtgtcattgcaagccatatgcatgtcatggggatatcatagccgattatataaactcccttgatgacggggaatga

SEQ ID NO: 91883 - DNA, 336 bp, Enterobacter aerogenes
atgcttgtgaccatgtcagataaagagctaaaccgaatcaacgttattcaggcagttatcgataaacgcatgcgtcgccgtgatgcagcccatcaacttaacctcaccgaacgacaggttcagcgcctgatgaatcgttatcgtgagtctggcgtttcaggattagccagccttcgccgtggccaaccaggtaatcaccggattccagaatcgcttaaattgcgggttctggcgctgttgcgcgaaaaatacagtgattttggaccaactctcgccgcagaaaaactcagtgaacgacacgatatttcagtatccgtcgaaacgttgcgtaactag

SEQ ID NO: 91884 - DNA, 558 bp, Enterobacter aerogenes; identical to SEQ ID NO: 86000

SEQ ID NO: 91885 - DNA, 372 bp, Enterobacter aerogenes; identical to SEQ ID NO: 85999

SEQ ID NO: 91886 - DNA, 501 bp, Enterobacter aerogenes; identical to SEQ ID NO: 85998

SEQ ID NO: 91887 - DNA, 327 bp, Enterobacter aerogenes
atgagccgcagccgccgcaaaacacccatcgtcgggcacacgacctgcggcagcgagcgcgaggacaagaagctctggcatcagcgctggcgcacccgtgagcgcacggcgctgaccagcgcgtcgcccgaagccctgagcgcccatctgcccctgctggaaaaccaggccagcagcgtctggtcgatgggcaaggatggccgctcctactggcccgtcaagcgccaggccgccacggcggatcgcatcgccaatcacaagggacgcaacccgcaagaacgcgcctccctgaaaaagcgcctgctgcgcaagtggatgagcaaatga

SEQ ID NO: 91888 - DNA, 357 bp, Enterobacter aerogenes; identical to SEQ ID NO: 16840

SEQ ID NO: 91889 - DNA, 246 bp, Enterobacter aerogenes
atgatgaaagtaccaacatggcaattagtattgttatttttttattcctgtacagctgttcccgccactatgttcatgctgagtctggtatttcagtggatccttgtacctggatttgatgttgatttctttggctatgaacaagtgtatgttgccctcaaaatggcagttataggtttttttgtcgggatatgcctatggctttcctattacttgccctatagaaagcgaatgttaaataagtaa

SEQ ID NO: 91890 - DNA, 231 bp, Enterobacter aerogenes
atgaaaaatgatttttaccgttggctcactgttttcactgttctgatgataatcatgagcttgagttcattttttgcactttttattaagcccgttattttttatttcgaaacaggaattattaatgtttcagttgttaattatttgtttttgagtataaagattggctcgtttgttagcggggtaatagtcattggtttgtggattaaacatcgatttaatatccattaa

SEQ ID NO: 91891 - DNA, 240 bp, Enterobacter aerogenes
atgaagcgagaattattcatccttgcatatgtagttataatgggcgctattattgtttctactgtttcttttttgggacagttggctatttttttagtaaacgaaatgaattcaggaaatgagaatataccgtataaagaactgttgtatgttagttttaaggtaggcatcacaggtggtgttattggcggggttggtacctggttgatgaatcatttttcttctcaacgtagaaaataa

SEQ ID NO: 91892 - DNA, 246 bp, Enterobacter aerogenes
atgaaaaatgatctccgagttagatatgtacagtctctatttatcttagttgctacgattttattcatgatcgcattatctgtatgcggaaagctttttttttcgttgttactgtggctgcttggcgatggttttaatgcaacttggcaggatgttttgcatggagcgaaattaggactttatggtggaagcattggaggcattggactcgcattattccgcctttttaaagtaaagggattttaa

SEQ ID NO: 91893 - DNA, 267 bp, Enterobacter aerogenes; identical to SEQ ID NO: 5985

SEQ ID NO: 91894 - DNA, 1176 bp, Enterobacter aerogenes; identical to SEQ ID NO: 5984

SEQ ID NO: 91895 - DNA, 2262 bp, Enterobacter aerogenes; identical to SEQ ID NO: 5983

SEQ ID NO: 91896 - DNA, 552 bp, Enterobacter aerogenes
gtgacagaagaaaagcaacaaactgaggacagacaacaacgtcctgtcactgaagacagtgatgcaaccattgaaataactaggaagaaaaagtcatccgatggagaaaagaaaaagacacgtccacctcgtaagataaaggctcaaaccagcgacagcaaccccacagccgtttccagtaatgctgcacctcaggctctggtcgaatcgtcccgtattgctgcgccttttaacagtgactcaacaaagcgagataattctgaggcatcttgggaaagcagagtaaaaggccacctaaaccgttataaacgttaccctggcgatgccagaaaacgtgcacgaaccggcacagccgtcgtgacttttaccgtaaacacggaaggcactattgtcagtagtttcttggaaatctcttcaggaaccttttctcttgaccgcgaagctattgctgttttagaacgcgctcaaccacttcccaaaccaccgcctgaaatattggagggaggattatttaaagtaaaaatgccgattacctttaagttgaaggagtaa

SEQ ID NO: 91897 - DNA, 261 bp, Enterobacter aerogenes; identical to SEQ ID NO: 17248

SEQ ID NO: 91898 - DNA, 510 bp, Enterobacter aerogenes; identical to SEQ ID NO: 5976

SEQ ID NO: 91899 - DNA, 348 bp, Enterobacter aerogenes; identical to SEQ ID NO: 5977

SEQ ID NO: 91900 - DNA, 336 bp, Enterobacter aerogenes; identical to SEQ ID NO: 17229

SEQ ID NO: 91901 - DNA, 171 bp, Enterobacter aerogenes
atgttttccaattctcactacatgtacataatcattcttgtactatggtttagtattctcaagtacttacagagaaagaatagcatattacatcctttattttcactaatcctgacaccactaaccattttaatcattagacttatgatagatttaacatacaaccaataa

SEQ ID NO: 91902 - DNA, 291 bp, Enterobacter aerogenes; identical to SEQ ID NO: 5978

SEQ ID NO: 91903 - DNA, 261 bp, Enterobacter aerogenes; identical to SEQ ID NO: 5979

SEQ ID NO: 91904 - DNA, 876 bp, Enterobacter aerogenes; identical to SEQ ID NO: 5981

SEQ ID NO: 91905 - DNA, 528 bp, Enterobacter aerogenes; identical to SEQ ID NO: 15035

SEQ ID NO: 91906 - DNA, 234 bp, Enterobacter aerogenes; identical to SEQ ID NO: 10186

SEQ ID NO: 91907 - DNA, 1959 bp, Enterobacter aerogenes; identical to SEQ ID NO: 22818

SEQ ID NO: 91908 - DNA, 435 bp, Enterobacter aerogenes; identical to SEQ ID NO: 13693

SEQ ID NO: 91909 - DNA, 720 bp, Enterobacter aerogenes; identical to SEQ ID NO: 13694

SEQ ID NO: 91910 - DNA, 213 bp, Enterobacter aerogenes; identical to SEQ ID NO: 6096

SEQ ID NO: 91911 - DNA, 708 bp, Enterobacter aerogenes; identical to SEQ ID NO: 10371

SEQ ID NO: 91912 - DNA, 852 bp, Enterobacter aerogenes; identical to SEQ ID NO: 10372

SEQ ID NO: 91913 - DNA, 816 bp, Enterobacter aerogenes
atgaataaatcgctcatcattttcggcatcgtcaacataacctcggacagtttctccgatggaggccggtatctggcgccagacgcagccattgcgcaggcgcgtaagctgatggccgagggggcagatgtgatcgacctcggtccggcatccagcaaccccgacgccgcgcctgtttcgtccgacacagaaatcgagcgtatcgcgccggtgctggacgcgctcaaggcagatggcattcccgtctcgctcgacagttatcaacccgcgacgcaagcctatgccttgtcgcgtggtgtggcctatctcaatgatattcgcggttttccagacgctgcgttctatccgcaattggcgaaatcatctgccaaactcgtcgttatgcattcggtgcaagacgggcaggcagatcggcgcgaggcacccgctggcgacatcatggatcacattgcggcgttctttgacgcgcgcatcgcggcgctgacgggtgccggtatcaaacgcaaccgccttgtccttgatcccggcatggggttttttctgggggctgctcccgaaacctcgctctcggtgctggcgcggttcgatgaattgcggctgcgcttcgatttgccggtgcttctgtctgtttcgcgcaaatcctttctgcgcgcgctcacaggccgtggtccgggggatgtcggggccgcgacactcgctgcagagcttgccgccgccgcaggtggagctgacttcatccgcacacacgagccgcgccccttgcgcgacgggctggcggtattggcggcgctaaaagaaaccgcaagaattcgttaa

SEQ ID NO: 91914 - DNA, 420 bp, Enterobacter aerogenes; identical to SEQ ID NO: 51548

SEQ ID NO: 91915 - DNA, 837 bp, Enterobacter aerogenes; identical to SEQ ID NO: 22759

SEQ ID NO: 91916 - DNA, 1029 bp, Enterobacter aerogenes
atgaacctctccctcaaaccctggaatacctttggcattagccattctgccaaagcaattgtacttgctgaaaatgaacaacagttgctggctgcctggcaagccgccgctgcagaacaccaaccttgtctgatccttggagaaggaagcaacgttctgttcctgaaagactattccggcacggtgatcatcaaccgcatcatggggatcgaggtaagcgaaacgtctgaagcctggcgtttgcacgttggcgccggtgaaaactggcatcaactggtgcaatttgcgctggaaaatggaatgcctgggctggaaaacctggccttaattcctggctgcgcgggatcttcgccaattcaaaatattggtgcctatggtgtcgaactgcagcgagtatgtgaatacgtagactgtatcgaactcgagacgggtcgcaagcagcgcctttctgccgcagagtgccgtttcggctatcgcgacagtattttcaaacatgaatatcaggatcgttacgcgatagtggctgttgggctacggctggaaaaagcatggcagcccgtcctgacctatggtgatttaacccgcctcgatccgcaaactgttaccccacgccaggtattcgatgccgtttgtcacatgcgtatgaccaagttaccggatcctaaagtgaatggtaatgccggtagcttctttaaaaacccggtcgtcagtgctcaggttgctcaggcattgctggctgcattccctggcgcgccgcattatccacaggctgacggcagcgttaaactggcggccggttggcttatcgaccagtgccagctaaaaggcaaaacggtcggtggggctgccgttcaccgtcagcaggcgttggtgctgatcaacgataaccaggcgaccagcgatgatgtcgtaggcttagcccactatgtccgccagcaggttggcgagaaatttaacgtttggctccagcctgaagtgcgcttcatcgcagagaacggtgaagtgaatgcggaagaggtgattgcatga

SEQ ID NO: 91917 - DNA, 963 bp, Enterobacter aerogenes
atgaaagacaataccgtacccctgacgcttatctctattctggcggatggtgagtttcactctggcgaacagctcggcgaacgcctggggatgagccgcgcggcaattaacaagcatatgcagacgctccgcgactggggtgttgatgtgtttaccgtacctgggaagggctatagcctccctgagccgattgaattgctggatgagcaaaagattgccggccagattgaacaaggtcgcattaccgtgctgccggtgattgattccaccaaccagtatttgctggatcgtctggatgaactgaagtcaggtgatgcctgtgtcgctgaatatcagcaggctggtcgaggtcgtcgcggccgtaagtggttctcaccgtttggggccaatctttatctctccatgtactggcgtctggaacaaggccctgctgctgcgattggtttgagcctggtgatcggtattgtgattgcagaagtactgcagagcctgggggcggataacgttcgggtcaaatggccgaatgatatctatctgcaggaccgcaagttgtccggtatcctggtagaactgacaggcaaaaccggtgatgccgcgcaaatcgtcagcggcgctggtatcaacctcgtgatgcgccgcgttgagtctgacattgtcaatcaggggtggatcagcctccaggaggcgggagtcttcattgaccgtaacaccctgacggcgcgtctggtgaaagcattacgtaccggtttgcaactattcgaacaggaaggtttaacaccttacctgccacgctgggaaaaactggataactttattaatcggccggtgaagctgattattggtgataaggaaatatttggtatttctcgcggaattgatgctcaaggggcattattactcgagcaggatggggtaattaaaccatgggtgggaggcgagatatcgctgcgtagcgctgaataa

SEQ ID NO: 91918 - DNA, 927 bp, Enterobacter aerogenes
atgacaccctatctacaatttaaccgcaaccaatgggctgcacttcgtgattccgttccgatgacgctgacagaggaagaaatcgcgcggttaaaaggcatcaacgaagatctttcgctggaagaagtcgccgagatctatttgccgctgtcacgtttgctcaatttctatatcagttccaacctccgtcgccaggcggtgcttgagcaatttcttggcaccaacggccagcgtattccttacatcatcagtattgcaggtagcgttgcggttggtaaaagtactacagcgcgtgttttacaggcgctgcttagccgctggccggaacatcgtcatgttgaactgataactaccgatggcttcttacatcctaactcggtgttaaaagaacgcggcttgatgaaaaaaaagggcttcccgcagtcctatgatatgcatcggttggtgaagtttgtttctgacctgaaatctggcgtaccaaatgccaccgcgccggtctattcccatctcatttatgatgttattcctgatggtgataaaaccgttgctcaaccggatattcttattctggaaggtttgaacgttctgcagagcgggatggattatccgcacgatccgcatcatgtatttgtctctgactttgtcgacttctctatttatgtcgatgcgccggaagacttattaaaaaactggtatatcaaccgcttcctgaaattccgtgaaggcgcttttaccgatccggattcttatttccataattacgcaaaactctcaaaagacgaagcggtcaatatcgccacttcattatggaatgagatcaacctactgaacttaaaagaaaatatattaccaacccgagagcgagcaagcttgattatgaccaaaagcgaaaatcattcggtcgatcaagttcgcctaaggaaataa

SEQ ID NO: 91919 - DNA, 2739 bp, Enterobacter aerogenes
atggcaaagctgctcaaggcaatgaaacgcccggcggcgctgtggggggtgccaatggtgcccctgctggctgtcacgggtgtaaccatcatcgttgctatctggacttccgtcgctctcctgttcttacttcctgtgcaatttctggtgatgaagtcccttaccagaaatgaaccgatgcggttcaatctgattgccgtatggctgagagcgaagggaaagccggtagcgaaccgtttatttggcgcaacaacatttatgcccgttgagcatgatgatgttgatatcaaggagtttctcgacgccatgaaactaaatcagtgtgccaccatcaagaagtacatcccgtactcatcgcacattcatcagcatgtggttcgttcccctaagagcgatctgtactgcacctgggaattgatgggaacgccgttcgactgcgagtctgacgaatcgctccagttcgggacgaaccagttacacgggctaatccgctcattcgaaggtatgcccgttactttctatatccataacgaccgcaatacgtttaccgacaatcttcataaagattccggcaacccgtatgcagatgaagttagccgtctttactacgcttctgtcggtctgttccggcgcaaccgcctgttcctgacggtctgctatcgcccgtttgtcagccttgaaaaagcagaacgcaaacggatgaaagacagccagaaactaaaggagctggacggtgctttgctggaaatgctggaaataaaaagcacgctcgataccgcgctgtcgcgctatggtgcgcggcctctcggtacgtttaccgaaggaagcgcggtgttttcgtcgcaactggctttctatgaatatctgttaacgcaccagtggcgaaaggtgcgcgtcacccgcaccccggcctatgacgtgatgggagcggcggcgttgttcttttcggctgaatccgggcagattaaccacgccaacggtacgcaatatttccgggggctggaggttaaagagttctccgaagaaaccgccactggaatgatggactcccttctttacgccccctgcgattacgtgatcacgcagtcctatacctgcatgtcacgcgaggaagcgaagaaagccattaagcgtacccgtcgccttttgatgagtgccgacgacgatgctgtttcccagcggctggatctggatgtggcgcttgacctgctgacatcggggaaaatcgcttacggaaagcaccatttttccatcatggtgtattccccgtcgctggaaagcctggttgctgatactaacgaaatcagtaacgcgctgaacaacatcgggataacgcctgttccggcagaaatatcgctttcagcggcatatatggcgcaactgccaggcaactacaatctgcggccacgtaaaggggagctgagtagccagaactttgtggagctggccgcactccataatttctatccgggcaagcgcgataaagccccctggggggatgcgatggctttactgcgcaccccgtcaggcgatggctactatatcaacctgcataacacactggcagataaggacgaattcaacgagaagaacccggccagtacctgcatcctcggtacgaacggttcgggtaaaaccatgttgatgacgttctttgagatcatgcagcagaaatacgggcgcgaggatagcttctccccggatgccaaaactaaacggctgacaaccgtttacctcgataaagaccggggcgcagagatgaacatccgggcgctgggtggccgttactatcgggttatcagtggtgagtctacagggtggaacccgttctcgttgcctgcaaccaaacgcaatatcaatttcatcaagcaactgatgaaaatcctttgtacccgcaacggctcgacgatctccccacgcgatgaacgccgtctgagtgatgcggttaatgctgtgatgaatgacgagccacaatatcgcgtctacggaattacccgaatgctggaaaatttgcctgagccggctacgaaagaagcccaggaaaacggccttagcattcggctgtcacagtgggcgcagggcggtgagttcggctgggtgtttgataacgaatctgacacgttcgatatcagcaactgcgataacttcggcatcgacggaacggagttcctggacgatgcaagcgtatgtgcgccaatctcgttttatctgctgtaccgcattaccagcctgcttgacgggcgacgcctggtcattttcatggatgaattctggaagtggttacgcgacccggtgtttaaggactttgcttataacaagctgaaaaccatccgtaagctgaacgggatgctggtcgtaggtactcaatccccggcagagatcatcaaagatgatatcgccccggcagtgattgagcagtgcgggacacagattctggcggcgaaccccaatgccgaccgcgcacactatgttgacggcatgaagtttgaaccggaagtgttcgacgtggtgaaagggcttgacccgcaagcccgccagtatgttgtggtgaaaaatcagttcaagcgcggcgataccaaacgttttgccgctcgcgtcacgctcgacctgtcgggtatcggcagatacaccaaagtcatgagcggcgatgcccccaacctcgaaatattcgaatcgatttaccgggaaggaatgcagcctcatgaatggctcgatacctacctggctaaagcgctctga

SEQ ID NO: 91920 - DNA, 906 bp, Enterobacter aerogenes; identical to SEQ ID NO: 6034

SEQ ID NO: 91921 - DNA, 1239 bp, Enterobacter aerogenes; identical to SEQ ID NO: 6033

SEQ ID NO: 91922 - DNA, 585 bp, Enterobacter aerogenes; identical to SEQ ID NO: 6032

SEQ ID NO: 91923 - DNA, 183 bp, Enterobacter aerogenes; identical to SEQ ID NO: 71824

SEQ ID NO: 91924 - DNA, 582 bp, Enterobacter aerogenes; identical to SEQ ID NO: 15705

SEQ ID NO: 91925 - DNA, 234 bp, Enterobacter aerogenes; identical to SEQ ID NO: 15702

SEQ ID NO: 91926 - DNA, 711 bp, Enterobacter aerogenes; identical to SEQ ID NO: 71828

SEQ ID NO: 91927 - DNA, 906 bp, Enterobacter aerogenes
atgaaaaagttaacatttaccgcactggcactgatgatgtgcggtgcggcatggggtgcggccataccacaggcaagccgctatgactcccgtgttcagcaggttatctataacccgcagaacgtaaccgtcgttaacaccaaacccggctttatgacaactctggtatttgataacgatgaggcggtcataagcgccaaacccggctttgatgaggcgtgggaagccacgccggatgcaaaccgggtcaacgttcgcccggtcgcgctcacgcagggagcgcccggagaggatggcaacacaacgcaagtcgtgatccccccgaacagccgggactggcataccaatatgctggttgtcaccagtaagcgcctgtacaacgtcgagctgaacgtcatcgatgataaatcggcacagcaacccgctttccaagtgagctatcgctatccgggcgaagaacgggacaaagcgagccgggaggcgacggccagacaacgcgagtgggagcagaaacagcagcaggccagtgtccagaaagcgctgaactcggcacagacgccccgcaactggagttacacaaaatatccgggcaaaggcagcttcaacattgttcccgattttgcttacgacgatggccgctttacgttcgtgggcttctccccgtctaagtccattccttccgtcaccaaagagctgaacggcaaagagcatgtggttaacagcagtatccagaagaaaggcgacttcaccgtactggtgattcaggaggtgacgccacgcctggtactgcgttccggtaatgccgttgtgggtctggaaaatagcggatttggcaaggtacacgccgccgatggttccaccgtatcccggcaggtggaaagagtggaaaaaccggaatccaattaa

SEQ ID NO: 91928 - DNA, 684 bp, Enterobacter aerogenes
atgagtgaacagaaattaatagctgaatcccgcacctttgagcagcaaatgattgagcgggataaacgcgccacaaaagccggttttgttgttggcggtgtgggtctgctgattgcggtactggcgctcgtcgccgtggtcgtgatgttgccgctgaaacagacggacgttgagctgtataccgtggataaccacacaggacgggtggaacacgttacccggacatcgaaaaccagcctgaccgcaacagaagcctatcaaaaggcgatggccgcaaactacgtcaaagtgcgtgagcggtatgtctatccctctttgcaggacgactacgagacggtacaggtctacaacgctccccaggtaaacgatgactacctggcgctttacgccggaaaaaacgccccggacaaggtttataagaacggggcgcacaccgtgaaagtggagatcttgtccaaccagatcaccgatgcgacagcccctgacagggtcgccaccattcgctacaagaagattatccgccgtctggctgataacagcatccgcaacgaatattgggatgcccggttcacgttccattctgaccctgacaaggaaatgagcgatgcggaacgcgagatcaactacttcggctttaccgtcaccagttggcagaccgaccgcgaaatccggggaggtgaatga

SEQ ID NO: 91929 - DNA, 273 bp, Enterobacter aerogenes
atggcggcgcatagcgccttatccgggctacggttcggtagtcggttggtagccccggtaagcgtaagcgccaccggggagggttcccggatggcggcgcatggcgccttatccgggctacggttcggtattcggtcggtagccccggtaagcgtaagcgccaccggggaggattcccggatagcggagcatcgcgccttatccgggctacgattcggtattcggttggtagccccggtaagcgtaagcgccaccggggaagttcccggatag

SEQ ID NO: 91930 - DNA, 1680 bp, Enterobacter aerogenes
atgagtaacgccatcacggagattgataacaccgacctggtgtttatcttcggttacaacccggcggattcccaccctatcgtggcgaatcacgtcattaacgccaaacgcaacggggcgaaaatcatcgtctgcgacccgcgcaagattgaaaccgcgcgcatcgccgacatgcacatcgcgctgaagaacggctcgaatatcgcgctgctcaacgccattggccacgtcattattgaagaggatctgtacgataaatccttcgtcgccagccgttccgaaggcttcgaggagtatcgcaaaatcgtcgaaggctacacgccggagtcggtggaagagataaccggcgtcagcgctcaggagatccgcgcctgcgcccggatgtacgccagcgccaaatccgccgccatcctgtggggcatgggcgtcacccagttctaccagggcgtggagaccgtgcgctcgctgaccagcctcgcgatccttaccggcaacctcggcaagccgagcgtcggcgtcaacccggtacgcgggcagaacaacgtccagggcgcctgcgatatgggcgcgctgccagatacctatccgggctaccagtacgttaagttcccggaaaaccgcgagaagttcgccagagcctggggcgtcgacagcctgccggagcataccggttatcgcatcagcgagctgccgcaccgcgccgaacacggcgaagtccgcgcggcgtacattatgggcgaggatccgctgcagaccgatgccgagctttccgcggtgcgcaaggcgtttgaacagctggaactggttatcgtccaggatattttcatgaccaaaaccgccgccgcggccgacgtcatcctgccgtccacctcgtggggcgagcacgaaggcgtgtataccgcagcggaccgcggcttccagcgcttctttaaagcggtggagccgaagtgggacctgaaaaccgactggcagattatcagcgaaatcgccacccggatgggctatccgatgcactacaacaacacccaggagatctgggatgagttgcggcatctgtgcccggacttctacggcgccacctatgagaaaatgggcgagctcggctatgtcatgtggccatgccgcgatgagtccgacgccgaccaggggacgtcgtatctgtttaaagagaagttcgataccccgaacgggctggcgcagttcttcacctgcgactgggtcgcgccgatcgataagctcaccgacgagtatccgatggtgctctcaacggtgcgcgaggtcggccactactcctgccgttcgatgaccggcaactgcgcggcgctggcagcgctggcggatgaaccaggctatgcgcaaatcaacaccgccgacgccgaacggttaggcatcgaagatgaagcgctggtgtgggtcaattcgcgtaagggccgcatcatcacccgcgcgcaggtcagcgatcgaccgaataaaggcgcggtgtacatgacctaccagtggtggatcggcgcctgtaacgagctggtgtcggagaacctgagtccgataaccaaaacgccggagtacaagtactgcgcggttaacgttgaacggattgccgatcagcgcgcggcggaacagtacgtaatcgaggagtacaacaagctgaaagcccgcctgcgcgaaagcgcgatgggttaa

SEQ ID NO: 91931 - DNA, 225 bp, Enterobacter aerogenes
atgatccgtcgccagcgtggcggcaaactggaagccgtctcctgggatgaggcgctcgattacgtcgccacccgccttggcgccattaaagaaaaatatggcccggacgcgatccagaccaccggctcctcccgcgggaccggtaatgaaaccaactacgtgatgcaaaaattcgcgcgcgccgttattggcaccaataacgtcgactgctgcgctcgcgtctga

SEQ ID NO: 91932 - DNA, 570 bp, Enterobacter aerogenes
atgataaaacatatccgtattttgcccggcggactgatggtgctggccgccgttttgctctgcctgctgacggcctgtcgcgaccacagtcgcgacggcatgagcggcgctgacataaatgtctataaccacggcccggatgacattgtttcggtgcaggtaaacggttacgggggccccagggctaatccctacggcggcggcggcttctgttgcgtgatggtgccagatgtctggcggccgggactgacggcaaaaatcacctggacttccgatcctaatgcctggatgaaatcgagtgagatgccggacgactatgaaactcactatcagaaacatgggccgattactgtccctatcgaacgttgggagaaggggcaggcctgcggatttgatgtgcatattttcccctgcgataaagtgcggatagtgcgttcctgcatcccgccgggacagccgggatatccggttccccagtcgccgccagactggaagcaaagagctcagaaaatacttatccaacatatcaaggaggaagttgtatgtccgacgccgcagactccacgttaa

SEQ ID NO: 91933 - DNA, 450 bp, Enterobacter aerogenes
atgtccgacgccgcagactccacgttaagtgccctgaaggcgcttattgccgccttccagaccggcgccaccccggtcgctgtcaaaacgtccaccgcagaagcggccagtttaccgccacactttcccgggccggatgataaaaaggggaaagcgccagcggatgactccacgcagcagaaaaccgaatacaacgagcgcgggcgcctgccggcgagcagaacgcagaccgaaggcaactacgccaggcagtacctggaggggtatgttaaagagtccgatcatccctcggacaaaaaaacggagccgggctgcccggccagcctgcatatcagcctgttcttcgacggtacctgctgtaatgaagaagatggtgatgaagtgtatggctcgcgaaacccgccgctgaccaatatcggccgattttatcatttggaaaaccggtattga

SEQ ID NO: 91934 - DNA, 378 bp, Enterobacter aerogenes; identical to SEQ ID NO: 16790

SEQ ID NO: 91935 - DNA, 1629 bp, Enterobacter aerogenes
atgaccgacgccggcatcgaccggcgctactacgaactgtgcgcgctgtccgagttgaagaactccctgcgctcgggcgacatctgggtgcagggttcacgccagttcaaggacttcgaggactacctggtaccgcccgagaagttcaccagcctcaagcagtccagcgaattgccgctggccgtggccaccgactgcgaacaatatctgcatgagcggctgacgctgctggaagcacaacttgccaccgtcaaccgcatggcggcagccaacgacctgccggatgccatcatcaccgagtcgggcttgaagatcacgccgctggatgcggcggtgcccgacaccgcgcaggcgctgatagaccagacagccatggtcctgccgcacgtcaagatcaccgaactgctgctcgaagtcgatgagtggacgggcttcacccggcacttcacgcacttgaaatcgggcgatctggccaaggacaagaacctgttgttgaccacgatcctggccgacgcgatcaacctgggcctgaccaagatggccgagtcctgccccggcacgacctacgcgaagctcgcttggctgcaagcctggcatacccgcgacgaaacgtactcgacagcgttggctgaactggtcaacgctcagtttcggcatccctttgccgggcactggggcgatggcaccacatcatcatcggacggacagaatttccgaaccgctagcaaggcaaagagcacggggcacatcaacccaaaatatggcagcagcccaggacggactttctacacccacatctccgaccaatacgcgccattccacaccaaggtggtcaatgtcggcctgcgcgactcaacctacgtgctcgacggcctgctgtaccacgaatccgacctgcggatcgaggagcactacaccgacacggcgggcttcaccgatcacgtcttcgccctgatgcacctcttgggcttccgcttcgcgccgcgcatccgcgacctgggcgacaccaagctctacatcccgaagggcgatgccgcctatgacgcgctcaagccgatgatcggcggcacgctcaacatcaagcacgtccgcgcccattgggacgaaatcctgcggctggccacctcgatcaagcagggcacggtgacggcctcgctgatgctcaggaaactcggcagctacccgcgccagaacggcttggccgtcgcgctgcgcgagttgggccgcatcgagcgcacgctgttcatcctcgactggctgcaaagcgtcgagctacgccgccgcgtgcatgccgggctgaacaagggcgaggcgcgcaatgcgctggcccgtgccgtgttcttcaaccgccttggtgaaatccgtgaccgcagtttcgagcagcagcgctaccgggccagcggcctcaacctggtgacggcggccatcgtgctgtggaacacggtctacctggagcgtgcggcgcatgcgttgcgcggcaatggtcatgccgtcgatgactcgctattgcagtacctgtcgccactcggctgggagcacatcaacctgaccggtgattacctatggcgcagcagcgccaagatcggcgcggggaagttcaggccgctacggcctctgcaaccggcttag

SEQ ID NO: 91936 - DNA, 861 bp, Enterobacter aerogenes; identical to SEQ ID NO: 5314

SEQ ID NO: 91937 - DNA, 333 bp, Enterobacter aerogenes; identical to SEQ ID NO: 5315

SEQ ID NO: 91938 - DNA, 1902 bp, Enterobacter aerogenes
atgggcatggctgacattgccgaagtcctgtggcgtgatttcctgaaccataacccgcagaacccgtcctgggccgatcgcgaccgcttcgtgctgtccaacggtcacggctccatgctgatttacagcctgctgcacctcaccggttatgatctgccgattgaagaactgaaaaacttccgtcagctgcactccaagactccgggccacccggaagtcggctacaccgcaggcgtggaaaccaccaccggcccgctgggtcaggggatcgctaacgcagtcggtatggctatcgcggaaaaaacgctggcggcgcagtttaaccgtccagggcacgacatcgttgatcacttcacctacgccttcatgggcgacggctgcatgatggaaggcatttctcacgaagtgtgctccctggccggtaccctgaaactgggtaaactggtggcgttctatgatgacaacggcatctccatcgatggtcacgttgaaggctggttcaccgacgataccgcgaaacgctttgaagcctacggctggcacgtggtgcgcggcgttgacggtcacgacgctgacgccatcaaacgcgcggtagaagaagcgcgcgcggtcaccgacaaaccgtccctgctgatgtgcaaaaccatcatcggcttcggttcgccgaacaaagcaggcacccatgattcccacggcgcgccgctgggcgacgcggaaatcgcgctgacccgcgaagcgctgggctggaaatacggcccgtttgaaatcccgtctgacatctatgcgcagtgggatgcgaaagaagccggccaggcgaaagaagccgcgtggaacgagaggtttgccgcctacgccaaagccttcccgcaggaagcggccgaattcacccgccgtatgaaaggcgaaatgccgtctgacttcgacgcgaaagctaacgagttcatcgctaagctgcaggcgaatccggcgaagatcgccagccgcaaagcatcgcagaacgccattgaagcgtttggcccgctgctgccggaattcctcggtggttctgccgacctggcgccgtccaacctgaccctgtggtccggctctaagccgatcaacgaagacaccgccggtaactacatccattacggcgtacgtgaattcggtatgaccgcgattgccaacggtatttcgctgcacggtggtttcctgccgtacacctctaccttcctgatgttcgtggaatatgcgcgtaacgcggtacgcatggcggcgctgatgaaacagcgtcaggtgatggtctacacccacgactccatcggtctgggcgaagatggcccgactcaccagccggtagagcaggtggcttccctgcgcgtcacgccgaacatgtccacctggcgtccgtgtgaccaggttgaatccgcgattgcgtggaaatatggcgtagagcgtcaggacggcccgaccgcgctgatcctctcccgtcagaatctggcgcagcaggagcgtaccgcagagcaactggcaaacgtggcccgcggcggttatgtgctgaaagattgcgccggccagccggaactgatcttcatcgccaccggttcagaagtggagctggcggttgcagcgtgggacaaactgaccgctgaaggcgtgaaggcgcgcgtggtctccatgccgtccaccgatgcgttcgacaagcaggatgcggcctatcgtgaatccgtactgccgaaagccgtttctgcccgcgtagcggtagaagccggtatcgcggactactggttcaaatacgttggcctgaacggcgccatcgttggcatgaccaccttcggtgagtctgcgccggcagagcagctgtttgaagagttcggcttcaccgttgacaacgttgtcgccaaagcgaaagcactgctgtaa

SEQ ID NO: 91939 - DNA, 480 bp, Enterobacter aerogenes; identical to SEQ ID NO: 8333

SEQ ID NO: 91940 - DNA, 327 bp, Enterobacter aerogenes; identical to SEQ ID NO: 5975

SEQ ID NO: 91941 - DNA, 243 bp, Enterobacter aerogenes; identical to SEQ ID NO: 71832

SEQ ID NO: 91942 - DNA, 1074 bp, Enterobacter aerogenes
atgagtggcggtctttttgttggggttgaaaaatacctgataggaggaattacagacgccacaaagggattgatgatgtcgtactcttctatgatgatggggctggcagcagcgtcagctaccatctacatcatgtggcgtggataccagactttggctggtaagctatctacgcctatggaagacacgatgtgggacatcatgaggatggcgatcatcctgtcctttgtggctaatttaggcggctacctcgatggcgttattgatgccataaacggaataaaggagggtttttctggtagtgataatatatggcagttattagacaccctatggaataaggctaaagtgttagggaaaacgctacatgacatggataattctacatatgtaaaagatgagggaatgactgctcaattttgtgtatggcttggaatattcgcacttatgattctagcgggctttgtttcaatggttgccgaagtaatgattctactattaggaataactgcacctattttcatattctgccttatgtatggtttcctccgccccatgttcaataactggttgcaaaatatatttgcaggaatattaacaattctatttgccgctctctcattgagaattgtagtgaattacttgaatctcgttcttaataaggcgacgaaggtagcagacagttcaacaattgttgaacttggtgctcaagtctgccttgcaggtattttcgctgcaatactggtgtatatttccgctaaggtagccgcagctctggccggggcaagcgctaccgtatccatgcaggggctggccgcagtaggtatcggtgcggctgcttttggtgccgggaagctagccgcgagtgccggaaggaataccacacgctccgcccaggacaacattcagggctggaaggatgcgaatgcaggtaagcccggcaagcccggaggtgagttaggctataacgcatctaaagcgcggaagtacgcgattgagcagatgatagcccggaacgaagcgcggaggctggcacagtcgagagattccgcggttaagaagttcaacagctag

SEQ ID NO: 91943 - DNA, 570 bp, Enterobacter aerogenes
atgataaagcatatccgtattttacccggcggactggcggtgttggccgccgctttgctctgcctgctgacggcctgccgcgatcacagtcgcgacggcatgagcggcgctgatataaatgtctataaccacggtccggatgccattgtttcgatgcaggtgaacggttacggcgggccaagagctaatccctacggcggcggcggcggcttctgctgcgtcatggtgcctgatgtctggcgcccagggctgacggcaaaaatcacctggacctccgaccctaactcctggatgaaatccagcaatatgcctgacaattattcgcaatactatcagcgccatggaccaattaccgtgccgattgagcgctgggaggaggagcaggcctgcggtttcgacgtgcatattttcccctgcgataaggtgcggatagtccgttcctgtcatatgcgtgattcccctgaatacccagtacaacctgaacctgacgaagaaaaaaaagcagatagcgttattttcaaacatattaaggaggaagttgtatgtccgacaccgcagagtccacgctga

SEQ ID NO: 91944 - DNA, 522 bp, Enterobacter aerogenes
atgagcaagtattctctcaactttaagcttgaggttgtgcagcactatctttccgggctggaagggcagaaagcgactgcaaagcgttttggtatcgaccacagtgccgttcgtaagtggacggctgcctggaagcttcatggcgaagccggacttataacccgtcatttcacctattctcctgcctttaaagagtccgttatcctgcatatgcgtgaacaccggctgtctgttcgcgaagtctgtgcaaaatttactatccctgctttttccactgtttgtcagtgggaacgactgtatgatgaaggcggattagaagcccttactgatagccgacgcaggaaaaaaacgatgccagaacgccctgaaaatcacccgactcctccttcgcaggctccccttgccccggatgaacgagaggaacttgaacaactgcgtactgaagtggcatatctaaaaaagctgcaggccttactcagggaaagaagcacgtcaaaacgcgggataaagcgcaggtcgtga

SEQ ID NO: 91945 - DNA, 840 bp, Enterobacter aerogenes
gtgaatgagttaaggccggagttccctcttgcacgtctgttaaaagcggcagggctggcgagaagtacgttttactggcaactggccagcggtaaaaaaccagacaaatatgccagtgataagtggcagattttaacgctgttccataaacataaaggccggtatggatacaggagaatcacgctggctggccgccgggaaggaagcttactgaaccataaaacagttcagaggctaatgaatgagttagatttaacttgctgtatcagaaagaagaaatacaactcttacagaggccggtacgggaaagttgcgggtaatgtgctgaaccggcagttcagtgcggataagcccaaccagaagtgggtaacagatgtcacggaatttaaaatcaacggggaaaaactgtatctgtctccggttctggatctgtataacggagaaatagtggcataccagatggcgtcccgtcctctgctgtcgatggtggatgagatgctgtcaaaagcgctgtcggtactgggcaaagacgaatatccgctactgcactcagatcagggctggcagtaccagatggcgaattatcagaagagacttaaggacagcggtctgaaacagagcatgtcaagaaagggaaactgtcacgacaatgcagtaatggaaagcttcttcggtacgctgaagactgaatgcttttacttgacggagcataagaatatcagtgagttgcgcatggctatcgatgagtacatccactattacaaccatgaaagaataaaacaaaagctaaaaggcctgagtccggtagagtaccgaacacaggccctgatagccgcttaa

SEQ ID NO: 91946 - DNA, 1065 bp, Enterobacter aerogenes
atgaagatccttgttaccggtggcgctggttttatcggttctgctgttgttcgtcatatcattgaaaatacccgggatgaagtccttgtcatggactgcctgacctacgccggtaacctcgagtctctggcgccggtggctggcaacgaacgctactctttcacccagaccgatattactgattcggctgctgttacggcgcagttcaatgccttccagccggatatcgtgatgcacctggcggccgaaagccacgtcgaccgctctattgatggcccggccgcgtttatccagaccaacctgatcggtactttcacactgctcgaagccgcccgccagcattatatgtcgctttctgatgagcagaagcaggctttccgcttccatcacatttccaccgacgaagtgtatggcgatttgcatggcaccgatgatctgttcaccgaaacgactccttacgcgccaagcagtccgtattccgcctccaaggccgacagcgaccatctggtccgcgcctggaaccgtacctatggcctgccggtggtggtgactaactgctccaataactacggtccgtaccacttcccggaaaaactgatccccctgaccatcctcaacgccctggcgggtaaaccgctgccggtttacggcaacggcgagcagatccgcgactggttgtatgttgaggaccatgcgcgcgcgctctataaagtggcgacagaagggcggagtggcgaaacttacaatattggcggccacaacgaacgtaagaatatcgatgttgtccgcactatctgcgccattctggaccgcgtggtgacagagaaacccggcaatattaatcattttgctgaccttatcacgttcgttaccgaccgtccgggacatgacctgcgctatgccattgatgcggcgaaaatacaacgcgatctgggatgggtgccggaagagacctttgaaagcgggattgagaaaacggtccactggtatctgaacaaccagacctggtggcagcgcgtgctggatggctcctatgccggcgaacgtcttgggctgaataaataa

SEQ ID NO: 91947 - DNA, 174 bp, Enterobacter aerogenes
atggctgcaaatatgttttgtagccagttattaaacatgggacgaaggaaaccatacataaggcaaaagatgaatataggtgctgtaatactcagcaataagatcattacttccgctatcatggaaacgaacgcggtgataatcattaaaacgaatattccaagccatacataa

SEQ ID NO: 91948 - DNA, 729 bp, Enterobacter aerogenes; identical to SEQ ID NO: 50969

SEQ ID NO: 91949 - DNA, 243 bp, Enterobacter aerogenes
atgccgatgcagccgaaccagcgcaccactttcatccagcccagtttctccgccacgataccccagaagacgttggagaagatggtggtgaagaagaacgccgcccacacctgcagccattcggaagtggtgaagccaagttcatcaacgaacatcatcggcatgaccaccgcgaagccgaacagcgacagggtgttgataatacgcacgatgctggagagcataatgctgcggttggtgtag

SEQ ID NO: 91950 - DNA, 660 bp, Enterobacter aerogenes; identical to SEQ ID NO: 52324

SEQ ID NO: 91951 - DNA, 570 bp, Enterobacter aerogenes
atgataaagcatatccgtatttttcccggcgggctgacggtgctggccgccgtttttctctgcctgctgacggcctgtcgcgatcacagtcgcgacggcatgagcgccgccgacatagctgtcttaaaccacggcccggacgctatcgtttcggtggaggtcaacggctacggcgggccaagagcgaactcctacggcggcggcggcggcttctgctgcgtgatggtgccagatgtctggcgtccgggcctgacggcaaaaatcacctggacctctgaccctaactcctggatgaaatccagtgagatgccggatgattatgaaactcactatcagcgccatgggccgatcacggtgcctattgaacgctgggaggaggatcaggcctgcggctttgatatccatattttcccctgcgataaagtgcggatagtgcgttcctgctatggtcgagcggcccctgaatacccaatacagcctgaccctgacggaaataaaaaagcacaaaatatactttataatcacgttaaggagaacatcgtatgtccgacaccgcagactccacgttga

SEQ ID NO: 91952 - DNA, 492 bp, Enterobacter aerogenes; identical to SEQ ID NO: 91845

SEQ ID NO: 91953 - DNA, 276 bp, Enterobacter aerogenes; identical to SEQ ID NO: 5786

SEQ ID NO: 91954 - DNA, 369 bp, Enterobacter aerogenes
atgcacaagcgcgaagatggttttgtggtggtcaatgaagaggtgtgcattggctgtcgctactgccatatggcctgcccgtacggcgcgccgcagtacaacgccgctaaagggcatatgaccaaatgcgatggctgtcacgaacgcgtcgcacaaggcaagaaaccgatttgcgtcgagtcctgcccgctacgggcgctggacttcgggccgattgccgaactgcgtgaaaagcacggccaactggccgccgtggcgccgctgccgtcggcgcacttcaccaggccgagcattgtgataaaaccaaacgccaacagccgtccgtgcggcgataccaccggctatctggccaatccgcaggaggtctaa

SEQ ID NO: 91955 - DNA, 321 bp, Enterobacter aerogenes; identical to SEQ ID NO: 71838

SEQ ID NO: 91956 - DNA, 408 bp, Enterobacter aerogenes
atgcactggctggataaaatcggcgaaacgcggcagggaaacattatcaatcttcagttcaatgtccctcatccaccacttgtgattgatacaacctgggttacggaaacggaaaattacggtttctacatccgcgatatgacgactcagaattttgatgttgtggatatcatttctgccgttgaaatcgctggtcctgatcgcgtcaggattatttgtagccgggccccaacagctaatgaacaggttacgtacggatggggtaaggcgggggatccgatgactaccgggaggacaaccggcccacgcggaaacctccgtgatagtgaaggggatttgccaggtgaaagctacaccgatacatccgggacgctgagaaaactccataactggtgcgtaattttttaa

SEQ ID NO: 91957 - DNA, 150 bp, Enterobacter aerogenes
atggaaccgggctgtcccgccagcctgcacatcagtctgttcttcgacggtacctgctgtaatgaaaagggagccgatgaggtgtacgggtcacgtaacccgccgctgaccaatatcgcccgattttatcatttggaaaaccggtattaa

SEQ ID NO: 91958 - DNA, 348 bp, Enterobacter aerogenes
atgaaaaaccgctataaatctctggttgatcgctatgcggcagctatccgcagcggtgcgctggcggctggctgccagctgccgacccatcggcaattggtcgttgaacacggaatttctctggctaccgcgacgcgggtctaccgtgatggctgggtaatgaatctggcgcagcgtagtcaactggttgatattgcccgccagttcgatttgttcatcattgaggatgccgcctatgcgtggttgattgaaaacacgccgccgccgctgatgtcgctggcgcctgagcgtcaaaaaacatcgccaccggtttacgggttggcatggtggtatgccgcgaagcgttaa

SEQ ID NO: 91959 - DNA, 672 bp, Enterobacter aerogenes
atgcgtagtcgcatgagttgggaagatttatggcccttattgtgggaaggcagcctggaaaccctctatatggtaggtctggcggcgctgtttaccattttaatcggcctgccggtcggcgtgttactgtttgtctcccgtcgcaacggcctggcgccgatgccgaaactgaatgcgttgctgggggcgattattaattttggccgctcgctgccgtttattgtactgctcattgcgctgatccccttcacgcgtttgattatcggcaccaccttaggcagcaccgccgccgtcgtgccgattaccatcggcgcttttccgttcttcgcgcgactgaccgaaaacgcgctcgacgaagtggattacggacgcattgaagccattctgtcgatggggggtaatctgtggcacgttatctttaaatcgctgctgccggaggcgctaccgaccctgcttgccgggatcaccctgactatcgtgatgctgattggcttttcatcgatggcgggcgtcattggcggcggcggtcttggggacctggcgattcgctacggttatcagcgctttaacgatcaggtaatggtcggtacggtactgattctggtggtgatggttcagggcgtacaaatgatcggcgacaggttggtacgacagcttgcccatcgccgctaa

SEQ ID NO: 91960 - DNA, 915 bp, Enterobacter aerogenes
atgagcatcgaaaaattaacccagcagccgctaacgattggcgtggaactgccgctggacaatgactggtcgaaaagcggacagctaaaacggcagcgcgacgggcgaccgtttggcgtgccggatatgagcgagcacgcggagcgcattaaactggcggatacgctcgggtttcgcgctgcctggatccgcgatgttccgctatacgatccgcagtttggcgatgcggctaacgtctttgaagcctttacctacctcggctatttatcgagcctgacgcaaaatattttgctgggcacggcggcggttgtgctgccgttacgtcagccatggctggtacgtaaagccgccgccacggtgcaggcgctcagcggcgaccgactgctactgggcatcgccagcggcgacaggccggtcgaatacccgctatttggtgaagactacgccagccgcggcgagcgtttccgtcacggcgtgagcgtgctgaagggcgagaccgatcgtcagctggagccgggcctggagttgctgccagccaaaccgaccccgccgctgctggttgctggtttggcgcaacaaacggcgcaatgggtaggcagtaatatggatggctggcttgcctaccctggccagcctgacgagcacgttagccgcgtcaagctgtggcgccgggtagcgggcgagaaaccctatatcagctttatccacctggatctgcaagatgacgccaatgcgccgattcagcgccatcgtttcggcatcagcagcggccgccatggtctcattcaggaattgaacgcgatgcgcgatgccggcgtgaaccatatcggtctgcattttcgtcgcaaccagcgtccgctggccgagacgatgcaggagattggcgaactggtgctgccggcattccattattaa

SEQ ID NO: 91961 - DNA, 216 bp, Enterobacter aerogenes
atgagtcttagtccggttgtaataaaaaggtgtcatctcgtcgcggcgataatgtggtttgtactggctataccgtcggtaatatggtggaaagacagtgtcctgtgggtcatcattattagtatttatgcaaatattgtcggccacttatcagggtatagcgcagcacgagccgaccaggccgcagaagaaaatgaagataaggctgaagagtaa

SEQ ID NO: 91962 - DNA, 1404 bp, Enterobacter aerogenes
atggctgagtttgatgcatttcatctcgcgaggatccagttcgccttcactatctcctttcatattatttttccggcattaaccattggtcttgccagctatctggtggtactggaaggcatgtggttaaaaacacggcgcctgctctggcgccagctttatcatttctggctaaatatttttgcgattaattttggtatgggtgtggtatccggcctggtcatggcctaccaatttggcactaactggagcggtttttcccagtttgcaggcagtattaccgggcctttactgacatatgaagttttaaccgcttttttcctcgaagctggatttcttggcgtgatgctatttggctggaaccgggtcgggccgggattacatttcttttccacctgtatggtggccataggaaccctggcctcaacgttttggatcctggcttccaatagctggatgcagacgcctcagggctttcatattgagcaagggcaggtgataccagatagttggttggcgataatcttcaatccctcatttccctggcgcttactacatatgtctatcgccgcctttctaagtaccgcgctgttcgttggcgcttcggcggcctggcacttattacgtgataacgatacgccagccattcgaacaatgttttcaatggcattgtggatggcgttgattgtcgcccccattcaggccgtagtcggcgatatgcatgggctgaacacgctcaagcaccagccggcaaaaattgccgctattgaaggtcattgggaaaataaacccggcgaagctacgccgctgctactgttcggcctaccggatatggcagaagagcgcacacgatatccgctggctatccccgccctgggcagtttgattctcacccatagccgtagcgcccaggttccagcactgaaagactttcccgccaacgaacggcctaattcgacgattgttttctggtcgtttcgttttatggtcggagccggttttttgatgatcgcgcttggcgtcattggctggtatttacgtcgccataaacgtttatgcgactcgcgaccttttttgtggtttgcgttagcgatgggacctgtcggtttactgaccattctggccggctggatcacgacggaagtcggacgccagccctgggtggtgtatggtctgttgcgcacgcgggacgccgtctcagcgcatagtacgctgcagatgagcgtcagcctgaccgcctttgtggtggtctattttgcggtgtttggcgtgggatatctctatcttattcgtctactcaaactggggcctcagcctgaatcggaattagcgcttaattcctccggaacgccagcgcgtcctttatcggcgccggataaattaccgagtgaggagaaattctga

SEQ ID NO: 91963 - DNA, 1011 bp, Enterobacter aerogenes
atgggagtggatctggcagtcatctggtttgcgataatcatcttcgccacgctgatgtatatcgttatggatggtttcgatctcggcatcggcgcgctatttttatttacccgcgataaggcgcaccgcgacaccatggtcaatagcgtggcgcccgtgtgggatggaaatgagacctggttggtattaggcggcgccgggttatttggcgcttttccgctggcctacgcggtgatcgttgacgccctgaccatcccgcttaccgcgatgcttattggcctgatattccgcggcgtggcgtttgaatttcgttttaaagccgcggaatcccatcgccggttttgggatagcgcgtttatgtgggggtcattattagccatcttcagccaggggatcatcgtcggcgccattctgcatggttttccgttgcatgggcggcaattcgctggttcgccgcttgactggttgacgccatttaatttgttctgtggattagcgttaattgccacttatgccttactgggggtgacctggcttattttaaaaagtgacggggcgttgttacgcttgatgcgtcggttaacacgcacactgctgctgctttttctaattgccatggctgtcattagtttatggacgccgcttaccctcgcacgaattgctgagcgctggttttcgctccccaatgtcttctattttctaccggtgccgctactggtccttaccctcagcctctggttatggcggctgagtcaacacgccgacagccacgccgcgccttttattcttacgcttgggttgctgttccttggttttagcggtttagggataagtatctggccctggatcatcccaccgaatgtgacgctctggcaggcagcggcgccagtggccagccagttgttcatgttggtcggcacgctgctgattgttccggttatcctggcctataccgcctggagttactgggtctttcgcggcaaggtgcgggcagatgagggctatcactaa

SEQ ID NO: 91964 - DNA, 126 bp, Enterobacter aerogenes
atgtgcaagcgtatcgccaaaaggctgggctggctgctgttgatctggtgctgcggcgttctggtggtgttaatcatcagtacgctggtgcgcggttttatgacgctggcggggctgcatgtctaa

SEQ ID NO: 91965 - DNA, 1626 bp, Enterobacter aerogenes
atggcagagcaaccgtggtttcaaaacgctgtaatttatcaggttgatacctcgctgttttatgatgccaatggtgatggctgtggcgatctggccggaataaggcaaaaactctattacttacgtagctttggggtgacggtattgtggttaacccccttttatctgacgccatttctcgatgacggttacgacgtgcaggatcatctgcagcccgatccgcattttgggcaaatccgtgacgttattcaactgattgatgacgcgcgggaactggggatacgcgttatcattgagttggttatccagcatacctcttcgcaacacccctggtttctggaggcgcgtaaaaacaggcattctcctttccggccatattatctctgggccgattcgccgcccgaacaggacgacccgccaatgtttcccggtgtcgaaaagagcgtctggcgctgggatcaacaggcgggacagtattatcgtcacatgttctatcgccacgagccggatctcaatctggtgcaccctccggtgatagacgaaattgacaatattgtgcgtttttggctacgcgttggggtgagcggttttcggctagacgccgcctcacacctggttaaacaagccggaaatggcgacgaagagcaggggtactggatattggcccatcttcggcaactggttgaacagaccaatcctgaagccattctgctcggtgaagttgacgtggcagtgaacgattaccgtcactatttcggccacagcgatcgcctgcaactggtgcttaatttctggctgaacaaatttttttacgtcagcctcgcccggcagagtgcgaagccgctcgttagcgcgctgcaagcgatgattaagccgccgcccggttgctgttttgctaactggctacgtaatcacgatgagctcgacctggagggtattgaggacgcagaccggcagtttgtgctgcgctgtttcgcccccaagaagtcgatgtcagtctatcaacgtggcattcgccgccgcctggcgccgatgctggagggcaatatccgtcggctggcgcttagccatgcggtgttactgtcgctgcctggcgtgcctgtgatgcgctatggcgatgaaatcggtatgggcgaggatctgtcgctgaaagagcgttatgccgtgaggacgcccatgcagtggtcagccggggtgaatgggggcttttccaccgccgcggcggaaaaattactcgtcaggccggttgccagcggcccctggcgatatcagcaggtcaacgtcgaactggcgttgcgtcaacgccactcgttgctgcagcgagtgcggcagatggttcaactgcgcgccgaataccatgagccgggggccaccccctttgagctggtatccggcgtgccgccatcggtgttagcgctgcgctaccgcagtcaatctcgcgatctgatgatgctggcgaacttcagcgaacgcccggtagaggtacgattgccgcgtcaggagacaggttactggtcctgcgtgctggaggaccgccgttatcgcgatagccttaccggcggcaaggtctgccggttacagcttgccgattatggttatcgctggtttagccgccagcacgattaa

SEQ ID NO: 91966 - DNA, 996 bp, Enterobacter aerogenes
atggcggtaatggttatcaccggcggcagcgcgggcgccggtaaagcgacggcgctacgttttgctaaggcaggctatgatgtggcgattattgcgcgggatgaaagtgggctacaggaggccgaaaacgcatgtcgacagtacggcgtccggacgcaggttatcagcgctgacgtcgctgatgctcgctcgctgcagaaggccgcggcggaaatcgaaacccagctcggcgccattgaagtgtggatcaataatgccatgaccacggtgttagcgcccttccatttgatgagtgatgaggaatttcgccgcgtgacggaggtgacctatttaggttatgtcaacggtacacgcgccgcgctggaagtgatgagccccagaaaccgcgggataataatccaggtgggctccgcgcttgcctggcgttccatccctttgcaatcggcgtattgcggcgcgaaggcggcgattcgcggatttaccgatgctgtgcgaaccgacctgatgcatcaacgcagccggatccaattaaccatggtccaactgccgggaatgaatacgacgcagtttggttgggcaagaaataaaatggataaagagatgcagcccgttcccccggtttatcagccggaggtggcggcagaggcgatttttagcgtcgttcagcgccccgttcgcgaattgtgggtgggtaaaagcaccattcaatccatcgttggccaatttttcttcccttcactacttgaccgcctgatggttaacaaagcctgggaaggtcagctgacagcacaagcgaaatgcagcgaaaagccagacgatctctattctgccgtgcggggcgagcatagcacccgcgggacatttagcgctggcgctcgccagcgctcatttaacgtcagcgccgatttgcctggtaaagtcgcctccggcgttgggatcgcatttggactgatgatattacgcggactactacgccgcccgcgcaagcgccgttaa

SEQ ID NO: 91967 - DNA, 447 bp, Enterobacter aerogenes
atggaaatggtgctcagagccgtcgcaatctatcttatcttattgattatatttaaagttgctggcagaagaacgcttatgcaactcaccagttttgatctgattttactgttgattatcagtgaggccacccagcaggccatgctcagcaccgactattctgttaccggttcaatgctgactattgtcacgctggtcagcgtggatattttatttggctatataaagaagcgcttttcgcaggctgagaattatcttgatggttcgccgacgatcgtcgtagaaaatggcgttgtcgctgacgataaaatgaaaatggtcaatatctctgtggatgacatattgctcgccgcgcgacagcaccatggtatatatcaacttgagaagattaaatttgcgatcctcgaacgtaatggacagatttcaattattccgaccgaagcgtag

SEQ ID NO: 91968 - DNA, 1311 bp, Enterobacter aerogenes
atgcagttggccctgcatgttctttcggctagctgctacatctccaggccgctgtgccaggatagggataacacgatgttaggctggacttcactacagcgcaatgccgccattgccagcttcttaagctggacacttgatgccttcgattttttcctcctcgtcttcttactgagtgacattgcccagacgtttcatgttgggctggaaaaggtcacgctggcgatactactgacgcttgccgtacggcctatcggcgcgctcatttttggccggctcgccgagaaatatggccgtaagccgatcctgatgttgaatatcatcttcttttcgattttcgagctgctgtctgctgcggcgccgtcattaacgatttttctggtcttaagagtgctatatggcgtggcgatgggcggtatttggggcgtggcgtcgtcgctgtcaatggaaaccattccggatcgttcccgagggctgatgtccggaattttccaggccggttatccgtttggctatctgattgccgccgtcgcttatgggctgctatttgaattactcggctggcgcgggatgtttgtcatcggcgctgcgcctattttactgctgccgtttatctggttctgcgtgcaggagtcaccggtatggctggcgtcacgagagagaaaggaaagcacggcgctgctgccggtactgaaaacgcactggaaattgtgctgttatctggtggtactgatggcagcgttcaacttcttttcccacggtacccaggacctgtatccggtatttttaaaagtgcagcatggctttgatccgaaaacgatcagtattatcgcggtcacttacaatattgcgtcgatcatcggcggggtgctgttcggttcgctttccgagaagattggccgtaaaaaggccattataaccgcctcgctgctggcactaccggttataccgctgtgggcattcgctagcggttcgctgatgctgggaatcggggcattcctgatgcagtttatggttcagggcgcctggggcgtagtgccgacctatctgaatgaactggttccagctaatacccgtgcggtgctgccgggctttgtgtatcaactgggtaatcttatcgcttcggttaatgcgacgttacaggccacgatcgcggatcatcatggtcaaaactatgggctggccatggcaatcgttgccggtacggtggcgatcattatcgcgatactgaccttctttggtcatgaaagccgggcgaagaagataagcggggcggttgagcaaaacgccatgcagcatgtgagtcggtaa

SEQ ID NO: 91969 - DNA, 531 bp, Enterobacter aerogenes
atgataaatattgatattgaacgcccccaggatattcccctggttcaacaggccattattgaggcttttggctcagccgaagaggcattgctggtgaataaactgagagaggacgccgcctggatcccgactctttcactggttgcgagagataagcaaggaacaatcgtggggcatgccgtttgcacgcgagccagtgtgggtttacatccggcggttacgttagccccagtgtcggtacatccggcatatcaaggggtgggtattggcagcgccctagtcattgcgattatcgaagccgcacgcgacgctggcgagaaactcatgaccgtactgggacatcctgactattaccctcgctttggttttcaaccagcctctgcttatggagttatctgccaacttaatgacggccccgatgcagccaaaatgatcatgtctctcgataacagtgctattcctggaggaaacatgggattttgtaagccgatgactgaatctattcaggcctggcaaccagaccacgcataa

SEQ ID NO: 91970 - DNA, 1320 bp, Enterobacter aerogenes
atgataaaaatcctctgctggctcatactcacactgctaagcgcaacggggcttggcgcctggtttcttcaacagcaatatgacgcgcgctccgccgacttccgcatcctgtatcgcgaaatcacggtaaaggtgtcgcagcacgatgccatcatccccctgcttccgtccggtcaaaatgccgccgaagtccagcagatcctgccgcagatcgtgcaatggcggcgctatgattccctggagccgcgacgccccatcgtcgcgcaaagccccgcacgctactggctgaatcttccgggcatctccctgctgattgatttgaacaccctacttaacagtctcaatgagaaaaagacattcaaacatcttgccattcgttgggacggtaccacgttgtttgaggacggtgccgcatctgccaacacctggtggcgctgggagaaaactgttgccagcccaacacaacctctgctcattagcgcaggtgataacccgcaatggcatcaactgccgtggtggctgatactttcaccggcactgttctgggcggtgattatctatcttgttaatcagtatcgaaccaataaacgccgacgggatatcgccgatctacgcacccgctatggcgaactgactcgccttaacaccatgggcgagctggccgctggtatcgtgcatgagcttaatcaacctttaaccgccattatgagctataaccaggcggcagtgcgcctgattaaaaaaaacgatcccgtaaagatccccgaactgcttgaggcctcagtgttgcagataaaacgcattgacgccctgctcagccagtttcgtctcaagctaaccagcaagcgcgccgaatatcagccggttgaccttccgtcgctgtggctacgcgtgtgcgaattactggataatgagatccgcgccggtaaagttcgtatctccagccattttccgtcggacctacccgcgcttcctgcgccgccgctgtgggtagagcaaatactgcataatatcgttagcaatgccattcaggcacaaagcataaatgttccaggtagtgcgtggattcatctgcaagccgtgcgggtaaataacggtatcgctttaactcttactgatggcggaccagggttatcatctgaagcgctggagcaggtttttataccgttttataccacccgtactgatggtgtgggactcggcatggcccttgcggatacccttgttcagcgtcttaatggcaagatagaagcgagcaatatcaccggacaaggcgcttgcttccggttatggtttccgctgcgcaatgaggagaagtaa

SEQ ID NO: 91971 - DNA, 288 bp, Enterobacter aerogenes
ttgcctaaagggtcgggcttaagcattaactatccgccgctgccaaaatcaaaaattaaaggtgtgcactatgttgaaaatgagatgttccctaccccacagattggttatgatattttgcctgatggacgcgctaaacaaaccatcaatccggaatcgttaaagacagtagagaacgataccgattccggctggcttaataaaggttatatcacctatagcctctttgatggggcaatgaacgccccgcaattccaggcgcaatatgaagaactgttgagtaaataa

SEQ ID NO: 91972 - DNA, 1308 bp, Enterobacter aerogenes
atgtttaagaacataacttccgcgttaatagcgtgcgggctggttacgcctgtatgggccgctacagacgctatttctgatgatcctttttttactgactcacagctcactgtctctgcaaagaattactggaaatatcttaaggaggaaaatgccaatcctaaacatgtacacaacgcctgggggcagggattttcagcagaataccagtctggttattttgcagatattatcggcttcgatgtgtcgtattatagtgcgataaagttgggcgccagcgactatttcaactcccgcggcgtgctttataataatggtacaggtaacaaaaaaagcaacgccgaagggtattccaagttcggccaacgtaacgtgaagcttaactatacgctttctggggctcagttaaacgcgcgctggggatggcagatgctgaaaaattatggcgttatttcaacgtcaaaccggctttctccaacaacatattccggcgtaagcagtgctgtaagctacggcccatttaccataagaggggcgtggcttgaaaattccatggacagaaactcaccagataaaaagcaatttcaaaccaataccggtaaatatattagccacctggcaagcggagaagttctctggcggggagagaaatttgatgcacagtatgcttatggtgagagtaaaaactacctgcaacggcacctgctgtttactcagtttcgggcggattcgcagataacgattggaacgcaagtctacggcacccacgcgatggaaagttaccgcgcaatgcctgcgagcaaacgggattttgacaataacgcctggcattttgcgctggacgcgacctggaaaggcgaacgctggaatagcaaaatgggcattggctacaccaatgctaaaaaagcaggtgaagtcgggttttatccacgccacatgagtaaaaattcccggggaacgtttatttctatggcctacgctggcgatgattacatgcgggatggggaactggtgctggcgaacatcaccgaatatcgattaacgccagaattagccgttggcctggcgggaaacatcgggcaatttaactataaagggaatcatgtgcgcaccggggaaatcaatgcctttagccgttgggttccaacgcagtccatgtttaaaaacttcaccttttgggcgatgttcgggccgggatggtcatataagacgcaaggtaaaacgccagtccttacggacggtcattatacacgtacaaacacgctgtcgtcggaagtgatcatggaatatcgatttaaggtgttctga

SEQ ID NO: 91973 - DNA, 2196 bp, Enterobacter aerogenes
atggctttcccgattcgaaaacttctgctcgtctccttactgtccgcgctgggaagcgcgggggcgctggcggcggaacaatcccattttgaacattttattactcgtgatggtgctgcgttaaaagacggcgatcggctctttcgctttgccgggatccatgccccggagctgcatcgtatagaggatgacgcgagaggaacctgcaaagcggatccgcgcgggtgggggcaatatttcaaatggcctactgctgaagagcaagaaaactggattaaagccctggtgcaaacgggtgctaaagcacagcgcgtgtatgtgctatccgttcagcaggaaaacgacgcggcctgcggacgtgaaacgcatatcctgtcgccggaaacgcctaacggcatgccgcggctgaatgaagcggcaatgaaagtttatgacaacatgattgctgaagcagataagcaggggcttcgcctgattctaccgtttatcgatcactggtggtggtggggtgggagagaacagcttgcctcattttatcatgaaaaacctgaggatttttatcggacggacagtaaaaccttccaggcttatcttgacgtgattcgtcaggttataacccggacgaacaccattacgggacgccactactacgatgaaaaggcgattatggcgtgggaaacgggtaatgagctggaggacactaacgccgattttcttcatcagacatctgcctggatccgtaaatgggcaccccatcagcttgtcgtagatgggacttataaaaaggtgaatgatttcgcgctcagcgatccgaacgtcgacatcatcagcaatcactattacaccaatgccaataacaaccaccccgggcaggttcgtaaagatctggaggcgattggtggcaaaaaagtctatctggttggcgaatttggtctcctcgaccaaaaagaccttaacgctatcatgcagtctattgtgcatactgaggtcaatggcgtgcaggccgcgggcggctttatctggggttttcgcggtcatcggcatgatggcggtttttactggcacaaagagtataccggacactatagctaccatctgcctggcttcccggatgaggggaaagcgaatcaggagatggaggttgtcaacctggtacggactgccgccgcacaaatggctggtctgagcaaggtgccagatttgccggtaccagaagcaccgaggttacgcgagagcgattccccctttgccattaactggatggggtcacccgttggtcgttattacgacgtggaaagagctgtgcagccacagggcccatggacacgcgtcggaaaggacatttccgacggcaaaaatgaatgggatccatcgaaaatgagtcttttccgcgataattatcgcagcctgacgctcggccagacttactactatcgggtaatcgctaagaatgaaagtggtcagtcagcaccttcaaacgtgattcgcctgaaacatatgcagaaaaaccttccaccggttattaccctgcaggacatgctttctaccactgtcgataaaggcgttcaactcaatgctgcctggcaggatgacaatctacctggcccgaaagtcagcgtagcgtggagccatgacggtaagaataacgttcacttctgtaacagcagtaaagaggaaacccgagtctggttctccgcgccgggcgactatgcgttgacctttactgctgatgacgggttgctggaaagcagcaaaacgataaatgtcagcgtgaagcccgctgtgaggcctgtaccggcagattattgcagctttggcagcgggactatggatgttagcaagggaacacttaactccattaaaagtgaaaaagatacgttagccatcggagaagacggtttcctcgggcctttcgcgcatgacggagacagcgtgagctggcaggttagcgctccctgggacggtaaatttaccctacacgtgaaatttaacggcaaatggggaagcaagaaaaactcgttcatcgtgaacgacggaacgccagtcagcattgaatttccgcaaacggatgagaagggcaagaccatagtcgttcctgtttcgctcaaagaggggggtaataccatcagttttggaaagtttaccggcgactggggatatatgttcatcaaatcaattgaagttactgcagagtaa

SEQ ID NO: 91974 - DNA, 681 bp, Enterobacter aerogenes
atgaaacctgcagataaacccgtgctgtgtgtcgtttccagtcatccgattaaaggcgcatccggtgtaccaaccggttttttcctggctgagctgacgcatccgctgaaagtactggaagatgccggacgaaaaacgacgatagccagcattcgcgggggacagccgccggtggatggatttgacctcagtgactctgtcaacgcctggttctggaacgaaaccgattttcagcagcgcctggccacaacgcctgcgttatctgagctgaacggttccgattacagcgccgttttctttgcgggcgggcatggaaccatgtgggatttccgcgacagccatgatgcccagcgtattatccgcgaagtgtatgaaagcgatgggattgtctcagccgtctgccacgggcctgcggcactggttgacgcaaagctcagcagcggcgaatacctggtgaaaggcaaaaacgtggcggcctttaccaacaaggaagaggaagaagttcacaccacagatgtggttccctacctgcttgagactgcactccgcgagcatggcgcgcttcatcatgaagccccgaactggtctgaaaacgtggttaccgacggacgccttatcacggggcagaatcccgcttcagcgcacggtgtcggtgtggcgctgttaaatgccctccgctag

SEQ ID NO: 91975 - DNA, 378 bp, Enterobacter aerogenes
atgatttttaaaacagtggtagccactcttttcaccctctccgggctcgcgtcagctctggcagcaacgcctgcttattacatcgcagagtttcaggcgaccgatcttgacgctatcaaaccgtacagcgctcaggttgaatccaccttcagaccttttggtggacgcttcatcgtcagaggaggtgaacccgatgttaaagaagggtttggagcacagggcagactggttgtaattaagtttgagagtctcaaaaatgcccaggactggtatagctcggccgcgtaccagaagatcattcctatccgacaccgtgccggcaattcgcgaacctatatcgtagaaggattgccagaactggctcctgttacaccatag

SEQ ID NO: 91976 - DNA, 606 bp, Enterobacter aerogenes
atggtgttacttcagcgcagagcagcagcattgtttttgtttgcttttatcttcctcatgcccgttagtcatgctcatagccgtgaaaagaccgacattaaaacgctcgttatcgtctctcacccttatccggaacgctcagttctgacaaaagggctgcaggaagccgctgagagtctggaaggcgtgacggttcgcaaccttgagactttgtatggttatgacacacgtcagattaatggcgacgcggagcgaaaaatgatgcgtgaacacagtcgtgtcgtttttatcttcccgacacactggttcaatattacgccgatgatgaaggcctggttgaatgaaacctgggggagtgtcggacccggtttgtggcagggaaaggagatgcttgtagtcagtacagctgcggggggaagctctacttacgggccggacggcaggatcggggtatcgctcgcggatgtgtttttaccggtgaaggcaagcgccctgcacgcaggtatgacgtggcttcctcccctcgtctttgagagcgccagcagcgatcgattaccttcttaccaacaccaacttatagaacgtcttaaactgccatttcagtaa

SEQ ID NO: 91977 - DNA, 726 bp, Enterobacter aerogenes
gtgaaaaagactcttatgcttttaatttgcatgctaataagcagccctgtctttgcaacaaagctggacgcgccggataaggtagtgatgaatatctttgagctcggcgtcaggcccgatcgggacaaagattttgcagacgtagccagacagacgattaccgcttcggttgatcatgaagtaggtacgctggcgatgtacgccctgcaccgcagcgacaatccacataaggcattcatggtcgaactctatgaaaacgagagtgcttaccgcaaacatctaaatgctgaaccatacaaggcattcgctgcctgggcacctgacattatcgattggaaaaataaaatcactctggagccccaatttctgggggacaaacacatcataccgaatgagcgaaccattaataatctggtgatcgtcgaggtaaagcctgaatttcagaccgaatttaaaaacatcgtcatgcctgaaatggctgagtcactcaaagtagagaaaggcgtgttagccatgtattccgctacagactcacagactccgaaccgctggtatttctatgagatttacgccagtgaggaagcgtatcaactgcaccgacaaacgccacacttccgtgactatctcaggcaaacggcgcatatgagcaccagtaaggacgctatcccggtaaaaccggtatttcttcgtaacaaaggcggaatcaaacaggatccgcaccgttga

SEQ ID NO: 91978 - DNA, 723 bp, Enterobacter aerogenes
atgatgaaaattgaaccttcagcgatttctgaagctgatattcgttctgtctcaccggctcttgcgcgctttggtcgagaagctattactgaagatctgtggacacgcgatgccctctcgcccagggatcgtagtatggtgaccgtcgccatgctaattgccagaaaccagcctggcgaccttaagcactatatagacattgcccttgataatggcgttacaccagcggaattgtcagaaatcattacccatctggcgttctactcaggttggccaaatgcaatgtcagccgtcagcgtgaccaaagcagtatttgaaactcgtggtgtcacggcagatgcacttcctgaagcttctccggacctgcttcctctcaatcaggaagcagaaaagcagcgttcagagacagtggaaaaaaatgttggcccaatatctccaggcctggttaaattcactgctgatccactcttcctggatctctggcaaagacccgcgctgaaaccccgcgacagaagcctgattacggtcagcgcgttaatcgcatccggacagagtgcgcagattggctatcaccttaacagggcgatggataatggactttcagttgaggaggctggtgagatcgttacccaggccgccttctatgctggctggccaaacgcatttaccgctgctccggttgtcggagaggtgctaaacaatcgatcatcgagtaaaaggtaa

SEQ ID NO: 91979 - DNA, 1260 bp, Enterobacter aerogenes
atgaaaaatgaacaggctgcagagatcctgcaggatatttttcagcatgctgtcgacagcgcccgggccggacctgcgatcctggctaacctgccggaaaaaccgcgtggccgctgcgtggtgattggtgccgggaaagcctcggcggcgatggccgcggctgtggatgcagcctggccggatgtggatgtgtctggcgtagtagcgacgcgttatggttacgctgtgcctgatggccgcatccggattatcgaggctgctcatccggtatcggattcgatgagcgaagttgccgcaatgctgattgtggaagcgctgcgcggattgacctctgatgacctggtgctggcgctaatttccggtggcgggtcggcgttgatggcgctgcccgtaccaggattaacattgaaagataagcaagccattacccgcgcgctactgcacagcggtgccaatatcaaagagatgaatctggtacgtcgtcatctctccgcggtgaaaggcggcaagctggcaagaatggcgcaaccggcccgtattgtgtcactgattatcagcgatgtgccgggggataacccggcagatgtggcatcaggtcctactgtcgcagatgacagcacgccgcttgatgcgcttcgggtactccagcgctacggtattcagaccccggaacctgttcataaactgctaagccagccggcagacccggttgaaagcacagcgaacagcgaggttaaactcattgccacgccgcagctggctttgaaggctgccgtgctggctgcgtgcagacacggaatgacgccgcttattctgggcaatgcgatagaaggtgaaagtcgtgaagtggccattgttatggccgggattgctaaatccgtgaagcagtatggtcatccggtttccggtccggcagtactgctgtcgggtggtgaaaccaccgtaacggtaaacaatgaccagcccggaaagggtgggcgaaatactgaattttcgctcagtctggcctgtgcattgcagggggagagcggcatatgggctatcgccggcgacagtgatggtatcgacggcacagaagatgcagcaggtgctctggtatttccggacacgttaatacgcggcaaaatgggaggtctggatgcggctaattatctcgatgttcacgacagttatagctattttcacgcgcttaatgacctggtgataaccggaccaacgctaacaaacgtaaatgatattcgggcaataatgattatctga

SEQ ID NO: 91980 - DNA, 1095 bp, Enterobacter aerogenes
atgcgtacctacaaaattgctgccatacccgccgacggtatcggtccggaagtcatctctgctggggttgaagtgctgcatgcgctgacacgccacaatccgcagctgaactttgatgtggagacctttgactgggggtcggactattataaaaaacatggcgtgatgatgccggaagaggggcttaacacattaaaaaaatttgatgcaatttacttcggtgcggtgggtgcaccggatgtgcctgaccatattactctctggggcctgcgcctgccaatttgccagggcttcgaccagtacgccaacgtgcgtccaaccaaaatcctgccgggtgtcacctcaccgctgcggaaccgcgggccgggcgatcttgactgggtcattgtgcgagaaaactccgagggggaatactctggcaatggcggccgtgcacaccgtggcttaccggaagaagtcggcaccgaagtagcaatcttcacccgcgtcggggttacgcgcattatgcgctatgccttcggactggcgcagtctcgtccacgtaaactgctgaccgtggtgaccaaatctaatgcccagcgccacggaatggtgatgtgggatgagattgccgccgaagtggcgcaggaattcccggatgtgcagtgggacaagatgctggtcgatgccatgacgcaccgcatgacgttgcatccccagaccctggataccatcgttgccaccaatctgcacgccgatatcctctccgatctggccggtgcgctggctggcagtctgggcgtagcgccgaccgccaatattgatccggaacgccgcttcccttccatgttcgaacctatccatggttcagcttttgacatcaccggcaaaggtattgctaacccgatagcaaccttctggactgcggtacagatgctggaacatctgggagagcgtaacgccgcggcgctgattatggaaagtatcgaatatgtttgtgagaaaggcattctgacgccagatgtcggtggaacggcctgtaccgcggacgtcacccgcgctgtagtggaatttatcgaagccagagctcatatcgccgagaccgtatacccatga

SEQ ID NO: 91981 - DNA, 1311 bp, Enterobacter aerogenes
atgaataatcacctcgaaaaaaaggttatgcgcaaggttaccctgcgcattattccttttatcatgctgctgtatttcatcgctttcctggatcgagtaaacattggttttgccgccctgaccatgaaccaggatctggggttttcgcccaccgttttcgggctgggcgccggcattttcttcctcggctactttctgtttgaagtcccgtctaacttaatcctgcataaagtgggagcccgtatctggatcgcccgcgtgatgatcacctggggcttagtctctggctgcatggcttttgtgcagggtacaacaagcttctacattctgcgttttctgctcggcgtggcggaagccggtttcttcccgggcattatcctttatctcagctattggttcccggcagcaagacgcgcgcaggtcactgccatctttatggccgcagccccgctctctacagcactgggatcgcctatttctgccgccctgctggagatgcatggcttcctcggctacgccggctggcagtggatgtttgtgctggaagccttgccagcgctgatactcggcgttgtggttctgttcttccttaccgatcgtccggccaaagccaaatggctgactgacgaagagcgtgcgtggctggaaaacaccatgcaggccgaggagctggcccgggcggcaaaacagagccacagcagcgcatggaaaggactggcggataagcgggtactggctctggcgctggtctatttcggtacttctgccggcctgtacacgcttggcatctggtccccgcaaatcatccgcagcttcggtgctacctcgctggagatcggtttcctcaacgctttcccggccgtcatcggcgtcattgccatgatcctgtgggcacggcattccgaccgcaccaaagagcgcagctggcatgtgattggcgcctgtctgctggcggcagtcggtctgatttacgccggtaacgtcagcacactctttaccgtgatcgtcgccttaacgctggtcaccgtgggcatcagcgcatccaaaccgccactctggagtatgccaacggtgtttcttagcggcccggcagcggcagcgggcattgccacgattaactccatcggtaacctcggcggctttgtcggcccgatgataattggcgtgatccgccagcaaaccggtagctacacctggggcctgtactctgtcgccggactgctggcgttctcggccctcgttgtcctgattctttctgccagagcgaataaatcgcaaacggcagagctccctcatcctcatactcattaa

SEQ ID NO: 91982 - DNA, 414 bp, Enterobacter aerogenes
atggatataaatcagctgcgttgctttgtggtgttaggtgatgagcttcactttggccgggctgcccgtaaactcgaaatgatgcctgcgtcactcagccgtttcatcaaactgctggaagaagatctggggataaggctactgaatcgatcaacccggaatgtgtcgctgacgcctgaaggcgcagagtttttaaatgaggccaaagccgtgattgctgatttcgatgcgctacggttgcggttccgtaaaaatgtgctgcctctccacgttgaagtgaccggtcgtgagcctggcgttacgcgggctatcgtggatatcttccgcctcaacgaacagcacaaaattgttgaacattgggatgttacccaaaacgtcccgccaaaaaccgccagcggtaacggtatgttttaa

SEQ ID NO: 91983 - DNA, 378 bp, Enterobacter aerogenes
atgaatgttatgacggaaccatcttttatctttggcattgtgatgacattcatagcattaggtatatcatttgctgcattcaaaccgaataaaactgaagtttcagcacttaaaaactggttgtcgagagataagtggtccggtcaaacaatccaggttccggtagaatcatggcgtcagacagaaacaaagtacggcaatgattatatttatgatttctatttttgtgcaaacataaacggttctgtgaaaaaatacattgcgaaaggcattgtgagacctaatgacattcataaattaaagaaaggaatgttattatcagtaaagtacagtaatgacacgcctgtaaagatagcggttattgctgtcaattattaa

SEQ ID NO: 91984 - DNA, 390 bp, Enterobacter aerogenes
atgacgccaggctggattatcaacgcagtattgacgctggttattattttcatcagcttttaccttgccaaccgcatagtaaaaaactcgcaacggcgggagcagcggattatcgaaaacgggaacgatatccaggttacgatactcgcaatgcggcaaaccggattatttatcaataacaatcctgtcattgatatggatctgcgggtacaggatttaaataatggaaaaacgtggcttgtggaaaagcaccaggaaacggttttgctcattaccctcgatgcctggcaggtcggagtgacttatgaggcaaaactagatccaaaagataacgccattgtgtttgtaagagatattaacgataagccaaaactgacgagtggaaaatga

SEQ ID NO: 91985 - DNA, 1425 bp, Enterobacter aerogenes
atgacggatcacgaaaacaatcggactgtcctgaacgcgctgccggtcgggtatcgttttaacgaatttgaaataaaggaagtgattggcggcggcggtttcggcattgtgtatcgtgcctgggaccatcagctggaacgtaccatcgcgataaaagagtttatgccttcgtcgctggcagtacgtaacgaagatatgaccctggtactgcgtagcgagcgcttcagcaaagcgttctccgccggattaaacagctttatccaggaggcgaggctgctggcgcgctttaatcatcccaacttgctgcacgtgctgcgcttttgggttcagaacgacaccgcctatatgggcacgctgttttatagcggcaccaccttgagccgcctgcgcgaacagcagccaaacctcatcgatgaggcatggatccgccggatgctgccgatgctattcggcgccattaaaaccattcacgacgccggctatttgcatcgtgatatctcaccggaaaatatccagatccaggataacggcctaccggtactacttgatttcggttcggctcgccggaccatcggtaatctctccgacgaaaccgaaaccatgctgcgcccgggttatgcgccaatcgagcagtataccgacgataatgacagcgaacagggcgcctggaccgatatttatgccgtcggcgcggtgctgcatacgctgatcgtgggttcaccgccgccggtgagcgtggtgcggagtattcaggacaactatcagccgctggcggaactgaagccggcgggttactcgctgccgctgctacaggcggtggataaagctctggcgctgcgggtggaagatcgtccccagtcaatcgacgcgttcgccgagctgattgaaatgccggtgtccagtatcgatgacgtcttgtcggtcaaaaaaaccggcaccatgctggcgctggtcgaagaggaagaacaggcgccggccatgacagactggcggcgttataaggttccggggatggtcgccgcaggcgtactggtcggcattattgccggcggtatgctgttcagcggcggcggcggcgagacgcaaccagcacagagcgccagcacccagccgccagcggcggttacgccgccggtaacaacgcagaccgctaacgcgcagcccgctccgcccgttgctgttcaagagagcaaacctgccgccgcggcggcgcctgttgctcaggtttacgtgcgcatgcgggaaggggaaaagcttaaactcaatggcgaacctcataatacgcaaccggccacaaacggcttcgcctcgctgaaactggcgccgggacattatgaaattaccctgcagggtaatggacaaacccgcgagcagacgctggagatcgccaaaccgggaacctggcttattaatccatcgagctag

SEQ ID NO: 91986 - DNA, 3741 bp, Enterobacter aerogenes
atgagtaaattactggatcgctttcgctactttaagcagaaacgcgagacctttgccaacggccacggtcaggtctacgacaataaccgtgactgggaagatagctaccggcaacgctggcagttcgacaaaattgtccgctccacgcacggtgtgaactgtaccggctcctgtagctggaaaatttatgtcaaaaacggtctggtcacctgggaaacccagcagaccgattatccgcgcacccgaccggacctgccaaatcacgaaccgcgcggctgtccgcgcggcgccagctactcctggtatctctacagcgccaaccgcctgaagtacccgctggcgcgcaaacggctgattgagctgtggcgcgaagcccttgcacaacatcccgacccggtacaggcctgggatagcatcatgcaggacccgctgaaaacccgcagctacaaacaaatccgcggtaaaggcggttttgttcgctccagttggaaagagttaaatcaactgatcgccgcagccaacgtctggaccatcaaaaactacggtccggatcgcgtcgcgggcttttcgccgatcccggcgatgtcgatggtttcctacgccgcgggtacccgctatttatcgttgatcggcggcacctgcctgagcttttatgactggtactgcgatttaccccccgcctcaccgatgacctggggcgaacagaccgacgtgccggaatccgccgactggtataactccagctacattattgcctggggttcaaacgtcccgcagacccgaaccccggacgcgcacttcttcaccgaagtgcgctacaagggcaccaaaaccatcgccattactccggattattcggaagtcgccaagctctgcgaccagtggctggcgccgaagcaaggtaccgacagcgcgctggcgatggcgatgggccacgtgatcctcaaaaccttccacctcgataacccaagcgattactttctcaactactgccgtacctataccgatatgccgatgctggtaatgctcgaccgtcgtgacgacggcagctatgcgcctggccgtatgctgcgcgccgccgacctgcttgacgggctgggagaaagtaataacccggaatggaaaaccgtcgcctataacgccgaaggcgagctggtcgcgccgaacggatccatcggctttcgttggggcgaaaaaggcaaatggaatctcgaacaacaggctaacggccgggacgtcgaattaaaattgtcgctgctggatatgcacgatagcgtggtgtcggtcggtttcccctacttcggcggcaacgaaaacccgcatttccgcagcgtgaagcaggagccggtaacgcttcatcagctgccagctaaacagctaccgttggccaatggtgagagcgctttggtggtgagcgtgtatgacctggtgctggctaactacggtctggatcgcggtcttgacgatgccaatgccgcgcgcgacttcgcggatgtcaaagcctataccccggcatgggccgagcagatcaccggcgtgccgcgtcaacatatcgaacaaatcgcccgcgagttcgccgatacggcgcataaaacccatggccgttcgatgattatcctcggcgccggtgtgaaccactggtaccacatggatatgaactaccgcgggatgatcaacatgctggtgttctgcggctgcgtcggccagagcggcggtggctggtcgcactatgtcggccaggagaaactgcgcccgcagaccggctggctaccgctggcgttcgcgctggactggactcgtccgccgcggcagatgaacagtacctcttatttctacaaccacgccagccagtggcgctatgaaaaactgaccgctcaggagctgctgtcgccgctggccgacgccagcaaattcagcggccatatgatcgacttcaacgttcgcgccgaacgcatgggctggctgccctccgcgccgcagcttaacgttaatccgctgagcatcaggcagcaggccgaggccgccgggctgtcaccggccgatttcaccgtccagtcgttaaaagcaggcgatattcgctttgccgccgagcagccggatagcggcaacaaccacccgcgcaacctgtttatctggcgttcgaacctgctgggttcgtccggtaagggccatgagtacatgctcaagtacctgctcggtaccgataacggtattcagggcgaggagtttggctccaccgctgacgtgaagccggaggaagtcgagtggcagaccgcggcgattgagggcaaactcgatctactggtgaccctcgattttcgcatgtccagtacctgcctgttctccgatatcgtcctgccgaccgccacctggtatgaaaaagacgatatgaacacctccgacatgcacccgtttatccaccccctttccgccgccgtcgacccggcctgggaggcgaaaagcgactgggaaatctacaaggacatcgccaaaagtttctctgaagtgtgcgtcggccaccttgataaagagaccgatgtggtactggtaccgctgcagcatgactctccggcggagctgtcacagccgttcgatgtcctcgactggcgcaagggcgaatgcgatctcattccaggcaaaaccgcgccgtcaattgcgctggttgaacgtgactacccggccacctgggaacgcttcacctcgctggggccgttactcgataagctcggcaacggcggtaaaggcatttcgtggaatacgcaaagcgaggtcgacttcctcggcaaacttaactacgtcaagccagacggtccggccaaaggccgtccgcgtatcgacagcgctatcgacgccagtgaagtcatcttaagcctggcgccggaaaccaacggccaggtggcggtgaaagcctggcaagcgctgggagaatttaccggccgcgaccacactcatctggcgctgaataaagaggatgagaaaatccgcttccgcgatattcaggcgcagccgcgcaagatcatctccagcccaacgtggtctggtctggaaagcgaacatgtctcctataatgccggttataccaacgttcacgaactgatcccgtggcgtaccctctccgggcggcaacagctgtatcaggatcatccctggatgcgcgccttcggcgagagtctggtggcctatcgcccaccgatcgatacgcgcagcgtcagccagatgaaggaagtgccgccaaacggcttcccggaaaaagcgctgaacttcctgaccccgcatcagaaatggggtatccactcgacctatagcgaaaacctgctgatgctgacgttgtcgcgcggcgggcccatcgtctggctaagcgaaaccgacgcaaaagaactggggattgaagataacgactggatcgaagccttcaacgccaacggcgccctcaccgcgcgtgcggtggtgagccagcgcgtgccgccgggcatgaccatgatgtatcacgctcaggaacgcattatgaacattccaggttcggaggtgaccggtcgccggggcggcatccacaactccgtgacccgcgtctgtcctaaacccacgcatatgattggcggctatgcccaactggcttacggctttaactactacggcaccgtcggctccaaccgcgacgagttcattatgatccgcaaaatgaaaaatattgactggctggatggcgaaggtcgtgaccaggtacaggaggcgaagaaatga

SEQ ID NO: 91987 - DNA, 846 bp, Enterobacter aerogenes
atgaccccatttttaagcgcgtattttactcgtctggcctggacgggaacccccgatgtttccattgacaccctgcgggagttgcatagccatcataatagcgcgatcccgtttgaaaacctggacgttctgctaccgcgtgaaatccaccttgacgatcgggcgctggaggaaaagttaatcaccgcccgccgcggcggctactgctttgaacagaacgggctgttgcagcgggcgctaagcgagatcggtttctcggttcgcagcctgttgggccgcgtggtgctggcgaatccgccgcagatgccgccgcgcacccatcgcttgctgctggtggaggtcgaaggcgaacgctggattgctgatgtcggctttggggggcaaaccctgaccgcgccgattaagctgctggccgatattccgcagcatacgccgcatggtgtttaccgcctggtgcatgaaggcgatgagtggacgctgcagtttaatcatcatgaacactggcagtcgatgtaccatttcgatctggggcgacaatatgcctctgattatgtgatgggtaacttctggtcggcgcactggccgcagtcccatttccgccatcatctgctgatgtgtcgtcatctgccggacggcggaaaaatgacgctcaccaatttccattttacccactgggaaaataaccatgtagtggagaaggtggatcttgcggacgtgtcggcgctttatgaaacgctgcaaacccgcttcggacttggtgtagatgacccgaagcacggcttcagcgaagccgcgctggcagcagtgatggcggcgttcgatacccatccggaagccgggaagtaa

SEQ ID NO: 91988 - DNA, 1278 bp, Enterobacter aerogenes
atgtttcgtaaggaagcgctcgaaaacagggataaaacatggtgtggcaaagcagtattactaccgggaatctcctctcggctggttataattaccagcgcgctttttttcgtctgcttcattgttttaattagcaccggcacttatacacgacgtattagcgtgcaaggtgaagttaccacctggccgagaccggttaatgtctattccggtgtccagggatttgtcgcgacacagttcgtccgggaaggggaccctgtaaaaaagggtgatcctgtttatcaaattgatgtcagtaaaagtacacgtagaggcgtggtcaatgagactcaacgacaggatatcgaaaaccaattgaagcgcatcgccgagattatcgctcgccttagagagagtaaggaaaccactttgcggatgcttgagcaacagaaaatacagtatagcgcctcttttgaacgctcggcaggcattgtcaggcgtgctgaggagggaataaaattaatgaaaaataatatggataattaccgacggtaccagcagcaggggttgattaataaggaccagttaaccagtctggtggccttgtactaccagcagcataatagtttgctcagcctgagcgcgcagcatgaacaaaatgctctacagttaaccaatctggaaagtcaaattcagacgcaggcggcggaatttgacaatcgggtttatcagatggaactgcagcgttatgagctacagaaagagcggattaatactgatgcgggaggcgatattatcattcgtgcctcatcagacggcaaaattgattcattaagcgtcaccccaggtcagatggtcagcgaaggcgacagtctgctgcagataattccagaaaaaatacaacgctattatttggttctttgggtacccaatgaagccgttccatatatttcagtcggtgatagggtgaatatccgctacgaagcctttccggctgaaaagtttggtcagttctcggcgaaagtcacactcatttcccggacgccagcttcctaccgtgaaatgcagacctatacgaccgccccgattaactctacggcaggtgcggctgcttactacaaagttgtgattagtccagaaaagcaggctgtcagctacgccggcaagcgtctgcctctggaaaatggcatgaaggcacagagcacgttatttctggaaaaacgtaaaatctatcagtggatgctctcgccattctacgatatgaagcgcagcgttacggggccgattcatgaaccgtaa

SEQ ID NO: 91989 - DNA, 288 bp, Enterobacter aerogenes
atgagcaaagtttactggccgttatatgaagtgttcgttcgcagcaaacaggggttatcccatcgtcacgtcggcagtctgcacgctgccgatgatcaaatggcgttggagaatgcccgcgatgcctacacccgccgcagcgaaggctgctcaatttgggtggtgaaggccagcgaaatcgttgcttcgcagccggatgatcgcggcgaattcttcgacccggcggaaagcaaagtctaccgtcatccgactttctataccgtgccggacggcatggaacatatgtga

SEQ ID NO: 91990 - DNA, 1158 bp, Enterobacter aerogenes
atgaaaagaaaagcactggcattggttatcccggcattattggctgccggcgctgctcacgcggcagaaatttataataaagatggcaacaaattagatctctacggcaaggtagacggtttacattatttctccagcgactccagtaaagacggcgatcagacctacctgcgcttcggctttaaaggtgaaacgcaaattaacgatatgctcaccggctacggtcagtgggaatacaacgttcaggctaacaatactgaaagctctggcgatcaggcatggactcgtctggctttcgccgggatcaaagcaggcgactacggttcattcgattacggccgtaactatggcgtcctgtacgacgtcgaagcctggaccgatatgctgccggagttcggcggcgactcttatactcaggccgacaactttatgaccggccgcgccaacggtgtcgcgacctatcgtaacagcgatttcttcggcctggttaacggcttgaacttcgcgctccagtatcagggtaaaaacgaaagtaaagggactaacgaagacgttggtaccaacaaccgtggcagcattgacgacaatgatgtgcgctatgacaacggcgacggctacggtctttctgctacctatgacttaggcatgggcatcagcgctggcgcagcatatacctcatccgatcgtactaacgcccagcaaaactatactgttggcgatcgctacgccaagggcgacaaagcggatgcctggactgcaggtctaaaatatgacgccaacaatgtttatctggcgactatgtattctgaaacccgcaatatgacgccatatggttctaccaacagcgatcatggcggtggtatcgccaataagacgcagaactttgaagtcaccgcacaataccagttcgactttggcctgcgtccggcgatctcttacctgcaatccaaaggcaaagacctgagttatatgggtcagtactccgataaagatctggttaaatatatggatgtcggcgcgacctattacttcaaccgtaatatgtccacctacgttgattacaaaatcaacctgctcgacggtaatgacgacttctataaagacaacggtatttctaccgacaatatcgtagcactgggtctggtatatcagttctaa

SEQ ID NO: 91991 - DNA, 657 bp, Enterobacter aerogenes
ttgatcaacgtacttcttgttgatgaccacgaactagtgcgcgcagggatacgacgcattctggaagatataaaagggattaaagttgtcggtgaggcctgctgcggcgaggatgccgttaagtggtgccgtgcgaatcctgtggacgtcgtcctgatggatatgaacatgcctggtattggggggcttgaagcgacgcgaaaaatcgcgcgctccattgtcgataccaaagtgatcatgttgaccgtgcatactgaaaatccgctgcctgcgaaggtcatgcaggctggcgccgccggttacttaagtaaaggtgctgccccgcaggaagtggtaaatgcgattcgttgtgttgcttcgggtcaacgttatatcgcttccgatatcgcccaacagatggcgctcagtcagattgaaccggaaaaaacggaatcaccgtttgccagtttgtctgaacgcgagttgcagattatgctgatgatcaccaagggccaaaaggtcaatgagatctcagaacagttaaatctgagtcccaagacggtgaatagctatcgttatcgaatgttcagcaaattaaacattcatggcgatgtggagctaactcacctggcaattcgccatggcctgtgcaatgcggagtcgttagcaagtcagtga

SEQ ID NO: 91992 - DNA, 870 bp, Enterobacter aerogenes
atgctgtcgggagtgtatatcggcctgcggtttgtccacttcatctcattgatgacggccttcggttgcgcgctgtacggcgcatggtgggcgccagtctcgctgcgtcgcctgttgatgcagcgcttttatccactgctgcgctacctgctaatgattagcgctatttcagctaccttgatgctgatggcgcagggcgggttgatgggcgatggctggaatgatgtctggcaacccacaatctggcgcgctgttatcgggacgcagtttggcggcgtttggctgtggcaggtggtgctggcgtggattgcgctggcggtcgcgtggatcaaaccccgtcgcccggcgcgtctattgttactgctattttgcgcgcagttgttgttgatggctggcgtagggcatgcggcgatgcatgatggttgggttggcgcattacagcgcaccaatcacgcgttacatctgttttgcgtctcggcatgggccggcgggctgttgccatttgtctactgtctgcgactggcgcgcgggcgctggcgtcaggtagcgataaccgccatgatgcgtttttcacactatgggcatctggccgtggctggcgcgattgccagcgggattggcaatacgctgttgatacagggacaactgattggcgactcaccgtggggaacggtgttgttgttcaaatgtgcgctggtcgccgggatggtagcaattgcgctggtgaacaggtatgttctggtaccgcgaatgtcaggtaacggctcgtgggcggaacgaactattttacgcactacacagctggaaatggcgcttgccgcgctggcgatacttgccgtcagcctgttcgcgacctggcaacctaattga

SEQ ID NO: 91993 - DNA, 1149 bp, Enterobacter aerogenes
atgtctcagagcaaaaattggtctccagagcttgatggtttgcgaggttatgcgtcactttgggttgtgcttggtcatctatgtaatttaacggaatgcaatattccaattttaagtagccctagcattggtgttgatattttcattctcttatctggctatctgatggctaaaaattacactgagaggcagcatgtagaaccatggaactcagtaaaaacaatgacatcattctggatgcggagatttttcagaattgccccattgttttatgttttacttatcatcgcacttctcttaggcgagcaattcggtaattacagagaagctattggtaacgtatgggcctcaacgcaaactgatcctgaaaagtacgctgatacttccatagttaatttcttcgcacatatttcttttgcttttggttttctcccctattattctgccagaacaacaataccagactggagtatcggtcttgaaatgcagtattatgctctattccccttcataatgttaataattatgcgttttgggtatattaagacatcattatttataatggcaagttgttttgttgcctcgcaactggcgcctggatattttaatgaattcaccaggccatcaatgattgccttcaaacttcctctattcattgctggaatgcttatatataaggcagcatcggatagtaaaatatattattcactgatagctttaattgcaccaatcagcgccttgggcatcggattcctaatcacacctaccagaatggtgattgagataattattgtagcaggcatggccattttactttaccctcataaaaataaatccccattcaaattgatagcagataccacaaaagcgtttctatccataaagcttagtcgatttcttggtgaagtctcatactcagtatacctactccatttgatgatagtacttccaacaataggtatacttattgagtatccaacatttataaatctcaaccctatattgagatttattatcgcgactgcaatatcagttccgattacttatgttatatcaacctggctttataaaaatgtcgaagtaaaaggcatagctataggcaggaaaattatcaaacctacatccagcaaagttaaagaagttgcatga

SEQ ID NO: 91994 - DNA, 663 bp, Enterobacter aerogenes
atgaaatttaaacactcaaatattatagcaaccttactttttatatgcttttcctgtaatcactctaatgcagatacttcagtaaagaacagtgccgcatatttaaatgtcaaaaaaacatattcccaacaccctggaaaatatgattatattatgtttggcgatagcataactaaaaatggaaaatggaataacttaatccccggctacttaataggaaatcgaggtataagcggagatgacacttccggcatgcttgacaggattaatgacattgaaaggactggcgcgaaaacggtgtttataatggctggtactaacgatgtaaccagaaaagtccctcctgaagaaattgctaaaaacattattctcatgactaatcatatgaaacaaaaaaacattaatgtggttatccagtctacaattctctctggcgacaagaggaaaagaaaaaatacgtcaatcaataaaattaacgacttacttaaagccttctcaggtaaatcaggaaccccattccttgatttaaactctatcttatcgccaaatggtgttttaaaaatggagtatacatcggatggcactcaccttaatacctctggatacgaagtctggagtaaaatcctcagagcttatattgatagctccatcaagaatcgatag

SEQ ID NO: 91995 - DNA, 720 bp, Enterobacter aerogenes
atggtcattaaggcgcaaagccctgcgggtttcgcggaagagtacatcattgaaagtatctggaataaccgtttcccgcctggatctattctccctgctgaacgtgaactttctgaactgattggtgtgacccgaacaactctgcgcgaagtgttgcaacgtctggcccgtgatggctggctgactatccagcacggtaaaccgacgaaggtgaacaacttctgggaaacctccggactgaatattcttgagacgctggcgcgcctcgaccacgatagcgtaccgcaactgattgataacttgctgtcggtgcgaaccaatatctcgacgatttttattcgtaccgccttccgccagcacccggacaaagcgctggaggtactgtctaccgcccgtgaagttgaagatcatgccgacgctttcgccgaactggattacaacatcttccgcggtctggcgtttgcctccggcaaccccatctacggtctgatcctcaacggcatgaaggggctgtatacccgcattggccgtcactattttgctaatccggaagcgcgtagcctggcgctgggtttctatcaccagttggcgaaagtgtgcgaagagagtcagcacgataaagtgtacgaaatcgtccgcgcctatggccataacagcggcgagatctggcatcggatgcaaaaaacgctgcccggcgatttagccattaatatgcgctaa

SEQ ID NO: 91996 - DNA, 1533 bp, Enterobacter aerogenes
atggctacgattgattccatgaacagggacaccacccggttaagcgatggacccgactggacttttgaactgctggaaacctatctcgccgaggtcgatcgggtggcgaagctgtatcgtcttgacacctatccgcatcaaatcgaggtgatcacctccgaacagatgatggacgcctactccagcgtcgggatgccgatcaactatccccactggtcgttcggcaaaaaatttatcgaaaccgagcaggcatataaacacggtcagcaaggtctggcctatgagatagtcattaactccaacccttgtatcgcttatttgatggaggagaacaccattaccatgcaggcgctggtgatggcgcacgcctgttatgggcacaactccttctttaaaaacaactatctgttccgcagctggaccgatgccagctcaatcatcgactacctgatctttgcgcgtaaatacattaccgaatgtgaagagcgttatggcgtcgatgaagtcgaaaaattgctcgactcctgccatgccttaatgaactacggcgtcgaccgctataaacgcccgcagaaaatatcgctgcaggaggagaaggcgcgacagaaaagccgcgaagagtatctgcaaagccaggtgaacatgctgtggcgtactctgccaaaacgggaagaggaaaaagccatcgaggcgagccgccgttatccttccgaaccgcaagagaacctgctgtacttcatggagaagaacgcgccgctgcttgagtcctggcagcgcgagatcctgcgtatcgtgcgtaaggtcagccagtatttttatccgcagaaacagactcaggtgatgaacgagggttgggcgacattctggcactacactatcctcaatcatctgtatgacgaaggaaaagtgacagagcgctttatgctggagtttctgcacagccacaccaacgtggtgttccagccgccctacaacagcccgtggtacagcgggatcaacccctacgcgctgggtttcgccatgttccaggatattaaacgtatctgccagtcgccaacggaagaagatcgctactggttcccggatatcgccggttccgattggctggagacgctgcatttcgccatgcgcgattttaaagatgagagttttatcagccagttcctgtcgccgaaggtgatgcgcgatttccgcttgttcaccgtactcgacgacgaccacaataattacctggagatttccgccattcataatgaggaaggctatcgggaaattcgttctaagctgtcggcgcagtataacctcagcaacctcgaaccgaatattcaggtctggaacgttgacctgcgcggcgaccgttcgctgacgctgcgctatgtgccgcacaaccgcgtgccgctggataagagccgccgcgaggtactcaaacacgttcaccgcctgtggggctttgacgtgatccttgagcagcagaatgccgacggcagcgttgagctgttggatcgcacgccgccgcggcagaacgcgctgtaa

SEQ ID NO: 91997 - DNA, 1332 bp, Enterobacter aerogenes
atgagtactacagatagcattgtatccagccagacaaaagagtcgtcctggcgcaaatcggacaccacctggaccctgggcttattcggcactgccattggcgccggggtattattcttcccgatccgcgccggcttcggcggcctgatccccatcttactgatgttagtgctggcctacccgatcgccttctattgccaccgggcgctggcgcgactgtgcctttccggctcaaatccttccggcaacatcaccgaaacggtagaggagcactttggtaaaactggtggggtagtgattaccttcctttatttctttgcgatttgtccgctgctgtggatttacggcgtgacaatcactaatacctttatgaccttctgggaaaaccagctgcagttgccggcgctgaaccgcggttttgtcgcgctgttcctgctgctgctaatggcgttcgtcatctggttcggtaaagacctgatggtgaaagtgatgagctatctggtatggccatttatcgccagcctggtgctgatttcgctgtcgctgatcccttactggaactccgcggtcatcgatcaagtgaatttaagcgagatttcgctaaccggtcacgatggcattctggtgaccgtctggctgggtatttcgattatggtgttctcgtttaacttctcgcctattgtctcttcattcgtggtttccaagcgcgaagagtatgaaaaagagtttggtcgcgagttcaccgagcgcaaatgttcacagattatctctcgcgccagcatgctgatggtggccgtggtaatgttctttgccttcagctgcctgtttacgctgtcgccgcagaatatggccgatgccaaggcgcagaatatcccggtgctctcgtacctggcgaaccacttcgcctcgctgtccggcaccaaatccacctttgccacggtgcttgaatatggcgcatcaatcatcgcgctggtggcgattttcaaatccttcttcggtcactacctcggcacgctggaaggcctgaacggtctggtgctgaagtttggctacaaaggcgataaaacccgcgtttccagcggcaagctcaacaccatcagcatgatctttatcatgggctcaacgtggattgtcgcctacgccaacccgaacattctcgacctgattgaagcgatgggcgcgccgattattgcctcactgctgtgcctgctgccgatgtacgccatccgtaaagcgccatcgttggcgaaatatcgcggccgcctggacaacgtcttcgtcacggtaatcggtgtgctgaccattctgaacatcgtttacaaactgttttaa

SEQ ID NO: 91998 - DNA, 570 bp, Enterobacter aerogenes
atggaattgctaattaagaaaggtatttattcttgtgttaaatggttaatgttattaattagccttactgcagggttatccgctgcggcaagcgaaaatatgccggataatttttatcgcgtcacccctgagttgtatcgttcggcgcaacccaatcacctgcagatgcagagcctggatcgcattgggatacgctcggtgttgaatttgcgccagtggcacagcgatgcagacgaagcgaagggcacggggcttattctgtatcgggtgccgatgaacgcggccgcgattaacaacgatgatgtggtgattgcgctgagttttttacatcgtgcggcaaaaccggcgctggtgcactgctggcacggcagcgatcgtaccgggatgattgtcgcgctttaccaactgctgtttagccacgcaacaaagtcagaagtgttgtcagagctgcgccgcccggaatatggttaccatcagcaattttatcctgacattgcccgatatattgcggcgattaatgtagaagaactgcgtgcgagggtgctgagtttatccgcaggaaaattataa

SEQ ID NO: 91999 - DNA, 246 bp, Enterobacter aerogenes
atggattacactgcagctattattgcttgtttaatgctggttaccgccatctggatgttactgcacgggatacggggctatcagaaaggcgtgattatcgaaacgcggaaatcatcaccgataaaagattattattaccgcggtgattttggtttttacgtcaatatatttttttatattgttgttggtacggtgatggtcggtttttccgcctggttatttttccgcagtatcgcctattggtag

SEQ ID NO: 92000 - DNA, 1086 bp, Enterobacter aerogenes
gtgcgccaggcgcgcccttacgccggtgaaacctttggtctgcatctgccgttgttagcgggcaccgaagtggcgatcgcttttgagcagggggatcccgataggccctatattgccggcgcgctgcacgactccacgcaccaggaccacgtgacgctctacaactacaagcgtaacgtgctgcgcacgccggcgaacaacaagattcgcctcgatgatacacggggtaaagagcacgttaaggtcagcaccgaaaatagcggcaagagccagctcaacctcggccacctggtggatcatcagaacacgccacgcggtgagggatttgagttacgcaccgacagctacggcgcgatccgcggcgggaagggaatatttattaccgccgatgaacagctgaaagcgatgggcgcgaccgtggaaatggatcccgcgaatcaattgctcggcagtgccgttgttcagctcaacgactggcaggagatagcccgcacccactacaacaccccgccggatgtcagcacgttaaagcagttcgtcggcaaagccgtcaacctggcgagccccgtcctgctgatgagcgcgccgaaaggcatcggcatcgtgacggcggaaacgacgctgctacagagtggtaaagggttgtacctgcaaagcgccagcgatattgcgctggccagcggcaaccggctgtcggtgaataccaaaaacgcaatctcgctgctttcccaccgcgaagggatgcgtatggtatcggtgaaaggaccgctggagatagagtcgcacggcgacacgctggcgctcacttcactgaaggatattaccgtgcagtcaacgcagggacatctgcagcttaccgccaaaaatggcatcaccctgggctgtggcggcggctacattcgcctgacgccgcagggagaaatccatcttcacagcccgagtctgctcagttttaaaggctcgcataagatgcaggggccggccggcgagacgtttccgctccccgatcttcccacatcgatatgtaaagactgcctgattcgtgcgcaagaactggctcaggcttttgtgccacgtgccgcctga

SEQ ID NO: 92001 - DNA, 570 bp, Enterobacter aerogenes
atgataaagcatatccgtattttgcccggcgggctggcggtgctggccgccgcttttctctgcctgctgacggcctgtcgcgaccacagtcgcgacggcatgagcggcgctgacataacgttgttaaaccatggtccggacgccatcgtttcggtgcaggtgaacggctacggcgggccaggcgctaactcctacggcggcggcggcttctgctgcgtgatggtgccagatgtctggcgcccggggctgacggcaaaaattacctggacctccgatcctaacgcctggatgaaatccagtaatatgcctgacaactattcgcaatactatcagcgccatgggccaattaccgtccccattgaacgctgggagaaggggcaggcctgcggttttgacgtgcatattttcccctgcgataaggtgcggatagtccgttcctgtattccgccgggacagccggggtatccggtgccaccttcccctccggactggaagcaaagagcacaaaatatcattatgaaaaatattaaggaggaagttgtatgtccgacaccgcagactccacgctga

SEQ ID NO: 92002 - DNA, 252 bp, Enterobacter aerogenes
atgtccgacaccgcagactccacgctgaatgccctgaaggcgcttattgcggccttccagaccggcgccactccggtcacggttaaagcctccaccgcggaagcggccagcttaccgccaaagtttcccgggccggatgatgaaaaggagaaaacgcccgcggataactccacgcagcagaaaaccgaatacaacaagcgcggccgtctgccggcgagcagaacgcagaccgaaggaaactatgcctcttag

SEQ ID NO: 92003 - DNA, 570 bp, Enterobacter aerogenes
atgataaagcatatccgtattttgcccggcgggctggcggtgctggccgccgcttttctctgcctgctgacggcctgccgcgaccacagtcgtgacggcatgagcggcgccgatttaaacctctacaatcacggtccggatgccatcgtttcggtgcaggtgaatggctacggcgggccaggcgctaactcctacggcggcggcggcttctgctgtgtgatggtgcctgatgtctggcgcccggggctgacggcaaaaattacctggacctccgatcccaattactggatgaaatccagtgagatgccggatgattatgaaactcactatcagcgccatgggccgattattgtacctattgaacgttgggaaaagggacaggcttgcggctttgacgtgcatattttcccctgcgataaggtgcggatagtgcgttcctgcatcccgccgggacagccgggctacccggtaccccagtcgccgccagactggaaggaaagagccaaaaatatactttataaacatatcaaggaggagatcgtatgtccgataacgcagactccacgctga

SEQ ID NO: 92004 - DNA, 420 bp, Enterobacter aerogenes
atgtccgataacgcagactccacgctgaatgccctcaaggcgctcattgccgcctttcagaccggcgccactccggttacggttaaagcctccaccgcggaagccgccagtttaccgccaaagtttcccgggccggatgacaaaaagcccgcggataaatccgcgcagcagaaagccgaatacaacgagcgcggccgcctgccggcgagcagaacgcagaccgaaggtaactacgccaggcagtacctggaaggatatgtcggggagtcagaagatccctcggacaaaaaaacggaaccgggctgcccggccagcctgcatatcagcctgttcttcgacggtacctgttgtaatgaagaagatggtgatgaagtgtatggctcgcgaaacccgccgctgaccaatattgctcggctctaa

SEQ ID NO: 92005 - DNA, 570 bp, Enterobacter aerogenes
atgataaagcatatccgtattttacccggcggactggcggtgctggccgccgttttgctctgcctgctgacggcctgccgcgaccacagtcgcgacggcatgagcggcgccgatttaaacctctacaatcacggtccggatgccatcgtttcggtgcaggtgaatggctacggcgggccaggcgctaactcctacggcggcggcggcttctgctgtgtgatggtgcctgatgtctggcgcccggggctgacggcaaaaattacctggacctccgatcccaattactggatgaaatccagtgagatgccggatgattatgaaactcactatcagcgccatgggccgattattgtacctattgaacgttgggaaaagggacaggcctgtggctttgatgtgcatattttcccctgcgataaggtgcggatagtgcgttcctgcatcccgccgggacagccgggctacccggtaccccagtcgccgccagactggaaggaaagagcaaaaaatatactttataagcatgttaaggagaacatcgtatgtccgacaccgcagagtccacgctga

SEQ ID NO: 92006 - DNA, 420 bp, Enterobacter aerogenes
atgtccgacaccgcagagtccacgctgaatgccctgaaggcgcttattgccgcctttcagaccggcgccaccccggtcgcggtcaaaacgtccaccgcagaagcggccagcttaccgccaaagtttcccgggccggatgacaaaaagcccgcggataactccacgcagcagaaaaccgaatacaacgagcgcgggcgcctgccggcgagcagaacgcagaccgaaggcaactacgccaggcagtacctggaggggtatgttaaagagtccgatcatccctcggacaaaaaaacggagccgggctgcccggccagcctgcatatcagcctgttcttcgacggtacctgctgtaatgaagaagatggtgatgaagtgtatggctcgcgaaacccgccgctgaccaatattgctcggctctaa

SEQ ID NO: 92007 - DNA, 570 bp, Enterobacter aerogenes
atgataaagcatatccgtattttacctggcgggctggcgatgctggccgtcgcttttctctgcctgctgacggcctgtcgcgaccacagtcgcgacggcatgagcggcgctgatataaacgtcttaaaccacggtccggatgccattgtctcgttgcaggtgaacggctacggcggaccaggagccaattcctacggcggcggcggcggcttctgctgtgtgatggtgcccaacgactggcggccggggctgacggcaaaaatcacctggacttccgaccctaactcctggatgaaaataagcgatatgcctgacaactattcacaatactatcagcgccatggaccgatcaccgttcccattgagcgctgggagaagggacaggcctgtggctttgaagtgcatatttttccctgcgataaggtaagaattgttcgttcttgtcacgatcgctcatctccggaatatccgatacatcgtgcgcccgatgaggatgaaaaagcgaaaaaaatattatttgaccatgttaaggagaacatcgtatgtccgacaccgcagactccacgctga

SEQ ID NO: 92008 - DNA, 2424 bp, Enterobacter aerogenes
atgtccgacaccgcagactccacgctgaatgccctgaaggcgcttattgcggcttttcagaccggtgccactccggtcgcggtcaaaacctccaccgcagaagcggccagcctaccgccaaagtttcccgggccggatgacaaaaagcccgcggataactccacgcagcagaaaaccgaatacaacgagtgtgggcgcctgccagcgagcagaacgcagaccgaaggcaactacgccaggcaatacctggaggggtatgttaaagagtccgatcatccctcggacaaaaaaacggagccgggctgcccggccagcctgcatatcagcctgttctttgacggtacctgctgtaacgaagaagatggtgatgaagtctacggctcgcgaaacccgccgctgaccaatatcggccgtctctaccatgcagcaaactggttagataaggcggagaatgatggttacttttgttactactttcccggctgtggcgcacgctttccggagattggtgaagagcactactcgctggacggcgagctgtttgccaacggcggtgaggatcgtatcaaccaggcgctgcttaaaacctacagcagcatttgctatgcggtgagaaaggaaaggatcgaagacagcgaactggatatctttcggcctcagatggccaccgtctggcccttctcgcggctgacccagaagttcaaccgtaaaagcgcgcttgacaaattctgcgacgaccatctggggtgcgtggtcaaccagtggccgcggcagccaacgcggttgcatatccagcgctcgcagcggcgcatcgccaaaatcaagctctttgtctacggctactgccggggggccgccaccgcccgcgccttcgcccgcggactggagtcgctgctcgatgacgctaaaatgccgcttgatgcgacaaatatgctgccggcgggcaccgtagtatccggcggcccgaccctgctgggcattcccatcagtatcgagtttatggggctgctggatacggtctctgcggttggcgtgccgcatatcctgccgtcggccaccgggcatctgggctgggcggccaacagcctgcggctaccgaccaccaaaggtttcttaaaaagctgctaccactttgtcgccggccacgagcagcacggcgacctgccgctggactctatccgcggtccggacgggaaatacccggcgggagcggtggaggtggtctatcccgggatgcatgccgatgttggcggcgactgtaaacccaccgaactcggtaaggtgcagaccgactcccgcagcctgctgtcaaagattgtgctgcatgatatgtatgccgccgccttcgatgccggggcgccgctgagcgtacctgaagaagtattgcccggtggggctcaggacaaaaaatatcgtgttatgcaaggctacgttgctgattatttcaaaatctccgcccaggccatcgccctgtttaacgcctggcagcaggccggggcgcagcaggcgggggcgaagagcgaaacgccggccatcaacgaagcagaggtggtggccatcgccgtggcccaggggcgggatccggtcgccgcgctgaaggcagctcacgacaaggcggatggcgataaggcgaaagccgccgccgccgcgaagccgccggagaacggcccgatgggcaaactgccggatccggtgtatgtgccgctgaaggccaaagcgctggaggtgatgctggcggaccagctgagctggatcaccgcctggcgcaccgagcgctttgccagcccgcaatacgccgataagtattatcagcgtaagcctttttatcagcaggcgctgaatgagtcgtccggcgcgctgccgtcggcgggggcgcccgcggaaagcaaagggccgcgtgaagtgccgtttatcgataaggatcggcttgaccgcgcggcgtggggctatgactttgcccataccggtatcgtggcgctgctggcccaggtgctgctggatgtgatccccaccacgcaaaccaaccagcttggcggtccgctggtggcggcgcaggagtcggaatatatccagatcaagaaaagcggcgatgcccggcgggcggcgctgatgggctcgccgacgatgctggatttttacgataactacgtgcatgacacgctggccaaatataatcacgacccgctgcactcctcgttttcacacggttattttgcgtcgcggacgatttacgataacgatgacgatacgtgggattcggtgaaacaatttggccagcgggtaaaagcgattatagatattaatgttggcgatatattagtgcaggcgcgaacggatatgaaagatctgaatacggtatcgggcgtgttgggtaaaatatatcgcgatataaaaagcgaggcttttaaaatactgctgccttaa

SEQ ID NO: 92009 - DNA, 1761 bp, Enterobacter aerogenes
atggacgatttaactctgcgttattttgacgctgaaatgcgctatctgcgtgaggctggcgaggagtttgcccgcgcccatcccgatcgcgccgcggcgttaaacctcgataaagccggcgcccgtgatccctatgttgagcgcctgttcgaaggctttgctttcctgatggggcggctgcgcgaaaagctcgacgacgacctgccggagctgaccggcgggctggtgagtatgatctggccgcattatctccgtaccattccgtcgctggcgatggtggagttcagcgtcgactggcgggagatgaaagagccgcagcggctgaagaagggaacggaagtgatctcccggcccatcggcgagacgggcacccgctgccgttacaccacgacccagccgctaaccttacagccgctcgcgctctcccgcgccagcgtcagggcgcaggccgacggccgccaggcgatttgtctgcgttttgactgtagcgcgctggtggactggcgggcgctcgacctgagccgtattccgttgtatctgaatgccgatgcgccattggcctgcgcgctgcatgaagcgctgaccctgaatgtggcgcacatcggcatacgtctggcgggggaggccgatagcaggccgctggcggcccattttgccgtttgcggttttggccatgatgatgcgctgctgccccaaagcggcgggttcagcggctaccagttgctgctggagtatttcagctttcgtgaaaagtttatgtcggtcgcgctgtgcgggctggagaatatgacgtttcctgatgcgccgggatggtttgagatcgaggtcgtgctggataaaccgtggccgcaggagtatgcgttgtcagagaaacatctgcgtttacactgcagcccggttattaacctgttcccgctggagtcggatccgctgcatctggattcactacaaagtgagtatctgctgcgccccatgcgcgtccaggatggacacaccgaaatctattcggtggagtccgtcacctcttcacgtctttccggcacccaagtgtatgtgccgtttaccagttttcgccacaaaggcggcatgttgcgccatgatgcgccggaatattattaccacacgcgcgttaaacgtggcccgtccgggctgcatgatacctggctgacgctgggcggcgaggcgtttgaccagcatcgcgtgccgcagaatgaaaccctgtcattgagcctgatcggcaccaacggccagttgccgcggcgggcgctgcaaagcacgctgctggacacggtggtcaaatccacgacgtcgcgactccaggtgcgcaatctcagcgcgccgacgttgccgtgttatccaccggatcgcgaccgttttcactggcgggtactgagccatctcggtagcagcttcctgtggatgatggataacgccgaggtgttgcgcggcgcgctggcgttgtacgactggacggacaacgaaatgaaccgccgtcgcctgcaggcgatcgtcgacgtgagccactgtgaggtggaacgttttgccgaggggcactttctacgcggcgtgcagatagaggtgacgctcgacggtaacggcttcgccggacacggcgacatctgcctgtttggcgagctgctcaaccgcttctttgccctgtataccgacatccatctgtttaatcgtctgattctgatactgcaacctaccggagagcgtctcgaatggcaggagaaccacaaacgccgcattcccggctga

SEQ ID NO: 92010 - DNA, 1086 bp, Enterobacter aerogenes
atggcaggagaaccacaaacgccgcattcccggctgagcccgcggctggagcgggatattcagcgcatcaacttttaccgtttctgccagctactggaaaaatcgcgacctggcgcgccggcattaggcagcacgctgaacccggcggatgatccggtacgctttcgcccgcatccggggatgggttttccggtcagcgaactcaaagcggtggagtatgatgaggcgcatcccgacgcgccgccgacgctgcgcaccacctttatggggctatacggtgtcgattcgccgttgcccaccgcctggctggatgatattgcgcagcaaagagaagggcatgaggcgcaggaagcatttctcgatatttttaaccaccgcattctgagccagttttatcgcatctggcgcaaatactcgtatccggcaacctttgaagacggcggtcgcgaccgtacttcgcagagcctgctggggctgatcgggctgggcattcccggcaccgctcagcatattgccgcgccggtatctcgctttctggcattactcagcgtgatgcgcctgcctgcgcgtaccgaagagggaattcaggcgctggtacgattgttggcgccccatacgcgggcggaagcgtcgccgcactgcccacggacggtgtacccggcgcagccgctgggtttttacggcgataacgatttcctgcttgatggctacacggtgctgggcgaggaaacgaccgagattgccagccagttgctgatcgcgctgtacaccgatgatatcgccgaggccgcaggctggatgccggaagggcaaatctatgcggactttctggttctgctgcgggtttatctcggctggcgctataaggccaaaatcaccttaacgcttcccacgccgctgttacccgcgccggtacttggcgaaacgccgtttatgctcggcataagcggcgttctgggcatggagggggacgcggttccgccggatttaccggccacgtttaccacggaactgggcggctaccgcggcatgccgcttgcatcattatcacaaggaaaccaacgtgttgaatatcacttcgcttaa

SEQ ID NO: 92011 - DNA, 750 bp, Enterobacter aerogenes
atgcgcgagtacgtgtactatccgggaagttttcagccgctggcgctgctgacgcaggaagcgggcaggaaggagagctggcactatcattgtgacccgaacggcgcgccggtccgcctgacgtcattacagggcgagatagtgtggtcagagaagacgggggtatggggagagaaaggggcggtctacgccgatcgtatcagcaacccgctgcgttttcagggccagtattttgacgctgaaacggggctgcactataatcgacatcgttactatgatcctgaaattgcgggatttattagccaggatccgattggattagccggtgggctgaatgtttatcagtatgcgccgaacccgctgggatgggtggatccgtgggggctaacttcggtagacgccacaggatatagtgtttacggtttatttgagtctggtgcgaaagaaccttattacgtgggtatcactaatgatatggatcgaagaagaggagagcatcttgatacagaaagattatcaccagattcgaggatggaacctcttgatcgaaatgtaacttatgggcaagccagaggttacgaacaatattacattgaaaaatataaaacgagaactgggaagattggcgaagccatatcatcaaccaataggggtaataagtataattcatttgatcatggacggaaagatgctcgtgcgaagtcatttaaacatgcttataatagtaaaaagaatgggaggaaatgttga

SEQ ID NO: 92012 - DNA, 483 bp, Enterobacter aerogenes
atgagtaattttaaattttggggatgggataaaaaaccaagaaccatgttacgctttgtaaaaccaggagacatattttgtttaaagtttgatgagagtaattattattttggtagagtcatatctaaaataatcactggccacgtagttgaaatttttgattttgtatctactactccagagttaaccgaagaagatatatcaaaaagaatcattcctccaattgtgattgatacatatacattatttgatacaaagaaagaaaaggggagtgactggagaattatcggacatcaaaatgattatgtacctgaaaatgttgatgacgtttattttgtttatggggtaggtgattcatgcaagaaagtggatgtttttgataatgagtacaatatatctgaaaaagatgcggatagttatcctcgcctgacaccacatggtgatcatcaggttaaatctttattgaaaactggaggccggtga

SEQ ID NO: 92013 - DNA, 1029 bp, Enterobacter aerogenes
atgccaccacgtagcgccagcgatctgtacgccgaaatgaaaaatatgtcagtagaagagcgtattcgctttttctcgctttcgcttgcggaaatgcatcgtgagctgcaggagagcatcagcgagattgagtcgatgcagcgagcgctggccgaaagcgaggagaaccatcgacagctggttgagactgcacaggatgcggtgattaccatcaatcatgcaggggtggtgattaactggaaccaggccgcggaaagaatgttcggctggtccgctggggaagctatcggcaacaacctgggcgagatgatcgtgccggaagagtttcgcgagcagcatgcgcgtggtttaatgcgctttcaggcggctcagccgtcgaatatccttaatcgcaccatcgaaattaccgccctgcatcgaactaaaggcaaattccctatagaactgtcgatctggccgcatcagcaatcaggcaagcagattttctccgcgtttattcgcgatatcaccgaccgtaaacagcgggagcaggtggtctggctgcatgcaaacttcgacgcgctgaccggattgccaaaccgcagactgttgagtaatcgcctggagctggcgataacgcaggccatcgccaatgagacagaagtggcgctgctctttatcgatctcgaccgctttaagccagtgaatgacatttacggccacgccgtgggtgacgaactgctgcggctggtggcgtttcgtctacaaagcgttttacgagaaggtgatacggtggcccgcctcggtggcgatgagtttatcgccctgctccccgatttaaaggcaaacgatccgctcccccgacaaacggcggaaaaaatcagcaatgcgctaacccagtcatttttgatccacgagcatgttattacgatttccggcagcatcggcattgcgcttttccctcacgatgccgcggatgccgatacattgctgaacagtgcagataaagcgatgtacagtagtaagaaggcgacgccgcgtgagaggtaa

SEQ ID NO: 92014 - DNA, 1770 bp, Enterobacter aerogenes
atgactaactgggcctacgggatcaccgtagggctgaccattgcatccggtatggcgatgctaatcgcttccggcgccgatcgcgctgaacgccaggctgtacaacaacgggatacgttcgttcgtcttgtcgatgagatagaacgcgacgcgtgggagctttcggatctcgtgcgactgtatgtcatcgaaaaacaaccggagacgctgcaacagtatcatcagcaggtccaaacgctcgaatcaattgaaaaccgattgcttaaactaaaagatgttggcgccagccagcaggagctggcgctgttgcacgatggtctgcgtattgtcgatgaattacaagatgaacagcaggccgccatcgatcgcgtcgctcgtggcgaagagaaagaggcgattttgcaggtttacggtaagccttatgagcaggagctggagcgggtgcaaacgcaaatcgatcatttccgcctgctgctggaaggacgaacaaacaacgccatgcagcaagcgactgaaaaatcacgcctctggcggacgctttcggaagcgatggttggcctgaccgccttgatgtttttatttgttctcggctttattctcaaacgccgggtgctcacccctgtggtacgactcagcgatgtggtacagcgtctggcatcgcaggattatgccgtcgaaccaccgcacttcaaacagattgatgaaatcggcgatatggcgcaggcgatccgtatctttcgcgaaaatggccttgcccgccagcgtcttgaacaacaacgcgatgccgactgggccgttcgtgaactgctggcgcgaatgactcaacgcttgcagggatgtgaatcatttgaggatgtggtgaaggtcgctgaacttttcgcccccaatatcgcgccggacgttcctggccgactgtatattcttgataccgatccctggcaaatgcgctgcgtcgcgcagtggctttcgccgccggacgaggcggccgtgttttatcccgataagtgctgggcagtacgtcgaggcctgagccatccgccggttaacggcgaaccggacatcgcctgctatcatctgccgcaagaatgcaacgagcaatcattgtgcgttccacttatcgcgcagggtgaagccattggcctgctctcttttcgtaatgtcactagtgagacagccccctctcgcgcttatcttgaactcatggcggaagcgttgggcctggcgctatccaaccagcgtctgcgcaatgctctgctggaaaaagcgttgtttgattctctgaccgggttgcgaaaccgccatcatcttgaggaagcgctgcatacgcagatgaatctggcggtgcgcaacaacagcccgctgagctgcctgatgatcgatatcgatcactttaaggcggttaacgataattacggccatgaggcgggcgatctggtgattaaaaacgtcgcggcgatcatccagcgcgcggtacgcgatcttggcctggcattccgctatggcggcgaagagtttttggtgttgctttccggcagcgatgaggccagcgcagaagcctgcgcgactgaaatctacaacaacgtgagaaatatgactttacgctgcgggctgacggatataggccaggtgaatgtctctatcggtatcgccagctatccgcaacacgcgcaaagcgacagcctgctacgtgctgcagatgccgcgctgtatcgggcgaaagagctgggacgttcgcggattatccgctttgatatgctgaaatcagcataa

SEQ ID NO: 92015 - DNA, 1188 bp, Enterobacter aerogenes
atgcgtattgccttaaagtcggctttaatgctggtcacgcgcgtcattaacgccatcaacccaaggctggatctgcatctacagcgcacggcgctgataagctacaaattatcgctggcgttggatcttcctgcgtcgcaacaaaaaaccatctttctggctgcgctgctacatgatatcggcgtgcttggcgataagcggcgcattgattcgctaaacgcgatagacaacctttatgacccgcaccaaatccgtggcgtacagatgcttgccgggctggatacttttacccctatcagccctattattggcgatcatcactttgatccaacccgcaaaggcactctggagcagcatatcgtctattttgcggactgctttgagcgtctccttcctacgcaaggcgtcgttgctccagaccaacaaaaggcgctcgtcgcccgctttgtcgctgactatcgcgatatcgatccaccactttgcgatactctgcgtgaactagcgcaacaccctaccttctggcgccatatgcaagcagagcatattcagcggttgctggaaattgtggggccgattaacgacgtatatattgacatcgatggtctgaaagatatttgtttgctgatcgcgaaaattgttgatacctacagtagtttcaccgccagccacagcatcatggttggcgaaatttcttatgccctcgccgtctatatgaatttaccgccgctggtgtgccgtaaaattgaaattgccggctatttgcatgatatcggcaaaatatatattccactggcgatcctcgaaaaacaggctgaacttagcgatgacgaagcacaattgatccgcgagcatagctatatgaccggtgaaatattacgagatttcaccgatctgggggaaatcatcgattgggccgctaaccatcatgagaaactcgatggcagcggctacccgctgaatttaaatcatcgttatttacaacttccggacagaattatcgccgttgcggatattttcaccgcgctcgttgaggatcgcccgtatcggctcggtatgccgtatcaggaggcgttacatcttatagaagctgatgttataaatggcgctctggataacgatgtgtatcttgtattgcgccagcatgcccaggcgctacatcacctcgtcacccgcataccgcgcgtctga

SEQ ID NO: 92016 - DNA, 249 bp, Enterobacter aerogenes
atgaagtggatagtaatgatgttgccgctgatgctagcgggctgcgctcagtcacaacagcctgatgcgccgccgccgccaaattcgatcggtatggccaatccggccgccgtctattgcgaccagaagggcggtaagcaggttccggtccagacacctcagggggtgcgcaccgactgtaaacttcccagtggtgaaacgctcgatgaatgggaactgtggcggcgcgatcatccggcgaagaaataa

SEQ ID NO: 92017 - DNA, 1854 bp, Enterobacter aerogenes
atgcgaaccctttggcgatttcttgccggattttttaaatggacatggcgaatactcaatttcattcgccaattcgcgctgaacctggtgttcctggtgttagtgctgatttgcgtcggcatctgggcacagtttagcagcagcaccgcggaacataccgcacgcggcgcgctgctgatggacatcaccggcgtggtcgttgataagccttccgccagcagcaagctcggggtcatcggccgccagctgttcggcgccagttccgatcgtctgcaggagaactcactgttcgatatcgtacagacgattcgccaggcgaaagacgaccgtaatatcaccggtatcgtactggatctgaaaaacttcgtcggcggcgatcagccttcgatgcagtacatcggtaaagcgctacgcgagttccgcgacagcggtaaaccggtatatgccgtcggcagcagctacacccaggggcaatactacctggcgagcttcgccaataaaatttggctctcgccgcagggtgaagtcgacctgcacggctttgccaccaacggcctgtattacaagtcgctgctggataaactaaaagtctcgacccacgttttccgcgtcggtacttacaaatccgccgtcgagccatttattcgcgacgacatgtcgccggctgcgcgtgaagcggacagccgttggatcggcgaactgtggcagaactatctcaacaccattgccgctaaccgccagatcaccgcgcagcagctgttccccggcgctcagggggtgatcgacggcctgcgtaaagttgatggcgataccgcgaaatacgctctggataacaagctagtcgacgagctggccacctcgacggaagtggaaaaagcgctgactaagcagtttggctggagcaaagcggataacaactatcgcgccatcagctactacgattacaacgtcaaagcgcctgctgaacagggttcagcggtagcggttatctttgcgaacggtgccatcatggatggtgaagaaacgccgggtaacgtcggcggcgacaccaccgcggcgcaaatccgcgacgcgcgcctggatccgaaagtaaaagcgatcgttctgcgcgtcaacagtcctggcggcagcgtcagcgcctcggaggtcatccgcgaagaactggcggcggcgaaagcggcgggtaaaccggtggtggtctcaatgggcggcatggcggcatccggcggttactggatctccacccctgcggattacatcgtggcgaacccgagcacccttaccggctccatcggtatctttggcgtgattaacacggtggaaaatacgctcggttcaattggagtccataccgatggcgtcgccacctcgccactggccgatgtctcaaccaccaaatcgctgccgccggaagtgcagcagttaatacagctgagcatcgaaaacggctataagcgctttatcaccctggtggctaacgcgcgtaagagcacgccggagaagattgaccaaatcgcgcaaggccacgtctggaccggtgaagacgccaaggccaatggtctggtagatagcctcggcgatttcgacgatgcggtggcgaaagccgcggagctggcgaaactgaaacagtggcatatcacctggtaccaggaagaacccacgttcttcgcgatggtgatggatagcctgaccggttcagtgcgcgcggctctgccggccgcgattcaagcatacctgcctgcgccggttgcggcagccgcggacgttgtgaaaacggaaagcgataaactggcggcatttaacgatccgcagaatcgctatgccttctgtctgacctgcgccaatattcgttaa

SEQ ID NO: 92018 - DNA, 186 bp, Enterobacter aerogenes
atgattttagcaattggtggtgatgaaatgataaacaatatcgattatacaaagctcgcgatggcataccaaagtgacaaagcggaaatcgatccaacgctgcgcagtcaggtctggggctcactgctggtggggcttagcgctttctggtgcatcgttgcattattcatctggattattagctaa

SEQ ID NO: 92019 - DNA, 1338 bp, Enterobacter aerogenes
atgctttatttcttttcaataatcccgctattatcaacgccttgccagtatgtaacgctttatttttgtgtgttcttcatagatttgaaggttatcaatttacgtataatgtgtacactgatgtgtatatcttcttccggagtgtacacattgcttaccgacacaaaattaagaaaagctcttggtaaaaaaagagaccaaatcgaggtcatttcagacgcacatggtctgaatgtcaggttgtctacatccggcagtataacattcttttaccgctacagatggaacgggaaagccgcacaactaacgattggtgattatccaaccacctcattagctcatgcccgagaacgtaggcaacagttcagggcttggctagcggaagggcttgatcctagacggcaagtagtactcgagaaacagaaaaaagtcgaagcgcttacagtgaaagaagcatttgattactgggagaactactactgcatccctgaaggtctggtaaaaatcaaagttaaccgccgcgacttcaataatcatatagccccagtgctcggaaatatgattgtagatcagacaactaaagctcactggctaaatctttttgacggtatggggcgaagagtggttacagggcaaatgctcggtttgatgcagcgcacatttcgtttctgttccaaccgtggggtaattaacgtgaaccctattgaaagccttagacgatcagatgtagggctcacagcagctgtaaaagatcgcaggttaagtgatgatgaaatcattacagtttggaatgccctgcctgagatgaaatataggcagcaattgataatgaagtttctcattatgactggctgtcgaagtacagagatcagaacagcaaaatgggaatggtttgatttaaaggaaaaaacatggactatcccggcaagtgactataaaacagggaagtcggtgagaagggcgcttcctgaggctgtaataaagatgatggtagttgaaaaagaaacatcagtttcaaaacatgttgtgacgttgtcacgatacagggggccagaagatgacaggccgccacttcaaccaaacgtggctcttttctctgcgcagataattgcaaaaacagggatgaaaccttggtcgcttcatgatttgagaagaacagtggcgacgcgcctttctgaattaggtgcgccaccacatgttgtggaaaagctactagggcatcatatgtctggagtcatggcgcggtataacctccacgattatttggatgatcagcgtcattggcttgctgtttggcagcgtcatcttgagaagttgattggccagcctctggtttga

SEQ ID NO: 92020 - DNA, 309 bp, Enterobacter aerogenes
atgagccttaaacatcaattacctgagctcgaagcaagcattgacccggccacattgcgcgcggccgccgacgaatattcggatctgcttctgactttgtgcttgtgcatgaagatggccggccccactcgagcgaacgtgcgcgcctgcgccaccgcgcttaaaaagcgcatgacaacctggcacagccagaaagagctcaacgcaattctgtccagttgggatcccgttggctatgttctcggccttcgccgtgaagcgaacgacaacgcgcgagcagctggcgatccggttgatgtatttgtgtga

SEQ ID NO: 92021 - DNA, 660 bp, Enterobacter aerogenes
atgatatttaacggtgagatggttcgcgccatcctcgacggtcgaaagacgcagactcggcggatcatgaaaattcagccagaacattcagggcttgggttacgccgggtgactgactccaaaaacggtagtgatgacggtaagtatttttggtcatcgtctgatgcgtgcggcctaaaagcgcgctccaaatcgttcacctgtccatttggtgtcgtcggcgatcgcatctgggtacgtgaaacatttcaggggccgttattcgattacgaacagatggagtcatacctcgaagatagctcgaaattcgaaaagccagaattttgccagtatgccgctgatggcaagccagcgccggaatattacgacgctgacgacaacctgcgtcacggatggcgcccgtcaatccacatgccgcgttgggccagtcgaattctactggaaattacagacgtgcgggttgagcgcctcgctagcgtgagtgacgaagatgctggcaaagagggctatccggcggatccctctccgtttggtgggccgatggataaatggctgtggtttcgtcagttgtgggacggcatctatccagagcagagctttaaacacaacccctgggtgtgggttatcgagttcaagcggattgaggagcagacagcatga

SEQ ID NO: 92022 - DNA, 1089 bp, Enterobacter aerogenes
atgtccaatttagtcgcaactactgaaaaccagacccagaagatcgacaacgtttctattctgacgaatggtgaattgttcaaccgcctgcgcacgctttctgaagtgatggccaacagtggaaatttcgtccctgaacattaccgcggtaaaccagatgcatgcatggctgtagtgatgcaagcagcgcgttggggtatggatcctttcgctgtagcacaaaagactttcatcgttggtaattcaggtgtgcttggttatgaagcgcaactggttaacgcagtgatcaataccatggctccgacaaaagaccgtattcactttgaatggtttggggcatgggaaaacatcgttggacgcttcgtggagaagacaagcagccagaacaaaaagtacattgcaccgggctggaatttgaaagatgaagctggcgtaggcgtccgcgcctgggcaacgctcaaaggagaatcagaacctcgcgagcttgtgctgatgctttcccaggcacaagtacgcaattctacactgtgggcgagcgacccacgccagcagttggcctatcttgccgttaaacgttgggcgcgactgtattgtccggatgtaatcctcggggtatataccgccgacgaaattgacgaacgcgaagaaaaggttatcaacccgtcgcaaacagaaaaagtcacgctgaatgagataacaaactccgttggcgcttccaccagcacgcaagagtctgcatctaacgtcgacgcagttgccgatggactccgcgaccgaattgatacagctaactcagtggatcaggccaaagccattcgcgcagacatcgaatcacagaaagctctgctgggtactgctctttataccgaactgaaaaataaggcggtgaagcgctactaccttgttgatgcgaagaacaaggttgaggctgccataaattcacttcctaacccaggggatccggaagcggaagcgttattcgcgaaggcagaaagcaccctgacctcatcgcgccgccacctcggtgatgaactgtatgaccagttccgtatcaccttggacgacatgaaaccggaatacctgggctaa

SEQ ID NO: 92023 - DNA, 3141 bp, Enterobacter aerogenes
atggaatatttttatctgataaaagcgactcaaaaatcgggtaaagccgatgccgtaatctggcgttctgcaaaaaccgaatcccgcgcgctgctgcagctggacgtcgacctggaagatgctgagattgaaacaggccgcggcaaagactatcaaaagccaatccgtaccgatttcccggtatttaacgacctgccagctgaaggcgttctcgattactcatggtgcgaacgctatcagctagccgacgacggtcgtacctgggcactgaagccaggacaagagcccgtggacgttcatcacaccgatgatgctggagtatcctctgagcctgcctctggcgagctggttgaaggcaatagtgctggcgatgctggtgatggcgataacgtggagtcgttcggcaatgctgaatacgaaaacgataaaaatgccctgttcaatattgctgaacagccgttccgcattaagctgctggcgcagtacatggcgaatgataaccacgtctatcaaatcagtattcctcaccgtaaagagctcgccgttctggaaatggataccgataactccgcagtgcaggatctgattctcgccgctgagaacgtccagggtttgaaggatgccgacatgcctaccctatggaaatttaccagcgccaacaaagcagtatttcctgaaggtaagcgccacgaactgggcaagcgtatccagtttgcaaaactgtggtttgaaactccgcacattgaccgcggcaaactcgttcgcgaatggtctgccggaaattacatttcttccgttcagaaaacggacaccggcacgaatgctggcggcggtaataaaaccgatcgcaaccctgactacacccatacccttgatacgcttgatgttgagattgctctggccacaatgccgatggatttcgatatctacaatttcccggcatccattcatcgccgggctaaagaaatcgtccagaaaaaagaaagtccgttcaaagaatggtctgctgcgctgcgtaaaaccgcaggcatcctggactattcccgcgctgccatttttgccctcattcgtggcgccaccagcgatattcatcatttcccggtaagtctgcagacctatatcaatgcgaacctgacagagcataagcatgaaacgccctctgctgaaacgattgagaaagccgggcatgtgtcatctgccgccatcgctgaacggtcagccgtggataagattctcgcagctgagcgcggtgaatatatcgaaggagtaagcgatccggatgcgccgaactgggtaacggaaggcctgaccaaacccaaacagcctgaagtttcaaacatgggcaatggtgttttttcgattgatggtctgatggatagccagccagcatcatcaccagcactttctatcgtggaccaggcgcgccagcgcgctgcagaagaaaaattacatccagctaattccggggaaaccaccagcgatgtgcagatggaaacggctcagccagtcaaagacgaaaatgataatgcggtatcagcaagcgaaggcactgatgcaactgctccgcaagcagatgccgtgaacatgcgcgatattcttgctgagcgctgccctgaccttaccgcggcagtattgaaagaccagcaatcagcaactgcagaagaagagcatgagccagagccggaagcaacaaaatggcctgaattcttcgagcccggtcgatatgaaggtgttccgaacgatgtttaccacgcggcgaacggcaccagttcgactcaggttaaagatgcccgtatatctctgatgtatttcgaaaaacgccacgtctcgaaagtcattgaaaaaacgtgctctcctgttctggatatgggcaatttggtgcatgcgctggcgctgcagcctgaacagctggaaaaagaattcagcatcgagccggaaatcccggaaggcgctttcaccacgactgcgacgatccgcgcgtttatcgacgagtacaacgccggtcttccgccgctgttgagtgctgacgatatcaaagcattgctggaggcgcacaacgccagccttgtcgcccccctcagcaccgatgatatcaaagctctcattgaagaacacaacgctagtctgccagcgcagatcgctctggggaacgacatcaacgaaacaggacagagctacatgtctctgccggttgatttccagcgcattgaagaaggacagaaacagaccgctgctgcaatgaaagcctgtatcaaggaattcaacgccacccttccgccacagctaaaaaccagtggcagccgggaaacgctgatggaaacgctggcgattatcaatccggatctcgttgcacaggaaatgcagaagcccgcaccagtaaaaaccagcggaagtcgtgatgccctgttggagcaactggcgattatcaaccctgacatggtcgcgcaggaggcccagaaggcgcagccgctgaaagtatcaggtaccaaagcggatctgattcaggccgtgaaatcagttaaaccggatgccgtgtttgccgacgaactgctggatgcatggcgcgaaaacccggaaggaaaaatactggttacccgccagcagatgagcactgcgctggacatacagaaagcactatttaaccaccccaccgccggcaagctgctccagcatccgagccgcgccgttgaggtgagctatttcggtattgatgaggaaaccgggctggaagttcgcgtgcgccctgaccttgagatagacatgagcggcctgcgcattggtgcggacctgaagaccatcagcatgtggaacatcaagcaggaaggcctgcgcgcgaagttgcacagggaaatcattgagcgcgattaccacctcagcgcggctatgtactgcgaaaccgctgctctggatcagttcttctggatattcgttaacaaagacgagaactaccactgggtcgccattatcgaggcatctgaagaactacttgaacttggcatgctggaataccgcaaagcaatgcgcgccatcgcgaacggtttcgacactggagaatggccggcgccgatcactgaagactacgccgaagaacttaacgattttgatgtgcgccgtcttgaagcgctgcgcgtacaggcataa

SEQ ID NO: 92024 - DNA, 159 bp, Enterobacter aerogenes
atgcagaagaaatgcgcttattgccgcaagccgattgaggaaggcaaggaagtaaaaatgaccatcctcatcattcacggttcgcagctggcgccacgggaaaggacctattgctctacgaagtgcggtcaatacgaccagatggccaacgaggcctaa

SEQ ID NO: 92025 - DNA, 192 bp, Enterobacter aerogenes
atgaacacgatgttcgcactggttctcactgtcggcatgctgactggcggaaatcaggacgttcttctcggtgtgtatgacagcgagtcggattgtaagaaagcagctgttgagcagggagttgaagaaaactgttacccgcttaagggagtattagcagaaaacccagccgcatttacggtgcaaatgtag

SEQ ID NO: 92026 - DNA, 144 bp, Enterobacter aerogenes
atgagtaagcaaggcatcagagccctgatcatttcggtagttgtcgggctcttcatctggacggcgctaatcagcgcactgtgggagttatatcaatggtcgattttgcacgtacacccgctcgtcaacaggctattcggttaa

SEQ ID NO: 92027 - DNA, 276 bp, Enterobacter aerogenes
gtgcagggagtatgtttatgggactattatttggttataaaaacatctatgaaggctaatggtatgcggtatgaggatgagtttttcgcggagatgcacccgcaaatagcgcaggttatcgggatagcggttatgcagctactggttgagaagcaagagccgtcaagaggtgcgctgatagagatgattcaggtgttgtggcaggaagaccaggtcgatctggctgtggagttggctatcgacgttctgtcgcgaccaaaggtgtacgggcaataa

SEQ ID NO: 92028 - DNA, 477 bp, Enterobacter aerogenes
gtggcctctgtctgcattgagcattatgaatcactttgctcccctagtagatttacgaatgaaactgcatttcctccgattgaaaatcaatcaggtgatatcatttttacacctacacaaattgctatcataagaccagtataccgggcttcttatcgagatgagcgacaactagtaagagcactttctataacaattgtcgtttttataagtgttatagtttggcttaaaggggggggatttatgtactacattccgttgtacttggccctaatgcctataatttattggatatctaaaataggcttggcctttgctgtagctaggttttcagaagtgaaatcaatcagttactgtagagaccacaaagacttaaaaccatatgtaaaacaccttaaaaaaaatgaagatttgcttgacgcgactttagattttctgaaagagaaaaagtgcggtggctctcgacatgacaactga

SEQ ID NO: 92029 - DNA, 387 bp, Enterobacter aerogenes
atgagaaaaaatacgcaccagtccgacaacccacaggtccaaaggctcaatgaaataattgagacgaagcgcatatccaaagcggatatagcgagaatttgtggtgtaagttcgcaatcggttaacaactggtttgtgcggggagcgatcggaaagagctctgccataaagctcgctgatgctcttggcgtaagccttgagtgggttttaggtcaggacgtcgatgcaaatgatggtttacgcccggacgagaaacggttgctggaactctataaccaactccccaacgaagaagagcagcagaacatgttgcggatcgtatctctgcgtctcaaagagctcgatgagctgtatgccaagtatatggggcggcgtatcaaagaatag

SEQ ID NO: 92030 - DNA, 537 bp, Enterobacter aerogenes
atgcaaacactttcctttcaacaaaataccggattcaaccccggcgctctgataaagcgaaatcagacgaaagtggcagatcacgacggcattcgttctgccgttcgcgcctgggctgcagctgaaggtcaggatgttgtttcggcgtacatcatcgatgagtggcgccagcagggcggggaggaaattgaatttcctgcggacatcagccgcgcccgccagaagcttttccgttacctggataacgaggccgactcggaaaagtatcgcgagaatgtgtgtcttctgacgccagccatcatggccgtgctcccgctggaataccgccaccgcctgttgcctgaagacaatttcatgtcccgtctggcacgactggagaaagagaccagcgaagcgaaggtagctgttgctatgggagctccacgccatcaaaagctgaaagaactgagcgagggaatattcgagatgttccgggttgacccagagctaacggggccgctaatggcaatcgtcacctcaatgctcggcacgttgtag

SEQ ID NO: 92031 - DNA, 861 bp, Enterobacter aerogenes
atggccgacctggctaacgggtataccaagatcgcaaacgagatacagaagctcaagccacgtctgcggatgtctggtcgtgagtggcagtgtcttgaggctgttatctggcttacctatggatggaacaagaagcaggaccgagtaacaaacacggtgattgctgagcttacagacctcggagagtcgcatatttccgacacaataaaatctctcgcggagcggaaaattatcttcgctcataagcagggagtgatgaaaattgtcggtataaatactgagctatctgagtggattttagacaaaccgaaaacgggaaaactcttcccggaatcgggaaaagtgttaccgaaaacgggaaaacccttcccggaaacgggagacacccaatacaagaacaagaacaatagtaaaagatcttcttcgtctcggaattctaaagaatcccgaaacgaggaaactttgaagtttctctctcgtcatccagaagcggtcgatgggatttatacccctgcgggaaaatcctggggaactgctgacgacctcaaagccgcgcgatggattttcgataaagccctcaccgtgaatgcctcactctcagaaccgaactgggttgaatgggcaaacaccatccgtctgatgcgcatgcaggacaagcgcagccattacgaaatctgcgagttgttcaagtgggccaacgaagacagcttctggcagaacaacatcctgagccccaccagcctgcgaaaacagtgggataagctcacgactaaacgtcagcgcaacccaaacccaccacacgcgaaatcctgtgcagctgcgctggacaataccgactggatcaagggggtacttgaatga

SEQ ID NO: 92032 - DNA, 744 bp, Enterobacter aerogenes
atgaaatctctcgcagaaagcatgcataactttgaccggaagaacttccagcgtatcgccgccggcatgcctgaaatgcaggatgcgcatagctttgcacatcaggcgacaaaaacggctgagatattcaacgagctgtttcgccagctgctcgccgtattcccggcactggccagcaagtctgcagaagacctcaacgagatgcgccgacaatggcttctggcattcaaagagaacgggatcaccaccatggagcagattaacgccggaatgcgtgttgcccgcaagcaggaaaaaccgttcatgccgtcgccgggacagttcgtcgcctggtgccgttctgaacaggctgtttctgctggactgccagatgcgaatgaactggttgatatggtctaccagtattgccgaactcgcggacagtaccccgacgcagagtcatatccttggcctgagcacaaagtcatcccggccacgctgaagcacaaagcctgctactggatgatcacgggactgtacaccgatatgcgcgcaaatggcctcagcgattcagaactgcgtcgtaaagcatcggatgaactgttgcgtatggttcgtcgcttgaacgccggagaaacgattccagaaccggtcaagcagatcccaaaactcggcggacgtccgctaagcaacgagcaggggttaaacaaaattgctgagattcgcgcgaagttcggtttgggaagagggcggaatcatggctag

SEQ ID NO: 92033 - DNA, 336 bp, Enterobacter aerogenes
atggctagagcattttcaactgctgagcgccgggagtatgtccgcgcagtgattcgtatcacgaaacatcaggggcgcctgacgaccagcgatgcaatgaaaaaactggggttaagccgcgataccgttctgaagtatttccgtgatacggaagccactggcgaagttgttcgtcatggccgatccggattattccgcgaccagcgcgccgttatcgattttgacatgaaacgatttggtctggtgccgaaagcagttgttgggatgaattacagcctgcttggcagtcctgtttttcagcgagttttagatgttcaggaggctattcatggctaa

SEQ ID NO: 92034 - DNA, 786 bp, Enterobacter aerogenes
atggctaagaattctatcgatgtatacggtgccagcggaaaaacaaacgtgctcaacttcgagcctgaaaacctgcacctggtcaccgataagacccatccactttacgatgagcgtgtacacctgccgatcgaagaagggatggtcctgaacattgcggagctgggtgtactggagccgatcatcgtctggaaagaccctgaaacggggctcacctgcgtagttgttggccgtcagcgcgttaaacataccctggaagcaaataaactccgtctgaaagaaggcaaagacccattgcttgttccaggagtcgttaagcgcggatcagcaaatcagatggctaaatacatggtcagcgaaaacgaaattcgccgacccgatacaccgcttggccgggctaagaaaatgtcagacgcgctcgaccgcggactcgatgaggacgacattgcggtgttgtttggctgcagcgttcagaccgtacgcgcaacgctgtcactgctggatgctactcaggctgttcgcgatgcagtggagtctggagctgtcaccgttactcaggcgcgtcagctggtatcgcttaaaccagaagagcagcgggagaaggtcgctgaaatcgaagcggcaactgctggcacaaccggccatgaaaaagcccggcgtcagcgcgctgtgcttggcgaaactaagtcacgtctcaaatcacgcaaagaaatcacaaaagccctcgaaggtgccagcggtgaatacgcggcggctctgcgctgggtgcttggggaggctgtatga

SEQ ID NO: 92035 - DNA, 204 bp, Enterobacter aerogenes
atgacaatcgtaaaaacccataccggcactgtgatcaccaaagacggtccgaaggtaaaaaaactgcaccagacagagcgaatgtgggtcgtcggcaagaatgagttttaccacaaagaaaccgggcgccgtcattttgctgagaatacgcgccgccggttgttgttggaaacgattcaggcgataggtggttcacatgactga

SEQ ID NO: 92036 - DNA, 252 bp, Enterobacter aerogenes
atgactgagcacgtcgaaaaatacacaaacaaggcaatagaaatcatcgctgactatatccagcgcactaacaaaaaaaacgagcagttgcaggaagcaaaggtgcgcttggataaaaaaatcgctctgtttgcagacgatgagaactgcaacacaaacaggctgatggccgtatttttaccagcaatgaccagccatacccgagatggctttttcgacaagatagcaacagctttagagagagccgaataa

SEQ ID NO: 92037 - DNA, 444 bp, Enterobacter aerogenes
atgaagatttaccaggctcaaccacatgatgtggatactatccttcccctgtatctcgggtaccgtcgtttctacgaggtcgaagaaaatgcctcgcaggccagagattttattctcaagcgccttcagcttaatgagtccgtgatcttttacgccgaggttgatgggaaagcggtaggctttacgcagctctatcctttattttgctctcttgagatgaagcgtatttggttgctttatgaccttttcgttgatgagtcagctcggaagcatggtgtggcacacaaactaatctcacgtgctgagcaactggcgaaggagagcgattcggcatttattatgcttagtaccgctacagataacatccgtgcacaggcgttgtatgagcgtaatggatttgtgcgagatactgagttcttcgtgtataacaagtttctgaaataa

SEQ ID NO: 92038 - DNA, 234 bp, Enterobacter aerogenes
atgcgcagagagagtgacgagtattacgatctggttaaacgttctacaggtgaaattgtgggcagtatcagggccgctggccgagccctggtgtacacggctagcgggattacttctatgcgaccgctacttgaggacgagggaatatttaatctcaacacaatgaccagttttctgcatcgcctcggctaccgagttatcccaccttctgataatatgaaatcaacggcctga

SEQ ID NO: 92039 - DNA, 597 bp, Enterobacter aerogenes
atggcgcaattgcacttagtaaaacagtcccaaggaatcctgatccctgcaacgccggagaccagcgattttctgcaatcaaaatgcaagctcggtgccgtcctggaggccgaatataagcttgtccgcaatccggcgtttcaccgccgatatttcgcattactcaatctgggctttgaatactgggagcctaccggcggcgcaatctcttcgaacgagcgcaggctgattcttggttattccaaattccttgcatcccatggcggcaatgaatcggtattccaggatatcgctgagcagtatcttgaccgcgtcgcagaaaaacgagccggaagcatcagcatctgcaaatcctttgacgcctatcgctcatgggtaatcgtcgaagcaggccattacgatgcgctacagctgccggatggcactcttaaaaagcatcaccgtagcatttctttcgccagtatggacgaaaccgaattccaccagctttaccaggcctcactggatgtgctctggcggtggattctgtcccaaaaattcgccagtcgtgaagctgctgaaaatgcagcgtctcaattgctcagctttgcggggtga

SEQ ID NO: 92040 - DNA, 258 bp, Enterobacter aerogenes
atgcaggagctggagaagaagcgcgaaaaacaggctcaggcgaaagcgaagaaagagcgagccgaatggcgcaaacgcaaggccgcggtgaaacctctcaggcactgggaggatatgacccagcgtgtcgttaacgactatatccgcgaacgagaccatgatctgccgtgcatcagctgcggcacgttcgacacggttcagtgggaagccggtcattaccgttctcgcggtaaagcatcgcacctgcgctaccactag

SEQ ID NO: 92041 - DNA, 141 bp, Enterobacter aerogenes
atgagtcgcgacgtaatcgaacgcatccgcgaacgctggcaaaagctacgcctctgccggcaccgtggaacagtaatgaccgattatcgaattttgaaaaactttgtccgcatttatcagtctctgggagaaatagcatga

SEQ ID NO: 92042 - DNA, 822 bp, Enterobacter aerogenes
atgaacctcgaaaatacagtgaaataccacttcgcgaagtccactatgattagcgattctccacgagcgacggcatcagactcattaaccggcactgacattatggctgcaatgggcatgacacaggaacgtgccgctatggggtatagcgctttcctaggcaagatgggcatcagcaataatgatcgggaacgagctatcggtctattagctgagtatgcgctgacaaaatgcgataaagttgccgcgctgcgtaagctctcggcgaatgtaaaacctcaggttatccagatcctcgcaacaattgcctttgaggactattcgcgaagcgcttccagcaaaaaaaaatgtgactgctgctgcggttccggattcatcgacgcagaggtattcacaaacaaagtatcgtatccagatgggaaaccgccaaagtgggtcaaggtaacaaagggaatctcgccgtcggactgggaagaagtaaagtctgtccgggagcagattcgggtgctttgtcaaaagtgcaaaggaaaagggactgtaagtgcctcctgtaatgactgccacggtcgggggagggtggtgaaccaggatgagaccgagaagcagggtgtacctgtcatgggcagctgcaagcgctgtggtggtcgtgggtatgaacgaatcctctccactgcagtgcacagtgccatttgccaggtaacggatgccatcactctggatacatggaagaagacggttaaaccattctttgacgaactgatcactaaattcgatatagaagaggcgtgggcggagggacagctcaaacaaataacgcgctga

SEQ ID NO: 92043 - DNA, 312 bp, Enterobacter aerogenes
atggctaaacgtatgcaagacaaagagagcatcgccgggattacctggctcgctctgctgatcattgcggggtggggcgggctggtccgcttcctgattgatgtgaagcagggcaaagcaaaatggagctggataaatgctctggcgcaaattgtggtttctggatttaccggggttatcggtgggttagttagcatcgagagcggcctgagcatctacatgattttagctaccgcaggtattagcggggcgatgggctctgttgcgcttacgtacttttgggaacgcattaccggagtgaaagcacaatga

SEQ ID NO: 92044 - DNA, 543 bp, Enterobacter aerogenes
atgacagctgaccagatcattgaagccatcctcggcaaagaggggggttacgttaataacccgaatgataaaggtggccctactcgctggggtatcacgcagaacacagcgcgtgcatacggttacaaaggtgatatgaaagagctccctcgggaaactgcgaaagaaatctatatgcagcagtattggctggaacccaaatttgacaagctcgccgaactgtcaccatcaatcgcagaagagttatgcgatacaggcgtcaacatggggccacgtgtttccacaacgttcctgcagcgttggctgacggcactgaaccaacgcggcaaactgtatcccgacctgaagccggatggcgtcattgggaacatcacgatcgccgcgctgcgcagttacctcgccgtacggggtagcgcaggggtcacggtgatactgaaagggttgaactgcagtcagggcgcacggtatctcgaacttgcggaagcgcgggaagccaatgaagaatttctcttcgggtgggtgaaggagagagtaaacctatga

SEQ ID NO: 92045 - DNA, 348 bp, Enterobacter aerogenes
atgaagctaattatcttcttcctgcttgcgctggtggctgttttaacgttgttgatgttaagaaagtatacccggcttgagtttgtgggacatgctcgcctgttacttagaacttggtctgttcgtctgggggctgcaggcacactggtcggtgtatgggcgcagtcgttcccggatgccgcgcttcatgcctgggcaatgctgccgccggatatcaaaaacatccttccgccaaatatcgttgcactgattagccctgcgctggtagtgctggcggtgctctcacaatacgtacgccagccggcattgaaagataaggccgacgaacagaaggagccgcagcaatga

SEQ ID NO: 92046 - DNA, 276 bp, Enterobacter aerogenes
atgagttttgaaattattgctgggctggtggtcctcatcctgggtgctatcgctggtgcattcggtattggccatgctcgcggtaccagtaaggcagaagccaaatcagcacaagcgcgcactgaagagaaagccgctgctagcgtagctgcagctgaacggaaagaggaagccaccagagaggccagcaatgtacagcagactgttagccatatgcctgatgacgatgttgatcgggagctgcgcgaaaagtttacccgccccggtggtggttga

SEQ ID NO: 92047 - DNA, 195 bp, Enterobacter aerogenes
atgacgatgttgatcgggagctgcgcgaaaagtttacccgccccggtggtggttgatacggcctgcaactgggtacgaattatctacctgaccgaccacgatatcgatgtgctggataagcagaccaagcgcgacattctggcgcacaacaaatcagtgctggccaactgccagagcattacccctactcattga

SEQ ID NO: 92048 - DNA, 258 bp, Enterobacter aerogenes
atgagcctactgaagaaaattaaagacgtcgtgtctcctcccgttccggaagagtgcagagaagataattacgattcggtgctgaaaaaccttgataccctgtccaaagaatcatctgagctgaaagccctgatggctgagttcagagaaggaaagataactcaggagcaatgcattgccacaggcgtagcaattgtcaccaaagaattactcgaattccgctacgtccaaaacaagattgattctcaggcctggtaa

SEQ ID NO: 92049 - DNA, 246 bp, Enterobacter aerogenes
atgtcagaaattacacctgcagaacaaattcgcctgaccatcatcaagaaagttaactacgacactgccgcggcgaagctggccattgactgggttgtcgacagtaatctgaaagctgagctatttgcagactctttcgatcgcgtttacacggaaagtgagattgtctcgaaaacccgcaaggcgattcaggaagcgaccgaagcgctggcgttgtttgataccgcgactgaactgtccagttaa

SEQ ID NO: 92050 - DNA, 1005 bp, Enterobacter aerogenes
atggcaaaaccggactggggcgagcttcagcaacggttcctgtccgatcatgccgcaaccggcgtatcaccgaaggattggtgtgaagcgcagggactgaattatgctactgcccgccgatatatcaagaaacccactgcgcaaactgcgcaaaaacctgcgcagaagaaattgcgcactgcgcaaaaggaaaagtgcgcagaagcgctggtggatgatgatgacctcaccgatcaacaacgcttatttgttgcggaatacctgaaggacaacaacgccacgcaggccgccattcgagccgggtatagcaagaagactgctgaacaaattggttatcagctgcttcagaaaacttcagttgcgcaggccattgcgcagcagcagaaagcatccattgtgcgcacgctcggcagcgccgatgaagtgcttgagcagatgtggcgcctggccaccttcgacgccaaccagctatcacagtatcgccgcgggagttgccgttactgctggggctttggtcaccagtatcaatggcgtgacgctgttgagtacgaagagaagcgattcgaagcgcttgagcgaaaacgtcgcgagcccgtcgatgttggtggctacggttacgaccacaccagcgcacctaacccggaatgccctcgctgtaatggagatggcgtcggccagcctttcttcgctgatacgcgcaagctggcgcctgatgctgcgcttgcctattccggtgtgaagcttgggaagaatggcgtggagattaccgctattagccgtgagcgaatgtacgaggcggtgatgaaacgtctcggcctggctgatagcgagttcgcccagcgtctgcagctgattgaaattgagcgccggcagctggaggttgaaaaattacgcaaagagctggccactgatccggaggatgacgaaccaacgccagttgcaatcaatatcaacgtagtcgatgcacgagtgagggaagaggatggcgatagcaccgacgcttaa

SEQ ID NO: 92051 - DNA, 1305 bp, Enterobacter aerogenes
atggcgatagcaccgacgcttaacatccctcaggccaaattccttgcgatgcagtacaagtttaaggcctacgtcgccggcttcggttctggcaagacgtgggtcggctgcggtggtatctgcaaagggatgtgggaacaccccaaaatcaaccagggttactttgcgccaacgtatccgcagatccgtgacatcttttatcccactgttgaggaggtggcccacgactgggggctgaatgtcaaaatcaacgagggaaacaaagaggttcacttctacgccgggcgccagtaccgaggaacgacgatttgccgctcgatggagaaaccgcaaaccatcgttggttttaaaatcggtaatgcgctgattgatgagctggacgtaatgcccgccaaaaaggcgcagttagcctggcgaaaaatcattgctcgtatgcgttacaacgtggccggtcttcgtaacgggatcgacgtcaccacgacgccggaagggtttaaattcgtttatcagcagttcgcaaaggctgtacgcgataagccttcgctctcaacgctctacggcctggtgcaggcctcaacgttcgacaacgaaaagaatctgccgccggactatatcccgtcgctgatggagtcatacccgccggagctgatcaaggcttatctccgtggccagttcaccaaccttaccagcgggacgatttaccatcagtttgaccgtaagctgaataactgtcgggaggaagagcaaccaggtgagccgctgtatatcggtatggatttcaacgtcgggaagatggccggggttgttcatgtattacgtctggggcttccgtttgcggttaatgaaatcgtgaaggcttacgacacccctgacatgatccgcatcataaaagaacggttctggctgtacgacggcaacgattatcgcaaggtgcgggaaatctatatttacccggacgcttccggcgattcccgcaaatccagcaatgccagcgccacggatatcgctcagcttaagcaggctggcttcaatgtggttgttaatgcatcaaacccgccagtgaaagaccgcatcaacgcgatgaatgccatgttctgtaatggtaacggtgaacgtcgctacaaagtgaatgtaaagcggtgcccggtgtacaccgaatcgcttgagcaacaggtttggggcgaaaacggtgagccggataaaacggcggataacgatcaccccaacgatgccggtgggtatttcattgtgaagcaattcccgattatcaaaccgactggaaaagtcacccaactgcggatgtaa

SEQ ID NO: 92052 - DNA, 1425 bp, Enterobacter aerogenes
atgcctgatatttcaacgcccaacctcgactataacgacatggttgaggcatgggatattaatgatgcgctgatgggcggcacgctggaaatgcgccggcagggcaagaagtatctcccgaaatggccgaacgaagatcctgaaagttataaggagcgtttggcttcggcaacgttactacctgcctatgaagaggccattaaacaaaacatcgggcgagtgtttgctgagccgacggtattgagtgaggattctcctgaacaaatacgggagctgtcgccagatattgatatggaaggaaaccggctcgatgtctgggcgcagcaatttttcagcatcggattccagtatggtctggtacatgcgctggtggatttcccgaaaattgaccgggaggcagtaaaaactaaagccgacgaaaaagccgcgggatcccgcccgtatgccacgatgttaaatcctcgccaggtcatcggctggaaatcgaaagtggttaaagggaaagtagtgttgaccgatctgcgtatcagagaggtcatcattattgatggcgacgattacgggcaaacgaaagttgagcaaatacgccatatcatgccgggcaaggttgaaatttatcgccgaaataaaggtgataacggcgaaagccagtggcaggttcacgacgagtgggaaaccagtcgcgatgacattcccctggtgacgctttacacgaaacgcacaggctttatgcgcggttcaccgccactgcttaatctcgccttactgaatatcaagcactggcagagtcagagtgaacaggacaacattcttcatgtcgctcgcgtgccgttgctggtggcttacggtctggctgatggcgaaacgttgacgataggttcttcctctgcgactcgtttcgatgaccgccagcggcagggactggaatatgtcgagcataccggggctgcgattgaagccggtaagatttcccttgaggatctggaaaaccagatgcgtcaggccggcgcaaaactgctgcgagcggaaaacacatcgactaaatccttagaccagactcacgaagagcggatgcaggagaattcacctctctacaccatggcaagctcgcttgaggatgcgctcgataatatcctgcagattatggcggaatggctgggcgagaaagaaggcggcaatgtcgatgtacgcaccgaactggatgtttcagcccagacgtttgatgccgcagctgcaacagctgttcagtcgctccgtcagggtggtgatatacgtcaggtcgatgctgttcgcgtattgcaggctctgaaatttatcgatccggatgcgaagcccgaagaggtaatcgacgagctgcgaaatcagcaggtcacgctggctggcggactgagtaacccgggtggtgcaaatggcaacggcgaatga

SEQ ID NO: 92053 - DNA, 1113 bp, Enterobacter aerogenes
atggcaacggcgaatgacaagcttcaggatgaatcgattgcgcatgcgatatggatagcgcggtacagcaccagcgttgcaaacaggatgataaaaatcctgaatgacagtgatgcggaactgatagccagattgctggtggcgatggatagcctggatgctgacagctttaccgtgtcgcgactggaagcgctgctcgtaagtgtcagagctctcaatcgcgaggctgtgcagtcaatgtacgcgggactatctgatgagctgcagcaactcgctcagcacgaagtaggctttcagctgagcctgttccagtttgcgattcctgatgatgttctttcgcttcacccgctggtgggcatttccccggatgccgtttacgcagctgcgatggcacagccgtttcaggggcgcctgctttcggagtgggcagataaccttgaagctgacaggatggcaagaatttccaatacagtgcggcagggttttctcctgggcgatacgcatgagcaaatcgccagaaaggtccgtggtcatgctaaccgtggctatcaggatggcgcgctgcagatgagccgaaccaatgccggcagtattgcaaaaacggccgtggggcatcttgcttcgacggccaggaaaagctttgcggcggcgaacgacgacatcctgaagggtaaacaatggctatccactttggataaccggacatcaaaggattgtcggattcgcgaccgcctcaaatacacactggataacaagccgatcggccataaggtgccgtatctgcagggacccgggaaaatccatttctgctgtcgcagcgtcgaaacctacatcctgaaatcgtctgatgagctgggtattgctgttgggcaaatattagatagctcacgtgccagcatggacgggcaggtgccttcggataccgattatcagggctggttctcgcgccagtcgttcacgcgacagtcccagatcgttggcgtaacccgggcccggctgattcgtgacggcggcatgtcgcccgatgacttctacaacgacaagggcgaatggctgactgtggagcaacttcgtaacctggatgctcaggcgttcagcaacgccagactttaa

SEQ ID NO: 92054 - DNA, 765 bp, Enterobacter aerogenes
atgaaactgaaaacagtcgaagttaacggcaaaagctatgcagaagtcgattccagcggtttacccgtctacgtccacgatgacggccaggaagttggttttgatgctgtgcaggccgttgggaaaatctcctctctgaatggcgaggcaaaatctcatcgtgaagccaaagaagctgctgaagccggtctggctaagtttgccaaaatcggcgatccggcaaaggcgctcgaagcgctggagatgatgactaaaatcgaccagaaaaaactgatcgacgcaggcgccgttgatcaggttaaagcggatatcaccaaatcattccaggcccagcttgatgaagctactcagcgtgcgacgacccttgaaggccagctttatcaggaaatgatcggcggccggttctctggctcgaaattcatcgcagataaagtagcaattccggcagatctgcttcaggcgcggttcggtcagtccttcaaagtcgaggacggcaaagtcgttgcctatgatggctctggcaacaaaatttactcccgctcgaagccgggcgaactggcggcctttgatgaggcgctggagttcctggtggagcagtacccacagaaagaccacattctgaaggccagcggcaaccagggaggcggctctcgccagtctcagcattcactcgggcagaaaacgatgaagcgcgatgcgtttaccagtttgagtccgacagatcagcaatcaactctcaaagacggtatcaccatcgtcgattaa

SEQ ID NO: 92055 - DNA, 1137 bp, Enterobacter aerogenes
atggctaatacgcttaccgggttgatcccgactatcttcacggctctggataccgtatctcgcgaacaggtcggttttatcccggctgtatcgcgcaatgctaaagctgatgcggcggcgaaggaccagactgttactgcgccggttgcgccaccggcaaccactgttgatattaccccgggggctactgcgccaaatgacggcgaccagacgatcggcaccgttgatgtcaaaatcaccaaatcaaaaatggccccggtcaaatggaacggtgaggaacaactggcactggggcccgcagggacatacaacaccatccttgctgatcagtttaagcaggcttttcgcgcgctggctaatgagatggatgcagatctcgcggctctgtatttcgcatcctcccgtgctgttggtacggccggcaccgctcctttcggtattgcaggtgatttgtcggatgcggccaatgcgcgccaggttctctctgacaacggttcgccgacaactgatctgcagatggttctcggttcttcggctatcgcaaacctccgcggtaaacagtctgttctgttcaaagtaaacgaatccggtactgatgcgcttctgcgcgaaggtatcgtggggcgactggaaggtttcaatatccacgaatccgcacatgttaagaaacgcgctgcatcaccggctgccggatacctggtgaatggagcaaaagctgaaggcgatattctgattgccattgataccggcacaggtgcttttgcagcaggggacatcgtgacgtttgacggggacagcaataaataccttgttgctgctgcgacggccacagcaatcaccctggctgctcctggcttacgtcaggcactggccgacaacaccgctattaccgctggtggcgcctacaccgcaaacatggcgtttgatcgcaatgcattcctgcttgcatcccgaaccccggcaatgccgcagggcggcgatactgcggatgatgtgatgaacgttactgacccggtatctggcatcacttaccaggtagcactgtaccgccagtatcgccaggtgcgttacgaagtcggtttgtcctggggcgtagcggcagttaagtcggcgcactcagcgttgttgctgggctga

SEQ ID NO: 92056 - DNA, 213 bp, Enterobacter aerogenes
atggccggattaacaaaagagcagcgcgcccaacgagctgctgagcaaactgcgtttacgcaggcggataacaacgaacccgtatcgaccacatcgcagctggtggcgatggttaccgatttcccagcattcccaggtgcgcccaataccgccaacgttcaccctgatgaagtggagaactggaaggcgcacggttggaaagaaatggagtga

SEQ ID NO: 92057 - DNA, 411 bp, Enterobacter aerogenes
atgatcactttcatcaccgttgaagacgtcaattcgattctcggtgccacctggacagatgaaagaaaaaaagccaaatctgtgctgatggctaatacctggatgaatggacttaacctgaaaatgccgtgcgataaggcaacccacgaaatcatcattcctgacgatgtgaagcaggctggcgcctatgcagcgctagcggcttcgaatggtggcctttatcagcagaaaaccgattctggtgtgttgctgagtaagacggtagatgccgatgatgtcagcgtttcaaagaccttcgcggaactcgctaccaacagctcggcattgcttgattctgatctgcagctggcgcttgcaatgctaaagccctatggcgttagtcagtctcaggtacggctggtaagggggtga

SEQ ID NO: 92058 - DNA, 234 bp, Enterobacter aerogenes
atgcaaaacactgatgtgcattatgccggtgacgggctcggccctcgcgatgtgtttgtgaatggaaacccgatcaattatgtcgtttacgcaaacccggcaaagggcgttgttgagtttgcacctcatccactccgggctaaacgaaatggtgaaatctatacccgtaggcttcgcggttctgtgatcgttaaattccgtcatagcggtggtgaatgcgatgggtatacgtga

SEQ ID NO: 92059 - DNA, 384 bp, Enterobacter aerogenes
atgggtatacgtgatgagttgcagacagaagtcgccgcagcattcgatactgacctgcaggattcggttaaggcgttcaccggcagttacaccgttcgtggtgcatgggatccggtaacggaaaccggcactgaggcgctggtgacttacgaggggcgtggagtgctggcgcactataaactgcgccgtatcgatggcgttaacattctgcatggtgatgtgaagataaccgccctggttaacgaggtgactgataagccggccatcgggcatatcatcaccgcaccggatccgattacgggtaagcttcagtgctaccacatcttaaccgcttctgctgactctgctggcgctgcgtactccattcaactgcggagggcgtga

SEQ ID NO: 92060 - DNA, 552 bp, Enterobacter aerogenes
atggataagggctggaacatttacccggcggcattcgccgggctggtggccgaagatgtcaaactacgccagcggacaatcgccattcaactgctgaatgagattgttcaacggtcgccggtaggaaacccggagctgtgggccatcaacgcgaccgcggttgaatacaacaaagcggtaggtgaatggaacgaatctctgtatgccgatcctgccaacctgacaaagactggccgtctcagaaagaaagtccgtgttaacgatggcatggatatccggcgtccggctgagtatcgagcaggaacctttcgggcgtcgcattttgtcagcatcggcgaaccggatcattcaataccatccgagcctgacccgcggggaacgatgacattcctcaacgggaaaaatatcatcaatcaggcgccgtcctactcggtgatttacattcagtcaaacctcccttactccgtaccgctggagaatggccactctactcaagcgccgacaggcgtctatgccgtctcatttaatggtgtgattcaggcctacaaatga

SEQ ID NO: 92061 - DNA, 393 bp, Enterobacter aerogenes
atgaccctcacagaaataagaaacgttgtcatcaggcgaatgacgacgcagaccgctattgcccaggatgcggtggactacccaaacggtcctgtattcgatcccagcggtcgaaaaatctgggcgcgtcttactgacatacccggacaagcaggtgctaacgaaattggagcggggccgattgtccaccgaacaggggttctcatcatccagcttttcgtccctgttggttcaggcactctgcagctgactcaggccgccgacaaattaacgcaactcttcgagtttcaggacgacggagcgctgagttatttcgccgtatccgccatcccggcaggtgaaaccgatggctggtctcagctcaatcttcaaatcccttatcgcgctctgtag

SEQ ID NO: 92062 - DNA, 1173 bp, Enterobacter aerogenes
gtgagttcaggcgcaaaagtagtaaccgcgtttattcgcgaaaccacaccgggagagaccccctctgctggtgtctggaacctgttacgccgttcgtcgttcgggttgatgccaacgcagaacaccaacgataacgatgaaatcggcggtgaccgtatggcgcagggcgtttcccgtggcacgattgatgtcggcggtgatgtcggcaccaaatttcgctggaatcagcatgatgattttctggcgagctgtttcggagcggattggctcgataatgtgctgacgatgggcaacaaccgcattactttttcagtttcttcatacgctgatgacgtagggatcgcacagattgcccgcggttgccaggttgccactttccagattgaaatcccgaatgatggcgacatcactgcaaccattacctttaccgggcttgactgggaaaccaaagccgacgataccagctattttactaacccggtggatggtgctggcgcgctgcgctattcgtttaaggaagtgacagggctgagtctgaacggggtagcgggtggtgctggcttctgtgtggatacgtttaatatccagtttgataacaacatgcagactcagcgttgtatcggtaccggctcagcatttgctggcgcaaacattccgacaacctttacaccgtcaggccagatcacgctgtcatggtccaaggcggcctgggagatttataaaaaaaccttcaccggcgaaacggtgccgtttaccttcacgctggagaacgccgaaggcgcttataccttcagcttccctgaagtgcagatatctggcgactggccggacgccgggaatactgacatcgtacaggttcagcttgatatcacggccgccaatacgtcgccaacgattacccgcgcgccaaaagtaccggcgacggcaatcagtgttgcgccagccacttcaaatggcgctgtcggctctacggtgacattaaccgccacgcttacgcctgctgattcaacagatatcgtccagtggacgtcatctgatcctgcgattgccagcgtagtttctaccgggcaaaaaacggcgaaagtgacccgcaatgctgccggaaacgccacgatcaccgggaaggctcgcacctttacggcaacgtctgaaatcactgtcaccgcaccttaa

SEQ ID NO: 92063 - DNA, 483 bp, Enterobacter aerogenes
atgctgattatttcttctcaacttgatctgagtggcgagcgttggtttttcccttttaaaaagcctgatggccgtaaaaagaaatacacaccggaagaagaagtactgtttaaactccgcctgctggtggccagcagcgagaatccacagtaccgctcacgtaatgcgctggtgcggcgccatatcgacaaaatggacgcgagctatcaggtcggtaccgatgctttcgatctcgccagcgtcggtgacattgactcaattgatgacctgctcatcgataactgcgcgcgcttccttttgaaagactgggtgggagtaggtgagctggtggatggtattgagaaggctgtagcgtatacgcccgaacttggcgtcgcgttactgaagcagaaccccgcgttgtattggctgattctggcagaggctgcgaacatagctcagggtaaggagcagcagactcaggaaaccgtaaaaaagccctag

SEQ ID NO: 92064 - DNA, 168 bp, Enterobacter aerogenes
atggccggagtaccgctccctttatccctgaatgatattgagctatatctggcatcgcgcaccattctgattgatcgcacagagtttgacgccgctatcctggcgctcgacgatgcgtggcgtgacgagtgggcagcagagcagaaaagacaggaaaaagtgaagtag

SEQ ID NO: 92065 - DNA, 684 bp, Enterobacter aerogenes
atgagaaagatactggcagtagcattgggggcagtgattttaacaggatgcacaacgccggcgcgtaattatgtgcctcaaacaaggcaaattagtatcccgccgcttaatactataacaacgacctatgtcggtgaggacatggttagacagggaattgacgcaagcattgatgcaattcatttcaatcaagctgtggttatcggttcaatcggtgtctatacgatcccggcaggggattacgttaagattggagaggattcaaaatcagaatttttctccaatgtagaaagaacttcaggtgcagtagttcccaaccgtttcatggttaccgatccaacgcaaagcatacaactcatgaagaacggcgaaatttgtattgttacgatctatggtggaactaagtgtgatacaggcaagccatttacgaaagtaaaattccagaccgagcaacaatcctctttccagcaaaccctgatctacaatggaaaggtaggtaacaaaatcaatattggctatagagagttccaagggggcatggctcgagccgccttctctaatgaggtcgagtacgatctttctgagtccaaaacgatacgttataaaggagctgtactggatattatggaagcaaataatcagtcgattacctttaagctcacgagaaactttaatacaaattag

SEQ ID NO: 92066 - DNA, 2949 bp, Enterobacter aerogenes
atgattgaacaaacatctcgcctggccattatcattgatagctccggggcagaaaaacaagctgataatctcgcaactgcactggtaaaaatgactcaggctggagaccgtgctgcttcgagcgctggcaaggtgacaaaggctacggacgaagaaaagcaggctctatctgaacttctcgatcgtattgacccggtgaatgctgccctgaataagttggacaaacaacaacaggatttggcgaagttcaaatcgaaagggatggtagatacagatacatttgagctttattcaaagcgaattgaagagactcgtaacaaattaaccggctttcgtgacgacttgaaaaaaactgggcagtctgctgcccagacagcttttgcaatgcgcatgattcccgctcagatgacggatatcgtagtcggactttctacaggccaatccccttttatggtgcttatgcagcagggtgggcagttaaaagatatgtttggcggtattgggccagctattaagggagttggtacctatgttatggggttggttaacccttttacgattactgccgcagctgttggtgttcttggtcttgcttactataaaggcgctcaagagcaggacgaattttataaatccctcgtattaactggtaatcaggtagggaaaacatccggtcaacttgctgatatggctgctcgtgcaggagctgttgctgattcaaccaccgggaaagccgcttcaacgttaaatcagttagtttcatctggaaaagtcgcaggcgattcactggagcgtgtaacaactgcagtcataagaatcagtgacgcgacgggaatagccactgaaaaacttgtgagtgacttcaacgatattgcagctgatccggtggcggccattactaaactaaacgatcaataccattttttaactctggcaacctacaaccagattaaggccttgcaggatgaagggaatcagcaagaggcggcacgcgtagcgaccgatgcgtacgccaataccatgcagcagcgtgcaaatgatattcatcagaatctaggccttcttgaaagcgcctgggactcgttggggaaagcagctaaaggtgcatgggatgcgatgctcaacattgggcgcgagcagaccctacaagacaagttaagtaccttaaatgaaaacattgccgaggcgcagaaaggtcaggcggaaggaggtttttggaacgggttaaatgctcggtttagtaaccttccggagatgctcaaacaacgggatgctattcagtcgcaaattacagcggaagatacgctaaatgatattttgtcagatcatgacaaagcagaacaaaagcgcattaaaactcagcaggaagcggatcgaattaaccttcaatacttgagcaatgctgataagcgaaataaagcgattaagcagcagagtgagttcttgaaggctggcgctatcacggcagaccagtacgctaaaaatgtttctcgtattaacgagatgtataaagatccaaaagcaccaaagatcgcgaagacgcctcaaggaaaagcctacgcagaggacgcagcaactcggcttcttgaccagattcaccagcagactgccgcgatgcagtcccagttggattccagcgataaacttaatagcgctacgcaggcacgggttaagttcgaacagcagatcgctgacctcaaatctaaaacgcaactaaccgccgaccagaagtcgattctttcccgttctgacgaaatattgcaggcctataagcagcaggaggctttgcagagttcagttaaaacgctggatgactaccggaaaatgcaggagcaaattgcaccaaaggaattgcgccaaaatgagacgttgcaaaaacgcctcgaaattcttcagaagatggttgagctgaagaaactgacgccggaggctgcagggaagcaggcgagcgacctgattggtaaatcagtgctgcctgattccgttatatcaggtgtgaacaaggccggtggtacgctgacgtctggagcaaccaatagtgacctgtcagggcagggattgaacatgatagggctgcaaatagatccgcagcttgaggttatcgaaaagctggagcaagcccagactgattatgcttcctggctgaaccagcagcagcaggcgatcacacaaagtactttactgaatgagcagcagaagcagcagcaattgctggctctccaacagcaaggacaacagaaccagcaagcactaagcaccgcagtatatgccgcacagacgcaatcagcgcaaaattctttctccagtatcaccgattcgatgggggcgatgttcggcgagcaatccgtgatgtataaagcggcatttgttacgcagaaagcttttgcacttgctcaggcagctgttcaattgccaatggcaatggcgcaggcgctttcaagccagccattcccatacaacttagcagcaatggctactgttgcaggcctcatggctacaataacgtccagcatctccagtgctgccgccgtcggctttgcttctggtggatatactggctcaggcggaaagtatcagccagcgggtattgttcataaaggggagtacgttttcgaccagaagtctacaaatcgaatcggcgtgtcacaacttgaggcgttacggaacggcaagccacttgatgccacattggggcgttcggggtttgggactggcgttcagaacgttagcaacagccagcaaacgaccatcatccgccccacagtcacggttcctccaataacaatcaatggaaatccttctgacgcgaccgtgctgcttgtacagcaggctactcgtgaaggagcaaaacaaggttaccagcaggttgctaacgatctggcaaaaggggttggccaagtgcacaaggcattaactgggaggtataacactggacggagaacagggtaa

SEQ ID NO: 92067 - DNA, 474 bp, Enterobacter aerogenes
atggctgaaatattttatccgcatgactatctccctatgcctttacaagaaggctatggattccagccagtcagccctttgaaacgaactcaactcaccacaggccgggcgagacaacgcagggcgtatacctcgactcccacggaagcgactgtatcgtggtttatggagagcgatgttcaggggctaacgtttgaatcgtggtaccgcgatgcgctctctgatggtgcggcttggttcatgatgaagttgcaaacccccgcaggcataaaattctacaaatgtcgttttacggatatctatcaggggccagtgctggtagctcccatctactggcggtattcggcgacgctggagttatgggagcgtccactattgcctccgccgtggggtaactaccccgagtggatcgcaggtagttcactgcttgatatcgcattaaacagggagtggccaaagcatgacggtgcttaa

SEQ ID NO: 92068 - DNA, 483 bp, Enterobacter aerogenes
atgacggtgcttaaccggctttatgccagtagcggatcggaagtcatcattgaaacgctgcaaatcaatatcggtttgacggtgcattatttctgcaagggctacgacgatattacagcgacgaccgaaaatggcgctgttataaccttttcagccgcagctatcgatatcgccatcccggccagaaacagcgacggtacacaggatttgaagttcgctgtcagcaacataaaaggggaggcgagtacagcgattcgtgatgccctggcagcgaggcaagatggctctatgacttacaggcaatatgtttcaacggaccttaacgctccggctaccgtgccgtatacgcttgctatcaaatcgggatcctggacagcgctgcaggcacaaatcacagccggctatatgaacgttctcgataccgcctggccgagattccgttacacccttaatgagtatcccggcctccgttacatgagttga

SEQ ID NO: 92069 - DNA, 381 bp, Enterobacter aerogenes
atgtttgaacctgataaatacctttcggtcacctggctgaagggcggcagagtgtatccgcaactcgactgctttggcatcgtaaatgagatacgacgcgaccttagattacccgaatggccagactttgcaggtgtgaccaaagatggcggcggccttgataaagaagccagaaagctgatgttgaagcttgagcgttgtgaaccatgcgtcggcgctggcgtggcgtgttattcgggaacaatggtcacccatgtggggattgttgttgagctgaacgggttgctgcaggtagcggaatgtaaccccggctcgaacgtttcttttatgccggtctggaaatttaaacggcgatttatcaaggtggaattctggcgatga

SEQ ID NO: 92070 - DNA, 3036 bp, Enterobacter aerogenes
atgacgatcagtatttatccctcccggttacctggcggaccactggaaacccatcatcatgcgcgcataaccctgcatgagtggatgcagaggaacgtcgaaaattatgatcccggaatgccacagccaatcagcgtagagattgataacgtgcccgtcccatcagaggaatggccgcggtgcgaactggcaccagatactgacgtgaagatttaccccgttccctacgcgacaggctttgctattgccgctctggttgtagcggtagccgctgcagcttattccatctatatgatgaataacctcgatactggggcctacgattcatctacgggtaagtctcttgacttaaacccggcaaaagcgaacacggcaaaacttggcgatcctatccgggaattattcgggcgtgcgcgggtttatccggattatgttgttcagccggtcagtcgttttaaccctgatgacccaaccagaatgacaattgagatgttgatctgcgtgagtcgtggaaatgtggcatttgctaacggcgatatcaggattggttcgacgcctatttccgccctgggtgattcattctactggacactttatccaccaggagcaaatgtttcaggcgatcgccgcagtgaaaactggttcaattctaccgaggtgggcggaacgtccagcggcagcggccttgatatggcgcagactgcaccggattcatccgatattaccgccgacagcatgaccgtttcgggatcgtcggtttcgttcaccgggctgagtgatgatgatggcgatgattctctgcctgagtcctgggtggaaggtgcgctggtgactatcatcgcgccgaccaactacctgatttcgtcttcatcaggttacagcgtcctgttcagtgacacgctgactgagattaacccctatgccggcatgcccgttacgctggaaattaacggggcagaatatgatctcttcatcgctacgttcacgccaaagcaggatgctgttccgggcgtggggggatcggcagcttcattgcgcggcagtgcagccccaacaacctatgatttttcgaccagcagccagacgtttaccctgacatggcaggcgactacttataccgtttcgctgatcgctaactacggcaatatgtctggcctgctggcggcaatcaatgaagcgatagccgggtctaacctggtcgcgcaggatgatggcggggtagttcgcatcattgagaagtccagcccgtggctgggcggcagtattaccgcatcatcacttcctgtttccgtatttgggggcagcccggtattcaccgatggaaccgcatccagcggcggcagtccggcaataatcgccaatgtcactcttgcttatgggagtggaagcggcgcggcattttccggcattcctgaaggggtgcagcgactgtcacttgcgcatcggggtaatgaataccgcattgcatccgcagacggcacgacagcgacagtacagcgaatggttaacggaaccgttgataatacctggccaggctactcacccaggacgatgattgattaccaggcgaccgggattaacgacaacaatagctggatgggcccgtttctcgcctgcccggataatgaggtggtaaatgcatttgaagtgaatttttcattcccttccggaatttgcggtttcggaaaatccggtggcaagaattaccgtaacgttgattatgaaattcagtaccgggtatatggttctggttctggctgggtgagcaaaaccggacgttacaggatgaagaacattaatgccctggggttcactgagcgatttgaactggctacccctggtctggttgaggtgcggtgccggcggcgtaatgagcaggggagtaaaaactccagggactctatgtactggcaggcgctgcgcggcaggttactgacacgccctgcatcatatgccggtgtatcgttaatggccgtgacggtggaatctggcggcaaactggcggcgcagtctgatcggcgcgttaacgttgtggccacgcgtatttatgataccggcgctccgcggcgaatctccagcgcgctgtatcatgtcggtaattctcttggcctggcgatggacaccgaagccattaacaccctcgaggcaacctactggaccccgcggggagagtattttgatttcgctactggcgacagtgtctccgcgctggaaatgctgcagaagatcaccacggcggggaaatcgtacttcctgctgagtgacgggctcgcatctgtaggcagggaagggattaaaaactggtccggcattatcagcccgcatgaaatgaccgaagagttacagaccaccttctcggcgccgtccgccgatgattacgatggtgtggatgtcacttatatcaatggcacgacgtggtcagaagaaacggtgcaatgccggactccggataaccccacaccgaggaaaattgagagttataccctcgatggggttcttgacccgaaccgcgcctatcaaatcggcatgcgccgcctgatgaaatacctctatcagcggctgggccataacacgacaacagaactggatgcgctggtctatcagtatggcgatcgcattctgctgacggatgacattccgggaaataaaacggtaagtagcctggttatggatatggccacatctggcggtcaaacggtatttaccgtctccgagccgctggactggtcctttgaaaacccgcgcgcaattctgcgttaccaggatggttctgcctccgggctgctggtggccacctttgtcggggattatcagttgtccgttccgtggcaggctgcttttgatgaaattctgctggacgatccgagcatcgaaccgccgcggctggtgttctgcagctcaacacgaagtgtttatgacgccatttttgaggagatagccccgcaggcagacggaacctgccaggtgacgaccagacaatatagcgacattttctaccagtacgacgacgcgccatacccaggcagcgtttcttaa

SEQ ID NO: 92071 - DNA, 1929 bp, Enterobacter aerogenes
atggcctatgttccacccgtcgggcagacagcagaccctgatattttcctcgacaacgtcaagcgggccgatcggttggttaatggtccggaaggaacggttcccgaccgtggcgggctgcctctcgattcctggcgccagatgatggcgaagaatgatgaaattcgtcagaaccttattcccctcagtcgccagtatatgaccgaggaagacgccatggcggatattgccaatattccagaagggagcacaacctatgtacgtagcattagtggtagcgccctggctaatgagtacattaacaacgcagggaccattgaaccaactggcagagcgatgccatcacaacaagccgttcaaataaacgatgatttcagggtggatgttactctgggcagcgaatcgcagtgggttgataacagtagcagttctgccaaaactacgataatggccgatgcttcaggaagagaggttatttacgctaaccatagcgcaaagaaaatagtcgcctatggaaaaccactggcggataacaaaacggtttcggaattaggttctgaaacatgggtaatggatgatagcaatccgacaatcatcattgagctggtggataagtcgggccgtattgttaaatatttggaccttgcttccgggctttattatgtttttggtaaagctgttgggactgaacagtcatcaattgtgtacccgacgtttattcctgaattcatggatgccaggagctatggccaaagtctgagtatctactcgcagggaacgccgggactttccacccctacagtgaatacattgcgctttgataccggagtattgacctacaataaaaatccagcgtcactggttaaccttgaagatccgacgtccagccagtatatgcaaagtcaggtccatgactttcaaacaaaagttagcgatgcctcaagtagtgagttttttcttgccgcatcaggtcttggcgggactccattctcagggcttgagcctggtaccgctatttacactcaattcattagcacaatccagaaagcaaaagacctggctgatgcgcggggagtccagtacggcatgctctggtttaattttcagcatggggaaacggatgcatcgcaagggactgggtattcatattaccgtcaaaagtcgagggaaatgcaaagtacgactaatgcccatgtaaaagaaatttctggcttgaatcatgacgtagtcatgttcacgtatcagatggcgacacatggtcgttatgatggggctacataccccagctatgaaataccactggctcaactggatgaagcagtcagtaatccgctaattcagctcgcgacgccgatgtatattttcgactatgccgatgggctacacctcacgaatgatggctatcgtcaccgtgatttgttcttctcgaaagcccagcggttttactacgaaaataaaaaaccatggaaaccaatgcaccccctaaacgtctcacgtatcggtaacagcgctgtcatcatggatgcgttcgttcctaaagggaaactccagttcagcacatccagggtgacaccggcgacggatgcaatgcaggggtttgagctgtggtcagaaagtcagtctggcgttctgacgcgtcttgccatcacagaggtatcggcgcttagcgatacccgggtgaaggtgcgttccgctgtcaatttcggcgctaacgagaaaatctacctggcttacgctttcactccggagaaccgtggcgcagatagcggtggtggtatttatccaaactggcccgccggatatatagccggttgtcgtggaaatgtttgtgactctgacgattacgaatctgatctccgcgataaaaacggcaatccctacgaactccgcaactatctaaccatcttccggaaagaggcaatttcatga

SEQ ID NO: 92072 - DNA, 753 bp, Enterobacter aerogenes
atgagctatttattcacccgtctgtctttcgatgtgccatttgataatccaacttatgttgatgaaagctctgtccgccgcctcataaatccggaatttaatccggagtctggttttgtaaactggatgtttggtggaagtgctgacagcctcacttcactgtcaggtggtcatgttatgacgccgtcggctggtgctttgccaacctataaaaactcatcgcttgttctgcctgctgtagcgacgggctttaacggcctcagcaccgagtataatgactcaaacagcatgacactgaccgctgtcattcagtataccggcgccgcaacgcagatccttctcggggtaaataccggaacacaaggggagtgtatctatatgagcggcaccagtgtgatgacccatcttgtgcgcaatgcgcagggggcatcagtgactactgaaattcctgtaccggctggacttacagctgggcagtatattttcctcgcgttcagccgaaacggaaacaacctgatttcaatggtaggcggcgcatccacgcaagtgaatctgacggattccgttaaaaccccggcaacagcggcgaaggttgggcccggcaacacggcatataacaccaatggtttttcaaaacagctggaggtagtcgagtgcctgtatcgggatggcccgacaacgcttgcagatcttcagacagcctatgctaatgccaagactcgaagtgcgttgcgtggaatttctgttctctaa

SEQ ID NO: 92073 - DNA, 783 bp, Enterobacter aerogenes
atgtctgataaacgcccagccataccggaaccaatgaagagagaagtgagacaacaatgtttttttggatgtgctatttgtggaatgcctttttttcaatatgatcatgtggtggagtattcggaaattaaagagcacactgcagataatttagttcttttatgtcccaatcatcatgcgatgaagacagcagggaagttagataaagagattgtatccgcagctaaaaaaaatccattcaactcaacaagggaaacaacatcctctttaaaaatagaaggagcaaaagaagtagatgttattattggaagttcgaaatataaaggcgtattctctggtgaaggaagtgaaaattttcgggctatagtaattgataaccatgatttcttaacaattcataatgaaaatgggatcctaagcatttctgtaaacctaacggatgaacatgccaaatccattctcaaagttgacaggggggagttaaaggtatggactgatacttgggatttcgactacccaggaacagatgttattgtaagaaaaaacttaggtgatattttactaaatatgaaactgagtagttctgaaatacatattaccaaaggatctttttacattggaaaaggtgcaggtatttctattgaaaataaatgcatatcggtaataaataacggaattgaaatcagtcggattatggatgcttcatttagtggcggggatgatagcattggtttttattatgaaataaataataggtctcttccagactgggtatatgaatga

SEQ ID NO: 92074 - DNA, 291 bp, Enterobacter aerogenes
atgtatctacagcagcccatctacgaagctacgggtataagccagtttgcaacgttcgttgatacacaacgaggcatcgccgtagttgagcgctcatcatcgccgttagcatcagcggttttacttatctcatattgcggggtacagcagtttgcgcgcttccttggaggatcgctcattacggaggacggcgacgctattgaaggggatatgttagcggatgttgagctgataggagtggtaactcacatcatcagcaaagctggttttgatgactgcccggtgatgtga

SEQ ID NO: 92075 - DNA, 1266 bp, Enterobacter aerogenes
atgtttgcgttggttgatgtgaacagcttctatgcaagctgcgaaaccatttttcgtcctaacctacgaggcaagccggttgtcgtattgtccaataacgatgggtgcgtgatagcgcgttccgctgaagccaagaaacttggcatcaagatgggggatccgtactttaaatgcaaagatcagttccgccggcatcaagtggtttgcttcagttcgaactatgaactctacgcggatatgagcaaccgggtcatgacgacacttgaggaaatgtgtcccagagttgaaatctacagcatcgacgaggccttttgcgatctcactggtgtgcgtaattgccgtgtgctggaagagttcgggcatgagctgaaagatacggtctaccgcaataccaggcttccggtcggggtggggattgcacaaacaaagacgctggcaaaactcgccaatcatgcggcaaaaacgtggaaagccactggcggggttgtcgacctgtcaaacgttgaacggcagcgcaaactgatgtctttgcttccggtggatgaggtgtggggtgttggccgccgtatcagcaaaaagcttgaggctatggggataaaaactgtcctgcagttggctgatacggatatccgctttatccgtaaacactttaacgtggtgcttgagagaaccgtgagagagctgcgcggcgagccatgccttgagctggaagagtttgcgccagtgaaacaggaaatagtctgcagccggtcgtttggggagcgcattaccacctatgaacaaatgcgccaggctatctgttcatatgcggccagaggcgcagagaaacttcgtggggagcatcaatactgccgacacatatcggcgttcgtgaagacgtcgccgtttgcgctgaacgaaaaatactacggtaacagcggatccattaagttactgacgcccacgcaggatagccgggatatcatcaatgccgcggtaaagtgtctggatgcgatatgggtcgatgggcaccggtatcagaaggcggggatcatgctcggtgatttctatagccagggtgtcgcgcagctgaacctgttcgatgacaatgcgacaaggcagaacagcaagaaactgatggaagttctcgatcacctcaacgcaaaggatgggaggggaactctctattttgctggacaggggatccaggccacctggcagatgaaaagggaaatgctatccccgcgctatactacgaggttttgtgacctgctcaaagttagatga

SEQ ID NO: 92076 - DNA, 426 bp, Enterobacter aerogenes
atgagcaacattaccatctatcacaatccagcctgtggcacctcacgtaacacgctggagatgatccgtaacagcggtaacgaaccaaccattatttattatctcgatactcccccgactcgtgatgaacttagcaaactgatttcagatatgggtatttcagtacgtgcattgctgcgtaagaacgtcgaaccttatgagcagttgggtcttgatgaagacaaattttctgatgagcagttgattgattttatgcttcagcatccgatcctgattaatcggccgattgtcgttacgccgcttggcactcgtctttgccgcccttcagaaatagtgttggatattctaccggaaggccagaaaggagcgtttatcaaagaggatggcgagacggtcattgacgaaacggggaagcgggttaattaa

SEQ ID NO: 92077 - DNA, 1290 bp, Enterobacter aerogenes
atgcttttggcagggagtatatttttactgacgctgatactggtgatctggcaacccagaggcttgagcattggctggagtgcgagtatcggggctgtgctggcgctagtaaccggtgtcatccatatcgctgatattcccgttgtctggaatatcgtctggaacgcgacagcggcatttattgctgtcattatcatcagcctgctgctcgatgaggccggcttctttgagtggaccgcactgcacgtctcccgctgggggaacggacgtggtcgcctgctgtttacctggatagtgttgctcggtgccgctgtcgctgctttgttcgccaatgatggtgctgcgctgatcctgacgccgattgtgattgcgatgctgctcgcactggggttcagccagggcacgacactggcctttgtcatggctgcaggatttattgcagatacggccagcctgccactcattgtttctaacctagttaatatcgtctcggcggacttcttcggtctgggttttacgcagtacgcttccgttatgatccccgtggatgcggcagcgattgcggccacgctgatcatgctgcatttcttcttccgcagggatattccggcaacgtatgacgtttcgctgctgaagaagcctgccagtgcaatcaaggatccggcaaccttcagggcgggctggattgttctgttattgctgcttgtcggtttctttgttctggagccgctggggatcccggtcagtgcgatagcaacggctggcgcagcagtgctgtttgtggtggcgaaacgaggccatgccatcaacaccgggaaagtcctgcgcggtgcgccatggcagatcgttattttctcgctgggcatgtacctcgtggtctatggcctgcgcaatgcaggactcacggagtacctgtctggtgtgctgaatctgctggcagacaaggggttatgggcagcgacgttcggcaccggcttcctgacggcatttctctcatcagtgatgaacaatatgccgacggtgctgattggcgcgctgtcgattgacggtagtacggcgactagcgtcgtcaaagaggcaatgatttatgccaatgtgattggctgtgatttaggcccgaaaatcaccccgataggcagtctggcaaccctgctgtggctgcatgtgcttgcccagaaaaatatgacgatcacctggggatattacttccgcaccggcattatcatgactctgcccgtgctgtttatcactctggccgcgctggcgttgcggctctccatcactttgtaa

SEQ ID NO: 92078 - DNA, 321 bp, Enterobacter aerogenes
atgctacaacctgttcagcttttcaaaatcctgtcggatgaaacccggctcgccatcatcatgattctccgggagtcaggagaactatgcgtctgtgatatctgtgcaaccatttccgaatcgcagcccaaagtctcgcgacatatggctatccttcgcgaggctgggctggttctggatcgtcgtgaaggcaaatggatccactatcgtctgtccccccacataccggcatgggctgctgagacaatcacgacgtcctggcagtgtatgcgggaggatgtgcgtgaatggctggataaatcagcctgcacctcatgctga

SEQ ID NO: 92079 - DNA, 699 bp, Enterobacter aerogenes
atggaacaatttccagccctgaatagtgaatgctttgatcaacacatcgccgagcgcctgcacctgcacgagccgccgcggattctgatcctatatggctcagttagagagcgctcctacagccgctttgccgcggaagaagctggtcgcctgctgacggcgatgggcgcggaggtaaaaatctttaacccctcaggtttacccctgccggatgatgcaccggacacgcatcctaaagtcaccgagctgcgcggtctggtcagatggtgtgacgggatggtgtggagttctccggaacggcacggggctatgagcgcagttatgaaggcgcagattgactggataccattaagtgaaggcgcagttcgtccttcgcagggaaaaacacttgcggtaatgcaggtctgcggtggttcccagtccttcaatgcagtgaaccagatgcgtattctgggtcggtggatgcggatgtttacgatccccaaccagtcctccgtagccaaggcatggcaagagttcgacgaaaacggccgaatgaaaccttcgtcatggtatgaccgcatcgtcgatgtagccgaggagctgtttaaaatcacactgctgcttaagggacaaaccggttatcttgcggatcgttacagcgagcgaaaagagagccatcatgagctttcatcccgtgtcaatcaggacaaaatataa

SEQ ID NO: 92080 - DNA, 1173 bp, Enterobacter aerogenes
atgctcacaactatcatttaccgtagtcatgctcatagtagcatttcaagaacctcaatcatggaaatgattgagctcgcaaatgcatgtaatataaaaagtgatgtcactggaatattactttttaatgggattcactttctgcaactgctggaaggtcctgaggctcaggttaacgaaatttacagcagaatctgtagagacactcgtcactttaatattgttgaactattaaatgacgttgcacctttccgacgatttggtaatgccgggatggaactaattgatgtagatttacacagtcatgaagattgcctaagaacaattctgaaccgtggaacagcaaaacatcaacttctttataatgacagagcattgcgtttttttagaacattcatagagtccatacaacaagaaaaatactatgaattaccgcccgctactgaatggcagttttccagagagcctttaatacctgaaaacccttatttttctagccccttcattatacatccagtggtagaccctctcgcgagaaaggtccattcgttccagttcagaaatcccgtggcgactggtttgtatggaatgggcttgttacagcatgatctggaatcaaaacgtattgctcttcttgaagctggtagtttccttcactctggacaaagggtttcaattagtctattaccattgactataattaaaattagtgatgccccttgcacgctgcttaagtatattcagcaaagcggccttatccctgaacaaattatcatcgaatttttagaaaaagatctgttcgccaatattggtgattttttacatgcactacgaatacttaaaagtgcaggtataagcgttgctattaatgactttgggtctggacatgcaggattactccttctaacaaaattccagcctgaaaaaatcaaaattcatagtgagctcataagaaatatccacatggatggtgcgaaacaagccgtagttcaaagcataatcaattgctgtgatactctcgagataagaatatgcgctacaggaatcgaaaaaactgaagaatggatgtggctggagtcagctggtatcgcttacttccagggtccccttttttctggctactcagatgacggcttaccatttgtaagctggccggatcctgtggagatttag

SEQ ID NO: 92081 - DNA, 678 bp, Enterobacter aerogenes
atgtgcggacgctttgctcaatcacaaacccgtgaagagtacctggcttatttggctgaagaggctgagcgggatatcgcttatgaacccgaaccaatcggccggtacaacgtggcgccagggacaaaggttttgctcctgagcgaacgcgacgagcagttgcatctcgatccagtacactggggttacgccccgggatggtgggataaaccaccgctgattaatgctcgagtagaaaccgcggccaccagtaggatgtttaagccgctatggcaacatggccgggcgatctgctttgctgatggttggttcgaatggaagaaggaaggcgacaagaagcagccatacttcatccatcgtgtcgatggccaaccgatattcatggcagcaatcggaagcacaccatttgaacgcggagatgaagcagaaggctttctgatcgtcacggcagcagctgataaaggtctggtagatattcacgaccgccggccacttgtgttgtcaccagaagcagccagggaatggatgagacaggacgtgtctggcaaggaggctgaagaaattgctgctgacggttccgtgtcagctgaccattttacatggtaccctgtttcccagggtgtgggtaactttaagaatcagggaccggaattgattcaggctattaaaattctatag

SEQ ID NO: 92082 - DNA, 966 bp, Enterobacter aerogenes
atgattatttttaccctgcgccgcctgctgttgttacttgtgacgctgtttttcctcacctttatcggctttagcctcagctactttacgccgcacgcgccgctgcagggcgcatcgctatggaatgcctggctgttctggttcaaaggggttctgcactgggactttggcgtctccagcatcaacggccagctgatttccgaacagctgaaggtggtcttccctgccacgatggaactgtgcattctggcgtttggttttgcgctgctggtcggcattcccgtggggatgattgccggaattatgcgtaataaatggccggacacgctcattagcgccctggcgctggtggggttctccattccggtgttctggctggcgttgctatttaccctgttcttctcgttaacgctgggttggttgcccgtctccggccgctttgatctgttgtacgaagtgaaaacggtgaccggcttcgcgctcatcgacgcctggctctctgattcgccgtggcgccatgagatgatcgtcagcgccgcgcggcatatggtgctgccggtgttgaccctggccgtcgcgccgaccaccgaagtgattcgcctgatgcgtatcagcaccagtgaagtctacgatactaactatgttaaagcggcggcgacccgcggcgttacccgcaggacgattctgcatcgtcacgtgttgcacaatgccctgccgccggtgatcccgcgcctgggactgcagttctccaccatgctaacgctggcaatgattaccgaaatggtcttcagctggccgggactggggcgctggctgatcaacgccatccgccaacaggattacgcagcgatttccgccggagtgatggtgatcggcgcgctggtcattatcgtcaacgtgatctcggatattttaggagccatggctaacccactgaaacataaggaatggtatgccctacgatag

SEQ ID NO: 92083 - DNA, 714 bp, Enterobacter aerogenes
atgcccgtttcacgccctcgccccctgcgcggcgctttcccgccaggcacgcaacgttacggccagtcgcatctcggcgcgccgctgctgtggttccccgctccgctggcagatagccgcagcggtctgattatcgccggcacgcacggcgacgaaaactcgtcgatcgtcaccctctcctgcgcgttgcgcacgctaaaaccggagttgcgtcgccatcacgtggtattaacggtcaaccctgacggctgtcagctagggttacgcgccaacgcccgcggtatcgatctcaatcgtaatttcccggccgctaactggaaggcgggagaaacggtgtatcgctggaatagtgcagccgaagagcgtgatgtggttctgctgaccggtgaaaaacccggttcggagcccgaaacccaggcgctgtgccagttgatccaccagatccatccggcgtgggtagtctccttccacgatccgctggcctgcattgaggaccccggccacagcgagctgggacaatggctcgccggggcttttaatttaccgctggtgggcagcgtcggttacgaaacgccgggctcttttggcagttggtgcgccgatatcggcctgccgtgcattaccgccgaatttccgccggtctccgccgacgaagcgacagaaaagtacctcgcggcgatgaccgatttactacactggcacactcacagatga

SEQ ID NO: 92084 - DNA, 1107 bp, Enterobacter aerogenes
atgaatataaaagaaatatggaaagcagcaaaccctaaaggtcatctgctgactgccatctcattcttgattccgattgtctgtggtgctgggtttattattgccatcggtatgggttttggcgggacggttcaggacactttagtatcgggtcaatttgatctgtggcaggctttcgctaccatgggagctaaggcgctcggactattgcccgtcgttattgctatcggaatttccggttcgatcgcaggtaagcccggtattgcccctggttttgttgtcggtctggcagctaatgctattggtgcgggttttatcgggggcatgatcggtggctacatttccgggtatattgctcttgctatcattaaaaatgtgaaggttcctggctgggcccggggtttaatgccgacattgattgtgccattttttgcatccattttcagtgctctgctcatggtctatatcatcggcacgcctattggtatttttaccgatgcactcacatcgttcctgagaagtatgggaacttcatctaatttagtattaggtgctgttattggggcgttgtgtatcgttgacattggtgggccgatcaataaaacgtgctttgcattcgtcttaactctccaggcacagggtataaatgagccagttacggcccttcagttagtcaacacggcaacacctatcggttttgggcttgcattttttatcgccaaactgcttcgcaaaaatatctataataacgaagaaatcgaaatgttaaagtcggcggttcctatgggggtagtgaatattgttgaagggtctatccctatagtgatgaatgatatcgttcgcggtattgcagcagcggcaatcggcggtgcttgtggtggtgcaatcaccatggtgtatggtgcggatgcaactgtaccttttggcggggtattgatgctcccaacaatgtcaaatcccatggcaggtattatggcattgatagttaatatattagtaacagcaaccatttatgctgtcatcaaaaaagatgttcctcgcgatgttgttatcaataacgatcaagaagaggaagatatcaacttcgatgatattaagattagttag

SEQ ID NO: 92085 - DNA, 165 bp, Enterobacter aerogenes
atgttaacgaaccaggcgaccgggccggatgttttccgggaggtggtgctgcgcaccttttccgggccacggggtctgtgccccggtaagcacagcgccagcgggggagatggcggtgtgtctggccataaaacaccaaaacaaaaggcccggtcttccgactga

SEQ ID NO: 92086 - DNA, 285 bp, Enterobacter aerogenes
atgggtgatgcattaggtctgattgaaaccaaaggtctggtggcctgcattgaagcggcggatgcgatgtgtaaagccgccaacgtcgagcttatcggctatgaaaacgtcggctccggtctggtcaccgcgatggtgaaaggcgacgtcggcgcggtgaaagcagcggtggattccggtgtggaatcggcgcagcgcatcggcgaagtggtgacctcgttggttatcgcccgtccgcataacgacatcaacaaaatcgtctcgcattacaaaattgcggactaa

SEQ ID NO: 92087 - DNA, 465 bp, Enterobacter aerogenes
atgaccgaagacgaactgtttgcccgccgcccgatggggatgcgcatggcgatggtggtgcgccagtggcgcgcgattatcgacagcgccattaccgataccggcctgacccagtcaagctggacggtgctgatgcagctgcatcagctggggtgcaacgtctcggtaagcgaactggcggaagtgcagggtattgaactgccgccgctgatgcgcaccctcacgcagctggaaaagcaggggtatctactgcgctcaacatcgccatacgacaagcgcatccgcctgcttacgctgacggcagaaggccgtaccatcctggaaaagctgaaccgcgtcattgagacttatcaacggcgcgtgacggaaaccatccccgatgcggatctcgacaccttcagcgccacgttaaatcaaatcgcctgcaacttgcggacaatccgcgaagaagataacaagatctaa

SEQ ID NO: 92088 - DNA, 198 bp, Enterobacter aerogenes
atgaccatcgccgaaagattacaggaagttggccgcagaaaaggcaaacgtgaagggcggcttgaaggatggcaagaagggcagcacgccgaggcgcagcgaattgcgaggatgatacttgccgacggtattgcacctgaaaccgtactgaagatcaccggtctggctgccgaagagatagccacgttaccacattga

SEQ ID NO: 92089 - DNA, 2151 bp, Enterobacter aerogenes
atggataccaaaaaactactcaagcacataccctgggtgattctcggaatcatcggggcattttgcctctcagtcgtcgcgttgcgccgcggtgagcacgtcagtgccctgtggatcgtcgtcgcgtcggtttccgtgtacctcgtcgcctaccgttattacagcctgtatatcgcgcagaaggtgatgaagcttgacccaacgcgcgcgacgccggcggtcattaataacgatggcctgaactacgtgccgaccaaccgctacgtgctgtttggccaccatttcgccgccattgccggcgccggcccgctggttggcccggtactggccgcgcagatgggttatctgccgggcaccctctggctgctggccggtgtggtgctggcgggcgcggtacaggacttcatggtgctgtttatctcctcgcggcgtaacggcgcttcgctgggcgagatgattaaacaggaaatggggccggtaccgggttctatcgccctgttcggctgcttcctgattatgatcatcatcctcgcggtactggcgctcatcgtggtgaaagcgctggcggaaagcccgtggggcgtctttaccgtctgttcgacggtgcctatcgcgttgtttatgggtatctacatgcgcttcctgcgtccaggacgcgtgggtgaagtctcggttatcggtatcgtgctgttggtggcatccatctggttcggcggcatcattgcccacgacccgtactggggcccggcgttgacctttaaagataccactatcacctttaccctgattggctacgcgttcatctccgcgctgctgccggtatggctgattctggcgccgcgcgattatctggccaccttcctgaaaatcggcgtgatcgtcggcctggcgctggggatcgttatcctcaacccggacctgaaaatgccggcagtgacccagtacattgatggtaccggcccgctgtggaaaggcgcgctcttcccgttcctgtttattaccatcgcctgcggcgcggtctccggtttccacgcgctgatcgcctccggcaccacgccgaagctgctggccaacgaaaccgacgcccgctttatcggctacggcgcgatgctgatggaatcctttgttgcagtcatggcgctggttgcggcctcgattatcgaaccgggcctctacttcgcgatgaacaccccgccggcaggccttggcatcgtgatgccaaacctgcatgaaatgggcggtgaaaacgcggcgatgatcgcagcgcagttgaaagaagtgaccgtccacgcggcggcgaccgtcagctcctggggcttcgtaatttcaccagagcagatcctgcagacggcgaaagatatcggcgaaccttcagtcctgaaccgcgccggcggcgcaccgacgctggccgttggtatcgcccatgtgttccataaaatcatcccgatggcggatatgggcttctggtaccacttcggtatcctgtttgaagcgctgtttatcctcaccgcgctggatgcgggtacccgcgcaggccgctttatgctgcaggatctgctgggtaacttcgtgccgttcctgaaaaaaaccgactcgctggtcgccggtattatcggtaccgccggctgcgtcgggctgtggggctacctgctgtatcagggcgtggtcgacccgctgggcggcgtgaagagcctgtggccgttgttcggtatctctaaccagatgctggccgcggtggcgctggtgcttggcaccgtcgtgctggtcaagatgcagcgcaccaaatatatctgggtcaccgttatcccggctgcgtggctgctgctgtgtaccacctgggcgctgggcctgaagctgttcagcagcaacccgcagatggaaggcttcttctttatggctcagcagtataaagagaagattgccgccggcggcgagctgaccgcacagcagatcgccaacatgaaccatatcgtggtcaacaactacaccaacgccggcctgagcattctgttcctggtggtggtgtatagcatcatcttctacggcatcaaaacctggctcaatgtccgcaacaataaggtgcgtaccgataaagagactccgtacgtgccggtaccggaaggcggcgtgaagacctcgtcacatcattaa

SEQ ID NO: 92090 - DNA, 1683 bp, Enterobacter aerogenes
atgaataaatggaacttaattcataaagtttttattatctctgcgctccctgtttgggtttatgccgcgcctgtggataccgtacgtgagcagcagttcatcaaccagcagcagcgccagcaggcgctggaaaaccagctcgcgccgccgtcaccggatattcatttatccgcggaagaaataaataccgatgatggtttatttcccgtggaacaaccttgctttgttatttctcaggttattttgcagggtgctgaagccttaccgcattggcttccgctccagcgccagacaaataaagcgattgggcgttgtctgggaggaaagggcattaatctactgatggcccagttgcagaatatattaatcgatcgcggttatatcaccagccggatccttgccccgcagcaggatttaaaaagcggtgttttgcgcctggtggtgatgccgggttatatccgtgaagccaggcttacggcgcagagtgatgattatctgtggctggcgagcgcatttccggcgactgacgggaaactactggatctgcgcgatattgaacaggggctggaaaacttgcagcgcctgccgacggtacaggccagcatggaaattgttccgggcgaaacgcctgggcaaagcgatattgttattaaccgccgacaggaacgcttctggcgcgttgacgcctcgcttgatgactccggctctaatgccaccggccgctatcagggtaacctgacgctatcactggataacccgctagccttaagcgatcttttttacctttccggttcacataacctcgatggcaacggcggtaaatcctcaaagaacctgaccggccactattcgatcccgctgggctactggcagctcggattaaccgccagccagtacgattacgtgcaaaccgtggcgggggccaacggcgattaccagtacagcggtaaaagcaagaacgttgatttccagcttagccgcgtgctgcaccgtagcggtagtcagaagaccacgcttagcgccgatgtgttggcccgcgagcagcgcaacttcattaacgacaccgagattgccgtccagcggcggcagacggcggcctggaagcttggtctgcagcatcgccattacctgggcaacgccactctcgatgccggagtgagctatcagcgcggtacccgctggtttggcgctcaacccgcgccggaagagcaatggggggaagcaaccgccctcagcaaaatcctgcaattcaatgctcagctcaatttgccttttgccctgggcgggcaaaattttcgctttaccagccgctatcagcggcagatgagcagcacgccgctgacttcgccggatatgttttccatcggcaaccgctggacggtacgcggctttgacggcgagcgcaccctgaccgccagtcacggctggtacgtacgtaacgatatcgcctggtcgactccgttgccggggcaggagttttatctgggggcggattacggcgaagtcggcggcgcaggcagtgaaacgctggtgggcaaacacctcgccgggggcgtggcagggctgcgcggccagtaccagcgcgccagctacgacctgttcgccggtatccctttagctaaacccgatggctttaaaaccgacccggcgacgtttggtttcagcgtcagctggagctactga

SEQ ID NO: 92091 - DNA, 252 bp, Enterobacter aerogenes
atgaccttcaaaaaatggctatcagtttttgtttaccttcttgcatcatgtgctttgggaatgaatatttttgttgtgatattgctctatggtgtaaggttttttttctgggctatgtttgatgtaccatttgaaattcatattgatgatttaatcaaatatagtaaggctgcaacatttgctggaataattgtcgcggtcggctgttggtggatttattaccaaggctacaagaaaaatcgtaataggtag

SEQ ID NO: 92092 - DNA, 192 bp, Enterobacter aerogenes
atgttaatgatcatcttttattctttgcgcgccggtttggcaaatagaagtgaatgttttgtgatcggattaacacaatatttacatattttttatttatttattatttatcatatagatacatttatttttaatgacggctggtacttttcaggtgcagaaaccggttgtacatggcaggattatggctaa

SEQ ID NO: 92093 - DNA, 234 bp, Enterobacter aerogenes
atgatctggcggggtatttttcagcaatttacctttcgcggcgataatggccaactcttcggcgaacgagtgcgatatccaatgaatatgttcttatttactatttattttttgtatgggttataccggctatttttatcgtctggcgtgtcgtttgctctcgcgcctgcgttttgccagaaaaatttttttggcctgccccttgatgaaaaccagggcgaccccatcttgtag

SEQ ID NO: 92094 - DNA, 945 bp, Enterobacter aerogenes
atgggatcgaaaggtgccaataagggctttgattataatttaatcaaggttcttgacgctgtcatttcggcaggaaatgccgcgaaggcggcgaaaaaattggccatcactcccgccgcggtctctttggcattaagacgtctgcaaaacttctatcagcaggagctgtttgtcagaagcaaagatggtttactgccaacggcgaaagcactcgaaatacaccaaagtttccgtcaggccatgtcgcttgtcgacaatacttttctgccggaaaacaaggatgatgacacccggattacgatccttggaagcgatttcatcgaaagttattacctttcccaactgtacggtagcgcgcttttcgagcagggcgttatcaaccatttttcatcccgcaacattagctgcgataaagctaaagagcttttattgaccgctcaatgtgatttatcgatcggttctgaaccgctggttgagcccggactcgataatcaaattattgatagcttcagaaactttgtctgtatttgtgccaaaggtcatttattcagcgagctgtcgcagctttctttgcatcaattctactcttcccgccatgccatgtatcaaccggggattacttcacccaccatcatcactgataacggattatttaaagatgatgtttattataacggttcacgtactatgggctattgtagcgattctatcaccgggctggttagcatggtagaaagaaccgcattgattgcactgttacctttgaaactggcgttgttttataaaaatcagcgtaaatatgatataaattttatccaaccgccccctgagttgatgtttaaatccgtgcaggtttatgcttcatggaacaaaaatagtagaaatatatcagcgataaatgaaacggtttccatgttacatacgctgtcctcattcagacggtaa

SEQ ID NO: 92095 - DNA, 933 bp, Enterobacter aerogenes
atgaatttgaaccttctacctgacctcgccctctttgtacaaattgtcgagcaaggcagcttttccgccgtcgcccgccagaacggccttaccccctccgccgtgagccgcagcgtctcgcggctggagcaggagatgagctgcaagctgctgcaccgaaccacccgcaaactacggctgagcgatgccgggaaagcggtgtatgaacctgcgcttgaaatgctggaagcagcgcgacaggccatggactccgccgggagtacccaaacggtggctcagggcaaactgaccctgagcgtgccgaaggccgtcggacgctttgtcatccatccgctaatgatgagctttttcaaccaatatccgcaggtagacgtctgcttacggttggaagaccgcgaccttgattttatcgatgacggcattgacctggcgctacgcatcacccatagcccctcccctggcctgcatggcaaaccactgatgccgatcgctcatctcatctgcgccactaaggagtatttacagcgccacggtacgccgcataccccgcaggatctgcgcgcgcatagctgcatcagccttggcgaaacgcccgccgacgcgcggtggaaatttcgtcgcgaaggcaaaagcgaaacggtgcatacgcatgggcgctacgccgctaaccacaccgccgtgcgtctcgatgctgttaagcaacatctgggtatcggcagtctgccgctgtttaccgctcgcgaagcgctggcaaagggtgaaattgtgcaagtgctgccggagtgggaatttatcagcagctattccggcaatctgtggttgttatgggcaggccataagcatatgcccgccagaatgcgggtgatgattgattatcttagcgagaaggtgccggcgttgaacgcaggcaacacattgtcagccgccaactaa

SEQ ID NO: 92096 - DNA, 2226 bp, Enterobacter aerogenes
atggcgcgtcttaaaactgctcagccaaatcactcgctgcgtaaaatcgcagtcgtagtagccacggcggttagcggcatgtctgtttatgcacaggctgcggaacaaccgaaagaagaaaccctcgtcgttaccgcggcgcccgccagccaggaaagcgcctgggggccggccccgactatcgcggcgaagcgttccgccacggcgaccaaaaccgatactcccattgaaaaaacgccgcaatctatctccgtggtgacaaatgaagagatgcaaatgcatcaattccaatccgttaaggaagcacttggatatacgcctggggtgacggttagcagccggggtgcatcgaacacttatgattttgttatcatccgggggttctcgtcagtaggcttgaaccagaataactatctagacgggttgaagttacaaggcgatttttacaacgatgctgtcgttgatccgtacatgctggagcgcgttgaggtaatgcgcgggccaacatcggtactttatgggaaaagtaatcccggtggcattgtcagtatggttagtaaacggcctacgactgagccactaaaagaagttcagtttaagatgggaacagataacctgttccagacaggttttgattttagtgacgcactggatgaggatggtgtgttttcgtaccgtttgacgggggttgctcgctctaataatgaacagcaacagaatgcggagcagcagcgctatgcgatagcgccttctttttcatggcgtcctgacgataagacgaactttactttcttatcctatttccaaaatgagccggaaacgggttattacggttggttgccgaaagaaggtactgttcagccactccctaatggcggccatctaccaaccagctttaacgaaggcgcgactaataatacctattcacgtaatcaaaagatggtgggttatagtttcgagcatggttttaacgataccttcacagtacgccagaatttacgtttctctgaaatgaaggttgcgcagaaaagcgcctatggtaccgggctgtgcaacaacagtatgaatgccttcaactcctattgccaatcactgactccagagcagcaggctcattatttaggacgaggtacagtcgttgataacgagcgtttacagaattttagtgttgatacccagctgcaaagcaatttttcaacagggaacgtcgatcatattttgctgactggtgtcgactatatgcgtatgcgtaacgatattagtgccctgtttggtaatgcaccgtcacttgatcttaataatttaccgtctatgagcagcgttgattttggtgatgctgttccttatcaaatgaatgaaagtaagcagacagggatttatcttcaggaccaagccgagtggaataaatgggttttgacgttgggcgggcgctacgattggtctaaacaagcgaccaccgtacgtagtgacaatggttatattgagcgtaatgaccaccaatttacctggcgtgggggaatcaactatctgtttgataacggaatatcgccgtacgttagttacagccagtccttcgaaccgaatgcttttagcttgtatagtactccacgtgttgcctatgagccttctaaaggtgagcagtacgaagcgggggtgaaatatgtgccgaaagatatgcccgttgttgttactggtgccgtttaccagctaactaagtcagatacattgatggcggatcctaacaatgcacttaatcaggttccggcaggtgaaattcgttctcggggtgttgagctagaggcgaaagcggctttgaatgccaatatcaatatgaccgcttcatatacctacacggatgctatctataccaaagatactaatctgaaaggaaatacggttgttcaagtacctaaacacatggcttcgttgtggggggattacaccttctacgatgggcccttgtctggcttaacccttggtactggtggtcgttttatcggctccagttatggagatccagcaaatacctttaaggtaggaagtgctgcggtgatggatgctgttgtcaaatatgatctggcgcgctttggtatggctggttcaaatatcgcggtgaacgttaataatttgctcgatcgtgaatatgttgccagctgctttgaaacatatggttgtttctggggcgcagaacgtcaggttgttgctaccgcaaccttccgcttctaa

SEQ ID NO: 92097 - DNA, 1890 bp, Enterobacter aerogenes
atgaaaaaagcgctcactgtttcgttactggccctgctgatttctcaaggcgccgccgccgctgaatacacattaaataacgcgtcgatggcgctttcatttaacgatgcggattcctccgcgaaggtaaaagatgaaaaatccgcccatcaactttcaccgcaagaactgttttttctcacactacctgatgaaaccatcatccacaccgctgattttaaaataaagcatgtcgagaaacataatgattctattgtcgtcgattacacccgcccggattttaatgtcacggttaagatgaacctgataaagggaaactacgcgagtattgattacactatcgcagcggtgggccaatcgagagacgtagcgaaaataacctttttcccaactaaaaaacaatctcaggcaccctatgtcgatggcgctattaatagttcaccgatcgttgctgattccttttttatactacccggtaaacctatcgtaaatacctgggcttatgaggcaaccacgaatctgaatgtagaattaaaaaccgctatcgaccctgccacaccgctcagctatacggcctacttcggcacctttccagaaaccaatcagcttcgtcgcagcgtaaacctctttattaatgccgtgcgtccccgcccctataaaccctatctgcactataacagctggatggatatcggcttcttcaccacctatagcgagcaggatgttctacgccggatggatgagtggaataaggaatttatcaccggacgcggcgtcacattagatgcctttcttctggatgatggttgggacgatcgtactggcagatggctcttcggccccgctttcagccaggggttcagtaaggttcgggaaaaagcagccagcatgcaaagttcagtggggctgtggctttcaccatggggtggttataataagcccagagatatccgcgtctctcacgccaaagagtatggttttgaaacggttgatggcaaattcgccctatccgggcgacactatttcaataacttcaatcaacagattattaagctgattaaagacgaacatattacctcttttaagcttgatggtatgggcaacgcgaattcacatattccgggtagccagtttgcttccgattttgatgcatcgattgccttactgcataacatgcgcagcgccaatcccgaccaatttattaatttaaccaccgggaccaatgccagtccttcctggcttttttatgccgacgcgatatggcgccagggcgacgatatcaatctttacgggccggggacgccggtacagcaatggatgacttatcgggatgccgagacttatcgttcgattgtgcgtaaagggccgctcttcccgcttaactcactgatgtatcatggtattgtcagtgctgaaaatgcctattacgggctggaaaaaccgcaaaccgatagcgattttgccgatcaggtctggagctatttcgcgacaggtacgcaattacaggagctgtacatcacgccgtcgctacttaacaaagtgaagtgggacaccctggcgcaggcggcaaaatggtcgagggcaaatgccgacgtgctggtggatacccattgggtcggcggcgatcctaccgcactggaagtttacggctgggcctcatggaataaagataaggcgatattaggcctgcgtaacccatcagataaaccacagcaattttatctcgatctcgctaaagccttcgagataccgcagggagagacgtcgcgctttacgttaaaaagcgtttacggcagtaacgcgacattccctgctgactatcagcaagcggctattgttacgctacaacccttgcaaacgctggttttcgaagcgacgccggtaaaatag

SEQ ID NO: 92098 - DNA, 276 bp, Enterobacter aerogenes
gtggttgatgtccccctggtgctgcatggcgcaagcgatgtaccggatgactatgtccgccgcgctatcacactgggaatttgcaaggtcaatgtcgctacagaactcaaaatcgcgttcgccgccgcggtgaaaacatggtttgctgaaaacccgcaagggaacgatccgcgttattacatgcgtgttggcatggatgcgatgaaagaaatcgtgaaaagtaaaattaacgtgtgcggttccgctaaccgactattacaggccgcagaagcctga

SEQ ID NO: 92099 - DNA, 429 bp, Enterobacter aerogenes
atgatcgaaataataagtgataaaaaaatattaagaatcaccgcgtttgaaagagagaatacacctaatgcacctgcttatgattggataaaaacctacgtcgaatatcacctccctgaattgaatgtacaatatcaggcttctttcaacgttggtgaactttccgaactgaaagataatcttatcgcgttacatacccacttaataaatgaagatgcccataccgatgttatttttgaaagcaccgaaaatcagctaaatctagtatttacaccatcatcttttggccatggagcacttatgtcgttaacgttgaggccagaaaacccggctgaaagcgtagtgatcagtgattgtttggggcttgatgaaagctattttcccgcgctcattgctggtctggaagagatcatcaatttacaaagatga

SEQ ID NO: 92100 - DNA, 213 bp, Enterobacter aerogenes
atgaaatctgctcttgctaatctatgccaatccatcgggattcagtccgcgagtctgctggaagctatcacaacctgcctttgttctatcgccgcgctgggtagcctttttgtgcttgaaggctggggcatgaagatggctggttttgtcgggtttttggcgctggcttacgtggttgcctggatagtggatatagtaaaaggcgaaaagtag

SEQ ID NO: 92101 - DNA, 867 bp, Enterobacter aerogenes
atgtccgacaatcactaccaaccaccgaaagtatgggaatggaaacagaataacggcggcgcgttcgccaatatcaaccgtccggtttccggcgcgacgcatgagaaagtgctgcccgttggcaatcacccgctccagctctattcgctgggcacgccgaacgggcagaaagtgacgatcatgctggaagagctgctggcgctgggcgtcgcaggcgctgagtatgacgcctggctgattcgtatcggcgaaggcgatcagttttccagcggctttgtggaagttaacccgaactcgaagatcccggcgctgagcgaccactccactactccgccgacccgggtatttgaatccggcagcatcctgctctatctggcggacaaatttggtttcttcctgccgaaagacccggccggacgcaccgaaacgctaaactggttgttctggctacagggcgcagcgccgttcctcggcggcggctttggccacttctataactatgcgccggtaaaaatcgagtacgccatcgaccgctttaccatggaagcgaaacgtcagctcgacgtgctggataagcagctggcgcgcggccgctttgtggcgggggaagagtacactatcgccgatatggcgatctggccgtggtacggcaacgtggtgctgggcaacgtctataacgccgcggaattcctcgatgccggcagctacgttaacgtgctgcgctgggcgcaggacgtgggcaatcgcccggcggtgaagcgcggacggatggttaaccgcaccaatggcccgctcgacgagcagttgcacgagcgccatgacgcccgcgatttcgacacgcagaccgaagacaaacgtcaggcgtaa

SEQ ID NO: 92102 - DNA, 837 bp, Enterobacter aerogenes
atgagttggattttattattaacttgtgaattttttatgcttattaaatatctcccggtatgcgcgctgtgtatcggcctgctgccaggcgcgctctttgcccagacgggggaaggtaaaaccaacgccgagaaatcggcggatgacccgactaaagtgaccaccaaatttggcgtgacgtggtcagataactacgatctgaacgacagcaatctcgcattttccggctcgctggcctttgacgaagcgcggaaactcaatgtgcgtattaatagcgacgccacggaatggcgcgtcggcggttcatggctatttcccattggtatttttaactttaactttgggaaaaatgtttatcccgatgactcctcacaaaccaactattctatcggtacgttcctgccgctcagttattttggctttgaaccagcaggtttccaaatattcccgatggccggttatacctataataccggcgaccatatgacctgtaataaggatcaacatagcgcctgttcgcagtcgggttttaacggcatgccgtcgccggagaacggttttgaatcgacgaatatctccggcagcagcggttatctcggcgcctttgttctgaaacctttgagcaccgatctacgcctgttaggtttcgccggtggatcgtatggctcaaaaaacgacgatggcgataactataaaggttatttcgccggggtcggcgtgggatataacctgaccgagcataacgcggtgaaatttatgacctacgttcaggataacaacacctatctcgatgaagccgaaaagcgcttcctgttctcctggcagtatcagctttaa

SEQ ID NO: 92103 - DNA, 1383 bp, Enterobacter aerogenes
atgactaatccaagcaatcagaaccgttcgacgtccgattaccaacattcagatgcggctcaccatattcatgccttcctggatcaaaaagcgctgaacgccgaaggggcgcgcgtcatggtacgcggcgaaggactttacctgtgggacaacgacgggaataaatacctcgatggaatgtccggcctgtggtgtacccagttgggctacagccgccaggatctggcggacgccgccgcggcgcagtttgccaaactgccctattacaatatgttcttccacacgacccacccggcggtgattgagctttccgagctactgttcagcctactgccgccgcactacagccacgctatctacaccaactccggttcggaatcgaatgaagtgctgattcgcaccgttcgccgttactggcagatcctcggtaagccggagaaaaaggtgatgattggccgctggaacggctatcacggctccacgctggcggcaagcgggctcggcggcatgaagttcatgcatgaaatgggcggggtgatcccggacgtggcccatatcgatgaaccctactggtttatgcacggcggcgacctgacgccgcaggagttcggcctgcgctgcgcccgtcagttggaagagaagatcctggaactgggcgcggaaaacgtcgccggttttatcgccgagccgttccagggcgcgggcggtatgatcttcccgccggaaagctactggccggagatccaacgtatctgccggcaatatgacgtgctgctgtgcgccgatgaggtgattggcggctttggccgtaccggtgaatggtttgcgcatcagtactttggctttgaaccggatacgctgtcgattgccaaggggctaacctccggttacgtaccgatgggcggcctggtgctgagcaagcgcatggccgacgtgctggtggaaaaaggcggcgttttcccacacggcctgacctattccggccacccggtggcggccgcggtggcgattgccaacctgaaagccttacgcgatgaaaaccacgtcacccgagttcgcaccgatagcggcccctatctgcaaaaaacgctgcgcgaggtgttcgaaaaccatccgcttattggcgaggtgcagggagccgggctggtggccgccctgcagtttgctgaagataaagccactcgcaaacgctttgccaacgagaacgaactggcctggcgctgccgcaccatcggttttgaggaaggcgtgattatccgctcgacgctggggcgcatgatcatggcgccggcgctgatagctggacatagcgaactcgatgaactggttgaaaaaaccaaacgcgccgtggaccgcaccgcgaaagagattggcctgctataa

SEQ ID NO: 92104 - DNA, 1266 bp, Enterobacter aerogenes
atgaccgtagaaaaaatacaaattgagacgctggttgttggcggggggcaggccggtatcgccatgagcgagcacctgagtaaacagggtatttcgcatctggtcgtggaaaagaatcgcattgccgaagcctggcgtaccggccgctgggattcgctggtggcgaacggcccggcgtggcatgaccgttttccgggcatggagtttaaaggcggcgaccccgatgcctttattgccaaggatgatgttgcgcaatactttgtcgattatgtgcgcgagtttaatcttccggtgcgtaccggcgtggaagtcaaaagtgcggtgcgtaaccacggtcgtccggggtttaccattgaaaccaccgacggcgtgattgaagcgctgaatattgtcgcggcgaccgggccgttccagaagccggttattccgccgatcgccccgcgcgacagcgccatccatcaaattcattcggcgaaatattacaacccgcaacaactgccggaaggcgcggtgctggtggtgggcgcgggctcgtccggcgtgcaaatcgccgatgaactgcagcgcgcgggccgtaaggtttatctgtcggtcggcgcccatgaccgcccgccgcgcgcctatcgtaaccgggacttctgctggtggctgggggtattaggcctgtgggatgccccggccagcgaacccggtaaagagcacgttaccatcgcggttagcggcgcgcacggcggccacacggttgatttccgcgagctggcgcatcgcggtatcacgctggttggtctcaccgaatccttcgccgggggaaccgtctcctttaaaaataatctcgtcgaaaatattcgcctcggcgatgaaaactacctggcgctgctggattccgccgatgcttacatcgccgccaatggcctggatttaccggaagagcccgccgcacggcaattcttagcggacccggactgcatgacgtcgccgatcctgtcgctcgatctggcgcaggcggggattaacaccattatctgggctaccggctatgcggtggactacagctggctcaacgttaacgctttcaacgaacaggggcgtcctcagcatcagcgcggcgtctccagcgaaccgggtgtctacttcctcggcctgccgtggttatcgcgccgggggtcaacctttatctggggcgtctggcacgacgcgaagcatatcgccgaccatatcgccacccgccgtaaatatagccagtacaaagacgccagccagcgttaa

SEQ ID NO: 92105 - DNA, 138 bp, Enterobacter aerogenes
atgccgccggttgtgcctccggccccggtgatgacctgttttgtcgggtggcggctaacgccttacccgacctacgccggctacagtaatgtgcagtttggtagcccggataaggcgcaacgcgccgccgggcaataa

SEQ ID NO: 92106 - DNA, 315 bp, Enterobacter aerogenes
atggatatcgatgctactgttcacggactgatcgaaaagcacttttggaagatggacaatgatacatcactaagtgatggtgatcatgtagtgcttccagaggatatgaactcatttctaaatgattactctgaatcattgaatgttgatatcgagagttttaactttcgtcgctattttcccaatacgggtatttggtttcttccaaacgccattcttcctgaatacctcaaaacagaccaccacaaaccagaaccattgacggtacaaatgtttattgaaagtgctaaagccgggcgctggctctatgactga

SEQ ID NO: 92107 - DNA, 1221 bp, Enterobacter aerogenes
atgtttaaagcttttttccccaaaccggggccgttttttatttctgcctttatctggtcgctgctggcggtgatcttttggcaggcgggcggcggcgactggctgctgcggataaccggcgcatcgcaagatgtcgccatcagcgcggcgcggttctggtcgctcaactatttggtattttacgcgtattacctgttctgcgtcggcgcctttgcgctgttctggtttatctatagcccgcatcgttggcaatactggtcgattctcggcacctcgttgattatttttgtcacctggtttttggtggaagttggggtggcgatcaacgcctggtatgcgccgttctatgatttgattcagagcgcgctggccacgccgcacaaggtcagcatcagtcagttctaccacgagattggcatttttctcggcatcgcgctgattgcggtggtgattggcgtgctgaataacttcttcgtcagccactatgtgttccgctggcgtaccgcgatgaacgaacactatatggaacactggcagcatctgcgccatattgaaggtgcagctcagcgtgtgcaggaagacaccatgcgcttcgccgcgacgcttgaagacatgggtgtgagctttattaatgcggtcatgacgctgattgccttcctgccggtgctggtttcgctgtcggcgcatgtgccggacctgccgatcgttggtcatttaccgtatggactggtgatcgccgctattgtgtggtcgctgatgggaaccgggctgctggcggtggtcgggatcaagctgccgggcctgcaatttaaaaaccaaagggtagaggccgcctatcgtaaagagctggtgtatggcgaggacgacgccaatcgcgccacgccgccgaccgtgcgagaactgttcaacgcggtgcgccacaactacttccgtctctatttccactatatgtatttcaatatcgcccgtattctttacctgcaggtggataacgttttcggcttgttcctgctgtttccgtcgattgtcgccggtacgattacgctcggcctgatgacccagatcaccaacgtgttcggccaggtacgcggctcgttccagtatctgataagttcgtggaccacgctggtggaactgatgtccatctataaacgtttgcgcagctttgagcgcgaactggataacaaagggttgcaggaagtctcttcaaccgttaattaa

SEQ ID NO: 92108 - DNA, 2661 bp, Enterobacter aerogenes
atgaaatatcacgaaaataaaaaaaggtccgtgaaattaaacccaattgcggcatcattattactgctgatgcctgtagtggcgcaagcggaaatttctattaaaaatggcagcgttactgaagcctcaaatggtgtgccgattgtcaatatcgcgaaaccgaatagcaatggtctttcgcataacgtatatgacaccctgaacgttggcgcagaaggggtgatctttaacaacgcgacaagcgcggcgcagtccgtgctggctgggcagattgcggccaacccgaaccttacggaccgcagcgcgatggttattcttaacgaagtgacttcaacgaatgcgagtaccattaatggcatgatggaagttgccggggattccgctcacttaatcattgccaaccctaatggcatcacgactcagggaggcgggttcatcaacgctgaaaaagggacgttgacgacaggtacgccaaagttaggtgaggatgggctgttaaatggctattccgttaatggcggaacgattactgtaagtggctttcagagcgaatcaccgaccgaaattctggcgcgtagtgtcgttgtgaatggtgcgctttcagccagtgagcttaagattgtcgcagggagtaatgcggtcaacgccgacggtgtggtcaccgactccgtaacgcctaccggtaacgcaagtacctacggcgtggatgtttctaagcttggtggtatgtatgcgaataaaattagccttgtcagcacagaaaatggcgtaggcgtgcgtaatctggggacgatttctgccggggatagcggtattaagattaccagtaacggtaaactgcttaacaacaatgcggttattcaatccagtggtgatatcaccctgaacaccaacggtgttttagaaaatagcgcagggaaaatcaacagcgacaaaatgatcgccattgataccgcgggtaataaagttagtaatatcaacggtggcaatattttagcaaccactaataactatattaccagcggtaaattcgataatagcaatggtaaactggctgccggacaaacgctggctgtcaatactagcggtaatacttttaccaataccggaaaagctaaaacggcgggtattgaggcgggtgtcgttgcaatcgaatcaggtgattttaataataacaacggtcagattcatgctggctatgttggcctgaaaaatacatcgttaactaataatggcggcactattgattcaactggaaatgttgaagttgaaagtacggggaatattgaaaacgtaactggtttgattcgctccagtgctggtgctgtaaaattaacgacaaccaaagcagttaaaaacaacgacaacaaatcggccgataccacgggcggtgaatccttgggtatcgtctcaggtaatggcatcgagattgctgctgactacttatttaactgggctggcgaaattgcctcagatggtgatgtgagcatccaaaccaccagtgatattgataactatatgggtaaaattgaaagcagtaagactgtgtcaattactggtcgcaacatgaataccagccaatccggtatcaatggcggggcgggtgttaatatcgatcttaacaactattatagccgtctgggcgtaataacttccgtgaacggtgacgtaaccatcaaagccgatacagtcagtacagacagttcggtgatcaaagctaaaaatatcagtattgattcaggcgctgatattgatgcgaaatatacaatgatggttgcggatgaaaaactagcgcttaatgcggttggtaaaatcaccagtactgacagtgacaaatttggtttctatgtggggcaatacttcggctatgggaatcagcaaggcggtctaattggcggtgaaggggttgatattacggctaagagcctgaataacgaatctggccgtattattgcgcaaaccggtgatgtaaatattaatctgactggcgatctcgcaagtaacaaagggcagattgttgctaattcagggggtatgacgattgctgcgaagaaaatcgctgctgattacgcaactatttatagctctggtaacatgcaaattgatgcatcttcattgtcatcaaaagcaagcggttccattgcaaagaatacggctaacggagtcatctcttcagatagcgacgtcttgattaatattaatggtgattataataacaccggatgggtgaatgctaaaggtaatctgacggttaatgcctccggttacttgacaaataatcacgcctttaatgctgatggtgacttgaacctgaccgggaaaaccatcactaacaacagcgatattgctgctggtaatactttgaacatttcgacggcgaatgatttgaccaataatcttggcgcaaacatttctgccaaaacaactaacgtcacagctaaaaatatctcaaactgggctaatttagttgctgatagccagttgaatgtcactgcaagtaataacatctacaactatggcaacctttatacagcgggtaaggcggtaatcgatgctaagaaaatcgtcaacactggtttctgggctgtattaggtggagctcaaggatttgagactacagctaatgttgtaaacgtatttggtaccgttgtaggtaaataa

SEQ ID NO: 92109 - DNA, 1647 bp, Enterobacter aerogenes
atggatattcgcaatatagtaattattagcctggtattgttgattaccggccctgcagtagcggctgatgctcagttagggcggcttgtaaaagaccagcaaagcaatgataacgctgcgttcaaagaccgaaaaatagaacaaaaggatgtgttctccgatgccgtcgcaaaaaaagaaaccgatagcacattcccgctggaaactccgtgttttcaaattgatgaattagtgcttagcaatgattttttagacgaccgcggattaaataaaattaaaaaacaggttgctggaaaatgcttagggatgaatgggttgaaaaaagcggctgtgctttttcaagattactatataaatgtggggtatataacaacgagggtggaaattccatctcaagatctcttgactaaaaaattaagtttggcagtgataccaggaaggatttctgagattgtcattgttgataacgatataagtaaatgggttttgccattttcagaaggtgatattctcaatatcagggatgttgagcagggcctggaaaatatacagagaacacctgaggttgatgttaaaattaacatagtgccaggtactaaaaatggcacgagcaagctggtaattaatacgcaacgaaaaaaaatatggagtgccagagcttcgtacaataactatggtgatgatagcactggaaaccaacttattggtggagtggggtatttatataatgtcactagtttgagcgatgttttttacctggcggggacgggtagccagaccggggggtataaaaatgctagtgcctattatagtgtgccttttggatataccgatctaagtcttttttatagtaaaagtaaatctactcagggtattgatgttggtatatatacttttgattatgtaggtgagacggaatatttcagcctcaaaggtaatcgtatgctataccgcaatgtgaactctaaattgtctgcgagtgctgaattgatcagacggaaatatgactacacattgggtgggacagaactggttttgcaaaaacgagatatgggtaacatacggttaggattaaattataaaagaaactttactggggctgcattggattctactttaacctggcaacggtttaccagggcttttggtggcactgacacaccagacatgcgtactggcactgtgagtaagaaaagtcaaattgtaaaccttaatgtgaactatgtgaaatggttaacgatgttgccagccaacgcctattacgaacttaattttggtgcccagtattcaccagataatttgacgttacaggatcaatttacaataggcgatcgttggagtgtacgtggttttcaaaacagcgatggtatctatgggaataaaggtttttttatacaaaatactctgaatgtggtgactggatttgacggtatcaccccttatgttggcacagattatggacaaataattggtaagttaccttcacaagacctgagtgggaaaaagataatgggtggagtcttaggagttaaaggcgcggtgaaagcggtcgagtatgatgcttcgttatcaacaccttttctctatccggatgatttcgatgtggataagtataagcttaatttcaatttttcgtaccagatttaa

SEQ ID NO: 92110 - DNA, 369 bp, Enterobacter aerogenes
atgcgtattggtacagatattgtcgaagtagcaagaataaaaaaggctattgctaatcataagtcggggtttcttcagagagtatttacgaataatgaaataaaagaaatcgatgttattgatctaaattatgaacgagcctcaggattttgggctgcaaaggagtctctggtaaaagccattggctacggatttggccatggaattcgattccatgatattgaagttgttcatgacgaatatggaaaacctgagtttatattatccggtagagttagggatattcttaatgagcagcgagtgatgaatatgtcattaagtatttcacattgccggacatatgcgatagccgtaaccatcatatattaa

SEQ ID NO: 92111 - DNA, 282 bp, Enterobacter aerogenes
gtgaccaacattaatgatgaaatcgatgaaagaaaaaaaataattattacgattaagtccgaaattattcaacgcctaaatgttcaacgtgaggcacatcaaattgatgatgacacgccgctgtttggcaatggactgaaactagactctgtagatgccacggaaatcatcgtaatgcttgataaaaccttcaacattcaggtctcggaaggtgatgatccagcctatatgcgaagcataaataatctggcatctttcattctaaagaaaaaaacatcctga

SEQ ID NO: 92112 - DNA, 1170 bp, Enterobacter aerogenes
atgaatttactttctgatcttcattttaaaaataatgcgcttatgggaatctataatcatcaacgcgtaccttcttcatatcatgatatttttgaagaatataaggctgtgcgtgaaaatgccttgttggtggattattctcatatgtctatcaccagtgtgatgggagatgatgcatgggcattggtaaactacatggtttcggctgatgtatcaatcatccgtgatgagcagggtatttactccctactgctaaacgctgatggagatatccgtggtgatgcatatgttttgtgctcagctgatggttattatattttatccgagagccttacctctaaagaaattatagatgtactcaacgaagcactgactaaagctgaggaattagatattcaggagatccctgaaattaaagccatggaggaaaataattggggggctattatgctggaaggcccctatgcatgggagataatggcggaggtttatggctttgatatcattggtctaccatattatgaatatatgaataccgatgatgagttaatgattttccgctgtggaaaacatggcgaatttgcatatcagttgatcggcccacaagcaacactagtcacgatgtggatgaagttacaagaaataggtgctaagtatttgctcaaaaccggtggtttagattatcaacgtctggtgagagtggaaaacccgggatgggacgaaagcctttataataattactcccgtaatccagtagaactacaaatgcagtgggctattcagtatgacaaggaagactttattggtaagagtgcggtagaagaactatcgcggaagggggctgagcgcaaacttgttgggattgctcctgatgttggatgtagtcacatcgactcaaatgaccttgtgatggttaatggacatcaagtcggtgttattgttaaagcagcatattctcctgcgaaacagcattggatcgcgttggcacttattgacgaatgctatgcattagcggatatctccggttttactattcaaactgtaaatggggaaatcacagccaaaacccaaaatgtcccttttatttataatctgagtttattggttaacccaacaatccatagttatgttgatgaattgaaggcgaaaagcgcgcttgaaacggtataa

SEQ ID NO: 92113 - DNA, 1221 bp, Enterobacter aerogenes
gtgagcgaaagggctattatttctggtttcagtgtgtgtttaccgtatgcagagaatagttcgctgttaattgaaaatttgcggcaaggtaaacgtgtacacttatctccatggtttacttcagataaacaggctatcgactgtggattttctggcaatatactgatagcgaaactaaaacgggataatgatagcgcttttgacctggtatataaacttatcaatgaaaccttaattcaggctggcctcaatgaagactgcctgaaaggtaatagggtcagagtatatattacagggataggtccgcgcgttgatgtcatggattatagaaatttctataattataatgatatggaagatgtttcattgatatcctcaatcaaaaatttatcagtgaaaaatatgtcgcaggacacggcttcctatcgccttgcaaaacgatacgaattaaaacatcttcccccaaatatgaactgcaccagtaactcttcactcactgctatccacctggggatcagggcaatagagcaaggtggtattgatctggcgctgatcatcaatatttcaaaaattaaatatcaagatctagtgttccttgagagccagggaatgttggagagtgaaatggtccaacccttcggtataaacagtaatggtgtaatttttgctgaggggtatggcgctatgttactggaaagtcaacagcaccgattagggcgagggaaaagccatggaataagcattacttcggcttacaagcagattaatgctgggcgtagtaatgattcctactggcaaagtactagtattctaaagttgattaatgcaatgttaaatgataagggtataaaaaaagaagacctttgtgcatttattccccatggtaatggcacttcatcaagtgataatgttgaggcaaaatccatcagcatgtatgccggtgaaaatgctcttccagtattggcctataagggacaaattggctataccgcaacaggttctggattaatcgatttagttattgggcatcatatactgcttaatagagaattaattttccctgtcgttaacgatcagattcgagaggatgtcgcacatcatatctccttagaggggggcgtaagtaaacatactaaaaaacacctcctgaaaactggcttaggggtcgacggttccgtcgttgcacttttgatgactaatttgcataataatactgactaa

SEQ ID NO: 92114 - DNA, 954 bp, Enterobacter aerogenes
atgtatctgtcttcatattcgttcatggaaccagacgagccattttatttatactacccgagttggctaaatgtatgggagtctcactcatacaatactgccttgaaaactacgggagctaacggctggagattcaaacgttttggctcaagaagtcaaatttatactcgagagattacacggcgtcctgaacatactccgtatattaacgccttcgataaagtatcagatgccgcattacatagcatgtcagcgaaagaaaggatgctgttactgaaatcgagaactgcttttatttatattgattcctggggagaatcaggcgtctttgagtacaatatcagtagccttaatttatctactattgatactctaccaaagaacttggttaagaaattttcaataagtgatgttacttgcaaaattcgcggcgaaaatttttccctttatcaggcgatgggaatggcgcaggattatcttgcatgggatgtatttgattttgtcgttatctgcggaggatatcgtgctgtgccattgttggcatttacagctgaaagtatgatccagagtgaagtaaaaaacaagaaaagactcattcccgggataaatatatcaatagaaagagtgggatgttttatttttagtaaaagggaaagtgatctaaaaatacattgtggtccatatatacatactgcaaccaataacccacatttaccaggtgttgaaaatacggatgatatagatctccttgcatatgccggaggaatcaataaaacaaaaccatttcctcataccggcatcgatcttattgctcgctacggctgtagcggatgtatgacaccggcgctaagttggcaatatattaatcagtatgcattgcataatggctgtctcagaaccgttattccgggagtagttagcggctatgcctattttgatacctggtaccaatag

SEQ ID NO: 92115 - DNA, 708 bp, Enterobacter aerogenes
atgcgcagcaatataacagaattacctgatatttcattatctggtatatataagacttatggttatcaggacaatatgacttatgctctaaacaatattaatctggatgttgtgaaaggcgagtttcttgcgttatgcgggccttctggtagtggtaagagtactttacttaatatactttccggtattgatacaccgactgctggcaatgtcttctttctgcataaaaatctcaatatgttgtcagacaaaaatcttgcacgccttcgcagtcgccatttaggtttcatatttcaatttttcaatttaataccggtgctgagtgtttttgataatgtttattatcccctgacgctcaacggtcattttagtacgaaagaggccagagagagaacgttacatttccttgagagtgttggtttatcccacttattggcaagaaaacctggccaattgtcaggtggtcaacagcaacgggtcgctattgcaagggcgctagcgcatagccccgaagttattgtcgctgacgaacctacaggtaatctggatcttgctaccggtgaatcaattcttgacctcctgcttgagattaatcaacggacgaaaacaacatttattatctcaacacattcgactcagcttaaagatcgtgctcgacggagagtagatatcaaagatggagcaataatttatgattcagcgaagtaa

SEQ ID NO: 92116 - DNA, 651 bp, Enterobacter aerogenes
atgattcagcgaagtaatctttgtagcgttttactcctgtgtcttagcatggttacattttcagtatttgctgagaaggtttcaacccctgcgactgcccgagtcttacaggatggatttcctggtgaaccacaggctttagcatctatcacttctgatttatttcaagagtatgaacgtactaacaaagttggcgcgctgatcttttattcgtggggaatgctgcgacaggctaactattatcagagtatcaatgatctcattaacgcttctgaatatgcaaagacgggctttttttatcttgatgaagcggtagataccaatgaagacaacatgctgattcgatacttacgtgccagagttgatgcctggctaccagtggggttagggcgctgtgtgattaccatcgaggatactgacctactgctgaagaataaagacaaatttagcagtgagatcattggtaatatactgataatgcgtttaagggcccttcataattgccatatgaaacagcaagaaaaacaactcgttgatcatctgcggagagttaatcagcagcgtgaaattgattttgaaaataacgaaatgccggcttgggaaatggttgaagtcttacaggttattgttcccgttattaaaggtgaatga

SEQ ID NO: 92117 - DNA, 1389 bp, Enterobacter aerogenes
gtgaaaggccatctggttactttgctgctttctatattaataactccattatggggaagggctaattgtttgtcaggtgatgaaatacgttctaatagtcagtttattttgaccggtcagacatctgttgcgcacaaaagcggctcgatctggcgcatcaatggaaccaatccgtatacaacgaacaacgtatataatgatattgccattaacttctcaagtgcttgttacttagttgatgatgtgctggggttggatttttcactatataatttaggattttatccaatacatggcgtgggattattcgaaaaagatgaacatcgcgccaaaatgttaatagacagacttaagcttaacttgtcgttatctgaaaatgtcagtcttgagggtggaaaactaaattcacttccaggagcctttcatttaagatccccggcttcactggtagccacctattatgcaggttttaaaccgacacggatatacgacccgaagctggagtctgcctatagcgagtcgtattggggagggcggttagcgaaagaatttcgtgattatgcattctcactcacagttataccaaaattagcaagtattgataaatactatgagtcatcaagcaactggacggccaatcaaagggctaacagcaatgaatactatttattaagttacaccgattatcaccttgttaatcatcgactggctgcgaatgtgatgcttggtgattctacttcattggcactagcagatggctacaacttaacacctcagtttgtagtcaatgtagaagttgcgcttcacaaaacgcagcaatggcggcatttttctcatgaaaaaaaggatgaggtgctttctgggctatatccttcatcgctctatgcgcagaatgacaaaagtggctatgaagtagccattggtgggcagtataccaccgacctttttagtgtgttgggcatcgagtactactatcaaagtgaaggttattcaaaatcggcatggcgggaacaggttgactttattaagttattaagtaaaaaaaccggttttgccagcttagacaaagtgtttgatgattataagtatctgatgggctcagaaataagtaatacagggaataaaggaatgctgcagggacggcattatattacttcatggctaagtttacaaaatgcagatcattcaacgcttcagccctatctggtgatgaacttagttgatggtagtgccttagtaggtactcattatatcaatccgttaaaaggattaagtgaccaagctgagatttatacgggtttgtatagcgcattcggtagtcatgattctgagttcgcactttttggcgagaccctcggagtttacgtcggatttaaatactatttataa

SEQ ID NO: 92118 - DNA, 939 bp, Enterobacter aerogenes
atgacaaaacaatcagtgcaacctacggtgcttattttcgccggtcagggaaaccctgttgtcggaatgggagcagatttatgggatctgaatacaactaccagggaaatctgggactgtgccagcgatgtgacagggttagatctgcgccggttgtgtcagaaagggccgatgaatcgtctggtgaaaacgacgacgcagcaggcagcggtgacggctatcaatgtcacactatatagtctgtatgccgagcaattctctgatgcgaatgttattggttcgtgcgggcatagcgttggtgagtatagcgcactatacgcggccggcgccttaacgctggaaaatgtgttcaagctaatattggcgcgctcaaccattatggatgatttaagcaatatccataaaggcgcaatgctagcggtaagaggcgctgattttcaaatggtaagccagttgattaacgactccggaagtcaagttgttgtgagttgtgataatagcccctaccagcaggtagttggcggtacgctaccagatttaagtgaattcaccgggagactaatgggggctggcctggaagctatcaaacttggcgttagcggaccctggcatacacctcttatgtctgagggggttcaacccatgcgggatgcgctgaagacggtggaaattctccggccaaatcatcctgtactgatgaatgtcaccgggtgtgaagaatataatccggagaaaattaaagagaacttatctttgcatttgacccatagggtacagtggacagcatctatgagcgcttttttacaacatatcccctctgccaggtttgttgaaatcagcaataaggcgtatctcggacaattgctaaatgatttcgacggtttctctgcagagtattatagacactgtagaaaactattggtggcgccacgaggttaa

SEQ ID NO: 92119 - DNA, 987 bp, Enterobacter aerogenes
atgatcccggattatttaactttcattcgtcgtcaggatcggtcgcttctcccgtatctttattttatttgtatatcacttattgcgctatatgttaaaaatagagggtatttgttgacccaggaggatgcatttcccgtaagtgccattttttcgttaacaatgttcagctttgtttatgagctaaaggggtactgggcttataaatacgagataggaaatatcaatttctcctggtttcaggggaaaatcgcctcgcgttttgaggttctgctgtggcatccacttgtcgcaactggatgctgtttcatcgtgtgctatctggcagtaaaggcgtgtctgttttttttgccgactattaccgcaatggtctgtattgccttttttgtgccgatcattgtttatctaatgtgctggtttgccagaaattgttacgtcaagcagttacagcaggaaactgcatttacgcttaaataccgtaatcttcattattatacttgcctgaacgtcactatgacttttttgaccagttttgtggttgtcagtccattggttgctgatgatgatttttctttatctaatggttttttttcggcaaagttgatcgttgccatgttgattctgtgttcagcgatactgatggttaatctgattttcgctcacccttcaaggcgttacacttttttaggcagacttttccaaaaagagtttgatgtaaatcttgtaaatacgatggttcttccagggatatatagaaaacccttgtggttaagattatttattttcttcactcttcagttattctggattgtggcgatgagtctgttgttgaaattattaggttggggaatatacttttatgcatatcttattgtctgcatgatacctgcgatgggatatttttatttgcatgtttactggcgttggcatgatgattacatgacagcgtgcgatatgtatctcaggtgtggtgaagataagaattaa

SEQ ID NO: 92120 - DNA, 534 bp, Enterobacter aerogenes
atgttttccgtggcgcagggagcgcacaaagggcggccagtcgccgccgccctctgtactcccgggctctggccgccaaaatcgccgctacgcggttccctcgacttatcccggcaggcttcgggtcgggccgaggctgcgtccttgcaaatcacggccctcagcccgcatccatgcgggctgccccggccttccggtaacgtctcagcgattttgaggccatcaacaccggcagtttcagtcagcgtggtgaataaattaaaggcaggccgcacggaccgtaggccggataaggcgcagccgccatccggcgcaaaaacggctccttatccgcggatattgcccggcggcgctgcgcttgcgcgggcctacagatccagtgcaatgggtggcccagtgccatgggtagcccgggtaaggcgccagccgctacccgggaagccgtctggttgggagagctacttcgccagccaggcggcgacctcctgccagttgccgcgaaaaataattttcccggcttttttccccaactga

SEQ ID NO: 92121 - DNA, 402 bp, Enterobacter aerogenes
atgaagttaattatcgcttccgttatttcattgttgagcttcagcgcgcttgcggccccggaagggacattaagcgtacatattctcaatcagcagaccggtctgccttctcaaggggtacagattgagctcgataaacagcagggcagcggctggcagcatatcgccagcggtaaaacggatgccgatggccgtatcaagtcgctttatccgcaggccgataatatggagcccggggtatataaagtaaccttcaaaactggtgactactttaaaagtcataatatgagcaccttctttcccgtcattccggttattttcagcgtaacggaacagaaccaaaagttacatatcccgctgttgttgagccagtacggctactctacctaccgcggtagttga

SEQ ID NO: 92122 - DNA, 900 bp, Enterobacter aerogenes
ttgcccctttttgatctgcaggatctctacgcctttttagccctcagcgagcacggcagctttcgctacgccgccgaggcgatttgcatttcgcaatcggcgttaagcaggcgaattgagaagctggaaaccgctttaggggtgagattgtttgaaagaaccactcgccgggtgaccctcacgcaaaccggcagagctttcgccccaaaggcgcagcatctgctttccgaattcgaagatgccctggacggtattagcgaccgcgccgccttcggcaacgggctggtgacagttgcctgtgtcccctcagccgctaactattttatgccgcaggttatcagccaattccgtctgcgttttcccaaagcgcggatcaaggtcattgataccagcgccggaaatgtttatagcgccgtgcagaatcaccaggcggatttcggcctgagttttctctccgaaatcgcgtccgaggtggtatttacgccgctggtccatgaacgctacctggcggtttgccgacgagacgatccgctggcgcagcgtaacagcctcagctggcaagaattttttaaccacgattacatctggcttgataagatctccggcaatcgccacctgctggacgacgccctgagcgacgtagggccacgacgcactgcagtttgtgaaacccgccacgtgacgaccatgctgggtatggttgatgccggcctcggtattgcggccatcccggcgatggcgctgccggcctatgcacaccacgcgttagccagtattccactagtggaaccagaggtgaaaaggcaggtggggctgataaaaaaagcgggcagagcattacctcctctggccgccgaactcgaaaaagctattaccgatttttaccatcccaccgcataa

SEQ ID NO: 92123 - DNA, 1107 bp, Enterobacter aerogenes
atgttattcgaccactattccttgcaggccctatcgttaaacaaccgtatcgtgatgccgccgatgacgcgttcccgcgccggagccggtgatgtcgctaccgatcagatggcggagtattacgcccaacgcgccagcgccggtttaattatcagcgaaggcacgcagattagccaacagggacagggttatgcctggacgccgggcatctataataaagcgcagatcgccggctggaaaaaagtcacctctgcggtacaccaggcgggaggcaaaatttttgcccagctctggcacgtagggcgtgtctcccataccgtactgcagccgggcaatgccgcgccggtttcctcgtctgctattcaggctgaaggggtgaaggtctttgtcgatgtcgaaggccgcggcccggaaaacggcgtcggtgaaatggtgcagcactcgatgccgcgcgctctgactcgcgaagagatcccggctatcatcgaacaatatgcgcaggccgcgcgtaacgctatggccgccggttttgatggcgtagaactacacggtgcgaatggctatctgattaatcagtttattgattctcgagaaaaccagcgcaccgatgagtacggtggttcgttaaccaatcgcctgcgtttcctcaaagaagtcgcgcaggccgttgccgatgcgattgggaaagagaaactgggtatccgcctggcgccgctgaccaccttgatggggtcgaaagacgatacgccggaagccacctatctggcggcggccagcgtcctcaatgatatcggcatcgcctatatccatatcgccgaagccgactgggacgacgcgccggtgatgcccgccgcctttaaagaagcgctgcgccaggtgttccgcggcacgatgatttattcagggaaatacaccgtagaacgtgccgaagaggcgctggccaagggctgggccgacctgattggttttggccgtccgtttatcgccaacccggatctgccctatcgcctgcaacacaacctgccgctgaaccagccaatcagagagcagtttttcggcggtggtaaagagggctacctcgactaccctaccgtcgatgcgaagtaa

SEQ ID NO: 92124 - DNA, 1734 bp, Enterobacter aerogenes
gtgaacaaaaaagccatggccgcggcggtcagcatgatcctcgccggcggcgcgcacggcgcgcagaatgagcatccaaacgtcatcgtgattatcgccgatgatatgggttattccgatatcagccccttcggcggtgagatccccacccccaacctgcaggccatggcggagcaaagtatccgcatgagccagtattacacctcgccgatgtcggccccggcgcgttcgatgctgttgaccggcaacagtaaccagcaggccgggatgggcggcatgtggtggtacgacagcaccattggcaaggagggttacgagctgcggctgaccgaccgcgtcaccaccatggccgagcgctttaaagatgccggctataacacgctgatggccggcaaatggcatctcggttttgttcccggcgccacgccgaaagatcgtggctttaaccactccttcgcctttatgggcggcggcaccagccattttaacgatgcgataccgctcggaaccgtcgaggcgttccacacttactatacccgcgatggcgagcgcgtctccctgccagatgatttttactccagcgaagcttacgcccgccagatgaatagctggattaaagcgacgccgaacgagcagccggtcttcgcctggctggctttcaccgcccctcatgaccccctgcaggcgccggacgagtggattaagcgctttaaaggccagtatgagcagggttacgccgaggtctatcgccagcgcatcgcccgcctgaaagcgttgggaattattcatgacgacaccccgctgccgcatctggagctggataaagagtgggaagcgctaacgccagagcagcagaaatatacggcgaaagtgatgcaggtatatgcggcgatgatcgccaatatggacgcgcaaatcggcacgctgatggagacgctgaaacaaaccgggcgcgataaaaataccctgctggtgtttttaaccgataacggcgccaacccggcacagggtttttattacgaatctacccccgaattctggaagcagttcgataacagctatgacaacgtgggccgcaaaggatcctttgtctcctacggtccccactgggccaacgtcagcaacgccccctacgccaattatcacaaaaccaccagcgcccagggcggcatcaataccgactttatgatctccggccccggcattacccggcgcggtaaaatcgacgcctcaacgatggcggtgtacgacgtggcgccgacgctatatgaattcgccggcatcgatcccaacaaatcgctggctaagaaacccgtattgccgatgattggcgtcagctttaagcgctatctgaccggtgaaacgcagacgccaccgcgctcgaagtacggggtcgaattgcataatcaggcggcctgggtcgatggcgactggaagctgcggcgcttagtcaagctcggcctcagcgccggcgacgcgccgtggcagctgtttaacctgcatgacgatccgctggaaacgcacgatatcgcggcccaacatgccgacagggtcaaagccatgagcgacgcctacgaggcatttgctaagcgcaccatggttaccaaagcgcagggcaagatgatcgattatgtcggcatcgatagcaaaaccggacgctacctggcggtcgatccggcgaccatgaagccggtgcccgcgccgcaagccattcttgtgagcgagggcaaataa

SEQ ID NO: 92125 - DNA, 1038 bp, Enterobacter aerogenes
atgaacgtcacccgcaagcagcagcggattcttcaacgcgctattgagcaatggcagcaggagggggtcctgaacagcagtgatggccaacggctgtcagcgtcgctatctgtccgtactttcgactggcagcgcctgagccgctatgccttctggaccgcgatagcctgcgtcttgattgcgctggggagtctgttcgccgacgctgaattgattgcggcgattatcaatctgttcagcgattccgctgtcgcgcggattattctgccgacgctgctggccatcgcattttactattgggggttccgccgccagcggcgcgaatcccagtggcactacagcaccgaggcgattttgttcctcggcgtcgtctgtaccgccattgccttgtggcagctaggcgatcggctggacgacggcagcggccatgtggcgccgctaatcctgctcggctgcgccatttacggcctgatagggtttttcgcccgctccgggctggtgtggctgttcttcctgctggcgttaggtaactggtttggcgcggaaaccggctatatatcaggttggggcgcctactggctggggatgagcttcccgattcgtttcgtgctgttcggcggcgtgctgctggcgctgtgctacttgatgcaaaatgtattacgccagcggcagttgtttaccgttagtaaggcgatggggctgacctggctgtttgtcgcgctgtggatcctgtcgatattcggcaactacgattccgatagctggtatggggtgagccaggcgcaactgctgccgtgggggctgctgtttgcgctggcggcggcgatctgtatttatatcagcctgaaaaccgacgatggcatgctgcgtggatttggcctgacgtttcttgccatcaacctctacacccgcttcttcgaattcttctggtacagcctgcacaaggtggtgtttttcctgatcctggcggtatcgctggcgatgattggccgttacgccgagcggatctggcacgccggcgagggggagaaaaagtaa

SEQ ID NO: 92126 - DNA, 327 bp, Enterobacter aerogenes
atgagccagtgggtaaacatctgcaaaattgacgacatcctgccggcgaccggcgtctgtgcgctgctggggcaacagcaggtagctatcttccgtccgtaccatgacgacagagtgttcgccatcagcaatatcgatccgttcttcaatgccagcgtgctgtcccgcgggattatcgctgagcatgacggcgcgctgtgggttgccagcccgctgaaaaagcagcgcttccgcctcagcgacgggctatgcatggaagatgagagccactccatcgcccattacgaagcccgtgttaaagatggcaaagtgcagctgaaagcctga

SEQ ID NO: 92127 - DNA, 1239 bp, Enterobacter aerogenes
atgcgaaggataagcctgctacttctgctgctgccgttgctggccgcggcgacgaaaaaagaaccgccggtgtcgctggtggttgatgatgtaccggtggtccaggtactgcaaagcctggcggaaatgcaaaatcttaatgtaatcgtggcgccggaggtcagtggtacattgtcgctccacttaaacagcgttccctggcgacaggcgctccagtcggttgtcgatagcgccgggctgacaatggcccggcagggcacggtgttgtacatccatacacaggcgtggcagcaagcaaaacgggcgcagcaggaagccgagcaggccagacgctggcagaatctgccattacgtaaccacagtatcccgctgcgctatgctgacgcagacgaactggcgaagtccgggggcaagctgttgagtgcccgcggcacgatgactgtcgatcggcgtactaatcgtctgctaatccgcgacgacgatcgtcatttgccggcgctgaaggcgtgggctgaagagatggatctgccggtcgggcaggtggaactggcggcgcacattgtgtcaatgagcgcgaccagcctgcgtgagcttggcgtgaagtggagcctggcggaggccagcagtacgccggggatggggaaaattactaatctgagcagcaatctggcggtgtcagacgcaaccacccgcggcggctttaatatcggccggatcaacgggcgattactggaactggagctttccgcgctggagcaaaagcagcaggtggacatcatcgccagcccgcgcctgctggcgtcgcatatgcaacccgctagtatcaaacagggcagcgaaatcccctatcaggtctccagcggagaaagcggcgccacctcggtcgagtttaaagaggcggtcctggggatggaagtgacgccgacggtgctacagcaggatcgcgttcgcctgaagctgcgcattagcgaaaatacgccaggccaggtactgcagcaggagaatggcgaagcgttggcaattgataagcaagaaattgaaaccttagtcgaggtgaaaagcggcgagaccctggcgctgggcggtattttttcgcaaaagaataagtcggcgcgcgacagcgtgccgttgcttggcgaaatccccttgctcgggcagctgtttcgccatgatggtaaagataatgaacgacgtgaactggttgtcttcatcacgccgcgtattctggcagtacattaa

SEQ ID NO: 92128 - DNA, 834 bp, Enterobacter aerogenes
atgacgctgttcgcgaccttccgctggccggtaaaactggcgctactcactattgcgctgctggcggcaatcgccatgagcagcggctggtggctaccctatgacccggcggccatcgatctccatcaacgtctgctctctccgggcgacgcccactggctcggcaccgatcatctcgggcgggatattttctcgcgccttctcgccgccacccgcgtctcgctgggcgcggtgatggcctgcctgctgctggtgctgctgatcggccttacggtgggcggcgccgccgggatggtgggcggacgtgtcgatcgcggcctgatgcgcctggccgagctgtttatgaccttcccgacttcaatactgtcattctttatggtcggtgtactcggtaccggtcttagcaacgtgattatcgccattgcgctgtcgcactgggcctggtacgcaaggatggtgcgcaatctggtggtctctctgcgccagcgcgagtttattctcgccgcgcgcctgagcggcgcgggacattggccattgtttcgtgaccatctggccggcgcggtgatcccttcgctgctggtgctcgcctcgctagatatcggtcatatgatgctccacgtagccgggatgtcattcctcggcctcggcgtcagcgcgccgacggcggaatggggggtgatgatcaacgacgcccgccagtacatctggacgcagccgctgcaaatggtctggcccggactggcgctgtttatcagcgtgatggcttttaatctggtgggcgacgcgctgcgcgatcgtctcgatcctcagctgatcgcggagcataaccactga

SEQ ID NO: 92129 - DNA, 504 bp, Enterobacter aerogenes
atggcattttacagttccggagttgagtacggcatccatagcctgatgtgtatggtggacagcaaaggcgacgcccgcgatatgagcgtgcgcgaaatcgctgagctgcaaaacgtgccctacgattatctggccaagatttttacccgcctatcgaaagcgggcctggtgcgtagtattgaaggcaaaggcggcggctttcagcttgccagagcggctgagcacatcaccgtgttggatgttgccaacgctattgatggcgaaaagcgtattttcgagtgccgtgagatccgccagcgtcttgcggtgtttgatgagcagccgccgcagtgggcctgcgaaggtatttgcggtgtgcgcgcggtcatggatatggcgcagcagcgaatggaagaggcgttaggccagcatactatcctcgatctggcgcgcaagatgtaccgtaaagcgccggatgagtttgtgattgaagtgcaggagtggatcgcggcgcgtaagaactag

SEQ ID NO: 92130 - DNA, 1203 bp, Enterobacter aerogenes
atgcgtaaacaaatcctgatcgtaggcgccggttttgccgggatgtgggcggccttgagcgccgcgcgtttagcggaaaaaaatcaacagcaggccattgatatcacagtcattgcgccgcagcctgagctgcgcgttcgtcctcgtttctacgaaagcgacgtaccgtcgctggttgcgccgctacagccgctgttcgatgctaccgggatccgttttcttcgcggcagcgtgtcgcagatccatcctgcggataaaacggtaacctggaccggtagcaacggcgaaagccacactcagaactgggatcgtttagtcctggcgagcggtagccatgttaaccgtgcgatggtcacgggcgcggcacagcacgctttcgatctcgatcagctcgaaagcgctacgacgctggaaaaccacttaattgctttagcacagcgtccgcaaagcgatgcgcgcaacaccgtggtagtctgcggcggcggctttaccggtatcgagatggcgatggaattaccgaccaagctgcgcgcgatcttcggctcaaatgctaagaccagagtagtcgtagttgaacgcggtccgcagccgggctctcgatacagcgatgcgctgcgtgaagtcatcgttcaggcctcaaaagaactgggcgtcgagtggcttgttaatgctgaagtggcgagcgtcgatgccgctggcgtgaaactgaaagacggacagcgtatcgactcgcagaccgtgatttggaccgtcggcgtccaggcgaataatctaacagcgcaaatcgacgcgccgcgcgaccgtcaagggcgtctgcatgtcaacgccgaactgcaagtgatgggttacgatgatatctacgcgaccggcgacgtggcctatgccgcgactgatgataagggtaatcacgccctgatgacttgccagcacgctatcctgctcggtaaattcgccggtaataacgccgccgccggcctgctgggcgtcgcgccactgcactatcgtcaggaaacctacgttacctgtctggatctcggcgcctggggcgcggtttacaccgagggttgggatcagcaggtgaaattgacccgcgaagaggcaaaaaaagtgaaggtgtcgatcgtcagcgaacttatttatccgccgaaggccgataagacctccgcgtttgagatggccgatccgctggcgccgtttgtttaa

SEQ ID NO: 92131 - DNA, 1143 bp, Enterobacter aerogenes
gtgctattggcattactgttggtttcaggctgcgccggcacgctgtcgcaaatgagccctcccagcaatgaaaccagcctggtggggcataacgggcggcggctttccgtcgatactttcgtcagccaatacatgcgcgagaagcaggtcagcggcgtggtggtggcgattattcatcacaacggcccggcggagtttcactgcttcggcgtgacggatgataagcagcgctacccgataactccgcaaacgctttttgccctcggttcgttaagtaaaggtgttaccgctgaagtggtgacgatgctggtcaacgaggggcgtttacactggaacgatacgctgcaaaccctgctgccgccggggaccgtgctcagtgaagatgcccgcaagataaccttactgcagctggtcactcatacctccgggctgccgcgtcaggcgatgaacatgctgtcgcttgaacatctgttggcctatctcaacaacggtgaaaacttttatcacgaactcgatgccgacggggtgctgagctatctgagcaacttcaatgcgccgctggagcgcgagccgagttactccaacctgggttttgcgatacttgggtatcttctcaaataccaaaccggcgaatcgattgagacgctggcgtcacggatgatcttccggccattggcgatggggaataccagcttcctgccgcaaacgctgcatgaatatccgtggcgggcgctgggacacgcaggcgatcagccgaagtttaaaccgcgcggcgcgctgacgccggactggcagttcatgaataatatggttggcgcggcgagtctgtacagcgacgccggcgatctgattaactatgcccgcgctcacttcgcccccacggggcaggcagcactggatcaggcgttcaaagacgttagcgtcgattattatccgcggcgggtcgaagcggcgaacattgcctgggtgaccgacacatttggtcggcagcgattaacttatcaggtgggttacatcggcggctactcaagctatatcggcttcgataaagcgaatcagaatgcggtggtggtgctgcaaaacagctttaactggagtaactacatcggccatcagatcctacgtaatctggcgacggagtaa

SEQ ID NO: 92132 - DNA, 1656 bp, Enterobacter aerogenes
atgaacctctggcaacaaaattacgatccggctggtaatatctggctatcgagccttatcgcctcactgccgattctgtttttctttttcgccctgattaagctcaagcttaaaggctatatcgccgccacctggaccgtagccatcgcgctgcttgtcgccctgctgttctataaaatgccggtcgatcgcgccttatcgtcggtggtatacggcttcttctacggcctgtggcctatcgcgtggattatcatcgccgcggtcttcgtctataaaatctcggtgaagaccgggcagttcgacattatccgctcgtcgattctttcgattacaccggaccagcgcctgcagatgctgattgtcggcttctccttcggcgccttcctcgaaggggccgccggtttcggcgcgccggtggcgatcaccgccgcgctgctggtcgggctcggcttcaatccgctatacgccgccggactgtgcctgattgtaaacaccgcgccggtggccttcggcgccatggggatcccgattctggtcgccggccaggtgaccggcatcgatagcttcgccatcggccagatggttggccgtcagctgccgttcctgaccattatcgtgctgttctggatcatggcgattatggacggctggcgcggggtgaaagagacgtggcctgcggtgatggtcgcaggcggctcgttcgctatcgcgcagtacctcagctctaacttcctcggcccggaactgccggacatcatctcttcgctggtgtcgctggtatgcctgacgctgttcctcaagcgctggcagccggtacgtatcttccgctttggcgatatgggcgccgcgcaggttgatcaaaccctggcgcgcacgcattacaccgccggtcaggtcattcgcgcctggtcgccgttcctgttcctcaccgctaccgtcaccctgtggagcgtgccgccgtttaaagcgctgtttgcgccgggcggggcgatgtatgacttcgtggttaacatcccggtaccgttcctcgacaaaatggtcgcccgtatgccgccggtggtgagcgccgcgacgccgtacgccgcggtatataaattcgactggctgtcggcaaccggcaccgccattctgttcgccgctatactgtctatcgtctggctgcgtatgaagccgaaggatgcgctgaccactttcgccgggacgttgaaagagctggcgctgccgatttactccatcggcatggtgctggcgttcgcctttatctcgaactactccgggctgtcatcgacgctggcgttggcgctggcgcataccggccacgcgtttaccttcttctcgccgttcctcggctggctgggggtcttcctgaccggttcggatacttcgtctaacgcgctattcgccgcgctgcaggcgacggcagcccagcaaatcggcgtctccgatattctgctggtcgccgcgaataccaccggtggggtgacaggcaagatgatttcgccccagtcaatcgccattgcctgcgccgcggtaggcctggtgggtaaagagtcggacctgttccgctttaccgtcaagcacagcctgatattcacctgcatggtgggcctgattaccaccctgcaggcttatgtcttaacctggatgattccgtga

SEQ ID NO: 92133 - DNA, 831 bp, Enterobacter aerogenes
atgattcgtcttttaatgctgatcagtgcaatttttggaatcggctatggttatgctatatcgcatgatgtttggccctttgaaggcatggatgcgaaccagagaggagtatttggcgattcttggggagcttttacctcgatcttttctgctatgggtttttgtggagttttatggacgataaaactccagatggatgctacaaaaataatagaagatgattctaggaaaagagaggaagcagaaaaaattagggatttcgaaaactccttctttaatatgttgaatatcttgcaaacgttaattaaagatatgagggttgaaaactcctcaggaaagactttggcagaaggtcgtcatgttttcctttatttttttagaagattcaaaaaggaaattagacaaaaatatggaatattattagattttgaattaagtgatgaaattgaagttaaaaaagcatccttacggatgtctaatgagtataggttttattttagaaacagagctcaaaatctttctcattattataggtatatttataatatgttcaaaataatccatgaatctgatttgactagtgttaataagaaaaaatatgcaaatattttacgcgctcaactttctaattatgaattactaatgcttttttataatgccaattttgtccatggtaggaaatttgaaacatatatgaactcatatgcaattctagataatttaccagcagagaaacttataaataaaaaacatgttgcattctatgataaaaaggcatggggtgaaaactatgatgcattaaagtatcaccccaaatatcatgatttttaa

SEQ ID NO: 92134 - DNA, 198 bp, Enterobacter aerogenes
atgcgtaaagcccgatacactgaacaccagattatcgccgttctgaagtctgttgaagccggacgtaccgtcaaggatgtgtgccgtgaggccgctatttcggaagccaactattacaactgtcagttggtaatgtcggtttgtttaccttcacattttccatttcgccaccgtgctgcaaactctgatggcgtctga

SEQ ID NO: 92135 - DNA, 357 bp, Enterobacter aerogenes
atgcacgaggttaaacgcctggagtcgtttgaggaagagaacgccagacccaagaagctgcttgccgaagccatgcttgataaggagtcacttcaggtggctctggggcgaaaagtactgacgacagaccacaagcgggaagccgttaagtttagttgtgaagcgaccgatctgtcacaacgtgtgcctgcaggcttacagatttacctctatcgacctgacgctacgaggctcagcgtcctgcggctgatgcgcatttatcagggggcatcaccaaactaccactggagcgcaagcattttagctaccgccgcatcgcgccgtgaaggtcttcacgttaatcacaagcgcgtgtag

SEQ ID NO: 92136 - DNA, 465 bp, Enterobacter aerogenes
atgggcgataaagttttcatttcacgacggcgctttttgcaggccggggcggcgctgagcggcgctatgctgctgcccggcgtgatgcaggcggcgtgggcggcgggttccgataagccagagttggccaccgtgcgggtcggattcatcccgttaaccgactgcgcgccgctggcgattgcggcattgaaagaattcgataaaaagtatggcatcagcctgcagccaagtaaggaggccagctgggcggcggtgcgcgataagctggtcgccggcgaactcgatgcagcgcatatcctctacggcatgctgtatggccttgagcttggtattgccggcaaaccgcagcagatggccaacctgatgaccctgaaccgcaacggtcaggcgatcaccctctctagtgacctacaggcgcaaggcgtaagcgatggtcatgggctcaagcggctgatcgaccaataa

SEQ ID NO: 92137 - DNA, 2607 bp, Enterobacter aerogenes
atgagcgaaacccgaaccacctgtccatactgcggcgtcggctgcggagttatcgcccgcgttgaacccagtggaaccgtcacggttcgcggcgatgaaaaccatcccgctaactttggccgcttgtgcgtaaaaggggcagcgcttggggaaacgacctcgcttagcgggcggttattacaccctgaagtcgatggccgggcggtcggctggccgcaggcgctggcggaggcgggttcacgtctgcgcgacattattgagcgctacggcccgcaggcggtcgcgttttacgcttccggtcagctgttaactgaggattattacgccgccaacaagttgatgaagggctttatcggcgccgccaatatcgatacgaattcgcggttatgtatgtcatcggcggtcaccggctataagcgggcgctcggcgcggacgtcgtgccgtgcagctatgaagatgtcgagcagagcgatctggtggtgctggtgggctccaacgccgcctgggcgcatccggttctctatcagcggttggtgcaggcgaaacgcgataatccgcggttgcggatcgtggtggtggatccgcgacgcaccgcgacctgtgatattgccgacgatcatctggcgttggcgcccggtagcgatggcgggctatttgtcggcctgctaaatgccattgccgccagcggtggaatggtggcgggttttcgcgaccagcggcaggcgctgaccatcgccgcgcagtggagcgtggaaaaagcggccgctttctgcggcctggcgccggagcaagtggctcgcttttatcgtgattttatcgctgcaccgcgcgccatcacgctgtacaccatgggaattaatcagtccgccagcggcagcgataagtgcaacgcgattatcaatgtccatcttgccagcgggaagtttgcccgccgcggctgcgggccgttttcgctgaccggtcaacccaacgccatgggcgggcgtgaagtgggggggctggcgacgatgctggcggcgcatatgaattttgagccgcaggacctgcagcgattagcgcgcttttggggcagcgagcgactggcgcagacgccgggactaaccgccgtcgaactcttcgccgcgattggacgcggcgaggtcaaagcggtgtggattatggggaccaatccggtggtctcactgcccgatagccacgcggtgagtcaggcgctgtccaggtgtccgctggtgatggtctccgatgtcgccgccaatactgatacggggcgctttgcccatatccgctttccggcgctggcatggggcgaaaaaaacggtaccgtgaccaactcggagcggcgaatttcgcgtcagcgggcttttttgccgccgccgggggaggcgaaagccgactggtggatcatttcccgtctcgccgccgaattaggttatgcccgagctttttcatggcaacatccgcatgaggtattttgtgaacacgcggcgctctcagggtttgaaaatgacggtcagcgggcgtttgatattggcgggctggcggacctcagccgggaggcgtgggatgccctgacgccggtgcgctggccggtgagccgcagcgccgcgccctggcggttaacggagggctggcacggcgacggcaggttgcggatggtgccggtgtcgccgcagccgacccgggcgcagaccgaggcattttatccattaatcctcaatagcggacgtattcgcgatcagtggcataccatgacccgcaccggcgacataccgcggttgatgcagcacattgccgaaccggtcgtcgaggtggcgcctgccgatgcgcgtcgcttacaattacgtgagggagaactggctcgcgtctggtcgcgccacggcgtgatgattgcgaaggtgatagtcagcgaagggcagcgcgccggttcgctctttgtgccgatgcactggaataatcagtttgcccgccagggacgggtcaataatttactggcggcggtcaccgatccgcattccgggcagccggagagcaagcagtcggcggtggcgatagcgccgtggcggccggcgtggcaaggggagctattatctcgcgagcccttaccgttgccatcctcgctgcactggcggcgacgggcggtggtagggcttagccatttgtcgctggccgcggataccggcccgcaaagctggctgaccgagtggtgtcgcaagcagggatggcagttgcaaattgccgagggcggcgggctgtggaacctactggcctggcacgacgggcaattgatgctcggctgctggagcgatattaagccgccgcaaatcgatgctgaatggctgtatacggcgtttcggacgccgcagcagaccgccggcctacgccatgcgttgctcagcggccgtaagggtggcgacagcgcgccgcgtgggcagactatctgtagttgctttagtatcggcgagcggcagatcggcgaggctattgccggcggctgcgtcagcgtagaggcgcttggcgcgaagctcaagtgtggcaccaactgtggttcctgtattccggaactcaaagcgctgctggcggcaaatcaaacccgaacgccggtttga

SEQ ID NO: 92138 - DNA, 1536 bp, Enterobacter aerogenes
atgaaaattcgttcacaagtcggcatggtgctgaatctcgataaatgcatcggctgtcacacctgctccgtaacctgcaaaaacgtctggaccagtcgtgaagggatggagtacgcctggtttaacaacgtagaaagtaagccgggcgtcggtttcccgaacgactgggaaaaccaggaaaaatggaaaggcggctggatccgtaaaatcaacggtaaactgcagccgcgcatgggcaaccgcgcgatgctgctgggtaaaatcttcgccaacccgcatctgccgggaatcgatgattactacgagccgtttgattttgactaccagaatctgcataacgcgccggaaagcaagcatcagccgatcgctcgtccgcgttcgctgattaccggccagcggatggacaaaattaccagcggcccgaactgggaagagatcctcggcggcgagtttgaaaaacgcgccaaagaccagaactttgaaaacatgcagaaggcgatgtacggccagttcgaaaacaccttcatgatgtatctgccgcgcttatgcgagcactgcctgaacccggcgtgcgtcgcgacctgcccgagcggtgccatctataagcgtgaagaagacggtattgtcctgatcgaccaggataagtgccgcggctggcgtatgtgcatcaccggctgcccgtacaagaagatctatttcaactggaagagcgggaaatccgagaaatgcatcttctgctacccgcgtattgaatccgggatgccgacggtgtgctccgaaacctgtgtaggacgtattcgctatctcggtgtcctgctctacgacgcggacgcgattgaaaacgcagccagcaccgagaacgagaaagatctgtatcagcgccagctggacgtcttcctcgatcctaacgatccaaaagtgattgaacaggcgttaaaagatggcgtaccgcagggcgtaattgaagccgcgcagcagtcgccggtttacaaaatggcgatggactggaagctggcgctgccgctgcacccggaatatcgcaccttgccaatggtctggtacgtgccgccgctgtcgccgattcagtccgccgccgatgcgggcgaactgggtagcaacgggatcctgccggatgtagaaagcctgcgtattccagtccagtatctggcgaacctgctgaccgcgggtgatacccagccggtactgctagcgctgaaacgtatgctggcgatgcgccacttcaaacgtgcggaaaccgtcgacggcgtcgtcgatacccgcgcgctggaagaggttgggctgagcgaagcgcaggcgcaggagatgtaccgttatctggccatcgccaactacgaagatcgtttcgtggtgccgagcagccatcgcgaacaggcccgcgatgctttcccggagaagagcggttgcggctttaccttcggcgatggttgccacggttctgacagcgaattcaacctgtttaacagccgtcgcattgacgccattgacgttaccagcaaaacggagccgcacgcatga

SEQ ID NO: 92139 - DNA, 873 bp, Enterobacter aerogenes
atgcagctttctcgtggtgtctggcagatgagcctggcgatgatcatttccggctcgattggcgcattcgtgctgctctcagggttgccggtaatcgacgtggttttctggcgctgtcttatcggcgcggtcacattattgctgtttattttgttaagccggcaacccttcagccgcctgacgcgcctcactctggcgctggcaatccttggcggcgtcgcgctggtgatcaactggctgctgctgtttgccgcctactcacgcgtttctatcgggatggccaccgtggtctacaacacccagccctttatgctggtattactgagcatgatactaggtgaaagagtaagcgcggtaaaatggggatggttactgctggccttcggcggcgtggtgattctgctatcgagcgaactaactcccacccacggcgacaatctcgttactggcattgcactggcgttatgcgcggcgtttttttatgccctgaccgccattatcgcccgcaagctgcagtcgctaccggcgcagcatatcgcttttattcaggttatcgtcggtacggtaatgcttttgccgctggttcatgcccccgagtttaacggccattttccctggcgctatttgctgatcctcggcatcgtccataccgggattatgtatcaacttttatatagtgcaattcaaaagctgccgacgccggtcactggttcgctctcgtttatctatccgctgatggctatcgtggttgactatctggttttccatcatgcgctcacgccgctgcagttggctggaggggtgctgattttgtttgctgcggcgggcaacaaccttggctggggcgaaaaaaaccccgccatggcggggtaa

SEQ ID NO: 92140 - DNA, 1014 bp, Enterobacter aerogenes
atgagcacaattgaaatgactaaagcgccgcaggccgcgcagcaaagcggtctgctgctggatgtgaaggatcttcgggtgacgtttaaaacgccagacggcgatgtcaccgcggttaacgatctgaattttaacctgagggccggcgaaaccttaggcatcgtcggtgagtcaggttccggtaaatcgcaaacggcgtttgcgctaatggggcttttggccgcgaatggccatattagcggttccgccacttttaacggtcgcgaaatccttaatttgcccgagcgcgatctgaataagctgcgtgccgaacagatttctatgattttccaggacccgatgacctcgttgaacccttatatgcgggtcggcgagcagttgatggaagtgctgatgctgcataaagggctgagcaaagccgcggcttttgaagagtcggtaaggatgctcgatgcggtgaagatgccggaagcgcgtaagcgcatgaagatgttcccgcacgagttctccggcgggatgcgccagcgcgtgatgatcgccatggcgctgttatgtcggccaaaactgctgattgccgatgaaccgaccaccgcgttggacgtcaccgtgcaggcacagatcatgaccctgcttaacgagctgaagcgcgagtttaacaccgcgattattatgattacccacgacctcggcgtggtggcggggatctgcgataaggtactggtgatgtatgccgggcgtaccatggaatacggtcaggcgcgcgatgtgttctaccaaccgtcgcacccgtactcgatcggtttactcaatgcggtaccgcgtctcgatggcgaaggcgattccttgctgacgattccaggcaacccgccgaacctgctgcgtctgccgaaaggatgtccgttccagccgcgctgtccgcatgctatggaaatctgtaataacgctccgcctctggagtcgtttgcgccaggtcgcctgcgcgcctgctttaaaccggtaggggatctgctatga

SEQ ID NO: 92141 - DNA, 387 bp, Enterobacter aerogenes
atgagcggtaagcgttactctgatgagtttaaaattgaagcagttaaacaggttgttgatcgtggtcattctgtttccagtgttgcaacacgtctcgatatcaccactcacagtctttacgcctggataaagaagtacggtccggattcttccactcataatgaacagccagatgctcaggccgggatccgccgtcttcagacagaccagatgctgaccaggcagatcaaacagttctggcttgagtctggctgcgtctatggttatcgcaagtgcgtgataccggacaggcacaagacagcggccccggtggctaacattcgtgaattttccagcgtcattcacgcggaatacggaacactgctgcaggacctgcgcagagaatag

SEQ ID NO: 92142 - DNA, 321 bp, Enterobacter aerogenes
atgtttatttttagggacgagacttcggagggagatctcggtaacggagtacgcaggcggattctggcgcacagtggttcgctgatggcggtcgaagtacattttgaaaagggtgctatcggggcactccaccggcatattcacgaacaactgacctatgtgctttccgggcgctttgtgttcaccattggcgatgagactcgtgaggtgaaagccggtgacacactctacaaacaaccgaatatcatacacggttgcgagtgtctggaggcaggtatattgctggatacttttacgccacagagagaggattttctgtaa

SEQ ID NO: 92143 - DNA, 1182 bp, Enterobacter aerogenes
atggctaagggttcaacgattcagttacattttcaccatttcagtgacccgcataccggggctcggataacgcgtctgacaccaccagatgtgatatgtcatcgcaactatttctatcaaaaaagctttacacgtgacggcagcaaactcctgtttgctgctgaatttgacggtcatcgcaactattacctgctggaccggcaaaaacagaccgccgttcaacttacacacggtcgtggtgacaatactttcggcggctttttgtcgcccgacgatcgcagcctgtattacgtgaaaaacgagcgggaattacgtcgtgtcagtctggatgattacagcgaacatacgatctatacggtaccggaggaatgggttggttatggcacctgggtagcaaacagcgaatgtacgcgtctggtcggtatcgaaattgcccgggatgactggacaccgctcaccgactggcaaaaattccggacgttttacctgcgtcgtccgcattgtcgcctgttgcaggtggatctgcataacggttccacgcgggtgatccatgaagcgaacgaatggcttggacatcccctctatcgaccttacgacgacagtacggtggcattctgtcatgagggacctcacgatcttgtggatgcacgcatgtggctggtcaacgaagacgggagtaacgtacgcaaagtgaaaactcatgcgccggaagaaagctgtacccatgagttctgggtaccggatggttccgcactcctctacgtttcataccttaaaggtcattccgagcgttacattcgccgcttctcaccacaaaccggagaagacagcagcctgatgacaatgccggcctgctcacatctgatgagcaatgccgatggcacgctgctggtgggtgatggctcgggtaccccggtggatgtacaggatacctcagggcatgtcatcgaaaacgatccctttctctatctctttgacacccgaacccgccgctatgcgccactggcgacacatcagagttcctggcaggtgctggacggcgaccggcaggttacccatccgcatccctctttttcacccgacgaccgggacgtgttatttacatctgatttcgaaggcctgccggccctttatcttgcacaaataccggatactctggtcagttcacttggtaaggagtaa

SEQ ID NO: 92144 - DNA, 1554 bp, Enterobacter aerogenes
atgaagacagaaaggccagttcttttcaggcatcagctcgcatatggagggggtaacttgctgggtagcggggcactggctatcgccggtatctggttactttacttttacaccaccttttgtggtctgacactgctgcaggcttcggctattttttcggttgccagtattattgatgccatcagcaatccgctcatgggatatatttcagataatttcggcaaaacgcgtctcggtaaacgctttggccgccgccggttcttcattctgctgggcatccccctgatgatggtctaccccctgctgtggatcgatggatttggtttctggtattacctttgtacctatgtgttgtttgagttgatctacacctccgtcatggtgccctatgaaacactcgccactgaaatgaccgcagatttcgcgaaacgatctaaactcactggttttaaagctatttttggtaaagtagccaactttctcgccgctttcattccgggccagttcattcttgtttacggtaaagaatcggccaccccatttttttacaccgccctgacatatggggtgattttatgtgtggcgatggggacactctggtattactcgtgggagcgcccggccgcagaagcttcgccggaaagtgaagaaaacaccacgctcagccatgcaatgctggcattgctgagggagatgagatcgactttttcactgcgtgtctttcgcaaacatctgggtatgtatttgtgcggcttcggggcagagtggctgtttgcttctgtctttacctactttatcatttttgtcctgcagtatgatccgaccatggtatccggactgagcagcctgaactccgtacttcagctcttttccacagctatttttattgctatctgcgtaaaacatgggttcagcaagccctatatacttgcgctgggtatcgttattttttccgtactgtgttatgccgcgctcttttttttccacctacctcaacagtatgccactgcggcgatgctggcgattaccgttgtcttcgggatcggtacgggcggggtgtattacattccctggactgtgtatacctttctcgctgatgttgacgaagtctttaccggacgccgccgcgaggggatctatgccggcacgatgaccttctccggtaaacttgtgcgctctgtgattgtgtttactatgggagcgatcctgagtttctatggattccagtctaaatcgcaaacccagccggaaagtgcggtaatggctattgcgctggtcttttgcgtcggtgtgattgcactggctctcgcggggatttatttcagcgcgcagatgaagctgaaccggaaggcacatctggtggtgcttgctgaggtggcacgtatccgggctggtggccagatttcacatgtcacagcggatgttcgtgccgtcatggaagccctgatcggttttccgtatgaacaatgctggggtaacagtaccgtctgttgcgatggcagaaacaagcatcttgataggacaccacttgtcggcacgacccgacaaccctga

SEQ ID NO: 92145 - DNA, 1278 bp, Enterobacter aerogenes
atgctgcagattgcactgcttttatgcggccgacgttttatcggtggcaaccggtaccttcttactgctgcaggtctgatttggggtcttttcggttttctggtactggcggacggtatgctgggagcacgctattttccgctcggactttttggctggtttcttttgtgcgagagtctgttaacgcttgttgcgtcatccggtgccaccggggctaagcgaggaatttatctgtttaaaggtgggattattggagccgtggccctgcttattctgtcaggatattcaggcagtaatctcctcctggctatcatactgggatttatctgtttgttgtccggcgcttttcaggttgctgccgcctgggtggttcgttatccgtactggagacgcgcgctggctggcgggatgtgtcagatcctgtatgcggtattccttttccagccctatcccactcatcatgatggaacggttcctcagttcatcggggcgctgatgctgctcagtgccgttgactgcattctgcttgcttttcggctccgaagtctggccccgggggtgactatttttgatgtccagtctccggacagcacaggatacgcgccgacaaatacagaaccacagcatccctgtcaggaagaagtggcgttggaagcgacagagctccgtgttctggtctggacaccggaaggttctgctacccaggacactctcccccggccagtgatgaatcgctatattgcagcagtggattctgccggggtcatttctaccggacatgccgcgctggagatgcaggatatctatatcagtctttacccggcagtggatatagatcggtccccttcggagttttttcgcacactccgggccgtacgggagaataatgtacccggaaaatttcaggacagttacgcatcagagtccgccgcctggtgtgaagccgacagacaggtttgttttcatactttcaacgcggtatcactccgggcattcactacatactatcgccgccaggaaatatataaccttacctggcgaaattgctccagcagtgtggcatacgcacttgaagccgcgttagatggtgtgctgtgcaaccggagcggctggtcagtttttttacggatcttcttgcagccggagctctggatcgcagcacaactccgccgccgtgccactaccatggcctggacacccgggctggttctggattattcccgcgcattgcacgggctggttcacccggccagactgaactggtttcgcaaaccatga

SEQ ID NO: 92146 - DNA, 1275 bp, Enterobacter aerogenes
atgccgaaacgtatacagattgcagaaaaaaactatcttcctgccctcattatctggcccgtcatttatcttattctggcatttatctctctgaaactggacgatccgcaaaatcgtgtagcgatggtctggtttcctgccggggcagctgtcagcgctttcctttctctgccgcgacgattctggcccgcaatgtatatcgtgctctttgctgcccgcgcagggatggatttgctgatgcgccattcttcggaaacatccctgatactttccctgatttcagtcagtggtgactttacagtggcgctggccgtacagcactacagtcgtggacaggatgattttcgtaaggtgtgtgtctggctaatcagtactcttatcatcagcgcgctggctggtatggcagcagcaggatggctgtcttcgcgtcatcccgtgtcttttgcggataccactgctttgtggtgggcggcaaatgtcagcggcaacatcgtcgccactaccatactgacaggtctgacatgggagccagccaggaaggcaacgggggacgtcgtaaagagcctcgccagcgtgctgttggtcgcggtgattgccatactcattttctcttccccttccggggaagagtcccgggcggggctcatttacggactggcctgcttgccggtcctgttgactgctgtcgtcccggtcatcgccggtgcccaggccggcgcgctggcttttctggcactgagcatcgttgtggtttccttttcatggcaccagacaggccccttttttattaatggcctggatccgggcgaaccgctgcttctcgctcagggatacctgtccggtacggccatcctgactatctttgtccggctgttactgcggttgccggataagctaaacggtccggggcgtaagcagatgcatcacgaagaaaccgcctttcgcatggatatccgaagtggccggatcgactgggatctgcagggaacaccggtgctggcagatacggtggcacacctgcctgacagaaaaatcctgctccagagcgtggatactgctgtcaggcaacagttaacatcacgctgggaacaggcaatccgcggcctgcccgtaggcggatcgttgatattccggcttacattgccgggagatgaacacgtaatgatctgcgagcggggactattctttttgcccggtacaacaggtggattcctcgtcggatactggttacccgccagtggtccggtttccgttatccgtccggaggaccactga

SEQ ID NO: 92147 - DNA, 336 bp, Enterobacter aerogenes
atgctgaacacgtggatcatcctgattgtggccatcgcggccgaaacctttgcaacaaccatggtcagagcatcagaaggattcacacgcctgcttccttcccttggggtcgtcgccggttatgccgtgtcattttacggactctctcaggtcgttaaggtcatgaatctggggatcgcttacgcgatatgggccggcctgggcatctttcttgtctccattttttcctggtttctcttcggccagaagcttgatcttcccgccattgcagggatgggcttgatactgtcgggggtggtggtcattcagctgttttcctccaccgtcacgcactga

SEQ ID NO: 92148 - DNA, 135 bp, Enterobacter aerogenes
atgaaaaagtcacgattcaccgaagaacagattgtttttgccctgaagcaggctgaactggagacgtccgtgccggaggtctgcggtaagcagggcatttccgatgccacgttctatacatggcgcaagaaatag

SEQ ID NO: 92149 - DNA, 456 bp, Enterobacter aerogenes
atgctcaggcgggagggcttgcgggataatcataaacgcatttaccgactctacagcgagcaggggctgtccctgcgtctcaaacgctcacgccggaataaatcggcacagcgccgacagccccagcctcaggggctgtatccgaatcatgtctggggcatggactttgtctctgatgccttatttgacgggcttcggttacgtctgctgacagccattgatctctacatacgcgaatgtctggggagctgcgtgggccagaatctgcgctcaacggaggtcgcagagatgctgaacgccattgtgctcagacgtcccttaccacagttgctgaaaaccgataacggctctgaatttgcagggaaaatgctgggcaagtgggtgtatgaacgagaactggttcatttctctggaggatgcacagttcaaaatcgaggcctggcgcatacactataa

SEQ ID NO: 92150 - DNA, 537 bp, Enterobacter aerogenes
ttgcaacttcaatctacccgactatatcttcgccccgtaacgaagtctgaccttgatgaccttttcagaatttatggtgacccggctacgaacacctttaaccccgcagggccctatcctgacatacatcatgctcaaactgttttagctcaatggattaaccactgggaaacccacggtattggaaactgggcaatctctttgaaggatagcccggaaaaaatcattggctttggggggctgcgtatccgtagttatgcggatacagtaattaataatttagggtatcgtttcgccacagaggcatggggaaaaggtctggcgacagagttctcgaaaaactctgtccaatatggattttgtaagttaaatctgtccgagatatccgccgtagtgagagctaaccacctggcatcgcagaaggttctaaaaaaaactgggtttcaatatataaaagagatttatgatgtgaaagatgcaccgccgagtctgattttttccctcaagcaaagtgaatggttaagacaaccaatgtga

SEQ ID NO: 92151 - DNA, 162 bp, Enterobacter aerogenes
atgcaacttggagctagacacgccttgactcaggagttccctgatggaataccatttgccattggccatttccactcatttcccagcatgaagaacgaagagaggcattactaccatctggatcaaaagtccggtaatgcaatattgcgaaattatttctaa

SEQ ID NO: 92152 - DNA, 678 bp, Enterobacter aerogenes
atgtgcggacgcttttcccagtcaatgacccgtgaagattatctttcctgtcttgccgatgaagccaatcgtgacatcgcatatgacccggagccgattgatcgatacaacgtcgcgcccggtaccaaagttttgcttctgagcgaacgcgatgaacaattgcatatcgatcctgtcttctggggttatgcgccagaatggtgggataaaccacctctgattaacgcgcgtgtcgaaacggcggccaccagcagaatgtttaaccctctctggcaacatggccgggcgatctgctttgctgatggttggttcgaatggaagaaagaaggcgacaagaagcagccctgctttatccatcgtgccgatggccagccgatattcatggcagcaatcggaagcacaccatttgaacgcggagatgaagcagaaggctttctgattgtcaccgcggctgcagataaagggctggtagatattcacgaccgccggccgcgtgtactttcaccagaagcagccagggaatggatgagacaggatacaggagggaaagaagccgaagaaatagctgcagacggttccgtgtcagttgaccattttacatggtaccctgtttcccgggccgtgggtaacgttaaaaaccaggggccagaattaatcgaggctattgagcgcctataa

SEQ ID NO: 92153 - DNA, 933 bp, Enterobacter aerogenes
atgaccaaaatttatacgctcacgctggccccatcactcgatagcgcaacgctgacaccgcaaatataccctgaaggcaagttacgctgtagcgcaccggtattcgaacccggaggcggcgggatcaacgtcgcccgggccattacctttctgggcggtaaagcgacggcgattttcccggttgggggcgccaccggcgagcatcttaccgccctgatggctgatgagcaggtcccggtcgaaacaatagaaacccgcgactggacgcggcagaacttacatgtgcatgtcgatgccagcggcgaacaatatcgctttgtcatgcccggcgcggcgctaaccgaagatgagttccgtcgcctggaagagaaagtactcgcgattgagcccggttctctgctggttatcagcggcagtctgccgcccggaatcagcgtcgagcatctgactcaactggtaaaaaacgcgcagcagcacgggctacgttgcatcatcgacagctccggcgatgcgctggccgccgcgctggatgtcggcaacatcgagctggtcaaaccgaaccagaaagagcttagcgcgctggtacaacgcgacctcagccagcctgacgacgtgcgtaatgccgcgctggaactgatccgctccggaaaagtacgccgggttgtggtttcgctgggtccgcagggggcgctgggagttgatgccaccggcagcgtacaggtggtgccgccaccgatgaaaagccagagcaccgttggcgcgggtgacagtatggtcggcgcaatgacgctacgtctggcggaacaagcctcgcttgaggatatggtccgctttggcgttgccgccggtagcgccgccacgattaaccacggcacccgcctgtgttcattaaccaacacgcagaaaatctacgattacctttgtggccgctag

SEQ ID NO: 92154 - DNA, 654 bp, Enterobacter aerogenes
atgccttccatcgaaacgtttataactttccttctcgcgctgacgctgctggagatttctcctgggccagatatgatgctgactatcgccagaggtgtcggtcagggaagacgtattgcgctgcttacggtcctgggcaatgtatttgtagcaggttttgtgcaagtttcttttcttgtcctcgggctggtaaccgttgttcatgcctggccggttgcgctggatctgttacggtgggtcggtgcggcttatctgatgtggctgggcataaaaatgattgcgacttcaggtactgatacgcggctgcgaaaaacggcaaaaatttctgactggaatgccgttaaggaaggcgctctgaacagcctgactaacccaaaatccctgctgttcatgtttgcttttcttcctcaatttgttgatcccgcagcgggtccagtttggctgcaattgcttgtccttggcagtatccaaaagctggcaggaatcgtgtctctggggtcagtcgcgatggcatcaggcacatttggtaactggctaggtaaacacccaggcgttatcaaatggcaggaacgatttacaggtgttgtcatgattggcctgggtatccgcatgttgtttagcgggtccggcatagtatcaaaatctatccgttag

SEQ ID NO: 92155 - DNA, 540 bp, Enterobacter aerogenes
atgatttttcagcaggcacctcagctagagactgagcgcttaattttaaaacatttcacgttagaggatttttccgctcttcaggcatgctgggctgatccagaaatggttaagataaatggcggagaagttcccacggcagaagcagtatgggcccgcttgttacgttacataggtcactggcaagctttaggttatggatactgggctgtttttgaaaaagcaacacatctttatattggcgcgtttgggtttcaggatgcgcatcgcaatactgagccaacattaaaatatccagaagcgggatggagaatcatcgctgaaatgcgcggaaagggttacgccaatgaagcattggcagcgattttaggttgggcagaccagacatttacctccccggtatgctgtattattgcggaagaaaaccaacgttcaaattatttagctgagcgatttggttttcaataccagagccatgttacataccgtaataaaaatgtacgcctgttaatccgtccgaaattcgctattcagtcttaa

SEQ ID NO: 92156 - DNA, 645 bp, Enterobacter aerogenes
atgtttgctgattttggtatcgtgaatttctggacgtatctgcttggtgcgacactgatagtgcttgctcctggccctgagaccatgttcgtgatcaaaacaagcattacgagcggcgtcaaacaaggctttgctgcaatattttccattctgatgagtgacgtacttctggttctgctggcatggtgtgggctggccgcagtcataagctcaactccagccttatttaacgccatcaaatacgcaggtgctgcctatcttttctatctcggtgtccagacgatacgcgctatctttaagcccactgtcgaaacgagtgaggaaaagaaatcttcagctgatgctaaggggattatcgggcgtggaatgctggttacgctactgaatccaaagacactgctgttctatatctctttcttcgcccagttcatcaatgttcaggctgaacattcctggatggcgtttatcattcttgctgcggtaatgttcgcgattactcttgtctatttcggtttccttgttttctgcggctcttatctgctaagccgtttgaaaggcaaccgtagattatcaaccattggaaacgcgctggtgggtatgttcttcatcggatttgccgcacgactcgcaagcgcaacttcctaa

SEQ ID NO: 92157 - DNA, 696 bp, Enterobacter aerogenes
atgttaattatatttaatggtttacctggtagcggtaaaagtacagttgcaaaattgttatcccaaaaaattaatgctgtgtatctacgggttgatacggttgagcaggcgattcgttcagtatctgaacagaacaaaaaaattggccctgagggttattttgttctttatgagttggcgcgtgaaaatctacagttaggggctactgttgtcaccgattcggttaatgatatcaatctgatacgtaatacttttcgtgatgtagcgatatcgttaaatgttccgttcttagaagttgaaatactttgttcagatatgacacagcatcgttatcgtgtggagaacagaatctcagatatcccggggttaaccactcctaactgggaacaagtacaatgccgtaactatgaaccatgggaacgagagcatctgcaattagatacagcaattttatcagcacacagaatgtgtcgatgtaattatcagaagaatatcgtccgtttgaaaaggataatggcaacattaagtagacgacggttaaacactagcgtctgcttttcgctcaaagcgggcctggaattgaaagcagatgggctaactaacacatttctgcacagtgaatgggcggtcatcgttaactctcagatcttcaacgtatcaatgaccatccgcagggcaggggagacgttgcgatga

SEQ ID NO: 92158 - DNA, 513 bp, Enterobacter aerogenes
atgagcaacctcgggatcagatataactatggctctatcggaattattattgcccatgaaataagtcatgctctcgacgatgaaggttgctattttgacgaaaatggaaatttaaacatgctatggacacaacaggatgaagctaattttattcaaaaagcaaatgtaatcgctgatttttacagcaatatagaagtccttcccggaaactacattaatgggcttctgaccaagggagaatgcttggctgatttatctggttgcgatattgcctggaaaacgcttcagaggctgtctcaggaagaaactagtgaattacgtgaagctttccagaccagtctgttaatgctctggcgtgaatatgcctctgaaaatatcatgcgtaagttgttaaccagcggtccccatgctcctgcacgctttcgtgcaataggatgtcttcattatcttgcgaggcgatattccggagacgaaagcgtgaatcaggggattcaggcgattgaattattttaa

SEQ ID NO: 92159 - DNA, 1218 bp, Enterobacter aerogenes
atgaatgccctggtaggaaagccatggctgatgttacttggtatatctttcattatttcctctgtcgggaatggcattacctatattgttgtttttagcgaactgattcggctcgctgccccgacaacctcccttgctttagcgtatgtgctttcaactgttcctggcttaatcggaagtaaggttggagagtattattgccgtactggcaaccctttctccattcttgtcgtgggcgaatttttaggcatggcaggcttgagcgccccttttatggctgtgttaaacggctcaattcctctttttcttatcgcacaaaccgtgtcagccttcatcatcggcatgacgttccctgctatgagtaagatatttaaaaccgggttaagtgaaaaggaattacccgttgcgaccacactggaaaccattatctttgcatgtaatgttatttttggtgttggactgggtttgttactattggggcatgttaccgtaatacacctgctgatcattgacctggccagctacgccctgtcagtcatcatgctattgagcgctaaaggcaagttcaggaatattttccattatatagaacaaaaagatgcagttataagatggaaagaaatcagtaacactcagaaacgaggtatcctgctattacccctattggcattcgcaggagccccggcgatggcgttactgccagggctggttccaacgaatcttacctgtcatgaagctcaagcaacagctttggctcttcttttctctcgtagtttagggcaactcatcggcccgttactgcttaatcctgagcgttttgagaaaaatagtaataataatagcctgctattgggatgtctgtttatttttgtggcatgctatggcctgatccctttttcaacctcatcttacctggcattggcactggtctttattgcacatattttttcaaatgttgttttctcgctcgcggtatattcagtattgaaaaaatttgatgaaaatcatgtggctgctgctatggctaagagctaccgatggcagatgatgatcactgcaatagtctctataggtgccgggtatagttcggattaccttggggtaatatacgcgctttatgccttcagtggctcaggctttttgctaattgtaatcttctcatttgtcgaaaaatatttttctccaaagacacggtcaaacaacctcgagctggaatag

SEQ ID NO: 92160 - DNA, 843 bp, Enterobacter aerogenes
atgaatactttacaatcgactgaatggcttaagtacggtataaaagacataaaataccgtaaacaagtcaaaatgaatgatccattaattacattcgagccggccttcgcttcagaggggcaaactttagtcgtcgcggtacgcgagtctgatgtaatacgggaaacgccaaatcaccatcacagctgtggacagctactcggttcgaggcatgggctactcacggtcgatgccggaaattgtcgctgggtggtaccggcgacacatgccgtctggatacctccggatgttccgcacggcctgcgctcgcatggcccgtattcaggatggagtgtttatgtatctgcccaagcctgtagcggactacctgataagccttgtgttctctcaataacaaatctgctgcgtgaagcgataacgcgagcggcctcatggaaagatgtaaaccttaacgcgtcccaaaaacgtttagctggtgtcatccttgatgaaattggctctcttcctgaggtcaacctggggctttcaatgccccaggatatccgactactcagaattgcgcagacactgtcagataacccggacgacgaccgcaggctcgaggaatgggcagtctgggccggaatgtcatcacgtacgcttacacggcgattccgtgcagaaaccggttttagttttaatgaatggcgacaacgcattcggttactcaggtctcttgaacttctggctgcgggtaagccagtgacggcaattgctctggaccttggatatgataacgtgagtgccttcattgccctgttccgacggatattcggcaccaccccgggacgttttaaaatttaa

SEQ ID NO: 92161 - DNA, 393 bp, Enterobacter aerogenes
atgaaaataatgactattactaccgtgctggatgaaattctcaatcaacaggaggtgccactggacctgatactcaatcgtcatttcagtcccgtttaccgccagcgtactaataacgagtgggaaggtttggatggctttgctcagcatgcacgtaaactccgggaaatcatcgcatccggcaaaatagaagtttgcgatgagcttcgtgacgggaatctctatgccaccaggcatcgcgttttgtgtaccaagcataatggtgaagaggtggatatggaagtttatatgttcgctgaaacagatgatgacgggcgctttattcgtgtcgaagaagcgacgctaatgcttcaaggtgtggagagcgatcggggtttaggtaacgtaaggtaa

SEQ ID NO: 92162 - DNA, 1602 bp, Enterobacter aerogenes
atgaatgctaccgaagctatcgaccaactggatccccaaaaatggaccacaacatctcccgcagaacgtttgcgtctgctggaggaagtccgtgcaaacctgaagaagtacggtgatgacctcgccttcgccgacagcaagatgaagaatggcatcctcggtgcgcctcttttttcatacccaatgtctaaggttgctaccgtcgttcctatggcgagtaccgtctcggcagccatcatcctttatgaatccattctcgacggcaagatgccacagccgctgagtgtggaaaaagtgagtgaggatctctacgacatttatgtctttccgcaggagcggaaggacaagttgatgtacgcggatcagaagagtcgcatccgtgtgaaaggcgcaccgaaacaaatcaatccgatggaaaagcccgcgggtattattgccgtgctgggtgccggtaactacagctcagcgctcgaggtgttgaaagcgatcttcttcgagaactgtgcggtcgtacacaaaccgcatcacctgaacgaagaaaccgacaggatttgggcaaagatcatgcagccgctgattgatcggcgcgttctgagcttctgcgatgccgatcggggacatgatctgacagtagacccccgcctctcgaggatctactttactggtggaaccgcgacggccgaggctatcatgtcagcgacagagacgccgctgatctccgaatgcggcggtaataacccatgcatcatcgtgccgggcgaccggccatggacaaagaaggaaattgagcaccaggcagtgcagatagccaccatggcaaagttcaatggtggcgcgaactgcggtcgtccccaaacactggtgacaagcaagcactggccgcagcgcaaggaattcctcgacgcgctgcgggtcgctatctcggagactactccggccatgggtatgtactaccctggcgccgacaaggtcgtggatggttttcgacaggcctatcccgatgcggaagtactgagccccgagggcggcaagtatccgcataccgatgtcatattactcacagacgttgagcccggtggctacgccacttcacatgaagcgttcagcctggtgctcgctgaagtgccgcttgacctgccagccaatgccgcgcactttctccccggcgccgtcaagttcgccaacacccagctcctgggcacgctcgccagtgcgatacttatcgatgaggacaccagaaaggcccatcagaaattacttgagcaggcggtgtctgacctggaatatggtgcggtcgccatcaacagcatgccgtccttcatttttctcaacccctatctgacctggggtggaaatgaggcaggcaagacgttcgtttctggtcgcggcaactttggcaacctactcaattacgagaacgttgagaaatcgatcatggaggcaaagtttatgtcaccagggcacatgctctacaccaacaagcgagcgttcgacaatatggctggaaacatggcgaatttcgcagtcgagcctacctggatgaacctgacctgtctgatgggggacgccatccgcgatagcttccgtaaaaaagatttctga

SEQ ID NO: 92163 - DNA, 321 bp, Enterobacter aerogenes
atggcgctggtgccggccatcgcgctggggatttttgtcgcggcgttcgtgccgatggcggcggtatttccggcgctggagccggagcataaaggggcggcgatttcggtctacaacctgtcggccgggctgtcgaacttcctcgcgccggcgattgcggtggtgctgctgccgcacttcagcaccatcggcgtggtggtggcctataccgcgctctatctgctggcgttttgtctgtgcccgtttattcgcgttgagcagcctggttttgctaccagcgaagcggctgaaccgctgaacgtcagcacagcaaaatcataa

SEQ ID NO: 92164 - DNA, 1128 bp, Enterobacter aerogenes
atgaaagttaaagtactgtccctcctggtaccagcactgctggtagcgggcgcagcaaatgcggctgaaatttataacaaagacggcaacaaattagacctgtacggtaaaatcgacggtctgcactacttctcttccgacgacagcgtcgacggcgaccagacctacatgcgtatcggcgtgaaaggcgaaacccagatcaacgaccagctgaccggttacggccagtgggaatacaacgttcaggcgaacaacactgaaagctccagcgaccaggcgtggactcgtctggccttcgcgggtctgaaattcggcgacgcgggttctttcgactacggtcgtaactacggcgttgtttacgacgtaacttcctggaccgacgttctgccggaattcggtggcgacacctacggttccgacaacttcctgcagtcccgtgctaacggcgttgccacctaccgtaactctgacttcttcggtctggttgacggcctgaactttgctctgcagtaccagggtaaaaacggcagcgtgagcggcgaagatcagaccaacaacggtcgcggcttccagaaacagaacggcgaaggcttcggcacctccgtgacttatgagatctgggacggcatcagcgctggtttcgcgtactccagctctaaacgtaccgatgagcagaacaactctacttatttttctaagtcctatcagcgtacatacggtgttctgggtgaaggcgatcacgctgaaacctataccggtggtctgaaatatgacgccaacaacatttacctggcgactcagtacacccagacctacaacgcaactcgcactggcgacatcggttttgctaacaaagcgcagaacttcgaagtggttgctcagtaccagttcgacttcggtctgcgtccgtccgtggcttacctgcagtctaaaggtaaagacatgggccgttacggcgaccaggacatcctgaaatatgttgacctgggtgcgacctactacttcaacaaaaacatgtccacctacgttgattacaaaatcaacctgctggacgacaacaagttcactaaagatgcaagcatctctactgacaacgttgtggctctgggcctggtttaccagttctaa

SEQ ID NO: 92165 - DNA, 144 bp, Enterobacter aerogenes
atggtgctgagagctccccggcgcgcgatgctctccggggcgggaataaagtttcagaatggcccggaaacggcggctggccgccatccgggaaaagtgaattactctttatccgttgaggtaagagaaacggaagagaggtag

SEQ ID NO: 92166 - DNA, 255 bp, Enterobacter aerogenes
atgaaggaacatccggacaaacatatcaggaaggcgattgctacggcgctggcgcgagggtggatattgcttcctgcaggtaaaagcgctcattgctttggccgactcgtctgcggcgtggctgaacaccgtgaacatatgatgagcatttggtcgacgcccgccgtccctgaaaaccacgcccggcaaataatcagaatggtcgaacggtgtcccatcccggctaccgcgcgcaccatgcataaggaacgctaa

SEQ ID NO: 92167 - DNA, 984 bp, Enterobacter aerogenes
atgacaccacccgtttcaggtatgtccgatcgccctccggggactggcccatccggcgcatccgccgtgggcccaaacgcgctcaccatgcagcaacgcaccgttctggagcggctgataacgcgtctggtgacgctgacatcgcagcaaaacgccgaagtgtgggcctgcgtgaagcacgatctgggtctgaaaggcgacacgccgctgctggcgagccatttcagcgcggctgagagcaacctgaatcagcgcttaagtatcgctcagcaaaaccaccaccatcggcaaattctcgcccagctcagcgaactgctgactcagggaaataaccgtcaggcggtgagcgattatatccgccagaattacggtcaaaccgtgctgcatgcgctgacccaggcgcagctggagaacgtgctgcatctgctgcaaaacggtcagttggcgatcccgcagccgcagcagcgtacgccgacgctgcgccctttgctgccggcggaacataacaccctgaatcaactagtgaccaaactggccgccgcaaccggcgaatcgagcaagcttatctggcaatcaatgcttgagctgtgcggcgtgaaatccggcgaactgatccccgccacccacttcaccccgctctcgtactggctgcaggcgcgacaaacgctgagcgcgcaaaccgcgccgacgatgaattcgctgcaggcagcgctcaagcaaccgctggaggcgcaggagtggcagaaaatcgccgatttcgcgcaaagcagctggcaggtgacgcccacgacgaccttaaccagcccgcaggtgctaacgctattaaataaggtctttgcgctacgcgtggcccgcgcccaggcgacaatggcaattactccggtcgagccgctgcccgccccccatgcggtgtatagcaaaaaagcgtggacggtggcgattgccctgctggtggtgattattctgctgtggctggtgctgtaa

SEQ ID NO: 92168 - DNA, 549 bp, Enterobacter aerogenes
atgcaacagcaacaccattatcagcagttagtcgagatcttcgacaagtgcttcgccgatgattttaatacccgtctgattaaaggcgacgacgaaccgatctatcttcctgcagatagcgaagtgccctataaccggattgtgtttgctcacggcttttacgccagcgcgctgcacgaaatttcccattggtgtatcgccggcaaggcgcggcgcgagcaggtagattttggttactggtactgcccggacggccgcgatgcgatgacgcaaagcaagttcgaagacgtcgaggtcaagccacaggcttttgactggttgttctgcacggcggcgggatttccgtttaacgtcagctgtgacaacctcgaaggcgactttgagcctgaccgcatcgcctttcaacggcgcgtacatgcccaggtgatgacctatctggagcaagggatccctgagcgaccggcacgctttattcgcgcgctgcaacagtattatcaaacgccgccgctgacggcagaacaatttccgtggccggaagacctgcactaa

SEQ ID NO: 92169 - DNA, 276 bp, Enterobacter aerogenes
atgaacgagaagcgcagcagaggatcgaccaggcgcgcaatgatgctcttgatgctgccgctcgcgctggcaggttgcagcagcagctcgttgccatccgtgagcagctcaggcagtataacgccactgtcggcgctgggtcgtcagccgcagacaccggaattttgcttaccgacgtgttcgaaaaatctctcgaacgaaaccgacaactggcagaatacgctgaccgggcagcagaagccggaagggtctgcgaaaggcagtacgatcaactga

SEQ ID NO: 92170 - DNA, 630 bp, Enterobacter aerogenes
atggacattaatcaattccagaaagctgctggtattaacctggcgctggcgacacgctggcattctcacattgttgcagccatgaaagagtttggcatcagcaagcctgatgatcaggcaatgtttattgcccagaccgggcatgaaagtactggctttacccggcttgtagaaagtttcaattacagcgtggccggcctggccgattttgtccgcgccggtcggctaacgcagggtcaggcaaactctcttggccgccggcagggcgaaccatctttaccactggaacgccagcgcgcgatcgccaacctggtgtacagcaaacgcatgggtaacaacgggccaacagatggctggttttaccgcgggcgcggacttatccagatcaccggcctgaacaattaccgggactgcggcagcggcctgaaggtggatcttgtgcagcagccagaactgctggcgcaggacgagtatgctgctcgcagcgcggcgtggttcttcgctaccaaaggatgcatgaagtacaccggtgacctggtgcgcgtcacgcagatcatcaatggcgggaagaacggcatcgatgaccggcgcgcgcggtacatcacagcgagtaaggtgctggcggtatga

SEQ ID NO: 92171 - DNA, 306 bp, Enterobacter aerogenes
atgacaggtcatgatctgttgctaataaccaatgcccttatatgcgcaggaattgcgttcagggtgatgttcttccaacgcaacggatcgcgccaccgccggtggggtggatggattgcctacttcctgattgtgtcggccgccagtatcccggtacgagccatttactcacttctctatcacttccccatgaccgcagatctttctgaggtcgttatcaatgctgtgatgctggctgccgttctgaaaactcgcggcaacgtcgtgcaaatattcaaaatatcgaggtctcaacatggacattaa

SEQ ID NO: 92172 - DNA, 261 bp, Enterobacter aerogenes
atgaaaggcacagatactaagcaggttgattatttatatcgtggaattatggattatttcagtggcatgtctgggctggacataactattgagcaaatttcggcaagggacaagtttattgcggatagcgccatagtttgtgatgactctttagatgaagaggttattagtcttcatgatgagttcgtgtcagccgatggggatccgttaaagcagaaagaaattatagagaggactatagcacttcttcacccttcataa

SEQ ID NO: 92173 - DNA, 2388 bp, Enterobacter aerogenes
atgacggtctcaaccgaagtcgaccataacgactacacaggtaacggcgttaccacgtcattcccatatacgttcaggattttccagaaaagcgatctgatggttcaggtagccgacctgaacgaaaacatcacagtgcttacgcttgacactgactacacagtcactggcgctggaggttattcaggcggtgcggtggtgctggcgtcaccgctggcaaatggatggcaaatctctatctccagggaccttcctgtaacccaggaaactgatctacgcaaccagggtaagttctttgcagaagtccatgaagacgctttcgataagctgacgatgctgattcaacagtgctttggtttccttcgcctggcgctgcgtaaaccatcattcattgctaactattacgatgcgctgaacaacaggattaagaatctgcgtgacccatcacaggatcaggacgctgctacaaaacattatgtagatgacagcgttgcaggttcaaattcgcatgcagacgatttattcaagagaacgctacgtgttccagaatcatctgttcagcccgttccatttcttgatattcgaaaagaaatgttgcttgggtttaatagttttggggatccggtagcaattgcagggcaaacagagacggcagatctggcattaaagttggctgcatattttggcacatcccttattggcatgccgttatcagggaacctatttgatctcgttaaaaacatggttacaccagcaatgtttcatgcaaaggcgggtaatacagataacggcggcattggatttgcacacgataattcattgtgtttccagaaaatgtttaacgctgtacgtgataacggcggcggattagtcatcattgatgatgagtattgcgttgatttttgtcttttcccgcacactaatacaactgtgatgtttgcgggaaggggggctatgcagtttattaaccctcgttctgcaacaactggtaggggtggtttcataatcgggagtagccgagaatttaactttgaccaggcatggagcttatatcagtctggtaattatccaggctcgattgttaacgcttcgttcactgatccagcacagaaacaatatttgcgtgataatcagcaatttgttcaggctgagcgtgttaatttcatcaacccagtaataaaagcttattacactgactctacttattggggcgggtttgcaattaactgtgtgaatgctcaacacatcagaatacttaatccagtatttaatggatggactgaaggtgtcaatgtgggatctgacgttcctccgaatactccatcgtgttatgacgtaaaaattcataacatgcgagtcattaaagccgatctggttagaacttattacgccggatttttcttcgcaaactcaacaaactgcgagatatcagagggatcgttagaaacccctctgacagcaggtacaagcaacggtagctttggtgcgacaaacttcactgaagattgtgtgattagagatatcaacgttcctaatctggggcgtactgtatcttctgaaggcattttgataaacaacactaagggttgtttggttaaaaacataaaaatgggtaatgcgaaatctgccgtaagtacattttatgtagatgcaacaactaatgatgcaaataacccaaactttatagacggggttgaggcgaacaattgcgaccaggctctggctgtaactggtaaatacgcattattttctaacgtaaaagctgtcaactgtctgcaggaactgtttttcagaaatgccaatgcaacaggaaacagatttaaaagcaaaccagactcgatcactatcagtgattcaagtgcaaaccttaaatattggtacctgattaacaatacagttagtggctggcgtagaaaatatacatggttacgcccccttgatattttaaggacgccattcgcttcactatcttcatggaattctaataattcggtgaaatttaatagtggggcaacgggtacattcctctataaaatacctgaaagcatgaatgcagtgtcagggtttactgcttatggagactttagcgttggcgctgcagcggctgctactgattccgtatgtacgatagatgttatttcaatggcagctgtagatgggaaccagacggcaccagtcattcttcttaccgcatcagtttctgcgtattctaatggcgatggaatatggtcactttctgcagatgttcagtccacatctcctggctatcttccaatggaaggtgctgcgagtggggtagataataccatgtatctccgtgttacatattcaaatggtgtagcaaacaacaccttaaaagaaattggtttacgtcactatggagtataa

SEQ ID NO: 92174 - DNA, 261 bp, Enterobacter aerogenes
atgtcgcagcggtaccatcaccctcttgaagaaggtttcacggagcgaattcacacgcctgctggcgttcgctctctggttgagagctcgcatttaatggatttactcagggagctggacaaagacggacacgatgtcagcggcgcgcttgctgaacttgttgcacttattaactacgttacaagctctcagatgtcgatgcgtgatcttcaaacgcaccttgattactgtgcactgcaattgagaaagcaaaccaaataa

SEQ ID NO: 92175 - DNA, 681 bp, Enterobacter aerogenes
atgaataccaaaccagcagtattttcattcgagtcaaacagcaacgttcgcgccataagtattgatggtaacccatggtttgtggctgctgatgtctgcaaagctctgggtattaagcatactgccagtgcaatgagatcattagatgatgatgaaaagggtgtgcattcaatgcataccactggcggccaacaagatttcaccatcatatctgagtcaggcctctacactctcatcctccgctgccgagacgcggtgactccgggcaccatcccctaccgattccgcaaatgggttaccagtgaagtgcttcctcagatccgcaagacaggccgttacgtacgggaggagctatcaccggcggataaagctcagaaggttgtggccagctttatgccagccatcctggaggcaatgaaggaaggggataagccttcatacagttacccactcaagccgggataccgtgagatgatccactgccctgagggtgttgttggcctggctgagaagtcactactgatgaacctgctgcagcagcttgatgaagacggccacgacgtcgccggcgcctcggcggaattcgcaactatggtgagctatattgttggtgttagccgctgtctgcaggacatacgcagccacgcgcagtacatcaacaagaacgcctctgagttctga

SEQ ID NO: 92176 - DNA, 540 bp, Enterobacter aerogenes
gtgttaagtgaagatatgcaatttgccatggctgtggctcagatagtaagtgcagtcgcggtttcgcttggtttgttcatcgctattgctactattatttataatgttaataccgcgagaaaggtacatacctctgtcttccttggtgaaagcaggtttgatgtagattacaagaaaggcctttctacgatgcgacgcattcatgaatcgaacaaagcatttcgctcttacatgtatccaagcaatggacaggctgatcttacagacgaagaaaagaaagagaagagagagatcatctactgcttaggcttctacgaacgtatggctgtaagcgtgaagcgaaaaacttatgatgaaaccatgattaaagaggttttttacagttccgtagtaaataactatcagatttcactgcctcttatacaagccattagagaaaaagaaaatagaagctcatactttaaagaatatgaatggatggctaagagatggaaggattgccctttgaaagataaagacccatggtacaagttttggtaa

SEQ ID NO: 92177 - DNA, 342 bp, Enterobacter aerogenes
gtgtcgcgtaacatttccaaagtatacctaatgcgcaattttattattttgttctgtcttgcattgccatttacagcatcaggtattgttgtgggcggaagcaacctgggattcagtggctatcctgagttctcagaaattgctccgacgccaccatattctgatgatcagtatgcctgggacagttaccggcgcgaagtggctgattacgcagagaaggcaaaacagtatcttgaggatgcaaactctgacatgaaaaggattcaagaggcacaacaggatgctatccaaaaagctaacgatgttgtagaagaattcaacaggaaggctaaagggtactga

SEQ ID NO: 92178 - DNA, 2766 bp, Enterobacter aerogenes
atgaaacaggcatgtgttgaagctattgcacagacacttggccgccagcctaaggctgacgagctgaaaaatattgaggaccgtatcaaagaggcggtgcgtgacgttcatcgtaaaaacgccagggaagggaaatccgggatccctgatgctcaaacgtatatggaggctgccgaccttgttcgccagcgcgtagtgcatgacgtctataagaagcgccagcgggtcgcacagaacgcgatagccatcagcaaggtaacagatacccttgatgccaatatcccgccagaacaacagacaccggctaatttgcagcagtttatctttgccggtcggcggacaaaaatatttggtgatgatcctgacatcaacgttacatctgccgaggagctggcaaccggtgcatatcaggactggtcacgacaactcagcgctgagttgctcaaagccggtgacgatgtacgcaaattctttgagcagagtaaggcgcttggcgagcagcgtttccgtagtctcttcgaccagcaggcggctaaatcagcacagtttcagatcctgaaggagctatacggcgaggatacaggcaacccgcaggcgaagaaaatcgcacaggtatggaatgatgtcaccagccgggcccgccaggagatgaacgacaacgggtttgatatcggcctgcgcgacgactggcacctgccatacgtcgatgatgcggattttatccgtaacgccgggcgcgatgaatggctggcctcactacctgcagccgagcgcgcaaaagcgcagttatctggccgccagccgccgattgaatttgcccgccaggcgtgggttgatgatgtttacaacacgcaggatcgcagcaactacgttaatccggacggcagcccgatgaatgatatcgagtaccgtcaggcactggaggctatttttgaaaccaaagctaccgatggtgccaataaaatagagcccggcgcttttatgggtaccggcggcattaagaaccgcggatcgcaaagcagggtaatggcatttaaagacgcacagtcccacttcgcgtatatggaacgctacacacagcagccggtggttggcgtaatgatgtctcacctgcagtcgtcatcacgtgaccttggcgttgttaaagcgtttggcccggatgctgcccgcaatttttcactggttctcgacaggatttatcagcgcgcagtaaccggcggtaaagaagtcggcaagatgaatgatgagcgccagatggtagagcgtatgttcaactcgatggccgggcttaacggtgcagcttcatcaagcgtgttcacgtctgctgtcggtggcctgcgcaacctgatgaccagcgctatgcttggcaccagcgtactgacggcgacaagcgatcaggccattatgcgcgctaatgctcaggctctcgggtttactcgaaatggcatgcatctgtctgcaaatacaatccgtaatctgttcagcggagacgccaaaaaagctaacgcagagttaggcctgctggtggacgctcatgctgctgtcatttctaagatgggtggatttgacctgtctcgcggcattaccggctggtttgctgagaaaaccctgaagtggtcagggctgattgcaatggaccgcgcaaacaaagcgtcattcggcctgctgatgtacaaaaacatcggagaattaacccgcaaatttaaaacgctggatgatgttaaaggctcagataaaaccattctggcaagtaaaggatggagcaatgaggactgggctataatggcggcggcagagttgaggccaatgacaactgccgggcatatgggcatgacccctgatgcaatttacgccgtcccggatgagaccatcaccaatattatggcagaccgcatcgcccaggttcgcgccggtagcgaacaggccttagccgcgcttggtgatttgccgcccgaacgcctgaaaaagatgaaacaggcatttgatgctgaagcagggcagaccatcgcccgtatggttcgcaacgcccgcgcagaagccgcgcagaaattactgggtatcacacacggtgaaatgaccagcgcagtgacgacggccaccgggctggatacctacgctcgcgatgatgccggtcagctgttaaagagcttcatgcttttcaaaaccacgccgttcgccggtttccgtcagttagttaaccgcacacgcgatcttgatacagtgccagctattaaattcctggcctcatatattgctggcacaaccctggccgggatgttcgcaaaccagatgaatagccttctcacaggcaatgacccgctggacatgacaaagccaacaacctgggtgcaggctctgctgaaaggtggttctttcggtatctacggtgatttccttttccaggatcatacgcaatatggatcgagtatcgcggccactatcggtggtccggtattaagttttgctgagcagttaaccaagttgctaatcaccaacccacagaaagcgcttcagggggaagaaacttccttcggtgccgatgcactaaaaaccgcacgcatgatcaccccgtttgcgaatctctggtatgctaaagcaataaccaatcacctgatcctgcaacaacttcaggagatggcaaacccgggatacaacgacagaataagggaccgcgcacagcgggaattcaacacaacaagttggtgggagcctggttctacagcgccacgtagagcgccggatttagggaaagcggtaggaaattaa

SEQ ID NO: 92179 - DNA, 1566 bp, Enterobacter aerogenes
atggcagatgtattttcactcgcgccagaaggccaggcatggaccgacgataaaaccgcggccaatcctgcgcgtcctgaagactatgaaccgacattcttccagggctcaattgctgcgccggcgcgtggcgttgctgaaggcactgtcggactcgctcagtctgctgtcggattcagcaaacgcctgatcagtgatccagcatttaccgccgatgttgcgccgacggtgaatatcttccgggtgatgtttccggatgccgataaagcgctgaatgacacctacgacacgatcggcaggcaactgcaacaggcgcgcggttacgttaaacctgatgcaggaagccagggaactgctgcggaagtcctgtacggactcgggcagtttgttccggccatcggtgcaacaatcgttggcggtcctaccgttggcgccgccacggcatttggctctacttatgagcagtcgtatcaggacttccgtgctaaaggcgtggatgagaacacagcacgcaacctggccgcgcagcaaagctcgttcaacgctgcgggtatggctttgcctgctgccgtcggcaccactctggcaacgcgcatcgcctctggtgtggctatcaataccggatttggtgggctcaaccggtattccgtcggcgacacgctggaggaaaaaggctacagcgaaatggcgaagcaataccgggtattcgacgggcaggcgatgctggtcgatgcagttttgggtggcgcattcggtggcgcgcatcacttggcctcgcggaatgctgatgcgccacctccggctgataccgaagctcctatccccgcggcagaggtgcagagtgttcctgaggcaactgcagagccatccaccttaacggaatccgcaccagtaactgatacaccaggcgcgccgatgcggtctgatgctcaggcacctgttacagaatctggctcagcaccagatatcccgaccattaagccaagcgatatcgatgcggctcataccctgaatgaggggctgtattacgatcttgaatcggcgccggtgctgcatgccagcaacgagagcataaacagccatgtggctgcaatggatgaagcgtaccggcaactgaatgacggccaacctgttaacgtcggaatgatggcgcgcggccttgatggaccggctcgccctggcatgctggacgcggcttctgagcagtacaatgcaatgcaacaggttttcgatgaaaatggtgtcaggtatgaaactcctgctgaattgacaggtgaagcgccggcaccgagacctgaaagctcttttactgcagcagatgaaactggcggtcaggtcagtgttgatccagataccggccaggcgatttcatcaaacagttatgacctgatggcggcccgcgatatggccacggccaatcctgaattgacgatcgcgcaccctgacacaggtcagccgacaaaactttctgatgttcttgctgaatttgacgagcagattaaaaccgtacaggcagactctaaagtgtattccgttgccgcggcgtgcttcctgaggaacccataa

SEQ ID NO: 92180 - DNA, 2535 bp, Enterobacter aerogenes
atgccagtcgtacctaccgtcaccggccgccaggtcgaaagccgcggcttatccacccagggatttcaggccgtaaatcagccaaacattaccgatgcgctgggcgccgttggaactcaggcgatcgacttgtttggtcaggccaaacagcgcgctgatgttgcaatggctcaggacgcatcactgcaactgacgcagaccgccagcgatctgatgactaacccgcaaaacggtctgctgaatcagcagggtaaaaacgctcttggcaaaggccaggagtacacccagttgtttgacgcaaaggctcaggaacttgcgatgactctgccagagtctgcccgccaggggttcctgcagcaggctcaacagcagcgcattcagttcacatcgcaagccgggcgccatgaaatcagccaattgaatgcctacgaacaggaccagtttcaggccacgctggctaccggtgccaaaactgcagcaacgatgtatggcgacaatgcaaactacgtcctggcaaaccagcaggctttccagcagatagatgatttcggcgcggcgcatggctggagtcctgaacagatccaggccaagaaaatagaattcaaagagaaagtagctgatagcgcgctttcacaatggtctgctgaaaactcaatcgcatttattcagagtaacggtgagttaagcgacacggtaactggttcacgtcgtgctgtcgccggcggtggtgaagcatcagcagatagcccgcgcggcgttcgcaacaataacccagggaacctcgaggcgagttcatcaaatccatgggtaggccaaactggtagtgatggccggtttgcaaaattcgagactccggaacatgggatccgcgcgcttgggcgtaacctgctgtcgtaccagcgccaggggattgataccgtcagcgacatcattaaccgctgggcgccgccgtcagataacaatgacaccgccgcttatatcaaatcagtctgcgcgcaactcggagtaaaggccgatcagcctcttgatgcgtcaaaccctgatacgctgcaggcgttatgcgcagccattatcaagcatgaaaatggaagccagccgtatagcaatgaacaactttccactggcgtcagcgctgcgctaggactttcacagcttcctaccagtaacaagcgatacactggtaatgccgcctttgatgctgcgtctcctgaatcacaggctgcattcctgcgacaggcagaccagatccgcaaacagcagcaggcagaatacagaacacagattgatggtcaggttcgtgatgctactgccgcttatatgcgcggtgtagagtttccggatccgccaggagagaaggagtttctggcggcgtatggcgtgcgagaaggtaaccagcgatataccgagttcaaaaatacgcagatcgccgggcagtacattggctcattccgcaatatgcctaccaacagcatcacggcatacgtcaaccagttgaagcctactccggaacagaccggggaagggtacgcctcgcgcgctgcgctttatgatcaggttaccgccgctgcaacaaaagttatttcagagcggcaaaataacccatttggcgccgccgtggacattggtgcatacaggccaatgcaaaacaatacccctcaggcagttactgaggaaatttcacgccgtttctcggcacaacccgacctgcagaagatcgggatatctgcgccaattctctcgagtgaggaagcgtctacgctcgcgcagcaggtgcgaggaacgcaaaacgtcgatcagaccattaacctacttcagacaatgggccagaccttaccgccggcggccatgcgtcaggttgcctctgcaatcgctccgaacaatgccgctacagcgtattccgcgctgcttctcggcacaccagataaccagtatgacaaccgaaacccggtcatatcctacgaccagtttattggctacaagccaaccatgaataaatacgacgtatcgaaggttattctggctggggaccagcttcttaacccgacgaaggctatgaaagatgctggcatatcacctgttcaactgccgagtgaggacaagctcaagcgtgcttttgatgaccaggtaggaaatgcgtttgccaataacccgcaggcgcgccaactaagttacaacctgttcaaagctgcttatgccggtatcgcctatcagtctggtgacgcctcgatgacacgcacagatgctgctaactcagacgtagtggagaaggctgcgcaatatgctactggcggtgtgtacaaaggatttaatggcggtgatgtggttatgccattcggaatggacaaatcaacatttaaagaccggtacacggtatctgcgcaaaaggcgctgaaggatgcagggcttaatgtgaacgcagcctcaaactttacgccggtgaatattggcaataaccagtatcgcctggtaagcggcagtggccgctgggctacggatccgaaaactaatcaggctatcgtggtgagggttgaataa

SEQ ID NO: 92181 - DNA, 543 bp, Enterobacter aerogenes
atgtgcgaaccagcaacgatcgccgccggcgcgacattagttataggtgcgatgtcagcctacaaccagaaccagcaatcaaaatatcagtcagcggtagctagccagaacgcggatattgctgaagcacaggcgcaggatgccgttaaccggggaaacattcaggcggcagaggtgcagcgtcggaaccggcaggcagcgggaacccaggctgccacgatgggagcgacaggggctgatttaagcactggcacttcactggacattttcggcgacaccgcacagtttggcacgcttgatgcgcttacaaccgtgaacaacgcacagcgtgaggcgtatgggtatcaggtacagtctgttaattatgacgcagaagctaaagccgctcggtctgctggaaaggcaaatgcgaccatgactctgctgtctacaccgcttaaagcctttggcgcttaccagacatttggtggtacctggagcccgttcacgcaaagtagcgcagcgccaatatctgcggcttccggcaccaaaaccgggcgataa

SEQ ID NO: 92182 - DNA, 465 bp, Enterobacter aerogenes
atgattaatgctcaaatcgtcccggccacggctgcgcatatcgctgaaattctcccgttagtgcgcgccgctgacctgcaggagttttctgcaaccaatggctggagcgccaggcgagtgctggagtgcggactcaaaacctcaacattctgctgtgcaggtctggtgaatggcaaggtggtgacaatctttggtgtggcgccggcgtcaatgattggtggaagtggtatcccctggctggttggcactgattcccttgaaaaatatcagcgcacattcctgcgccgctgccggaaagtggtcaatgcaatgctgacggtttacccgtatcttgaaaactatgttgatgccagaaaccacgtcgcaaaggcgtggctccactggcttggttttaccctggaagacccggcgccgtatggcgtgcaaggcctgccgtttcatcgattccacatggagagaaaataa

SEQ ID NO: 92183 - DNA, 2478 bp, Enterobacter aerogenes
atggccgttagctggatacaaccgagtttctccggcggagagattgcgccatcgctatacggccgcattgatatggccaagtaccaggtggcgctgcgcaagtgcgataactttattgtgcgccagtatggcggggtagagaaccgcccgggcacgcagtttatcgccgcggcaaaataccctgatcgtaaatgtcgcctgataccgtttcagttctcaacggttcaaacctatgcgctggagtttggtcacaactacatgcgcgttatcaaagatggcggccttgtgatgaccaccggcgatgtaatttacgagctggcaacgccgtatgccgatagtgacgttttcggtctgaagttcacgcaaagcgcagacgtgatgacgattgttcatccttcatacccgccaaaagaactacgccggtacgcgcatgacaactggcagattgtcgacgtcgaaacaaagaatggtccgtttgaagatattaacgtcgatgagtcagtaaccgtttatgccagcggcacgaccggaacgatcactctcactgcgagcagtgccattttcggcagtgagcaggtagggaagttattttatcttgagcagcctgccgttgactcagtgccggtatgggaaaccagtaagactactgcaattgatgatatccggcgcgccgaaagtaattactaccgggcgaacacggctggtaaaaccggcacgctgcggccatcgcataccgaagggatggcctgggatggctggggtgggactggtgacgatgatactggtgtgcagtgggaatacctgcatagtgggtttggtatcgcgcggatcactgcagtcgccggcgatggcctgtctgctactgctgacgttatctcacgtatccctgaaaatgccgtgggatcagacaaggcgagctataagtgggcgcggtatgcatggaatagtgtcaatggctatccggcgacagttgtctattaccagcagcggctgtactttgcagcttcctcagcttatccgcaaaccatctgggcaagccgtactggtgattataaagacttcggaaaaagtaaccctgttcaggatgatgaccggatcgtttatacctacgccgggcgccaggtgaacgagatccgccatcttattgatgttggatcactggttgttcttacctccggcggggaatttgttgccaccggcgatcagaacaaagtgcttacgccttcctctttctctctgagctcccagggttcaaatggtagcagcgatgtgccgccgatagcggtttcaaacatcgcgctgtttatccaggaaaagggcagcgttgtgagggatctggcctattcgtttgatgttgatgggttccaggggaatgacctgacaatactcgctaaccaccttttccagaagcgcagcattgttgactggtcattctgtatcgtgcctttctccagcgcgttctgcgtgcgtgatgacggtaagttactggtcctgacatatctgcgtgaccagcaggtttttgcctggtctccgcaatccagcgccggaaaatatgaaagcacatgtggcatcggtgaaggaagtgaggacgcaatttactttgtggtgaacagaaccattaacgggcaggttgttcgctacatcgagcggctgtccagtcggcagtttactaacgaccttgatgctttctttgttgatagtgggctcagctatgatggccgcaacactgaaggcagaacagcatcgataagcggaggcagcggaaactggagttatcaggtgccgtacactctgacgatgagcggtggctcgtacttttccgccggcgacgtcggcgcacagattcagtttccgtataccgggacggatccggttgatggcactgacgtagccatgcagttgcgctgtgacattgtttcagtggaaagcggaaattcagtaaccataaccgcaaaccgcgatattccggcagttctccaaaataccgcaaccacaaactggacaatggcaagacaaaccttctcagggcttgagcatctggaagggcagacagtaaacattctttccgacgccagcgtagagccgcagaaagtcgtcaccggcggcgctgtaacgctcgaaaagcctggcggtgtggtgcatatcgggttgccgataaacgcacaattcgaaacgctggacatcaatattaacggccaggaaacactgctggataagaaacaactgatcagcaccgtaacgctggtagtaaatgcaagccgcgggatatgggcgtccacgcccggcggacagtggtatgaatacccacagcgcgagtttgagttttacgacgatcctgttgaagacgctaccgggaaagtagaagtgaaacttgacagcaactgggacaagaacgggcgcatcaagatccgacagactgacccactaccgctttctgttctggctgtaatcccacgcattacggtaggaggattctga

SEQ ID NO: 92184 - DNA, 606 bp, Enterobacter aerogenes
atggcctcagttatcgaaatctgcaaccgcgcgctgagcaatatcggcaataaccgcagcattaacagcctgaatgaagccagcaaagaagccgggcaatgctcactttattacgaatcaattcgtgatgctgtcctggccgatttcgactggaactttgccacgaagactgtagcgcttgctgacactaataatccgccgctggactgggattacgcgtatacgtacccaacggactgcctgaaaattattgaaatccctgtgcctggtatccggtacccaaatgcagcgatgcgtgtgcagtacgtggtcggcgccgacagcgccggcaccggtcgcctgatttacaccgacctgcctcaggcgtggttgcgatatgtggcgcgcatcactgatgtgaacatgttcgattcaattttccaggaagcgctatcctggcgcctggccgcggctattaacatggttctcactggcaacgctgacctcggcaataacgctctcagcatgtatagccggatcatcctcagcgccagctcgcacagcatgaacgaatcgcaggagccgcaaccgcctgttgatccctttactgaagcgaggatgtgctga

SEQ ID NO: 92185 - DNA, 324 bp, Enterobacter aerogenes
atggaaatggtcaatctcaaaaccggtaccgacagttaccaggatgaaagcggtgaaacgaagactcgcgatgaatatccgtgggggctatgcatcacactgaacaatgacaccctgaataagctgaaggcgcagccgcagaatgttggcactgaggtgatgattacagctaaagcagtgattaaaggcatctcggcacgtgaaggcgacgatggcactttccgtagtgcggatctgcagatcactgatatggcacttgcaccagtgtccggtgaagcaccgaagaccgcggctgaaactttatatggtgaagggggcgagtaa

SEQ ID NO: 92186 - DNA, 348 bp, Enterobacter aerogenes
atgtcagcagaaaaagcaaaataccgcgtgctgcgtttgtctcatattcacaacaacctctggccggaaggatctgaggttgaatatgacggcgttccgggatctgcgcttgagccgctgaacgaagcggctaaggcggctaaagctaaagccactggcaaggttgcagtggtcaatgcagtcaaacagtctgagccgctgaacgaagaaggccatggcgatgatgatgctctggataagctccgagaagagtatgaactgctctttaacgagaagccgcatcacaacaccaaacccgaaacgctccgcgagaagatcgccgagaagcgaaaagatttaggcgtctga

SEQ ID NO: 92187 - DNA, 438 bp, Enterobacter aerogenes
atgatcctcgacaaactgttgatgttctccgaagcgcaggcggttactgccactgctgcttctaccgacgtgattgacctggggccaatcgacggcacccgccgtgatatcggtgttggttatccgctggagttctgggcactggttaacaccactgccaccgctgctggcgccgccaccgtcaatgtgcagttgcagacgagccctgacaacagcacctggacgaccatctatgacagtggcgcgctggcgctggctgctctgaaggccggtaagcgtgtggtatcagcgaaggttcccgcaggtgtgatgcgctatctgcgcgttaactacacggttggcacaggcccgcttaccgccggcgcgttcacctccggtatcaacctggatgttgatgcgaataccccgtatccgactcgctctaaagtgaccggttaa

SEQ ID NO: 92188 - DNA, 987 bp, Enterobacter aerogenes
atggctgttaaaggcattaatgcgctgacgcttgctgactggggtaagcgcatcgacccaaacgggaaggttgataaaatcatcgagcttctctcccagactaacccgatcctgcaggacatgctgatcgttgaaggcaacctgcctaccggtcaccgtacaaccgtgcgcaccggcttgccgtctgcaacctggcgtctgctgaactacggcgtgccgcagagtaaatcgaccaccgttcaggttactgatgctattggcatgctggaaacctatgcggaaatcgataaatcactggcagacctaaacgggaatactgctgaattccgcctgtctgaagatcgcgccttcattgaagcgatgaatcagcagatggcgcaaaccctgttctacggtgattccagcgttaacccacagcagttcatgggcttgtcttcgcgttattccgacctgtcggcaactaacgcacagaacattatcgacgctggcggttccggtaccgataacacctctatctggttggtggtgtggggtgaaaataccgtacacggcatcttcccgaaagggcagaaagccgggatccagatggaagataaaggccagcaaaccctgaaagatgcgaacggcggccagtatgaaggctaccgcacccactacaagtgggataacggcctctgcctgcgtgactggcgctatgtcgtacgcatcgcgaacatcgatattagcgacctgtccgatccggcagcggcggcgaatatctccaagctgatggtgaaagcactgcaccgcatccctaaccgtggcatgggccgaccggtgttctacatgaaccgtaccgtagcccaggctcttgaccttcagtctctggagaagtcatccctggcgatcagcgtcaaagagaccgagggcgaatggtggaccagcttccgcggcgttccgattcgtgaaaccgatgcgctgctggaaaccgaagcccgcgtggtttaa

SEQ ID NO: 92189 - DNA, 699 bp, Enterobacter aerogenes
atgaacttattcgaacgtttgatgtatcgccgcctttgcaatgagcaacctgccgacggtggcgctgctccggctgcggcatctgaacctgcacgggcggctggtgataaccctgctggcaaccctgcgtcgacagaagcagcttctgacgctccagaaaacggcgcagacccggaaaagccggaggaaagcaaagcgcctgaagatggcaagcaggaaggaaagaaagatgacggcaatcctgagggggcgccggagaagtatgaatttaccgctggagaaggcgttgagctggataccgaagcgctgaaggatttcgaaccggtagcgcgcgatctgaacctgaccaatgagcaggcgcagaagttggtcgatgcatacccgaagattctggcaggcgtccagcagcgccaggcggaagcatggcaggcgcaaactgaagagtgggcggcaactgtgaaggccgataaagaaatcggtggcgacaagttgacggcaaacctcggcgttgcgcagcgcgctctggataccttcggtacgccggagttgaaggaatacctgaatggtactggtcttggcaatcacccggaactggtgaaggcgttcatcaaagtaggtaaggccatgtcggaagacggcatggttacaggtaaagaaagcggtcagcgtagtgcggccgaagtgctatatggcaaataa

SEQ ID NO: 92190 - DNA, 270 bp, Enterobacter aerogenes
atgacgatcaaacgaattctacctatccggctcgacggtaacgcgatcattgctgatgtggaggatagcggtgcgggagattcagttgcatgggctgacattactggcaagccaagcacgtttcctccttcggctgcgaccacctcagctattggtggcgtaaagatggctgccactcaggctaactccaccgcgactgatgcggctggcctggtaactgattttaacgctctgctggccaagttgaaggccgcggggattatggcttaa

SEQ ID NO: 92191 - DNA, 297 bp, Enterobacter aerogenes
atgacagatatcgatgacgaaaaactcagggcgcaacgtgaaatcgaggcgcgcgagcgtgagcagcgcgatatcgacgatatcaagtttgtcatggatagcgagaaaggccgccgcgtcgtctggcagatcctggttgaaggccaggtattcggagcctgcttcagcccagacccatacgttacagcatttaacgaaggtaagcgtaaccatgcgctgtcgctgttccagcgcgtcatggtgcattgccctgatcagtatctgaagatggccgcagaggctaacgaaaaggagtag

SEQ ID NO: 92192 - DNA, 1680 bp, Enterobacter aerogenes
atggcggaaaccattaaagagcaattgctgaagcaggtggctttgctcaataacgatcgctcttcgttcgagccgcactggcgcgagctgagcgactttatcaacccgcgcggatcccgattcctggtcactgacgtcaatcgcaatgaccgccgtaatacaaagacagttgacccgacagcgacgctggcaaaccgcacgctatcaagcggcatgatgtcaggcattacttcaccggcgcgcccctggtttaagctggcaacaccggatccggacatgatggactatggcccggttaagctgtggcttgaagccgtccagcgccggatgaatgaggtctacaacaaatcgaatttgtaccagtctctgccactgctctacagcagccttggcacttacagcactggtgcgatggccgttcttgaggatgacgaagacgttatccgcacaatgatgttcccaatcggcagttactacctggcgaactctgcgcgcggcagcgtcgatacctgctatcgcaaattcaccatgaccgtgcgtcaactggtgatggaattcggtatgagcaacgtcagcacctccgtaaaagggctgtgggagtccggctcatatgaaacgtggatcgaagtgattcatgccgtatatcccaacatcgaccgcgataccgggaagctggacagcaaaaacaagcgcgtcaaatccgtttatttcgaagttggcggagataacgacaagctgctgcgtgagtctggtttcgacgaatttccgattatggcgccgcgctgggaagttaacggcgaggacgtatacggctcatcctgcccgggaatgattgcccttggtcaggttagagcgcttcaggttgagcagatgcgaaaagcccaactgattgacaaagcaactaacccaccaatggttgcccctacgtctcttagaactcagcgagtatcactacttcctggaggtgtgacgtatctggatgtgatgacaggtcaggacgggttaaagcctgcctacctggtaaacccgaatactgctgatctgctcgctgacattcaggatacgcggcagatgattaacagcgcctatttcgtcgacctcttcatgatgctgcagaacatcaacacgcgctctatgccggttgaggcagtgatcgagatgaaagaagagaagctactgatgctgggccctgtgcttgagcgtctgaacgatgaatgcctgaacccgcttatcgatcgcaccttctccatcatggcgcgcaaaaaccttttaccacctccgccagatgtacttcagggaatgccattgaagattgaatacatctccgtcatggcgcaggcgcagaaatcaatcgggctatccagtctgtcatccaccgttggctttattggccagcttgctcaggtcaaacctgaagcgctcgacaagcttgatacagaccaggccattgacgctttcgctgaaatgtccggcgtatcgccaacggtcattgttcctcaggaacaggttaaccagcttcgcgaggaacgtgctcagcagcagcaacagcagcaggcaatggcaatgggtatggctgcggcacaaggcgccaagacgctaagtgaagcgcagaccgcagatccgagcgtgcttactgctatctctggagccgtcggcgcacctgcaggaggtcagcaatga

SEQ ID NO: 92193 - DNA, 207 bp, Enterobacter aerogenes
atgtgcattggcagcaagccatcagtacctgcagcaccagaagttcaggcggcaccgcaggaacaggatctggctgtggtcgattcccgcgacgaagaaacccgccgccgccgcgcagccgccggtcgtagctctacgctgctgaccagttcgcagggtgacacctccaccgccaataccagcggtaaaacgctgctcggtcagtaa

SEQ ID NO: 92194 - DNA, 567 bp, Enterobacter aerogenes
atgcccggcgaaccgggcgaaatggaagcaatgaagggtgccttccttggctgggtgtcacagggtttacagcatgaagtcatcgtaatggcgtcctgctgtaaaaagggcggtggtcagaaagggaataactgccaccgccaagtctacacacagcaatgtctctggtactgcatcacggtcctgaggcgtgattgggttgtggtgctgtgcgtcagcatttccgtcgtcgccttggtatccgccgcaaccgaaccaactagcatctggaaaaccacaacggaaagagcactggcatgcggcaccgcccttactaatcgccagcgtctgactggacacttcaatgctcttaccttttgcatcctcgtctcttccgaggtgtcacaccgaaccgccacaatggtgagttgcaacttcgtgcctaaacgatggcttgcacattccggcgacccgctcggggggtacagaacaacaaggagccccgccggaccgataacgacacatgtgccatatgccgtgtatcaacagcatcgctgttaccttaaaggtaataattgcaaccaataa

SEQ ID NO: 92195 - DNA, 1470 bp, Enterobacter aerogenes
gtgaccaataccgtgcgatccccggaagaacaactgatcgacgatatcgccagtttcacgcacgacccgctgggttatgcgctttatgcgttcccgtggggcgaggatggcacagaactggcgcatgccaccgggccgcgacagtggcaggctgatgcattccgcgagataggcgagcatctgcagaacccggcaacacgtcaccagccgctgatgattgcccgggcctccggtcacggtatcggtaaatccgctttcatatcgatgctgattaactggggaatgtccacctgcgaggattgcaaggtggtggttaccgccaacaccgacaaccagctgcgcacgaagacctggccggaaatcatcaaatggtcaaaccttgccatcaacaaagactggtttacctgtaccgccacagcgatgtacagcaacgatcccggccacgacaaacgctggcgcgctgacgcaatcccatggtctgagcacaacacggaagcgttcgccggcctgcacaacgagcgcaagcgcatcatcgtggtattcgacgaagcatccaacattgccgatctggtgtgggaggtagctgagggtgcgctgacggacgaagatacagaaattatctgggtggcgttcggtaacccgacgcgcaacaccgggcgattccgtgagtgcttccgcaaatacaagcaccgctggaagtgcgcgcagattgattcccgcaccgtggaaggcaccaacaaacagcagttgcagaaatgggtggatgactatggcgaagatagcgacttcgtgaaggtgcgcgtacgcgggatcttccctgacgcgtctgaactgcagtttatccctaccggcctgaccgacgaggctatgaagcgagtcgtcaccgcggcgcaggtggcacatgctccggtgattatcggcgtcgacccggcttattccggcgtggatgacgcggtgatatacctgcgtcaggggctacacagcaaagtgctctggaccggcaataagaccaccgacgatctgattatggcgaagcgtatcgctgactttgaggacgaatacaaagctgacgccgtatttatcgactttggctacggcaccgggctgaagtccatcggcgacggatggggcaggacgtggcaactaatcccgttcggcggtggttccaccgacccgcagatgctcaacaagcgcggcgagatgttcaacgcctgtaagacgtggcttaagctcggcggcgcgctgaatgaccaggagacggctgatgacctgtcggcggcagagtacaaggtgagggtggatggtaagatcgtcatggagccgaaggaagatatcaaagagcgtcttggccggtcaccaggcaaaggtgacgcgctactgctgacgttcgccttcccggtcgcgaagaaactgaatgacccgcgccagcaacagggcaaggccatcactgactacgatccgtgggcgtaa

SEQ ID NO: 92196 - DNA, 585 bp, Enterobacter aerogenes
atgccaaaggacccgaaacgaaaatcaacgcagttcaagccgctgacagtccagcaggaggcttattgccaggagtatgtgaaatgccctgagaaccagactcaggcggcaattaacgccggatactcaccaaatacagcgggaaagttcgccagccagaacatgcgcgatgcgcgtattcagaaacgaattgctgagctgatggaagaccgcaacaagcgcctgcgcgtcagtgccgattatgtcctgctgcgcctggtggaaatcgaccagatggacgtgctggatatcctgaatgatgatggcgggctgaagcctatccgcgagtggccgaagatatggcgcaccacgctaagtggctttgacctgtcgtcaaccatcatgaacatggatgagaccacgatcgagaccatcctcaagaaaatcaaatggccagataaggtgaagaacctcgagcttatcggtaagcacgttgacgtgatggcgttcaaagagcgcatggaagttaacgtgaacgtcacgattgccgaccgcatggccgccgcacgtaagcgcctgaaagagcacaatggcggtgaccagtga

SEQ ID NO: 92197 - DNA, 330 bp, Enterobacter aerogenes
atgggttttccatctccagccaaagactacgtcgagcgtacactatcccccaatctcctgtgccacattgatggaaattgccgggttatcgaaaccagcgccggatacgccgttatcaataccgccatcaggccaaagcaggggagtaacatcctgatatccctgtgcggcatcatgcagtttgcagtggtgcgcggtaaagcaattatcaccgatgacggcgaagcaattgaaggcgatgcgcttgatgatgtcgatgtgaaaggggtgctgacgttcctggttaatcgtgccgactggcagagagaagatgatattccgatcatgtaa

SEQ ID NO: 92198 - DNA, 339 bp, Enterobacter aerogenes
atgcctaaatcccccgcagaacgcaaatccgtgcagcgcgcgcggcagtccgccgccggcaatcgtaaaattgaactggtgctggatgagcaggagcaggaaatgttggcgcggaactgcgccgcccggcgccctggtcgcgatccctatgaaatggccgagtacatcgcgttgctgatccgccaggatgatgcgcgggtgcgcggtcgtataaagtcaataagtaaacgccgctgtgggaagtgtggtgacgcgctgccggtggcatcatgcccgtgcgctggcgattctgcgtgctgggctacgcttggctggcacgaaacgaaaatacctctgtga

SEQ ID NO: 92199 - DNA, 231 bp, Enterobacter aerogenes
atgaattcacgccaacgataccgaatgaaataccctggctggtttgtagaggctgtaaaggatttgctgagccggagaatgctggaagatattgcatatggcgtggtttgcttactgttcctcatcacgttaccagtgtcgctgccgattatcacggcaatcaggatgttggtcaccaagcgcaaactgcgtaaagagtacggacacgatgagttgatgagggacgactga

SEQ ID NO: 92200 - DNA, 1083 bp, Enterobacter aerogenes
atggcgctggccgcaatggacagcgagccggtggcgtggcgttggcgcagtgggccagataaacggtggcatctcgccagtagaggtgacctggcgggagaggttgagccgctctatcgccacgcgcagacagcgtcggaacgtgagcaggtacgccaagagcacgccgagtggtcacaggctaccttcggcaatgtcggaccggtaggcccgctgaagcacctcagcaaagaagcactggaagccgctggacagcccggcgacctgtcagaatgggctgatatgcagttcctgctttgggatgcacaacggcgtgccggtatcactgacgagcagattaccctggcgatgattgataagctggcagtaaacaagcagcgcgaatggccggagccgaaagacggggaaccgcggttgcatatcaaagcgcagccagcgccggtagtgccggaagaagccaccccggacagtatcgagattcttgccagtgccaggcgtcgtgaccacgctgtattccagtgggatgaagaccaacgaaatgcggccgctgattcctggaatgcctgccgcgccgccatgctccagggtgccgatggcaaaccacatttaaccgtctggtatggctcgatgccagaaacgaacggtaaaaccaactggaccgctatgctgcatcgcaaaggacagcacccgtgggaaggcatcacaatcgaccgttcagagtatcctgaccgcgtacgctatgaagctgaccgcatgcgtcacctcattggtgatttggcagatgaaccagatattctggcctatgatgctgacgcgcacagcgggtatgtaccgccagcagtaccgcagtcacctggcagtgaacccgcaaccctgccgggtaaatggattccggtaagcgagcagatgcctgaggcgggtgatgacatgattgtattcacagacggcattgttatgtctggggtttcatacgccaaaaagaaaggtttctatatccaggctcttgaatatgacgatgatgaacctgtcgacggcgtaacccactggatgccgctgccggccggtccgaaggaggtgaagtga

SEQ ID NO: 92201 - DNA, 762 bp, Enterobacter aerogenes
atgactgatatcaccgaactggcgcagagagaaaaattcgaggcttggtttaagtcgtcatttcatcccgacaaaaccgggccatacatcaaagaccaactgtatttcgcctggaaagcggctggcgctgagctggtagaggcgctggagaaggcgcagcagcacattgcgcgtcaggagcaaattctcctgaataaggatgagtccctgtctattcgtcgcggtgagcttgaggcggcgcagcaggagcgggagaactggcgtaccagctttgataacgagcggttccgcgctgataagctcaaagcgcatatcgacgatattgaacctattcgtgcagcagccgagaagttagtccgttgcaaaggtcgttatcacagcgagcagaactatcgcgcgttggctgcgctgtttggcgtaaaaaccccagacctgccgccgttggatagcgagtcccgcaccgccaccgctgccgccgctgacgtactggccgagcgtaagcggcaggttacagctgaggggtggacacctggacatgatgatgaatatgaacacggcgaattagccgatgcggccggttgctatgcgctttcctctgaactgttcgattgtgccggtgaaccacccagaccgtggccgtggcctgatgaatggtggaagccaactaatcgccgccgtgacctggttaaggctggagctttaattctggcggaaattgagcgccttgaccgtgccgctggcatcaaggtgggggatgagtag

SEQ ID NO: 92202 - DNA, 264 bp, Enterobacter aerogenes
atgagcatcgccacttatctcaataccggtttagccattcttggatgggcatacatcatggttaaaacaggccagtggattaccaaaaatgctctgaggcagtgggacaagcgtcgtaaggaatctcgccgccagaaagctgtgaatgagttttatgacgcctttgagcttaacagcctggaacctggctctaccgttcgcctggccactaaaggcgacctgacaatcatgatgttccgcagcgagggaaaggccaatgactga

SEQ ID NO: 92203 - DNA, 582 bp, Enterobacter aerogenes
atgaataacgaactcacagcagcactgttaactatcgagaagagcaaagaggcaacaggctgcccggctggcgtagacctgcaggactgggtgaagaagctggcggcggagaatgcgtacttgatacctaaagccgctagcgaactgtcaaatgcctgggtgcttcataagtatctaatcggcattcaagcggcgattatgtatctggataatggaaacaagaaggccgcgcaggaatggctgtatggaactattgctggtccgggatttgagttccctgacgaggttgacgatatcgacgcatgggcaactcatcagatgcgcggcagcataagccatccgcgcgcacttgaaataatcaaggaagaaacccccgccaccgatcgcatcgtagccgggattaaggctgatgcgattaccgcttctttggatgcctgctctgactacctcgatacagactgcgttatggacaggcttgatatcagctacgaagaagccgagaagcgaacctcaggggcaatcgagtttcatgatgcgatggtcgattttgcaaaccaggtgcgcgagggggccgacaaatga

SEQ ID NO: 92204 - DNA, 345 bp, Enterobacter aerogenes
atgaagaaacaacttcaggcgctcggaaggctcaagtctggccagatgaacaaaaccgaaaccgcctatgcgcaagagcttgaactgcgtaagcgctacggggaaatcgcctggtaccgatttgaaggtatcaagctgcgactggctgacaacacgttctacacgcctgacttcgcagtgatgctggcaggcgggcaaatggaattgcacgaagtgaagggctactggactgatgacgccagggtgaaaaccaaagtcgccgctgatcagtatccgttccggatcatcggggtaacgaagctaccagccaaagccggaggcgggtggaaggttgaagagttctga

SEQ ID NO: 92205 - DNA, 786 bp, Enterobacter aerogenes
gtgaacaacgtatttaacgccattcagaaccgagacggtgatgcgttatcccgcctgacagggtcggatcgtcagtatgcaggtagcgacaacgtggtgaacatctcggcagagcgtttagtcgatgctctgtttaaacagcttaaacaactcttcccggcggcagagcagactaacctgaagacacctgcgcaggagacagccgccaaacagcagtggatagcagctttcgctgaaggtgggatacgtacccgcgaacaggtatctgccggtatgcggcatgccagagccagtgagtcacctttctggccgtcacccgggcaattcatcaagtggtgcaaagacagcaagatggtgctgggcgtcagcatcgaggatgtcatgggagagtttcatcgctacgccaaggagaaaagtctccagcctggtggccctgaacaattcccctggcgccatcctgtcatgtactggatagtttgtgatacccggcgtgcgatgtaccagcggcagctgagcgagattgaggtcgagaagcatgcgcgcaaactcctggatgagtgggcgtcgaaggtagctgcaggtcatcagatacccgacccgattctgagcattcaggtgaagccagagccaattcaaacaccagttgatacgggcggtaatgcttaccacccacccggtaaaagtttcggatgcatgccgaatgccgccaccctggggggaatgacaccggcacaatggctgatggaggaatacaggcgagggaaagcggcaggactcatcaggtaa

SEQ ID NO: 92206 - DNA, 768 bp, Enterobacter aerogenes
atggcccgcattcgaaccattaagccggaattctggacagatgaagatatggccgagatctcagagccagcatgtcttcttgctattggcctcctgaattatgccgatgatgagggttacttcaatgccaacccgaaactgataaaagcagcggtttttcctatccgagagccttccattcctattccggtactaatacgggagctttccaactgtggttatttgtccatgttttccacccaggatggcaagcattttggggtcatcaaaaactttctgaaacatcaggtagtaaacaagccaaaagaaagcaaaatcaaaatcttaccactcataccgtatgagtatggtactgataccggacaagtaccattaggaatggatcagggatcagggatcagggaaagtaaaacccctctctctgcgcgcgaagaaattcaaatccctcccgttgtcgttccaggagtcggtgaaccgatcgggaaattcaccatgcatgaaaactggcagccctcagatgattttgtcatgcgagccagaatgtggggtcatgcactacctgctgatgggtacaagaaatctgatcttgcagagtttgttacgtactgggctgctgaagggaaagttatgcagcatgttcagtgggagcagaagtttgcgcgcctgctgatgcagaaggccgccagagccaccgggaagaagggtaacggcgcagaacaaaacgaaccgcactggaacagtccagaagcgtgggaggatttcctgtga

SEQ ID NO: 92207 - DNA, 210 bp, Enterobacter aerogenes
gtggagattatcactcgtcttgacgctgcaaagtcaggtcttaagcgttattacactggtaaacaatgcaagcatggccatgacagcgagcgttgggtttacaacgggcattgcgtggaatgcacgatggagacgaaccgccggcgccaggctgagattaaacggattatgggtgaagcggcgaaaggcgcctcgccggaggtaatctga

SEQ ID NO: 92208 - DNA, 231 bp, Enterobacter aerogenes
atgagcgagaacacgcagttcgattttaaaaaacactggcttgcgctgacgccggatgagcgtgaagcgttcgcagaagaggccggaacaaccagccattacatccagactcacctgaccggtaagcgcaagatgccaggtaaggcattgatgaatgggctatttaaggcatgcaaatcccgcgaatgggttaaatcaaagcctgagctggcttacttcttctactcctga

SEQ ID NO: 92209 - DNA, 588 bp, Enterobacter aerogenes
atgaaaagcatccacgatatccggcgcgaaaacctgaaagagctgatctaccgtgaattcaacggaattcagtctcgcctggcggagcggatggagacccagccaaatctgattaaccgttgggcaagcggcaaaaagataattggcgacgtggctgcacgtaaaattgagaaggccgctaacaagccgaccaactggctcgacatcgataaattcatgccagtacatgaagaggtgcaggatgtcgacttcggagagattggcaagctggcatcttggaaccttaaacgctggatgagcgagaaccgaaacctgtcatcgcaacagcgcctggcggaagaatctggcgtcagtcagtctacaattaacaggttcctcaacaacgaggccagcatatccatcaccaacctggcggcgctggctgagccgttcgggcgccatgcctacgagcttttgctgccaccagatgacccggcagccatcgattatgaccgagccaggtacaaattgttacctgagtccgacaagatggcgatcgaaaactacattgatttcgtgattgttaagcacgaaaagcctcatcaataa

SEQ ID NO: 92210 - DNA, 150 bp, Enterobacter aerogenes
atgcagtggaagatcatcaacggttggtactgcgttacggcatgcgggctgatgagctggaagcttcgcacgctgacagaggccattagctgggcattcgttaacaagctggcggccaggactgaaatggatatgggggtgagcaaatga

SEQ ID NO: 92211 - DNA, 303 bp, Enterobacter aerogenes
atgatttcaactcaacagcaacgcaacctgcaaaaaatcatggctggttttgatcgcgactaccgcgtcgccgagatgcttcacgaacgccaggttgaactgcaggaaactctgaaaactgaatacctgcttccggcattcgacaatctgcgccgcgctggcgtccgtcaggaaatcatcaatgccgcggtagaaagcgtggagtttgaagaatcactggcggcattcatcagcgaactgaccggtatcgttggcaaatgggatgtagcagaccagatcgacagcgcgaggacggcggcatga

SEQ ID NO: 92212 - DNA, 822 bp, Enterobacter aerogenes
atgaaaccaggcatttatcacgatatcagcaacgaggattaccacgccggtgacggcgtgagtaagtcgcaactggatatggttgcaaaaaaccctgccctgctgaaatgggtaaaagcggcgccggaggatgaagagaaaaaatctgcgctggatatgggtaccgccctgcactgcctgctgcttgagccggaagaattcgacaagcgtttcatcgtggcgccgcaattcaaccgccggactaaccaggggaaagctgacgaagaagcgttcatgaaagatgttgctgacaagggaatgacggtgatggacgccgaacaaggcaggaaactgaaacttatgcgcgaaagcgccatggctcacccggcggcgcgatggatgcttgaagcgccaggtttctgcgaaacatcgatgtactggaacgacgatgagaccggcgagttgtgccgaatccgtcctgataagtggctcaacgagcacaacgtgattgtcgacgtgaagaaagtggctgatatggaccgcttcgcccgccacatcgaggagtttcgttaccacgttcaggatgccatgtaccgggaaggtgcgcagaaagtaactggtgaaccacacggattcttcttcctggcagtaagcgaaacgatcgactgcggtcgatacccggtacgcgttttcgaacttgacgcaccagatgttgatgctggcatggcgctgttccgccgggatctgaatacctatcaccagtgtcgcctttcagatgaatggggtggcgtggaaattattaaacgccctgagtgggcacgcaaacaggatatgtacgtatga

SEQ ID NO: 92213 - DNA, 882 bp, Enterobacter aerogenes
atgagcaacgatatcgcaatcacctctcagccaggcgctaccgtcggaaccgccgcggctattttcagccctgaaggcatggatcgtcttgttcgctttgcaactctgatggcggacagcaaggcaaccgttccgcagcaccttgcaggaaaacctgctgactgcctggcggtaacaatgcaggcggcgcagtggggaatgaacccgttcgcggtagcgcagaaaacgcatgttgtaaacggcacgctgggctatgaagcgcaactggttaacgccgttgtttcgtcttccaacctgcttgccacccgcctgaattaccgttgggatggcgactggtcgaaggtaaacggaaagagcgataagtcaccatcactaaccgtcactgtttcggcaattctcaaaggagagtcagaaccgcgtgaattgaccattagcatggctcaggccggcgtccgtaattcccccctgtgggaacaggacccgcgccagcaactggcttacctgtgcgttaagcgctgggcccgtctgcatgcccctgatgttctccttggcgtctacacaccggatgagttgcaggaatcgcagccgcgcgttgagcgtgacattactccagcaccagcaactgcgtcaggcatgaacaaactgatcaacacgaagccagagcaaagccaggaagatcgacagcgcaaagcagatgaccgtgatccagatgaaatgctgacagcattcaatgatgcagcaatgaactacaacaccattgctgatctggataaggcatacaaatacgttgccaaaaacctagccaatgatgatgagcgcctggcgaaagcaacggacgtgtacaccatccgacgcgacgaacttaacgaaattccgatgtaa

SEQ ID NO: 92214 - DNA, 249 bp, Enterobacter aerogenes
atgaaaggtgctttaggtaagaaggaactcctggcggtggtgccactgtcatggagcacgattgaccgcctggaggctgcaggcgaattccctaagcgttggtatatcaccgaccgtcgctgtgcatggactcaggaagaagttgaaaaatggcttgatgaaagaaaggccaatagccctgaggtatacacaggaaaaaagccaccggttgatcagagagtttatcgcccggtgagttccgcggcatga

SEQ ID NO: 92215 - DNA, 591 bp, Enterobacter aerogenes
atgactaagtacactctgatttatgcggatccgccttgggtataccgcgataaagccgcagacggcaaccgcggcgccgggttcaaatacccggtgatgaatgtactggatatctgcaggttgccggtttgggagctcgccgccgacgattgtctgctggcgatgtggtgggtgcccactcagccggttgaggcgctgaaagttgttgaagcgtggggattcaagcttatgaccatgaagggattcacctggcacaagacgaacaagcacaaaggtaacagtgcgatcggcatgggccatatgacccgggcgaacagtgaagattgcctgtttgcggtacgtgggaaactgccggcgcgcatggatgcctctatctgtcagcacgtcacggcgccgcgcctggagaactcccgcaagcctgacgtaatacgggagaaactggtgcaactgctgggcgatgtctcacgcattgagcttttcgcccgccagtcatcgcacggtttcgatgtgtgggggaatcagtgcgcggcgccggcgattgaactgctgccaggctgcgcaataccggtagtgaatacggaggcagcatga

SEQ ID NO: 92216 - DNA, 303 bp, Enterobacter aerogenes
atgaatatctacgatgagccatccatgatccgccagcttgaagaggcccgcgccgttatcaatcagcgcaatggtgaaatccttcgcctgcagagagatgcagagcgctaccgagagcagcgtgattcagcaaacgcaatggttacttttcttcgtgagctgctggcgaaaggtacagcgctgctacctcaccagtccgtcattgtattgaaccatgcatacgagcatctaagggaatgtccgtactgccacaaacttcacgatgacagactaacgtgcaccgcatttaatgaggttaactga

SEQ ID NO: 92217 - DNA, 309 bp, Enterobacter aerogenes
atgagcaccaagcaccaaatcaatgcattaaagaaacgaatagatccggcggtgctcaatgcagccgccgatgaatacgcggacatgctaatcacattatgcctgtgcatgaaaatggctggcccgactcgcgcaaacattcgcggctgtgctgttaagttaaaagaacgccttgtgacatgtcacagcagaaatgcactggacaccatactaaatagctgggatccggttggcgcatttctgagtatgagacgcgaagcaaacgaggcggccttatctcacggagatccgattgacgtattcgtatag

SEQ ID NO: 92218 - DNA, 1251 bp, Enterobacter aerogenes
gtgcttaccgataccaaattaaaaaacctcaagccgaaagagaaactctataaagttacagatcgtgatggactgtatgtagccgtgctcacgtcaggcagcatctcgttccgctacgactatcgaatcaatgggcgccgggaaacgcttgtcattggtcagtatggccgtgacggtatatcgcttgccgaagccaggcaagaattggttgatgcaaaaatactcctgaagtcaggagtatcgcctgctgcagcaaagcgtgacggtattaagcaactacgtggtcaggaaacttttgcggtacataccgacagttatatgaagcatgtcgttctcgccgacagtacgcgcgatatgaagcaggccgttatcgacagggatattcttcctgctctgggtaacaagctgatgggtgagatcagcaccaggatggtgagggatctgtgcgacaggatagtcgaacgtggcgggcgggcgacagcagtacaggcaagagagattatcagcagcgtttatcgctatgccaacgaccgcgggcatggttttttcaacccggctgcggatataaagccaagcgctattgccacattcaagccgcgtgatcgttgcctgaagcctgaagaaattggcgtgctgttccgcgcacttgataccgtcagcacattgccaacgctcaagctggcggtaaagctaattcttatcaccatggtgaggaaaggtgaattcactctggccacctggggtgaggttaatttcgcaaaatcgacgtggactattcccgccggcagaatgaaggcgagccgtgagcatgttatctatttgccgtcacaggctcaggatctgatggttggcctgcagatgtgtgctggtggaagtgattacctgttgcctggaagatacagcaccagtaagccgctttctaatgcggcgctgaattcagttatcgatcgggcggtggcggcagctacagatgctggtgaaagcatacagcctctcaccgttcacgaccttcgccgcacggccagcaccctgctgcatgaggcaggattcccgtctgactggatagagaaggcattggcgcatgagcagaagggcgtccgtgcagtgtacaaccgtgctgagtattcgcggcagcgcgcgtacatgctgcagcagtgggctgatatgattgatgcatggataagcggggagcattacgacctggtgccgttctccccgtctgcgtttgaaaaatggatggatgggaagtaa

SEQ ID NO: 92219 - DNA, 327 bp, Enterobacter aerogenes
atgggatttccctctccggccgacgactacgcacaacgagcccttacagttgacatgatatgcggtaccgggccaaacaccagaactgtagaaaccgcgaccggctatgctgtgattgatgtatcgctcaagccaaagctgaacagcacggtaatgatcgcttattccggaataactgattttgcaaaggtgatgggcaggacactaattaccagggatggggaagcgatcgaaggggaagcgcttaacgatgttgaggttaagggggttgtgacgttcattatcaaccgtgcgatcatcgacgatgacgaatgcccagtgatctga

SEQ ID NO: 92220 - DNA, 1254 bp, Enterobacter aerogenes
atgaaaagttacagcaggagagatgccatagatatggcattcaaactaggtatgggtgctgctcttatggcgtccataccaaaagttgcatttgcatcaggagcgtcaagattcagcgttaccgactttggggccaaaggggacggagtgactgacgactcttttgcgtttcaaaaagcatttctcaaagcaaatgaggccggcggaggaacggtttactttcccccgcccaaaaaagaatatttgctgaagttcccggtatttatatttaacaatactgaagcatacggcgatggtaaggatacgcggattgttttcgagaatccggtgttcagtaaaggacgtggtggtttcgtcatcggctcaagcctggaggcaaacagagacctagcgttaactcggtttagtaacaaatcgctatcaactacgatcaataacaacttcaagaatcccgttcaacggcactacatacgcgacacgccagagttggcccaggcgaaaggaagtagcctacacgatatctatctggaggcgagattcactgctggctcagaaagcaactggggcgggtacggaattaacttcgtaaacgccattgactgccatgccagcaacatctgggggaaaggatggacgcaacttattggaatgggctctgacactccgccagaaacaccatcaaaccataattgcagcgcgaaaaacctgtatgttcttgagcccgatatggtcaggacatattactcaatagggtttatggctaactctagtaattgcacgattcagaatgcaaaacaattaaaaccaatgacagatggaagtaaaaacggcagtggcgtagcgttgaacttttgcgaggattgcatcatttcagatatagatataccagaccttggaagaactcaaacatcagagggtgtgcttataaacaattcgtctggttgtttaattcaaaacatcagcattggaaatgcaaagaaagcggtgtcaacattctttaaatttaaagacactcaaaaggaatttaaacctaatatgataaaaaatgtattaggttcaaattgcgatattgtattatctgtatactccaaatttaacatcataagaaacatcaagggcgagaattctggaagagttatagccctgatgaatactaatgcagcgcgaaatgttataagtgcccctgaggcggatatttcaaccccagggaaagcaccgattactacattgatgaagcttaataaaatagagtaa

SEQ ID NO: 92221 - DNA, 1206 bp, Enterobacter aerogenes
gtgagaagtaaattcaaatatgatgatattgctattaggctatatctattagcgctcgcaataataacgctagtaccttttggtcgtggtagtatatctgggttagagccggctgttccttttattttaatttcatttgctgttttctcaatgacaagaaagacaatagataaaaagaaattatctgttttatttatgttctttctgtgggcatcatggatcgttgcaggtatagcgtatagctatctaacctacgataaactggcagatcatgagtcatcatttcttcgatatgtcagacttcttgaaatgtactttccagcgcttttagttttcgcatttattaataagctcactgaagagcaaaggaaaactgtctatcgttttttcattttccttttctttgttgttaccatcgaggcagcctggggttggttcatgcaaatggacatccttgttgcgaagcaaaggtttagctatcctggaatgggctacatttacagggcgggtggtgtcgctaatgattccagtgcgtatggtagtcttgcattgattcttggcgtggcatcgcttattggtcttcgccataccagcaaaagcaaaatactttacattttgatactgcttggccttgtgtttaacatctatatttcacttacacgaactctggtttttgcgctggcggtatatgtattctttgatttaatcagaacaagaagccttagcgtattcaagatgttgttcttcgctgctataggtgcaggggtaatcatttacggtatcactaatgattatatcatcgccttgttggataggattaccggatctggacagattgatatcacgtctggccgacttgccacctggtctgccgtccctgatattcttggggaaaatccaatatttggcgttggttatcgcatggctactgataagtacggcatcgtacctgataacgtgttcatatcatccttgctggaaacaggcgttattggtttagctttgtacgtagggatgcttgtgtctctgtgctactgcgtttacaagaacaactcagaaagtctcccgcttctccttgcgtttatagcatcagggatgtttgttgatatatctacgttctggattagtattcctgcactaatcttctttgttgcagttaacagtcagcgcgatgaggatgatggtcgccatcgcgctatagaatga

SEQ ID NO: 92222 - DNA, 1947 bp, Enterobacter aerogenes
atgactgataccaactatctggtttccatgccagttactcccttttcaacaccgagatcgtttaaatcagttagtaacggggcggtctatatcggagaacccgatactgatccaacaatccctgataaccagataccggtatttgttgtaaatgaagatggatctgaggtgcagatatttcaaccgatcgtgattaattccggtgggttccctgtttataacggtcagattgtaaaattcgttactaaacaaaatttcagcatggccgtttacgacgcttatggtgcccagcaatattattggccagatatatcacaggtcgacccggcaatcgctatgcaagagataattaagctaaggagcgatcttgcgtcaagtgatagcggtcttggcggagaaatggttggttttaaaaaggactttcctggcgcccagccaaccacaatttcaaaggagttagacacttcggaagcaataactcctgaaacatttaatacaggaagcatgactgatgatgagctttttacagcaatgttttctaatattgattcctattcttcatgggcgtcagggtttggtgtaaacccaggaaagatagacctgcgcgggaaaacctacacccttacgcaagagcatatctgcagaaagggtgtaaacataactaacggcatcattcgccttaatggtggaaatatagtcatgggggagctcggcagcacctctactcttacatacgcattccagggtctgagcgttatcgatgttggaactgcagaatcagaaaaagccctcatagaagtgcgtgtgtgttttaacgttttcgtctgtgcaaactatatgaatgcgcgaaaaccatcctcagggaacagatctagatacgctctcttccttggctcttccagggggtggggaattggcatcgttagcggatactacacagggggtcggtgtaccgttcgcattggcagaacaggcgaccatactggaattttcgttggctcaggagcgaccatagatcatggaagtgtttgtaatctcatgctgtgtaattctgcaggagcttccgttatcggctgtaatgttgaacactcagaaaatggtagcgccggctcaattcttattacaagcagcaccaacggttcgagcaattacgcgcattcagtcaccattcaaagcgtctatgcatataactccggcaagggaacatctggaacagctctaaccccagcagcaattgtggtaggtagagatgttcctggaactatgggatgggacgtacccggacagctcatcactagtggaaacactgctgataacataaaaataagcaactgctatcttgtatcagataaccagcaatatgctgccatcatgcgcggaagaagtgggctggtagtagaaaactgcgtagtaatcaataacaactccgatgctgatgatgtcttatttgaagggacagcagcaagaagccacgcatacgacaacagaaatcaaaacaccggggtatttgattttgttggctacacatcatcaagcgcaccaacaatcggctctacaaatggctcctggaatatggcgcttactgactcaaatggcgtggggtcatatacaaggagtacatttggtggaggatataatgtaaccaacgatatgtgcacagcatacggatggatggttataggctctgtcgttactcccgcaacagggcaacttcgaatagcattacctcttcctgtcaggacagcgatacgagctgggatttctgtagctgtatttaatatcgccggttcaaagcagcaacctgtgataggtcaggttttagaggggggtaactacatgacactcttcacctctgatgggcaagcgcttgcggcatcagccattaccgcaggaacgtcattccagtttacattcacctacccagtcaggatggcaagatccagataa

SEQ ID NO: 92223 - DNA, 249 bp, Enterobacter aerogenes
atggaagagctagaaacacagtttcatttaagattgccgaaagaagtacacggcaaaatgaagcagcgcgctaaaatgaacggccgctcattgaatgctgagatcacgttgataattgaagaagcgctggcgcaaccgtcaaagataacgggtttccgcgacgaagccgaacgactggcacacgaacacgccgagcagtttaaaaaggtagtgatcgaaacgttgaccgcaatgtatgtgaaaaaataa

SEQ ID NO: 92224 - DNA, 288 bp, Enterobacter aerogenes
atgaagaaattaactctggttattacggcagtaggactgcttgtcggatgcgctaactcatctaaaacttttgcgcctgatgggcgtgaagcatattcaatcgactgttccggcacagcgagaacatgggggatgtgtttagagaaagcgggtgacctctgcggggccaaagggtacgacacatttacttccgccggcgacaaaggctggattgccactgcgcagcctgactttgcaatggctggtagtacgatctctcgaaacttgctgatagcctgtaaaaagtag

SEQ ID NO: 92225 - DNA, 2721 bp, Enterobacter aerogenes
atggcgggtccttgggagaaatatcaacgcacgccaacggaaactttgccttctgaagggccgtggggcaaataccaacaacagcagaccgaacagtcgccaccgcaaacaggtggcgatattgtttctgctgctgagcagcgttttggacttcccgcagggttattaggcgcagtgatcagcaaagaaagcagcggtaactcaaaagcgattagcccgaaaggcgctattggtttagggcaggtaatgcccgatacggcgcgtgggatgggttacgaccccgaagagctcaagcgcaatccggcgctgcaggtcgaggccgcaggccgctatttaaaacagatgctcgatgcgcatggtggcaatgtagcggacgctttggctgcttacaactggggcccgggtaacatgcaaaaattgatgcgtggtgagaagacgcagatccctgctgagactgctaattacgtcacggaccctcgtttcgcgcagtggacgcaacccgttgtgcagcccggtagcgaaggtgaactggctcagcttgagcagcaagcagcccaaccgtggggacaggtgacgccagagccgacttttgcagagaaccttgaacaagctgggcggggtttggcgcaaagcgcggtgaacgtcgccaacatccctgggcaggtggttaataccgcgctcagcgctgcaggcgtaccggcggaagaccaggtgatgcaattacggttacctgagagtatgcggcctacagaccccttcgcgcagctgggcgcggagattggcccttaccttatccctgggctcggtgctgagcgtaccgcggcggctttggcctcaacagctggtgctggccgagcagagcgcattgcgactcagggggctaatatgctggcggaaaacctccctggcgctattgcacagtccacccagaataacgacttgtcgggcaaccttgccactggcctggccgggagcgtaatcgggcgcggactgctagccgctggcggccgcgcggcaggtgctatccgtaatgccgcccagcgtgaagggcaggcaacggtgtcagcgaccgagcgagcggagcaggctgcagtaggcgcagccccagagcaatcaacgttacaacagcccaaaatgcagccaaccgggggtgctattcctcctgaacaaggggtacaggatgtggctgcacgtgtcggcgcagctgttgatcgtgaaaatccgctgaggatggctgatgccgctcgtgatgtagccccgcgtcaggatgttatcgacgccgcgaaacaattaggtttgagtgaagacgatctgctgctttcgcatgtctccggcaaccaggcttatcgtgattttgagcaggcactaaaatccgtcccggggtcgcagctggcggcgcaggagaatcaggcgttaaccaaaatcgctaaatatgccagtgacctgacagatacagccggcgcgctgccggacaaggcggcgatgaatgacaaatttttgtcatctttccagcgtggtatagcgactgtgcagaataagtctgaccagctatataaccagatctcggctgccattcctaaaggccaaaccgtagaagcgaataatattattcgttatctggaaagtaaagccgatgatgttggtgggtgggaacatctgtcgacaaatgaaaaacgcgtatttaacgaggtatctcctgtcggcgccgatgcgtctccaccaacatatgcgcgtctggataatatccggaagcagatagggcaggctatcggcaagaactcagggccgtttcgcgatgaagagaccggcgcactgaaacagttatacgcgaatcttacagcagatcaggagcaggcggtcgtcgccgctggcatgggcgataaatggcaggcagccaagaaactgatcggggtgcgcactacgatggaagacgcgctaacaggcctgctgggtaaagacctgcgcggcgacattggtaccaaagccagtttggctatccgtaacctggccaagggcgatgcgaaaggattccgtgcgctgcagcaggatattccttcgccgcggatccggcgagaagtggtgtccacgtcgttgcgtgatgcattcagccagggaagcaggaaagagaacgaattccatctcccggggtttgtggactggtatcagggtcttaagtcctctggcactttaccgatgatggagcgagagttgggcgggagaacctcagcaaacttgcgtaacctgttcacggtatcacaggcggtacgccaggctcgcgagagcagtatccaaaccggtcgccttaacgcgtttattaagcagtttgatgccgatggcggtgtgctggataaaatataccgacacggtaagggcgctttggcgacgacaattctgggtcatattccggtggttggcccgacgctgagttatggcgcggttgcgggtatggcggccaaagaagcagccagaccggcgcgtagcgtggcggcagaccgtttgctggcgtcaccggaatttaggtctgttgtgaaacagacgaaaggcgcccggctaccggagaagggccagcaggtagttaatcgaaaaatggaagcgcgtatagccaattctgccgcatggaaatcgttctaccgaacgctgacgcgcgaggagaaacaggcaattgcgagagtaggtattattggctggctttcaggggaggccgatggcacggaatactga

SEQ ID NO: 92226 - DNA, 1347 bp, Enterobacter aerogenes
atggcgacatggcagcaaggcaatgccggtgggttgctggctggcattggcacgaataatacgaacgccccacaggctagcgatgcaaataccgcgttaagccttattcgcgacaataacgatcgtgcgcgtgcaggagagaacaacctcggcatgcagctggcgggagccgcgggctcaattttcaacagctataagcagggcgaacagttccaacgtcagaaggcattccagcaggagtatgcgaacgcgtacgaatcaggcgatcgcggagcaatgcgcgggctcgtagctaagtacccggaacagttcgaagcggttcgtaatggcatgggctttatcgatgaagaccagcgcaataccgtcggtagcctggcggcgtcggcgagactggcctcccaaagtcccgaagcgatgggacagtggctacagaaaaatgcgggcgacctgactcgtgttggggttaacccttctgatgtagcgcagatgtatcaacagaaccctgctggttttggtcagttcgttgatcatttgggaatcgcttcgctcggtccggataaatattttgacctgcaagcaaaccatgccaaattgcagcaacaaggacagtaccagcaagggcaattatcgcttggtctgcagcgtctgcagcagcaaactgcctatcaacaggagcaactggctcaaggtcagcagcaactgaacctgacagctcagaagaaccaggcggataacgccaacaagcagctggagttgagtttgaaagcaggcgagaacagcgcgaaatcccaggcagcccagcaggcagcggtacagaaaatgcaagattacgttggcgcacatcagagtaatgttaataacgtctccagcatgtacgacactgtgaatcaggtaaaagctatttcgcctgaagtcttcgaccgcgtatttggcttcggcggcacagttaactcccggatcccgggttcagagtcggcagatgcatggtccaaaatcgagcagatgcagggacaggcgcgcctgatgggggtaatcggtatgaaaggttccggcccggtgtccgactctgagggacaagccgcggcgcgtgcgttcctggcgattaaccagaacatgtcgccaaaagctgcacgtgcggcgattgataactggcagaaggtgctgcaacggcaaactgcttacctgcggaagcaacagccaatggtcgatacctaccaacggaaaatcgatacgtttaacgctggcctgagtggtacatctactacacctcgcgcagggcagactgagggcggttatacgttcatcggtggcgacccaagtaatcctaacagctggagaaagaactaa

SEQ ID NO: 92227 - DNA, 651 bp, Enterobacter aerogenes
atgctaattcatcagattgccaataagcacctcaacaaagctgtgtatcaaaagggtggtgatggcggtgccggcgcgcaggcagatgcaacaaaagatgcaacaaagctccagcgtgagatttggcagacgaacatgcagaaccttgctccgttcacgccacttgcacagcagtatattagccaactacaaaatttatcttcactcggcggccagcagcaagctctgggtgagtattacaactcaggccagttcaaagatcttgctaaccaagcgcgctatcagcagcttgcatctgctgaagcaaccgggggtttgggctcaacggcaaccagcaacgggctagcgacaatcgcgcctatgcttgggcagaactggttaactggccagatgaacaactaccaaaatctggcgaacatcggccttggcgcgttgcaggggcaggctaacgctggtcagtcctacgcaaacaacaccgggcaactactacagcagcaagcggctctctcggcggccaatgctaacagaccatcaaagcttggaggtgcactccaaggggcggcagcgggtgcagcggcaggtactgcaatcatgccgggatgggggacagctatcggggcgggcgttggtgcccttggttcactattttaa

SEQ ID NO: 92228 - DNA, 480 bp, Enterobacter aerogenes
atggaaattaagctgatagacaacccggtgcggttgcagtcgttcctgaacgaccaggccaacaccggcaacatcgtcgacgatggcgatcgttacttcatcaaaccggatgcggtttaccttggtgtttatgagggggtgacactggtcggcgtgcacgaagtacgaaatttctggcacagcgtcgtcgaatgccacgccatctacgacccgggttttcggggtaaatatgctctcaacggtcataggcttttctgtagatggctgctggctaattctcctttcactaacagcataacgatggtccctgattcgaccaaatatggtcgcgcgatcattcgactactgggcgcaacccgagtcggccatcttgatgacgcctatatcagtaacggtaagcccgtcggaatcactctctatcaattgcctcgctcgaaatatgaggaactcttaaatgctaattcatcagattgccaataa

SEQ ID NO: 92229 - DNA, 831 bp, Enterobacter aerogenes
atggccgacgacggtctcaaagaccccgtaacaatccaggctacgcgtatagacgcaactctcctgcctcgtaatattttctcccaaccataccttctgtatgtcgtccaacaaggtaccgacttaggaaatgtagccgggaaagcgaacgaagccgggcagggtgcatatgatgcgcaggttaaaaatgatgagcaagacctgatacttgcggaccatgaaacaaggctagaggcagcagaggcgacgctcattgaccatgagcagcgcatctctgccgcggaagccacgttagtagaccacgaacaacgcatctctgccgccgaggctgaacttgcggaccacgagacccgtatctcggctaacgaagcggaattggcggaccacgaaacgcgaatctcgcaaaataccgatgatatttcagcgttagacaatcgcttggatgtcgcagaaagcgacatcgataccctggaaaccaattcgatatcgaaggctgtttcaaccagtcaatcagtgcaggctactggcgggtcgtttctcgtcgggaatgtgccagtgcctacgactgacaagctgcaggtgggcggcagtctcaacgccagcgtttcgtacaaagtggcgggattgcaggtccttggcgctcgtcagacaggctggactgccgctaccggtacggcgaacaaaggggcgttcgatgctgaccaggtatttaccgttggtgctacctattcgcaaacagaagttcaggctttagcgaatgcgctgagagcagaacgccagcgtaccaaggcgctggaagatgcaatgagggcccacgggttaatcgactga

SEQ ID NO: 92230 - DNA, 1422 bp, Enterobacter aerogenes
atgccgactcttccactggctaaaggcctcggtaaagacttccgcaacgcggattacgtcgacctcttaccagttaatatgctggcaacaccgaaagaagtgcttaacgcggccgggtatctccgttcttttccggggatagccaaaaaagcggatgttgaggggctgtctcgcggggcggagtacaacactgtgcagaacgttgtttaccgcgttgccggtggcaagctgtataagggggccaacgaacaaggaagcgtatcgggtagctctcgggtaagtatggcgcatagcgcgaccagccaggccgtggctgccaatggtgtcatgaatctgtatcgttacgacgggacggtaaaaacactggagaactggccggaggcggttggtgatgtctcttatgctcagtacgaaatcggtagcgtacgtgacatttgccgagctcgtgggcgttacgtgtgggttaaagacggcacgcagacatttggggttactgacctggaagacgaatcgcatcctgatcggtttcgccctttttatagcgcagagtcgcaaccagacggcattcttggctgtggggtgtggcgtgattttgtggtgatgttcggctcaagcaccatagagtacttttcgcttaccggcgctgccgatagtacctccgcgatatatgtttctcagccgtcgttaatgttgcagaagggtattgcaggtacgtactgcaaaaccgagtttgcggatacttttgcatttattagtcatcaatccactggcgcgccatcgatttacctcatcaacagcgggcaggctacaacgatcgccacgtctactgttgagaaagtacttcgcgagtataccgcgggtgagctggcctcaggcgtactcgaaacagtgaggttcgacagccacgaattgcttatcgttcatctcccgcggcacgtgctgtgctacgacgcggcagccagccagaatgggccccagtggtgcattctcaaaaccgggctgttcaatgatgtgcaccgagcgattgattacatgtttgagggtaatcagatcactaccggtgacaaaaccgagccggtactcggcaccttgcaatttgactcctcagcgcagtacgacaaacaagcagaacacctgttatttacgccgatgttcaaggctaacaactcccgggtatttgatttcgagctggaagccgcaaccggagtttcacagtacgcagaacggctgtttatctctgcaacggcggacggctcaaattatggccgcgagcagatgatcgacgccaatgcgcctttcgtatacgacaagcgcgtgctgtggcgccgtattggtcgagtgcgtaaaaacatcggctttaaagtgcgtgtgataactcggtctccggtaacactgagcgactgctcagtaaggattgagtaa

SEQ ID NO: 92231 - DNA, 504 bp, Enterobacter aerogenes
atgaatctcacgactaaaggcgatctggtactcgccgctttgcgcaaaattggcatcgcctctaacgctactctgacggatgttgaacctcagtccgtagaggacggggtgaacgaccttgaaatgatgatggcggagtggcgggaggatcctgcggtcggtatcgatatcggatatcagtttgctgctgaaggcgaaccggcgatggatggcgatgaccacgggttgaaaatcgcacatcttagcgcggtctatcacaatctggctctgcgtatcgcacccgattacgaggtcgagccttcgcaaaaagtggtgaccaccgcgcgctacggtaaggagctgctagtcaaatcctcggcgttgaagcgggccaaaaaagtataccgcgacgccgggtacccaaaccggatgccgatcggctctggcaaccgcattccgacctataacggtcaccattatttccatcgtaaaggtgatgacgatgccgactcttccactggctaa

SEQ ID NO: 92232 - DNA, 225 bp, Enterobacter aerogenes
atgtcccagatgatttacaagcgtggtggcgacacgttggtgtgggggttgcgagcccacgtaatagtaatcgaggccgacgaactggaagcccacctggcggaaggctggctggaccacccgtcaaaattgtttgagccagagccagagccagagccagtagctaagaagccccgcaagaacaaggcagtaactgacgctgacaatgcggacgcgctaatttaa

SEQ ID NO: 92233 - DNA, 1290 bp, Enterobacter aerogenes
atgtctctcaatgaaggccaaatgatcacctatgcggtggacgaaattgtcgaaaccgtagaaaacctgacgcctatggcgcagaagaccaataagtacgatcctccgtcgccatccatgcagcgctccggcaacacgttctggctgccggttgagcaggaagcgccaacccagccgggatgggatctgactggcaaagccactgatgtgctggaattgtcggtgaagtgcaacatgggtgaacctgataacgactttttccagttacgtgctgacgatcttcgtgacgaacgttcttaccgtcgccgcatccaggcgtctgctaaaaaactggcaaataacgttgagaaagcgatcgcacagcaggcggtcgatatgggttcgctggttgtcactaaccctcaacctattggtaccgcggctggtagcggttgggatttcgtggctgatgctgaagaaatcatgtttgctcgcgagctaaatcgcgatgcaggcctgtcctacttcttcaacagtaaggactacaaagccgctggtcatgacctggtgaaccgcgacatgttcggccgcatccctgaagaagcctacaaaaacggtaccattcagcgtcaggtggcaggcttcgatgacgtgctgcgctctcctaaactgccaacccttgcagcttcaactgcaacggggctcactgtagctggtgctcagaagtttaaacctgaagcctggcgccttgatgccgatggtaataaagagaacgtcgataaccgtgttgcaactgtcaccttgagcgcaggtacaggcctgaagcgtggcgataagatctcctttgcgggggtgaaattcctgtcgcagatggctaaaaatgtgcttacccacgatgcaaccttcaccgttgttgcagtgaacggcgccaatgtaactatcgcaccgaaacctgtggcgttggatgatacttccctgacagcggcggaacgcgcctacgcgaacgtcaatacctctttggcggacacgatggcggtgaacatcctgaacgtgaaaactgcggaaacgaacgtgttctgggcagatgattccatccgtctggtatctcagccaatcccggctaaccacgagctgtttgccggtatgaaaacccagtcgttcgccatcccgggtgtaggcattaacggtatcttcgcgacgcagggcgatatttcgactctgaccggtaaatgccgtatcgcactgtggtatgcagcgtgcgcggtccgaccggaagcgatcggcgttggtctggcaaatcagaccgcttaa

SEQ ID NO: 92234 - DNA, 912 bp, Enterobacter aerogenes
atgaccgataccatcagtattcaggcaactgaagagcaaaacctgcccgtcacccagcaggcggcacctgcggatgatcagctgaccgacaatgccaacggcagcgcaggccaggaaagcggctttgatattgtcctgaaagacgatgaggcaaaacccaagcaggacccggcgacaaatgcccatttcgccgccaaacgcatcgagcgcaagcgccagcgcgagcttgaacagcagatggaggcggtgagccgtggcgaactgccagatgacctgcgcgtggcgcctgaactgccgccacagccggatattaaccagtatttgtccgacgacggccttgccaaatacgactacgaccagagccgggcgcttgccgctttcaacgctgccaataccgagtggctgatgaaagcgcaggacgcccgcagtaatgcagtagccgaacagggcaagaaaactcaggcgttcacgcagcagtcagccgtttatgtggatgcagctcgtaaacactacgacgcggccgaaaaactaaacctgccggattatcaggcgaaagaggacgctttccgctcaatgctcgctccgggcatcgacgcggaaattatggcgttgttccctgaaaaatccgcagcgattttctaccacctgggtgcaaacccggagaaggcgcgcagcatcctgagcctgccgcaaacgcaggccattatcgagctgacccgactgtcagaccgtttaactctcaaaccacgcggtaagcaaatctccggtgcgccggcagtagatgaaccagttcaggggcagcctgccgccgcgaaccgtgacgcgcttcagaaacagatggaggcggcggccagtaaaggcgataccgcgacttaccgcatgctgaaacaaaagcttaaggaactcaaataa

SEQ ID NO: 92235 - DNA, 2178 bp, Enterobacter aerogenes
atggctgacaacgacaagcagcaggacaggctgcaaaccatcctgacggtcttcgatcgggattggatgtcaagcgacgaagccagaaccgaagcgactaacgacctgtatttttcgcgagtgtcgcagtgggatgactggctgagtcaatatacaacgctgcaataccgcgggcaattcgacgttgtccgcccggtagtgcgtaagctggttgcagaaatgcgccagaacccgattgatgttctttaccgcccgaaagataacgccgacccgaacgcggccgatgtgctaatgggcatgtatcgcaccgatatgcgccacaacacggccaaaattgccgttaacgtggccgtgcgcgaacagattgaggcgggcgtcggtgcctggcgtctggttaccgaacatgaggaccaggacccgacaagcaataaccaagttatccgccgtctgccgatccacgaagcgtcctcgcatgtcatctgggacagtaacgccaagcagatggataagagtgacgccaagcacgtgacggttatcaacgccatgagtatggacggctggaagagctacgctgaggagaacggttttgaccccgatgatatcccggatttccagaatcctgaccagacatggcttttcccgtggctgaccaaggatgtggtttacgtcggtgagtactacgaggtcgaggagaagaaagaggccgttttcatctatcgggatccgctgacaggcgaaccggtaagctacttcaagcgagacatagcgaacgtgatcgacgacctcgccgagcgtggcatgcagaaaatcgccgaacgcaaggttaagcgccgccgcgtctataagtcgattatcacgtcttcatgcatcctgaaagaccgtgaacttatcgccggtgagcatctgcctatcatccctgtttatggggaatggggtttcgcgggcgacaaagaggtctacgagggtgtcgtccggctgacaaaagacggccagcgtctgcgtaacatgatcatgtcgttcaatgctgacattgttgcgcggaccccgaagaaaaaacctttcttctggccggagcagatcgccggttacgagtatatgtatagcgggcaggatgatttcccgtactacctgctgaaccgtactgacgagaacggcggcgatatcccgccacagccgcttgggtatatggataacccggaagtgccacaggccaatgcttatatgctcgaggcggcgactaacgcggtgaaagaagtcgcaacgctgggtgttgatactgaggctgcaggcggtaacgtggcgttcgacacggtcaaccagttgaacatgcgcgcagacatggaaacctatgtgtttcaggacaacctcgcaacggcgatgcgccgtgatggtgaggtttacgccgcgatggtcaacgacctctatgacgtgccgcgtactgtgcttatgacactcccagacggcagcgaaaaggacgtgcagttgctgacgcaggttgtggattaccagacgggtgaggtcgtcacgttgaacgacatccgcgggcggtatgaaacctatacagacaccgggccttcgttccagagcatgaaatcgcagaaccgggcggagatcctcgacctgctagccaaagtcccgcagggcacgcctgagtttcagatgctgctcctgcagtacttcacgctgctggatggcaagggcgtcgagatcatgcgcgattatgccaataagcagctggtgctgaagggactgaaacagccagagacggaagaagagcagcaggcagtgatgcaggcacaacagcagcaaggccagccggacgccgcaatggtgcaggcacagggtgtgctgctgcaggggcaggcagacctgcagagagcgcagaacgaccaggctaaaatccaggtcgaggcgttcaaagctcagaccgatgcacaggtttctgctgcgcgtgtggtcgagatactggcatctgccgatagtacgaaaaaacaagacgtgatcgctgcgcttaaactgctcggcgatttccagacgaagcagggcgatagcgcccgcgctgacgctgagcttgtcctcaaagggcaagaccaactccattcccgccgcatggatttaaccaatctgctgcggcaagcaaatcaaccctccggcggagcagccgagattcctcaatag

SEQ ID NO: 92236 - DNA, 1506 bp, Enterobacter aerogenes
gtggtaagcgcagcgattgacatcgacgacctgaccgacgaggagcaggccgaactgctcgcattgttggaagaggaagacgagtatcgccgcactcacttgctctatgaatacagcccatatgccaaacagcgggaatttctggacgctggcggcgacttcaccgaacgctgtttcatggccggtaaccagttaggaaaatccttcactggtggcgcagaggttagttttcacctcaccggcaggtacccagggagcgcggggtatccagacgacggcgcctatgaaggtgagtggaaaggccgaagattcaacgagccggttgtgttctgggttggcggggagaccaacgaaaccgtcaccaaaaccacacagcgcattctctgcggtcgtatcgaagagaacgacgagccaggctacggcctgatcccgaaagaagacatcatcagctggaagaaatcgccattctacccgaacctggtcgatcacctactggtgcgccaccatgcgccgaacggcgtagaagatggcatgtctatctgctatttcaaaccgtattcgcaggggcgccagcgctggcaaggggacacagtgcatggtgtctggttcgacgaagagccaccctatgctatctactctgaaggactgacgcgtaccaacaaatatggtcagttttcactgctgacgttcaccccactgatggggatgtcgcaggttgttgaaaagtttattaagaaccctagcaaggcgcaaaaagtggtcacgatgaccattcatgatgctgagcactacaccgacgaagaacgagagcggatcatcgagtcgtatcccgagcacgagcgagaggctcgcgctaaaggcattccgacgatgggcagcgggagaatattccagatccccgaagaaaccctcaaatgccagccgttcgcatgccctgaccacttctacgttatcaatggtcaggactttggctgggaccaccctcaggcgcatatacagctctggtgggataaagacgaggatgtgttctatctggctcgcgtgtggaaaaagagcgagaagaccgcaacggaagcctggagcgccgttaaggcctggtcaacccgtatccctgtagcgtggccgcacgacgggcaccagcacgaaaaaggcggtggggcacagcttaagacgcagtattccgatgcgggtttcctgatgttgaaagagcatgcaactttcgctgaagggggcaattccgtcgagtccggtcttatcgagctccgcgaccttatgctggaagggcgattcagggtgttcaacacctgtgaacctttcttcgaagagttccgtctctatcaccgcgacgagaacggcaagatttcgaagacaaacgacgatgttattgatgctgtgcgctatgcctacatgatgcgccgctttgcgcggatgatgcgtgatatcaggaagccaaaagagaaaaaaatcccagcgccaattcggccgatccaacgtcccacgaggtag

SEQ ID NO: 92237 - DNA, 561 bp, Enterobacter aerogenes
atgaccatgaaacttaaagcaaaacatgaggtgttttgtcgtgagtttctggtcgatctcaacgccactcaggcggcaattcgtgcgggctattccgccagtcgtgcacacgtcaccggcgccgaactctatggtaagcccgatatacgagcccgcattgacgagttaaagcgagagcgtatcgcgcacctgggcattgacgccaactacgtgttgctgcggctggtagagattgaccagatggatgcggcggacatcttcaacggcgacatgagccttaagccgattatcgactggccgccagtatggcgccgctatctgagcgggttcgaccttgccgaaatattcgaaggccgtggcgatgaccgggaaatgatcggcttcctgaagaaggtcaagtggcctgacaaggtcaaaaacctcgaactgattggcaagcatatcagcgtgcaggcctttaaagacaagattgagactgaggacgtgaccccgccagcgaatcgcgaggtacgccagtcacgcattaaggagctactcagccgtggtaagcgcagcgattga

SEQ ID NO: 92238 - DNA, 537 bp, Enterobacter aerogenes
atgagcaacaaatggccgatctttactggtaacaacactcaggtcaacgcggtgaaaatcagcgctattcgtcagcaggacaacggctacggcgttattacgccagagggaggttatcctgcggttactgttaccgacggttttatgcgtgactggaagcccgttgttggcggttacctggtacaggacgcaaccgggcagttggtgttcatgtccgccgccaatttcgaagcgcagtacacacccggcggcggcggtggtgatgtcacctccgcagatattactgatgccacaaccataggtaagcaggttcttacagcagcggaccaggcggcagctcgtacagcaatcggcgccggcacgtcaaatctggcgttaggcaccacggccagtactgcgctggcgggcaacggtacggcggctgcggctaccaaactggcaacagcacgcacgatcaccctaaccggtgcggttacaggctctgcgagctttgacggcaccggcaacatttctattgcaactaccgcaggcgcgtaa

SEQ ID NO: 92239 - DNA, 243 bp, Enterobacter aerogenes
atggcgattaccgaaatgactgaattgcaggctatgaacctcgagattttccgactggttcagagcgataccgcagcggccgagaaggcgatcaccttcatcggcggcgacaaactgaaatacgagctgttcaaggatggctacacccgggcccagactgaaactggcgttgtggctcgtgctgataaagcgatccgcaccgccgaggaagcgctggacctgtttcagactccaaccccgtga

SEQ ID NO: 92240 - DNA, 288 bp, Enterobacter aerogenes
atggaaatagtaaccaggctgaacctgattaagcagggggagattgaccccgctgttgaacaggataaagagatgatccggcgcattttgctggacgtgctggagaaagttgataccgaagacctgcgcacgctgatgctggtcgctattactgacgatggttcggtggtgcacgggcggcacgtacttggcaactactatgcgctactcggcggtttgaaccgtgctgcctgcatcgtcaaccagctgctggacggggttaatgatgccagcgagcaggaatactga

SEQ ID NO: 92241 - DNA, 324 bp, Enterobacter aerogenes
atgccaaagagcagatcgcactggacgcatcgggagcctcggcagatatcaaagtggctgttgcgaatgatgattgcgttaatcgctctgtgccttctggcgcagttaagcggctgcagcaatacgcgaacggtctacgtcaaagtgccgggggtaccgctgccggccagtctgacggctgagaccccgcagccggtaatccctgacaatctgacgtggggtgagagcctggatttaaacgttagcctgctgtcggcgctggggcagtgcaaccgggataaagctgatatcaggcaagccgagaaacaacgagcctcgcaatag

SEQ ID NO: 92242 - DNA, 480 bp, Enterobacter aerogenes
atgcaggaaattaataagcaacgccgggcttttctggacatgctcgcatggtctgagggtacagacaggcaggggcaacccaccagaaacgacggctatgacgtcatcgtaggcggggcgctcttctccgattacagcgaccacccccggaagctggtcagtcttccgaagctgggtatcaaatccaccgccgcggggcgctatcagcttctggccaagtggtgggatgcgtatcgcaagcagcttggtctgagagacttctccccggcgtcgcaggaccaggtagcgctgcagcaaatcagggaacgtggggcgctgtcgcttattgataacgggcagattcggcaggctatcgaccgctgcagcaacatctgggcttcactcccgggtgcgggctatggtcagtttgagcacaaggtggaagacctgatcgcaaggtttaaagccgctggcggctacgttgcggacatcccggcatga

SEQ ID NO: 92243 - DNA, 342 bp, Enterobacter aerogenes
atgaaaatgccaaacacaccgcatgggtgggcagacattagcgaaatgctggcgtcctggtggcgcggtgacgtgccgatcggcggcgtcatcatggcgatcgtgatggcggtcctccgaatggcctattcaggcagcagctggaaagaaacctttttcgaaggccttatgtgcggcgcgctggcgctgacaacgtactcagcacttgactacctggacgtgccaaaaacactcacggtgggaattggtggcttcatcggctttataggtgtgaaaaagctcagcgctttcctgtccagctatgtcggcaatcgtttcgggggcggcaatgcaggaaattaa

SEQ ID NO: 92244 - DNA, 435 bp, Enterobacter aerogenes
atgcgcaatattcaacaagttttagaaagatggggcggatgggcagcccaggacaataccgcggtgagctgggcgccagtcgcagccggatttaaaggtctggtagcgccaggcacgacaacgcgcctttcatgctgcgatgacgatggtctggtcattgacgcctgcgtgtgccgtctgcagcaggtgcgtaagccagaggaactggatgtcatcatgctgtattacgtccacggactgacaaaacgcgaaatagggcgccgccggcgctgttctgagggcttcatccgtcagcagctacaggttgcggagggcttcatcgaggggtgtctctgtatgctaggcgttggtcttcagatggatcccgaggtggaaattaaaagggatgaaaaaagtattagtgcgctacgcaaaaactgcgctacgctggtatga

SEQ ID NO: 92245 - DNA, 2169 bp, Enterobacter aerogenes
atgccagagattaagaactggggggcgacgcctgatgaatggttccacttcgatctggtgctgggccgtactgaccagctgctgccagtcgtgtgcaacccgaacgccgccatttcccccaacagtaaactgaaagcgctgggcaaaacgccgagcctgtataaccgcgaccgcctggctacgggtatcaaagactggacagagcatattgtgactgaacacgactttgcgcgctggtcaaaagagcctgattacgggatttgcgttcgtacgggtaacggctggctggcgctggactgcgacagcgaagacgcggacgtgcagcaaaagatccgcgacctgctcgcgcagctgctgggtgtcgttccgccgcggcgctggcgtgcgaacagcaacaaatgtctgtacctgctgggagtggaaggtgatttccgcaaacgcattcaccgcctcgagggcgaactcggcattatcgagttgctggccaacggccaacaattcgttgcctgcggcacacacagcagcggcgcccgtatcgaatgggataacgagctgccggatgatccgccggcagtgaccgctgaccagctcgaaacgctgtggcagcagctggccgacgtgctccctgtatcggtcaccaccgaagccggcagcagtaagatgcgcgaccgctcaaccttcacgcccggcgccaccgacgaaacggcggaatacctggacgccaacggctggactctgctggacggtaccaacggcgagcgttacatccgctgcccgttcgaggacggacacagcaccggcggcgacccgaccagtacggtttacttcccggcgggtaccgctggttttgacctcggccatttcaagtgcctgcacgccagctgcgcccaccgcaacgatggtgattacctgaacgctatcggcatccgcaacgacgatttcgaagatctcaccagtaccgaagtggccgagccgttaccgctgccggcattcgagcgtgacaaatgggggcgcattgaggcgaccatcagcaacgcggccaaagcggttgtgcgccctgacttcgttgatatcgatattcgtttcgaccagttccgcgatgaaattatgttcgcgccggcgggctcaggccagtggcaggcattcaccgatccggattacgcacgcctgcgtatcacgatggagaaacgcggctttaaagcagtagggcgtgagcttatccgcgatgtggtactgctggctgctgacgaacagcctttcgattctgcgacaacctggctgaacgggctggagtgggacggcgtaccgcgcatcgaacatttctaccacacccacttcggcaccgccgatacgccatatacccgcgcagtgtccatgtacatgtggacggcgctggcgggcagggtgctggagcccggcattaaagccgacatggtgcctattctcgtcgggcggcagggctgcggcaagtcctcgggtgtggaggcgctaagccccgatcctgctttcttcacagagatatcgttcgcggaaaaagacgatgacctagcgcgcaagatgcgcgggcgacttgtcgctgagattggcgagctgcgcggcctcaataccaaagagctggaatctatcaaggcattcgtgacgcgtacgcatgagaactggatccccaaataccgggaattcgctacacagttcccgcgtcgcctggtgttcatcggtaccaccaatgaagacgagttcctcgcggataaaaccggtaaccgccggtggttgcccgtcgaggtctccagcgtcgatgtgcaggccattaagcgcgacctgctgctgctttgggcggaagcccgtgagacgtttaagcgcctcggcggtatccagttccgcgatgctgaacgcctcggcgcaagcgtccatgagcagtacaccattaaggacgcgtggctcgagacggtcgagaaatggctcgatacacctgacctgatgactaatgacattccgcgaaaatgcgaatttttacgcgctagcgacgtgttgcgcgatgcgattgggttagacccgcgccacatcggaaagcgcgaagaaatgcggattagcaatgttttgcaaaattgcggttataagcgcgttcagcgtcgtgtcgacggaaaaatgactcgtatcttcgaaccagtgtaa

SEQ ID NO: 92246 - DNA, 213 bp, Enterobacter aerogenes
atgaccctggcaactcgagtaaaagagcgacgtaaagagctcaacatgacacaagtcgcattggctgaactcaccggggttagccagcaggcgattaacagaatagagagtggggtaatctcccggcctcgttatttgctggagatctccgcagcgcttcaatgtgaccctaactggcttctccacggccaacctaccgacaataaggcgtaa

SEQ ID NO: 92247 - DNA, 624 bp, Enterobacter aerogenes
atgtctctcgcagcacgcttcaaagcccgccgtatcgaacttggaatgactcaaacagaagtcgcaaacgtagctggggttagccagcaatcaatcgagtccatcgagagcgggagaacgcgaaaaccgagaaacgtactggagttggcaaaggcattgaaatgcagtcctgactggctactgaacggtaaaaacattatgccgctggcagaggttagcactcgccgcatacctattctcagctatgtacaggccgggcaatgcaccgaagcgagagactacaccaacatggaaggcgagttcgaatacgttctcgcagacgctgatgtgccggaaacctgcttcgccttacgcatagacggcgacagcatgcagccagaatttaaagagggagatattgttatcatcgacccggatctgtgccctgcgccaggtgaattcgtcgttgccaaaaataacgggcatgaagcaacctttaagaaataccgcccgttaggcatcggggttgaagacttcgaactggtaccgcttaaccctgattatcctgtattacgcagcgcggagctgccgttacgcgttattggcgtaatgattgagcaccgtatataccgccgtaaacgctaa

SEQ ID NO: 92248 - DNA, 513 bp, Enterobacter aerogenes
atgatcactgttaatcgagctgaatacttgtctgcgctgacatgcgctggcgtaaaagacgtccgttactacctgaatggtattttcttcgacccggagggttttattgtcggcaccgatggacatcgtttgttttgcgggaaagcagttactgaaggcgaaagcgtgatcatcaacgttaaagccaagccgccaaccaaattcaaccatgtagttatcgatactgaaaaacgcagcgctactttcattgatgataaagcgcaggaagtgttgatctcgccgattgaaattatcgacggccggtatccagattggcgccgggtatcacatttcaaaccaggtaaggtcgaagcgatcggtcttcatcttccctacctggctgatgcagcaaagtgctcgaaatatttcgacaagaaagctaacggcgtacttgaaacacaggactcagccggcgccacgcggatacgcataggcaaagaggcttatatgctcatcatgccagttcgaatgtaa

SEQ ID NO: 92249 - DNA, 150 bp, Enterobacter aerogenes
atgaaacctgaacacctccaccggctgacggggcgcgatgtgctccgctggcgccgtaaacatttcgacttcatcaccgggctggctatcgcacttgcgtgcggcctgaccgtttccttaatccttcttatcgcgaggactgccgcatga

SEQ ID NO: 92250 - DNA, 891 bp, Enterobacter aerogenes
atgagccttgaacaaaatctcgaactgaacaaccagctgctgaccaagcaaaactcgctgtacgaacgcaatattgcactgctcgaacgtctggtgcagtcgctggcgtctggcgtggcgcttaaagccgacaccgtagcgcaggttcaggagtaccgcgaaacagttaccgaatcgaaaaccgcgctgacgctcgacgatctgcagttcggcgacgttattgcgctggcgacgttctacccggtaccgcagcaaatcaccgaagacatgctgcagcgcgccattgactaccgcgacgccgaagctgacgcgcgagtagtgcagatcgatgcgctggacagcgccctgcaaggtgtgaaacgcgccaaagcgctactgaaacccgccctgctcgacctgtcccgcaacgttcttaagtactgggacgacctgccaaccatcggcgaacgccgcagctttgccgagcgccttctcgacgccgcaccaactgaacgcgacgcagtgaagccgaagaaagccagcggcaaaggcaatcaggaacgtaaaggcccgtttttcgtccagcatagcgacggaaaaattggcgaactgagcaccgaaagcgagctaaaagcgcatctcgatgcggggtacaaagagatcaataaggtcgagtatctccagttgcaggaagccgccgcgaaaaacaaagcacagacggaagacagcacaccagactttgaggcgctgcgtaaacaggctgaagagtgcattaaaactctgtgtaaaggcggttatcgcgctgaggccgtcggcatcctggacagcttcggcgcgaaaaagctgggcgaagtggaagacaaagacctcgctgatctgatcgccaaagccgaaaaagctctggagggctga

SEQ ID NO: 92251 - DNA, 1230 bp, Enterobacter aerogenes
atgccagacgttcacgcaagattatcaccatcatcagcgcatcggtggatgcgctgccccggtagcctggcgcttgagtcaacgcagccggataaaagttcggccttcgccgaggaaggcacccgcgcccacgaactggcggaaaaaatcttaaacggtagattgcaggggtttgagcaccagggtggaacagacccagaaatgcatgattacgtgctgcgctacgtcgatgctgtctggacactggccgaaggtaatgagctgatggtcgagcagcgcgtcgacttttcgcatatcgtcggcgtggaaaactcattcggtaccgccgacgccgttgtcattgtcggcaacgagctgcagatccacgaccttaaatatggccgcggtgtgcaggttgacgccgagcagaacgagcagctgcagttatacgccctcggcgcgctggagcagttcaacctgctgtacgacttcgacagcgtacgcctgttcatccatcagccgaggctgaaccatgtatcagaatgggctttatctgtggaagagctggaggcattcggccagcgggcgcaggaagcagcggcaaacgtgatcgtgatgttcaacatcgcggaatgcgaaggcgtgaataccctgccgctggagaacttcactcccggcgagaaacaatgccggttctgtaaagccagcgccatttgtactgcgcgcgagcagttccatatgcaaaccgtcgccggtgacttcgacgacctgacagcacctgtcagcgagctgatcaccaacgccatagcacgtgtaccgatgctcaccaacgaacaactggctgaaatatacgggcaagcggattttctcgaatcctggctaaaggccatccgcgaccgggtaaacagtgaactcaacgccgggcatccggtaccggggttcaagctggtaaccggtaagcagggtaaccgcacatggcgcaatgaagttgaagccgaagatctgctgaaatctttcaggctgaaacaggatcagatgtacagccagaaggtgataagcccgactcaggccgaaaagctgctgaagaaagaaagcccacgccgctggacgaaagtcgaagcgctgataacccgctctgatggtaagcccaccatcgcgccagaatccgacccgcgccccgcgctcaacgttaaccctgtaaacgattttgacgacgtgtccgaagatgcgatcgccgctgacctcatttga

SEQ ID NO: 92252 - DNA, 549 bp, Enterobacter aerogenes
atgaaattgaaactcaataacgtacgtctggccttccctgctctgttcgaagcgaaaaccgtgaacggcgaaggcgatccgcgcttctcggcggtcttcctgatggaccctaagcacccgcaactcgaagaagttcgcaaaacgcttaaacaggtggcgaaagagaagtggggcgagaagtgggaaaccatctacggccagctggagaaaaagctcaacctctgcctgcacgacggcgacgagaaagccgagtatgagggcttcccgggtaatttcttcctgaacgcggcgaacaaagcccgccctaccgttatcgaccgcgaccgtaccgcgctggtacaggccgacggccgcccgtatgccggctgctacgttaacgccgtggtagatatctgggcgcaggataacaactttggtaagcgcatcaacgcatcgctaagcggcgtccagttcctgcgcgacggtgacgcgttcgcgggcggcggtgtggcagcgccggacgacttcgacaatatcagcgaaggtgccgacgctggcgaactgatttaa

SEQ ID NO: 92253 - DNA, 192 bp, Enterobacter aerogenes
atgcgaaggatttatatccggctggccatcaccctggtcatagccgcacttgtctacggctttctggttccttccctgatctccatgcgggataccgttgccgttatctctggctttgcgctggcacttaccgcgccgccgtgcctgttcgccattttcaaaggcatctttgttactaaggaaaagaaatga

SEQ ID NO: 92254 - DNA, 837 bp, Enterobacter aerogenes
atgaagaaaatcatttttgctgtagttctcgctgtgtcagccgtcggtctcaccggttgcgaacgcgctaccgttccggctggttatgtcggcgtcaaagttgacctgtatggcgatgaaaaaggcgtacagcagcaagaggtcggcgtagggaaatactggctaacgtggaacgaagaaatttatcagttccctacctttaaccagttacataactatgagcagccgttcaccttccagactgctgactcgatggacgttaaagcccgcatcggcgttgagtattacgtcgaccccgagaaggttaccaaaatcttccagacctaccgcaagggcgtggatgaaatcaccgaagttaacctgcggcagaacattagcgacgcgctgatcaaccactccgggaagatgaatatcaactcgctggccgccggcggcaaaacgcagttgcttgaacaggtcacgcaggatctgaaacagaagctagaccctatcggtatcaggattgtgaaactgtcctgggttagcgatctggactatccgcaaaaagtgaaagagtccatcaacgcaaaaatagaagccacgcagcgcgcgctgttacgcgaaaacgagatcgcccagtcgaaagctgaagcgcagaaatcgattgagcaagcccgcggtgaagcggaatcgaccatgttgcgcgctaaagccgaggctgacgctatcgccctgcgaggtgaagcactccgcagcaaccccgaagtgttgcaactggaagcgatcaataagtggaacggcacgctgccgcagtacctgaccagcggcgccgcaacacctttcatccctctgaaataa

SEQ ID NO: 92255 - DNA, 2124 bp, Enterobacter aerogenes
atgtctgaaaccattctctggggcgacctggaaacctattgcgaaataccgatcaacaacggtacccacgcttatgcggaaggcgtcgaagtaatgctgttcgcctgggctattgatgacgaaccggttagcgtctgggatctgactgccggcgaacctatccccagcagactgcgcaaggttatcgccgaccctgacaccattctgttcttccataattcgcactttgaccgcacggtgctgcgccatgcaatgccggaattagcgccgccagttgagcgctggcgcgacacaatggtgcaggctcttgcgcacagtctccccggcgcgctgggggcgctctgcgaagtgctgggcgttccacaggacaaggcgaaggataaagaaggtaaatcgctgatccagctgttttgtaaaccccgtccgaagaacagcaagctgcgccgcgcaaccagcaaaacgcacccggtagagtggcagcggttcgttgcctacgctgggctggatattgaggcaatgcgcgaagtctataaacggttgccgaagtggaactatcagggcaccgagctggcgctgtggcatcgcgaccaatggatcaacgaccgcggcgtatgcatggacgtgcagctcgcacaggccgccatcgaagcggtagaccttgaacagaagcgactggcaaaacgtacgcaggtgatgaccgacggcgaagtgcaggcggccacccagcgcgatgcgatgattaagcacattgtcgaatcatacggcgtcgagctgccggatatgcaacgaagcacgctggaacgtcgcatcgctgaccctgatctgccgtcgccagtgaaagagctgctggctatccgcctgcaggccagcaccacgagcaccagtaagtacaaatcgctgatgaagggcatcagcagcgacgggcgtctgcgcggtacgctgcaattctgcggcgcatcgcgtaccgggcgctgggccgggcggctgttccagccccagaacctgccccgcccgacactcgagcaggagcgtattgacgagggcatcgaggcgctgaagtccggctgcgccgatctgcttttcgataacgtcatggagctgaccagttcggcgctgcgcggctgcattatggcgccagcgggtaaaaaactggttgtatcggacctgtcgaacatcgaaggccgaaagctggcctggcttgccggtgaagcgtggaaacttgacgcattcagggcttacgacacgctggtactcgaccagtccggcgcgccaatctgggacgctgccgcaaaagattataaacgtcgcggccctgacctctacaaactggcctatgccaaagcgttcaacatcaccccggaggaagtgaccaaataccagcgccagataggcaaggtgatggaactcggcctcggctttggtggcggcgtcgcggcgttcctgaccttcgctctggtctatggtctcgacctagaggagctggcaaccgccgcactgccgaatatcccgcgcgatgtgcagcgcgaggctaagagctggtatgacgaatcggtgaagcgcaaagcgacgtacggactatcggagcgcgtcttcattgcctgtgattcgcttaagcgcctgtggcgccgggcacacccggaaacctgcgatttctggtaccagctcgagcgcaccgtccgtgccgccattgctaccccaaagaaaacgctctattgcggctatctgaaagtgcgccgcgatggcgcatggctgcgcatccagttgccgtccgggcgggcgctctgctacccgtcgccgtcgattgagaagggaaacatcacctacatggggattaactcctactcgcgaaaatggcaacggctcaaaacctacggcggaaagctggtcgaaaacgtcacacaggccgctgcccgcgacgttctggccgggaatatgccgctgatcgagaacgccggatacaacattgtgctgaccgtgcacgatgaagtgatttgcgaagcgccggacaccgacgactacaccgacgctgcgctctcttccctgctctccactaaccccgaatgggcgcccgatatcccgctgaacgctggcggctttgaggcgtatcactaccgtaaggattga

SEQ ID NO: 92256 - DNA, 201 bp, Enterobacter aerogenes
atggctcttgaccaaaaccaacaagtacagcggctggtaattctcggcgctgtggcaacgcttagcgacgaagatcaggcggctattcgccatttgaaacaagaaattctggcgttagctgaaaccgcaaaggaaccggaatacgcgatttttgccctttcactcgcgggtctggactacgccgacaagtacgagggttga

SEQ ID NO: 92257 - DNA, 228 bp, Enterobacter aerogenes
atggcattcaaatacaaagacagcccgctgtattaccggtctgcgcgagaagccatgcagctggaaaaagctggtgaatatgaccgggcggcgaaggtctgggcgaaagccaaccgcgaatcacgaaacgatcttaaccaggagtggagcgaacgccgttccgacttctgcctgatgcaaaacatgcgcgaaaggcgcaaggcggtggacgatgagctatcgaggtaa

SEQ ID NO: 92258 - DNA, 294 bp, Enterobacter aerogenes
atggcctacgaacgcgagagcattatcgaaaagcatctcaccgctgcggtgaaagccgccggcgggattgcctataagttcgtatcacccgggcgccgttcggttcccgatcgtatcgtgctgctgcccggtggccgtatcgttttcgttgaatgtaaagcacccggcaaaccaccacgcgccgaccagttgcgcgagcatgaacggctgcgcgcgctgggctttaacgtggtggtgctggatagcaaagatctggaggggatattgtgcggggcgcctattacaacgaaatag

SEQ ID NO: 92259 - DNA, 969 bp, Enterobacter aerogenes
atgtcgcaccagacgacttgcgcggcttcacacagtgccatttcttcgccgggatcggcgtctggtcatatgctctgcgtctggccggatggccggataacaaaccggtctggacaggaagttgcccgtgccagcctttcagctcggctggtaaaggcgctgggtttgatgacgagcggcacctatggccagcattattccacctcatcagcgagcgacgccctgagctggtatttggcgaacaggttgcgggagtcaatgcctggttcgatcttgtacaaactgacgtggaagcaatggactacacctttgggcttgtcccgtttccggctgcgggcgtcggtgccccgcatatcagagacagagcatattgggtggccgacgccagcggcgagcgatcacagcggtggaggaagcgcctcaatagcattgaggaaaatgtcaggagagcggcgcccctccggcaacccgttacacagttcgctacgggactttgttcacctggcgggatggtacaccccaacatgcaacaccaatccccagccggaaacaaagcgcggtctggaaacgttggcgggatcagccaggctagcaggctggccaagtcctctggcgagcaataccaaaactgcctaccaggacgcggagaaagtgatagcgcgtcagcaggcgggacggcaaccgaatttacaggattatgcttgtctgagcggatggccgacagttacaacgatcgacaacaatcaggttcggggagagggagcggccgccaaccacaaggagcggggaacgacgctaggcggagcctcaagattatgcggcccgatacgattaacggctgctgggacgatgctgactggctcctgtgcagggatggccgctggaggccagttgaacccggcacattcccgctggctcatgggattaccgccagagtgggacgactgcgcgcctacggaaacgcgatag

SEQ ID NO: 92260 - DNA, 1401 bp, Enterobacter aerogenes
atgacctcatctaaaattttcaccccccgcccctatcaagatctcatcatcaaccacgaaatcgatatccagcgctgcaacatctgggcgggtatgggcatgggtaaaactgtagcgacgctgaccacgctggaagatctcttcatgtgcggcgcagagacacagccggctctggtactggcgccgctgcgcgtggcggccagcacatggcctgatgaggctgtaaagtggggccacctgcgaaatatcgaagtgcagccgattgtcggtacagccaaagcgcgcgctgcggcgctggcaaacagcaatgccagcgtgttcactatcaactacgacaatctggtgtggctggccgaagaactcggcggccgatggcctttcgctaccgtcatccctgacgaaagcacccggcttaagtcgttccggttgcgtggcggtggtaaacgcgcggcagcactcggcaaagtggcacataagcacgtgcgtcgctggatgaacctaaccggcacgccggcgccgaatggcctggtggatttgtgggggcaagcgtggtttgtcgatcaggggcagcgcctcgggcgcacgtatggcgcatttacctcccgctggtttaactcgatacagttccccggccagagctggacaaagctggagccgtttgctcactcgcaggacgaaatacagcgcgcgctggccgatgtgactatctcgctggatgccgccgactggttcgatatcaaagagcccatccataacgtgatccgcgtggacatgccaccaaaagcgcgccagcagtatcgcgagatggaaaaagaaatgttcctcgagctgaacggcgaaggtatcgaagcgccgaacgctgcggccaaaaccgttaaatgtctgcaaatcgccagcggcgcggtgtacaccgacgaagctggcagttggtcagaacttcacgacgctaagctgcaggcactggacagcatactcactgaagcagctggcgcgccggtgctggtcgcctaccactggaaacacgaccttgagcgactgctcaaagcctttccccgcggccgccatcttgaccaggatccgcagacgctgcgcgactggaacgccgggaaaataccggtgttcttcgcccatccagccagcgcaggccacggcctgaatatgcaggacggtggcaacatactggtgtttttctcgcactggtgggatctggagcagtaccagcaaattatcgaacgtatcgggccaacccggcagattcaggccggacacaaccgcccggtattcatacatcacattatcgccgccggcactatggatgaaatggtgatggaacggcgcaattctaaacgtacagtgcaggatatcctgctcgatgccatgaaaaaaagaggtatagcatga

SEQ ID NO: 92261 - DNA, 201 bp, Enterobacter aerogenes
atgagcgagcaacccgacgatctgctcaccccggatgaggtatgccagaagctgggcataacccagaagacgttatgcgactggaatataaagcaccggcatcgcgccatactggcccccatccgtttcagtgcaaaagtggttcgttatgagcgccgtaacgtcgacgccttcatccagaaatgccgtagccagtattaa

SEQ ID NO: 92262 - DNA, 1398 bp, Enterobacter aerogenes
atgccgcgcactgtaacacataaaccagatagccccaataatgacgatgttttagccgcgtcagaaaagtgggactcctgtaaacctccctataccagcgcacacatgaaaatctgtgttgctgccgccaaaatcatcctcgctgcttccggcgtggctcgccgttccaaatacgaaaaagagaactatctccgtatcgatttcagcaaagccggtaaggttacattttacgccgagtttccaaaaaagatggggctcaaaggcaaaaagctcggcgagtggccggagcttgccattcagctggcgcgcgaaaaagcgttaggtatggccgaaggtggcctgcgagccgagtccatacatgcagcgttggaaatgtaccgggatgacctcaaagccaaagtggcccgtcagaagttaagcccggatagtttcaccacctacggggtgcgtattgaccggattaaagcaacgttcggcccacgggaagtattctgcgatgtaacgtacactcggctggttgaagtgctggacgagtggatcgccacccgttcgaacaataacgccctggagttgtttgccgagctccgtcggttctggaagttctgcgcacctacgctttgcaatggccgcaacgttgctgccagcctgcccgacgattatgtatcttctcgcgttcagaaacctacccccacacggctttttaccgatattgaatcaatcgctcgcctctggctcaatgttgccgcctgtacctctgtacaccagaaaaatgctgttcgcttcatgatcatcaccggcgttcgtccgattaatgtccataacctgcgctgggactacgttaacgagggggctggcgaaattgtttatccggaaggggttatcggtatgcgcggggctatgaaaacacaaaaggctttccgcctgccgataacgccagagatccggcggattatcgacgagcagaaagcctggcgtgattcagttcctgagtgcaataacgattttgtattcctgcagccgcgtgatccaatgcagccattttcaaagcgatcgctggataagctggtgaaaacctacagcccggaaggcgctgttaaaggtatgaagcatgacgggactattaaggggaaggagggcgcatttaatacgatgtgtcgtaagtttctaaagagcaatgttattgccctgatgaaggaaagaggctattcccggtcagaccgaagggaaatcagcctcctgtgtcttcaccactccagcaagtcagatgacccgatggcagaacattacgacttttcagacgagattttacaggaagagattgcgttgaagcgcgaagccttcgaggctcacgaaaggagcatacttgcgcaggctgcgctattacggcgacggggttaa

SEQ ID NO: 92263 - DNA, 1086 bp, Enterobacter aerogenes
atgaaaaaaacctgtcgtattgccgccatccccggtgacggaattggtaaagaagttctgcctgaaggtattcgcgtgctgcaagccgccgcgcagcgttgggatctgtcgctgagcttcgagcagatggagtgggcaagctgcgaatattacgcccatcacggcaagatgatgccggacgactggcgcgagcagttgcagggcttcgatgctatctatttcggcgccgtcggctggccggataccgtccccgaccatatctcgctttgggggtcgctgctgaagttccgccgtgagttcgatcagtacgtcaacctgcgcccggtgcgcctgttccccggcgtcccctgtccgctggcaggtaaaaaggccggcgacatcgatttttacgtggtgcgcgaaaataccgaaggcgaatattccgccctcggcggccgcgccaatgaaggcaccgagcatgaagtggtgattcaggagtcggtcttcacccgccgcggcgttgaccgaatcctgcgctacgcctttgagctggcgcaaagccgcccgcgtaaaacgctgacctcagcaaccaaatctaacggccttgcgatcagcatgccctactgggatgagcgcgtggaagagatggccaaaagctatcctgaaattcgctgggacaagcagcatatcgatattctctgcgcccgcttcgtgctgcagccggaacgtttcgacgtggtcgtcggctccaatttgtttggcgatattctgtcggatctcggcccggcctgtaccggcactatcggtattgcgccgtcggctaacctgaacccagagcggaccttcccgtcgctgttcgaaccggttcacgggtcggcgccggatatctacggtaaaaatatcgccaacccgatagctaccgtttgggccggggcgatgatgctcgatttcctcggaaacggcgacgagcgctaccatgccgcgcacaacggcattctggcggcgatagagcaggtgatcgccagcgggccgaaaaccccggacatgaaaggcaacgcctcaacgcagcaggtcagcgacgctatctgtaaggccattttggcgtaa

SEQ ID NO: 92264 - DNA, 621 bp, Enterobacter aerogenes
atgttcgtcacccgcgtctcccgcggccgtaagattaaagaggtgatctgggggcttatcctcggcagcaccgtcggctgctggttcttcttcggggtgatggaaagctatgccatgcatcagttcgtaaacggcgtgattaacgtgccgcaggtgatgcagtccctcggcggcgaaaccgccgtccaacaggtgctgatgtcgctgccggcgggcaagctgttcctcgccgcctatctgttcgtaatgatcgttttcctcgcttcgcacatggatgcggtggcttacaccatggcggcgaccagtacccgtaacctgcgcgaaggcgaggatccggatcgcggcatgcgcctgttctggtgcgtggtgataacccttatcccgctatcgattctgtttaccggcgcttcgctggaaaccatgaaaaccaccgtggtgctgaccgccttaccgttccttgccattttactgatcaagaccggcggcttcgtacgctggctaaaacaggactacgcccacgtgcctgtgcatcagatagaaacccatacgcccgagccgatcgttaaagccgagacgctgccggttggcgcggtactcaaaggcgacggccagtcgctgtaa

SEQ ID NO: 92265 - DNA, 1269 bp, Enterobacter aerogenes
atggcacaagtaattaataccaacagcctgtcgctgatggcgcaaaataacctgaacaaatcccagtcttccctgggcacggcgattgagcgtctgtcttccggtctgcgcatcaacagcgccaaggacgatgccgcgggtcaggcgatctccaaccgtttcaccgctaacatcaaaggcctgactcaggcttcccgtaacgctaacgacggtatctccctggcgcagaccaccgaaggcgcgctgaacgaagtcaacgataacctgcagaatatccgtcgtctgaccgtacaatcgcagaacggctccaactccgcaagcgacctgcagtctatccaggatgaaatctcccagcgtctgtctgaaatcaaccgtatctccgaacagaccgatttcaacggcgttaaagtcctgagcggcgaccagaagctgaccatccaggtcggcgccaacgacggcgaaaccatcgatatcgatctgaaagatatcaatgcgaagactctgggtctggataagttcagcgtggctaatccgattgatgcggcgactcagattggtactgctgatattgataaagtgggtggcactgcagcgaaagatattcctgttactgctaacgggacaggaactacagatggcaaactgtataaagatgacaataaatactatgttaaggatggcggtaagacttatgaagcgaaacttgacgccgatactggagagtatacttttgacacgactggtgctgaatacacagtaagtggtactgaaagtgtcgtagataaagttaccatcccggcaagtggtggagtaagcgtaaccggtttagcagcaaatgaaaaattgcatacatttaccgatgccaaaggtaataaagatggttatgcaattgaaggaaaagataaagacggtaacacagcgtactataaagctaccgttgatgaaaaaacgggtaaagtggtaaaaggcgatcaactgcaaaccacagaaaaaactgccgatccgctggctaccctcgacaaagccctgtcccaggttgaccaactgcgctcctccctgggtgcggtacagaaccgtttcgattctgttatcaacaacctgaacagcaccgtgaacaacctgtccgcgtcccagtcccgtattcaggatgctgactacgcgaccgaagtgtccaacatgagccgcgcgaacatcctgcagcaggcgggtacctccgtgctggcgcaggctaaccagtcgactcagaacgtcctgtctctgctgcgttaa

SEQ ID NO: 92266 - DNA, 327 bp, Enterobacter aerogenes
gtgggaaagcagctaacagaagatgatcttcgtgaacatggcttcaccgataaagagattgcccgcctgcgcgaaatcctgacgcggcaagaaagccaaaacaaaagctattttgatttaatcgatgaacttcgcaaaagactttgggctggagtcttaggtttttttattgtttttatagtgctcattcattggtgttataattatgagtcaattaatcattttgcctattttttcattttattattcggtttctcggtagtttacaaactaactccgtttccaatggcgctcaaagcatacaaattgtatctaaaaataagatag

SEQ ID NO: 92267 - DNA, 345 bp, Enterobacter aerogenes
atgagcgaacaacctcatcacagcgatattccccatcttctggattgggctaacgcgatggcttttgtcgccagccattatcggcagagctattcgccggggacgctgcatgcggcggcggagtgggcgacgcagaaaacactgcctgatgcgcttaaacatctctgtcggcacgccggtttgcattgtcaatttctcaacggcaacgaccggcgtatgtcggcgtggcgcttgccgctagtcgttcagcttaaagatgggcagattggtattatcgaaagctttgatcttaataatttagttggcatccgttttgtcaaagagctcaccttactcagccagtga

SEQ ID NO: 92268 - DNA, 1437 bp, Enterobacter aerogenes
atgcgtctatttcaacaaaaagggattgtcagcgtttacaggttcagcacaattttgctgtcgttaagcgtaatattaacggctgatgcggaagagctttcatttccgccgactaacattagtactcagagattaaacgatagccaacaggtcgccggatattctgaggatctcatcaatccgcagagtcatttaaccggcccgttagatattgccaccgcggtaaaatcagcggtcaactggcacccggcgattactcagcaggtgagtaaacttcaggaacaggtgcagcgcgtggatgtagctaaagccaaatattatccccaggtgaacgcggggatgaataatggttatagtaattcatactccgattccggctattcaccctcattagttgtttctgtttcacaaatgctctacgacttcggcaaagtctcaagctcggtcagagcggcagatgccgccgttgcccagcagcaggcgatggtgatgcttaatatcgaccaggtggcccatgatactgctggcgcggtggtgcagatgcagggctaccagaagctggtgaaaatcgctcaggcacaagttgattcgctaaaacaaattggcgatctgatccgccagcgtaacgatgccggggcaacttcgctctctgatgttgtgcagactgacactcgcgttgagggagcgcaggcgacgcttatccaatatcaggcggcgctcgaacgctggaaagcgactctggccacctatcttgggcttggcagtattacctccgtgactgacggcgtgccgcaggatatggatgcggcctgtgccgtaagtaaaattgattatcgtgccgtacccgctgtgctggccgctttagcgcaagccacgcaggcgcaggcgcagctcgataacgcgacagcgcaaatgctaccgaccatctctctggaaccccaggtgacgcattatctgaatgataattacgccaacagcgccgtgttaaataaaacgcaatattcggcgtgggtcaaagtggaaatgccaatctaccaggggggggcattaacggcctcccgcgaagcggcgcagcaaattttatctgcggctaacgccgggattagaaacgcccaactcgatgccagtcagaaattaagcgcctcgcgcgatgaggcgctgaatcttaaacaatccatcagtatccagcgccgccagcagcaacttggcgagcaaactcgcgcgctctatcaggatcaatatctgcagttgggtacgcgtccgctactggatctgcttaacgtcgatcaggaaatctatcaggcgcaattcagccaggtgttaactgaagcacaactgcgtaatctggagctggactgtctgttcagtactggaaagatgcgctccgtttttgctctggataatcaaagcatccagggtgtggagatccgcccatga

SEQ ID NO: 92269 - DNA, 1116 bp, Enterobacter aerogenes
atgacattgaatggaaaacgcaggaaagtctggtggctgttggcgttagtggtagtgatagcggccatttggggatggcgcattcttaacgcgccgttgccgcagtatcaaacgctggtggcgcgcaaaagcgacctgcagcagagcgttctggcgacgggcaaattagatgcgctgcgtaaagtcgacgtcggcgcccaggtcagcggccagttgaaaacgctgcgcgtcaatattggcgataaagtgcagaaagaccagctactgggggttatcgacccggagcaggcggaaaaccagattaaagaagtcgacgcgacgctcatggaactgcgcgcgcagttgaaacaggcgcaggccgaacgcaagctcgcgcaagtaacattagcgcgccagcagcagttggcgcagcgtcagctggtctcacgtcaggatctggataccgccgccaccgatgtggcggtgaaagaggcgcaaatcggcaccatcgaagcgcagatcaaacgcaaccaggcgaccctcgacaccgcgaaaaccaacctcgactatacgcgtatcctggcgccgatgtccggtgaagtgacacaaatcactaccctgcagggacagacggtgattgccgcccagcaggcgccaaacatcctgaccctggcggacctcagtaccatgctggtcaaagcgcaggtttcggaagctgacgtgatccatcttaagccggggcaaaaagcctggtttacggtactcggcgatcctctgactcgttacgaaggtacgctgaaggatattctgccgacgccggaaaaggtcaatgatgccatattttattatgcgcgttttgaagtccctaacccgcaggggatcctgcgtcttgaaatgactgcgcaggtgcatatccagctagcggaagtgaaaaacgtgattactattccccttagcgcgctgggcgacgccatcggcgataaccgctacaacgtgcgcctgctgcgcaacggggaagtgaaagagcgtgaaatcgttattggcgcgcgtaacgataccgatgtggcggtagcgaaagggctggaagagggcgatgaggtgattatcagcgaaagcacgcccggagcgacaaaatga

SEQ ID NO: 92270 - DNA, 957 bp, Enterobacter aerogenes
atgtcttcaatcgctgaaaatccagattccgaactatcgcaacctaaaacaggttggaaacttttctgccgtctcgccagcggagagataacgccgggacgtgcctggcgtaacccggcataccgccgcaagttcattttacgttcattgatgaagccatttgccaccgcgcaattattaaacgacctggcgcgtcagcctcagcttccggccatgcttaacgtacagccgggtttaccctgccgactgcatcgtccctggttgtcggtaaattgcagccaacagcagattctggatgcgctcaatttccactatcaagctatgagtgaacaattgacgccgctggcgctaaatgggtatttatcacgtgcgggaaccctgctggcgactatcagcggtaaagacgatcggcagtttcgtattgtgctgcgcgctgagccgaatctcgataaggaaggcgaagccacgctaagtttcgtgacagaagaagatatcgtacttgccgaactcacctttacgctttgtcgactggaaggcaaacgcgtcatgtggattggcgggcttcaaggtgccaaagcaaatgtatcacatcagttgatacaagatgcgacgaaagcctgtcatggactgttcccgaaacgactgctggtggaagcggcgatgtcaatggggcaatcattctctgttgagcgcctgcaggcagtgagcaataccacacatatttatcgcagtattcgctatcgcaagaaaaaacagggattactgcatgcggattacgatagtttttggcaatcgttaggcgcgcatccgctggcgagcggcgatttccaactgccgctggtcatgccgcgtaaaccaatggaagagattgccagtaaaaaacgagcggaataccgccgtcgttatgccttactggatagcctacagcaacagagcgtcgcatgctgccgcccctaa

SEQ ID NO: 92271 - DNA, 1659 bp, Enterobacter aerogenes
atgcatcttgagcgtgtagagatcgtcggatttcgcggtatcaaccgtttatcgttgatgcttgagcaaaacaatgtgctgatcggcgaaaacgcctggggtaaatccagcctgctggacgctctgacgctgctgttatcgccggaatttgacctgtaccatttcgtgcgcgatgacttctggtttccacctggcgatattcagggacgtgagcatcatctgcatatcattttaactttccgtgaaaatgaacccgggcgccatcgcgtgcgccgttttcgtccgcttagcgattgctgggtgccctgtgatgacggctatcagcgcattttctatcgtcttgagggtgagctggcggatgacggcagcgtgatgaccctgcgtagttttattaactgccagggagaggcgctggagatgcaagatatcgacaatctggcgcgccacctggtgcgcttaatgccggtattgcgcctgcgcgacgcccgctttatgcgccgaattcacaacggtaccgtgccgcattcgccgcaaattgagatcaccgcccgtcagttggattttctctcccgcgaactggtcaatcatccgcaaaatctcaccgatgggcaaatccgcgaagggctgtcggcgatggtgcaactgctggaacattatttcgccgagcagagcagcgcgcaaagccgcaatcgcctgatgcgccgccgttctcatgacgaacaacgcagctggcgctatctcgatattattaaccgaatgattgataaacccggcggacgcagtcatcgcgtgatcctgcttgggctgttctccactttattacaggcgaagggaaccgtccgactcgatcgcgatgcgcggccgctgctgctgattgaggacccggaaacgcgtctgcatccgatcatgctctcggtcgcctggcatttattgaatttgctaccgctgcagcgagtgaccacgaccaattccggcgagctgttgtcgttgacgccggttgagcaggtgtgtcgcctggtgcgtgaatcgtcccgcgtctcggcgtggcggctcggtcccggcgggatgaatgcggaagatagccgccgcattgcgtttcacattcgcttcaaccgcgcctcatcgctgtttgcccgctgctggttgctggtggaaggcgaaacggaaacctgggttatcaacgaactggcgcgccagtgcgggcatcatttcgacgctgaaggggtgaaggtgattgaattcgcccaatccgggctcaagccgctgattaaattcgcccgccggatggggattgaatggcatgtgctggttgatggcgatgaggcaggaaagaagtatgccgctacggtacgtgggctgctcaacaatgataacgaactggaacgggtgcacttaaccatgcttccggcaatggacatggaacactttatgtatcgtcaggggttcgacgatgtataccaccgtgtggcgcagatcccggagaatatgccgatgaacatgcgccgggtgataacaaaagccatacatcgttcgtcgaaacccgatctggcgatagaggtcgcgatggaggccgggcggcggggagtagacgccgtcccgacattactgaaaaagatgttttcccgcgtgctgtggctggcgcgtgggcgcgctgattag

SEQ ID NO: 92272 - DNA, 564 bp, Enterobacter aerogenes
atgaacaaggatgtattgcgtcttgcgctggcggcgatgtgttttacctctgtagcttccgcacaaagttattcctgcaagtatttagcgaaaatcagcgcagaagaggagaccctggtgaattgcgccagttgggttgatggagagccacggttttccccgcgcttatctcggcttgcgttgtctgctaatggcctttaccagctgtatatcagttctgctgagtggccaggtagtgggcgctattacttacttaacgatcgcagtgaggcgctgtctttgctgccgtttgataatggcggcgatgaatttgctgaaggactggtgcgttctcgccagcagggtaaggtcggtttttataatgcacagcttcaggcggtaattatcccgcagtttgacttcgcctggccgtttaaagaagggaaagcgctggtctgtaacggttgcaatacacggcgtgatggcgagcatacgtcgatgattggcgggcagtggttttatatcgataaatcaggcgcgcgtatttcgcctattggcagcaaaccgggtgacttgctgccgtaa

SEQ ID NO: 92273 - DNA, 723 bp, Enterobacter aerogenes
atgacgccgaccattgatctgctgcgtaaccaccgttccatccgccattttaccgacgcgccgattagcgaccaacagcgtgaggcgatcattgccggggcgcaaggggcttccagctccagctttttacaatgtacctcgattattcgcattaccgacccgcagatgcgtgagcagctggttgagttgaccggaggccagcagcacgtggcgcaggcagcggagttttgggtattctgcgccgatttcaaccgccacctgcaaatttgcccgcaagcgcagttgggactggctgaacagctgctgctgggcgttgtcgacaccgcgctaatggcgcagaatgccttaatcgccgcggaatccctgggattaggcggcgtctatattggcggcctgcgtaataacattgacgcggtaaccgagctgctgcagctgccgaaacacgtgttgccgctgtttggcctgtgccttggctggcctgctgacgacccgcaggttaagccgcgtattccgcctgcgatgctggtgcatgagaatcactatcaaccgcttgatcaacaggtgctggcgcagtatgacgaacagctggcggactattatctgacgcgcggcagcaatacccgccgcgatacctggagcgatcatatccgccgcaccatcatcaaagagagccggccgtttattctcgattatttgcataaacagggctgggcaacgcgctga

SEQ ID NO: 92274 - DNA, 699 bp, Enterobacter aerogenes
atgttaacgcaaagtcttattaatatattcagcaaagaaatgatagggacagttatcaccgccctgcccatcataaaagccatcttaaattacttaaacaaacctttagatgacatcgatgatatatataaaaaagccaaattaagcacatggcgaattcgatttttcatgatcaaaatatcgacaaaagagatacccaggctgactcgcgcaaatgtgatattgttttccatcgtcttattatttctttttggcagcttagcaaccagttcatattatggcgtaaagctattacaagtacgtccgggctggacatctttaattcttaaagaaacggatgaatggtttttaatctcggaaaaagaagcatcagaacacgcattccatccctcatggcatctcacagaaaaaagctgtctctctggcgaggccaagcaactggcaaatgacaaaataataacaccacaactagggagatttatttgtgaatccttcaccaatacagatgacaaagagaacataatgaaatccattaaagataccactcacaataaacctgtcatcacctttctcatctcgatcattaccgttggctgcatatggttcataaccagcttaatattgacgttaatatatactctcagacttaaaaaattcattatccgggagcatgaaaaagcctatgactatctaacatag

SEQ ID NO: 92275 - DNA, 252 bp, Enterobacter aerogenes
atgattgatgtacagcaggaacaaacacttcagaagcacggttttaccagcaaagagatcaatatgctgcgaaaaggacttgagagtccacaacgtaaagatcaaagcctgcaggtcttgttggtggagctaaggcgtcgtttttacatgtcctgtatcatcatcattgccctgcttatcttttgcggctacgcggtgctgactaattataccggttatgggctggcttactttgctgcacctttgcactaa

SEQ ID NO: 92276 - DNA, 1233 bp, Enterobacter aerogenes
atgcagaattattcgttatcaggtaagcgcctcggtcgtcaggcgttgctgttcccgctgtgccttgtgttatatgaattctccacctatatcggcaacgatatgatccaaccgggtatgctcgcggtggtgcaggagtttcaggtcggcaatgagtgggtccccacctctatgaccgcctatctggcgggggggatgtttttgcagtggctgttggggccgctgtcggatcgtattggccgccgtccggtgatgctgaccggggtggtgtggtttatcgtcacctgtctggcgacgctgctggcgcaaaccattgagcaatttaccctgctgcgtttcctgcagggcatcagcctgtgctttatcggcgcggtgggctatgcggctatccaggagtcgtttgaggaggcggtgtgtatcaaaattaccgccctgatggctaacgtcgcgctgattgcgccactgctcgggccgctggtcggcgctgcctgggtgcatatgctgccgtgggagatgatgtttgtgctgttcgccgtgctggcggccatctcctttgtggggctgcagcgggcgatgccggaaacggcgacgcggatgggggaaaaactgtcggtaaaagagctgggccgcgactatcgtctggtgttgaaaaacctgcgctttgtcgccggggcgctggcgaccggttttgttagcctgccgctgctggcgtggattgcgcaatcgccggtgattatcatcagcggcgagcaggccaccagctatgagtacggcatgctgcaggtgccgattttcggcgcgctgatcgccggcaacctggtgctggcgcgtctgacctcgcgccgctcggtacgttcgctgattattatgggcggctggccgattatgtttggcctgctcctgtcggcggcggccacggtggtctcgtcccatgcttatctgtggatgaccgctggtttaagcttctacgctttcgggattggcctggctaacgccgggctggtgcgattaacgttgttcgccagcgaaatgagtaaagggacggtttcggcggcgatgggtatgctgcagatgctgatctttaccgtgggcatagagcttagcaagcatgcgtatgagcttggcggtaacggcctgttcagcctgtttaacctgctgggcggggtgctatggctggggctgattatttacttcctgaaagataaaagcgtcggcagttcgcagcaggcgtga

SEQ ID NO: 92277 - DNA, 903 bp, Enterobacter aerogenes
atgaaaaagaaaatcgtcattgcgctgggtggtaacgcactgctgcagcgcggagaagtgctcagcgcggaaaaccaacagcgcagcattcaactttttgcccggatggcggcggaattagcccgcgattaccaactggtgatcgtacacggcaatggcccgcaggtcggattgctggcgctgcaaaacgccgcctatcaggaatctcccgcctggccgctggatattctggtcgcggaaagtcaggggatgataggcttcgctatcgctcaggaactgatgcagtacgccggtgcgccggtcagcaccctgatgacgcgcgtagaggtggcggcaaatgatgacgctttcgcggcgccggggaaatatattggcccggtttatcagccgcagcagcaggcggaactggaaaaacgctatggttggcagatgaaagcggatggcgactatatccgtcgggtggtcccttcccccagaccgctaaatattgttgatagcgcggccattcagacgctgatggatgccggtcatctggtgatttgctgcggcggaggcgggatcccggtggttgccgatacgcacggttaccggggagtcgaagcggttatcgataaagatctgacggcggcggcgcttgccagcgccattcatgccgaccacctgctgatactgacggatgccgatgcggtctatgttgactgggggacgccgcaggctcgcccgttgcatcacgccaccattgcaacgctcgcgccatttgccgcgccggacggcgcaatggggccgaaagcggaagcggtcattcagtttgtcaaacagaccggaaataacgcctttatcggcgcgttaaaggatgcgccacagatattagccggggagaaagggacctgtgtaagccgctaa

SEQ ID NO: 92278 - DNA, 1224 bp, Enterobacter aerogenes
atgtcaggaacgtatgaggtaaccgaggtgaccaaaagaaaaggaatacccgcctggtgggtcacggtatttcttttctggttaggttgggtatttatgtatgccgatcgcacggtattaaatccggtgatgggtgaactggaaaaagaatttggtttaagcggtacgcaattaggagtgctcaactccgtattttatttttcttatgcattgctgcaggtgccggcggggatcctcggggacaaaatcggtaagaaaaaagtgctggtgcctgggtttattctatttggcgtttttaccgcggtcaccggttgggtaaaaagctggtatatgctgctgtttgcccgcgtggtcaccggcgcaggcgaggggacatattatggcccgcagtacggattgtcttccgagcagatcccgaaaaagttccgctcgctgggtagcgcgattatcaatagcggaatggcctttggcatcgcgttgggtctgatgacctccagctggctggtctatgaccagggttactcctggcggatgccgttttatgccatggcgataccttcggtgctggtaggggttgctatctggctctttgtgaaagagaaaaaacgcaccgccgacgccgagggcaagccggtacaaaaaggcaaatttagcgatctgttgaagaatcgtaatttaattctgacctatatcatggtgttctgcagcctgtttggtttcttcgttattctgacctggcttccttattatctgcaaaacgagcgcggtattgccggtagcgaaactgggtttatttcgtcgctggtcgcgtggatctctattcccggcgcgctgttgttctcggggctgtcggataaattaggccgccgcaaaccgttaattttattcctcgtgccggtggcgattgccagcatgctttccattatttggatgccgagtatgaccggcgtcatcgtggcgctgtgcgtgtacggcctggttggcaaactggcgctggatccggtgctggtggcgctggtcgccgatagcgtcgatgagaccaattacagtaccgcgtttggtttatttaattttattgggatgagctcatcgattctggcgccaattattgcaggggcggcgcgtgatattaccggcagtctggcttcgagtttttatgtttccgcggcgctgctggtcattggtctggtcgccatgctgtttttaaaagaaaaacgcacataa

SEQ ID NO: 92279 - DNA, 1662 bp, Enterobacter aerogenes
atgatttacgcttttattaaaaagggaagctttcaggattccgtaagcctgatgattatctcccgaaaattaagtgaacgcccggaagtggatcaggtttcggtcatgatgggtaccccggcgaataaatcgatgctggagtcgaccggattctggcacccggatttcgccgaggcgacgcccaacgatatttgtgtcgcagtccgcacgcaggaagcgcagccggaaattctcgatttaatccgtgaacaattagagaaagagctgagcgctatcgctaatgcatcgggcagttcaacgcagctggtcaaggcgcggcgctgggagagcgcctgccagaaattaccggacgcgaatctgttgctggtttcggtggcaggcgagtacgccgccggggtggcgaaagagggattgttagccaataagagcgtgatgctgttttccgataacgtcccgctggagcaagaagttgaactgaaaacgctggctcgcgagaaggggctcattgtaatggggccggactgcgggacggcgatgatcgctggtagtccactggctttcgctaacgttttgccgcagggcggaattggcgtcatcggcgcatcggggaccggcatccaggaaatcacctcgcaggtggcgctgcatcaacagggaattagccacgccatcggccttggcgggcgcgatctcagcgccgaagtcggcggtatcagcgccctgaccgcgctggagatgctggcggccgatagcgcgacgcaggttatcgcttttgtctctaaaccgccttcgccccaggtgcgtgcccgcatcattgccgccatgcaaaaacagaataaaccggtggtggcgctgttcctcggcagccgtgccgagcagcgccgcgagggcaacgtctggctggcgaactcgctggcggacgccgcgcaactggcggtactgctgatgcgggtcgcgcaacagcggcagagccagccgcaggttgcaggcaaggggatttatggcttgtacgctggcggtacccttgccgccgaggccgcgatgctgctttccgcccatctgggagtgccggtcagcgacagccacgccgacggtgtgatgctggaagccggcgggcatcgcattgtcgaccttggcgacgatagctacaccctcggcagaccgcacccgatgatcgaccccaccacccgcagcattgaaattgagaagctggcggcgatgccggaagttggcgtgctgctgctggatgtggtgctgggctatggcgcctgcgccgatcccgccggggcagtggttgaggccatcgagcaggttcgccgtaaacgtgtcgcgccgttggtagttatcgccaccatgaccggtaccgatgccgacccgcagggccgtagcgagcagatagccatcctgggcaatgccggggtcgcggtggtcgaaaccctcgaagaggcgacgctactggcggttagcctgacgcagcatcagccgcagagcgaatcgacagcgcataacccgctgctcgacggcgtgcaggtcattaatgccgggttgcgcagcttcgcgctggatctacaaagcagcggtacgccggtagtgcattatcagtgggcgcccgttgccggcggtaacgctcgtcttgccagtttactcaagcagttacattaa

SEQ ID NO: 92280 - DNA, 1263 bp, Enterobacter aerogenes
atgtactcatcaattgcacaggctaacgaagccattatcgaacgaattaaagccgcgcgcccgcattgggttgccgtccgccctgcgaaagaggcggtggctgaattatcttctggacgtaaattactgcacgccgggccgccaatcgcctggcaagagatgaccgggccgatgcgcggagcctgtatcggcgcttcgttgtttgaaggctgggcgacgagcgaagaagaagccgtgcggatgctggagcagggagaggtggaattcatcccttgtcaccacgtgggcgcggtggggccgatgggggggatcacctcggcgaacatgccggtgctggtggtgcgagatgtggttcatggtaaccaatcctgctgcaacctgaatgaagggatcggcaaagtgatgcgcttcggcgcctacggcgaggatgtgcaaacgcgtctgcgctggatgcgcgacacgctcgcgccggtgctgcaagaagcgctgtcgcgaatggaaaacggcgttgacctgacggcgatgatggcgcaggcgattaccatgggcgatgagttccaccagcgtaatatcgccgcctcgtcgctgctgctgcgcacgctgtcgccggtcattgccggcctggagcggccaaaggcggaaattgtcgccgtgctgcagttcctcagcgtcaccgatcagttcttcctcaacctggcgatggcttacagcaaagcggtgatggatgcggcggcggaaattaaagccggctcggtggtgaccgccatgacccgcaatggccgcgagttcggcattcgcgttagcggtaccggcgatcgctggtttaccgcaccggtgaatacgccgcaggggctgttcttcaccggctacagccaggcggatgctaacccggatatcggcgatagcgcgattaccgaaacgctggggatcggcggcgcggcgatgattgccgccccgggcgtgacgcggttcgtcggcgctggcggaatgggcgcggcgctggaaacatcggaagagatgtctgaaatctatcttgccaacaacccgctgttccagatcccatcatgggatttcaaaggcgcctgtctggggctggatgttcgtcgggtcgtagaaaccggcatcacgccgcttatcaataccggtattgcacaccgcgaagcagggataggtcaggtgggggcgggaaccgttcgcgcgccgctgctgtgctttgaaaaggcgctggaagcgttagcggaactgcaccacatcactgcctga

SEQ ID NO: 92281 - DNA, 933 bp, Enterobacter aerogenes
atgctcgatcaggaaaccatccgcacgtttatacaggtcgccgagaccgggagtttctcccgtgcggccagcctgctgcacaaaacgccggcggcgattagctatcgtatcaaaacgctggaggagcaggtggcaacgcagctcttcttacgcacgacccgatcggtaagcctgacgctggccgggcaacatctgcttgagcactgtcggcagtggctgaactggctcgacgtgatgcccgatgaactccagcagattaatgctggcgtcgaaagacaggttaatatcgttatcaataatcttctgtatcagccgcaaagcgccgcggatcttctgacctggctacatcagcagtttccctttacccgctttcagctttcccgccaggtctatatgggggtctgggactctttgctatacgacgatttccagctggcgattggcgtcaccggctcggaatccctgtccaacaatatctctttattgccgctcggcgatattcgctggcagtttgtggtggcgcagaatcatccccttgccactcatcccgcggcggtgctctccgacgatgcgctacgccgctatccggcaattaatattgaagatacatcgcggactctgacgcgtcgtgttgcctggctgctcaatgggcaaaaagagatcaaggtgccggatctcagcaccaagctggcctgccatcttagcggtctgggggtcggctttttgccggagcggatgtgtcgcgcttacctggagtccggcgcgctggtggcccgtgcggtcgccaacccccgccagccttcgccgctctccgttgcctggaagaatgccggcagcggtaaagtcgtcagtgaaatcgccagggcgttcgagcgcaaagaggcattagtcagcggttttttgcggatggtggatcgtcctgcgcaagcgtaa

SEQ ID NO: 92282 - DNA, 1179 bp, Enterobacter aerogenes
atgaagtatcttattggtatcatgagttttttagtaattttcattcttgcaatccttgccagtaacaaccggggggctatacgctatcggccattggtcgtgatgttattctgtcaatttacgtttgccggtttgttgttgaaaacaagcgtgggtaaccaggtgatagccgttattgctggcgcgtttgcccatttaatggcctatgcgagtgaaggggttaactttgtctttggtggtttgcaaaaccatggcgagctctctttctttattagcgtcctcttgcctatagtttttgtgtccgctcttattggtattcttcaacatctgaagatactaggcttccttatccgttacatcggattgggactcagtaagattaatggcatggggcggcttgagtcgtataatgcggttgcttctgcagtattaggtcaatcagaagtatttatttcagttaagcaacaactgggacttctacctcaacatcgtctttatacgctgtgcacatctgcgatgtcgactgtgtcaatggccatagttggtgcttatatggcgatgttagaaccgcgctatgtagtcaccgctctggtgctgaacctgtttggcgggtttataattgcatcgctacttaacccttatcaggtcgaaccacaagaggatattcttaccgtatctgaaggccatcaaagtttctttgaaatgttaagtgagtatattttagatggttttaaggttgcgctcattgttggggcaatgttgattggatttattgcgttaatcactatgatgaacgccatatttaccgcaatatttggcatctcatttcaggcgcttctgggatatttatttgctcctatggcctacctggttggtgttccatggcatgaaacggtggatgcagggagtctgatggccaccaaaattgtaagtaatgaatttgtcgcgatgctgagcctgaaaagtatggctgctgaattctcagtacgtactatggctgtactttcggtattcctggtatcgtttgctaacttctcatctattggcatcatcgtaggtgctattaaggcgctgaataatgaacagggtaacagcgcggctcgttttggcttgaaattattatatggtgctacgttggtaagtttccttaatgcgaccattgttggcctgtttttctaa

SEQ ID NO: 92283 - DNA, 1347 bp, Enterobacter aerogenes
atgttaaattgctgtttttttaataaacctctggctacgattttattaatgtctgcatcaatgtcaccgatatatgcagctgaagaatcgaggagtagaccaccaaatggtgtaactaactttatcacagacagtagcgctgatatttccttgagaaaccaattcaaaaaccttaactcctctgactatggtgaaaggtcagtgcaaacagcctgggggcaaggggtaacattagatttccgttcgggttatattgccgatattattggttttgacacatcgtattatcaagtttttaagttggccgcaagtgatgatttcgctgggcgcagcgtcttatacaatgataatgggaaagcaaagggatttcataaatttggccagttatatgctaaattgaaatttgacggtgaagatagttatttcagactgtattctggttggcagattatcaataaatggggagcgttgacgaattcgagtcgtgcgataccaagtacctatcaaggatggaagatggatagcgagtttggccgactcgcttttcgcggcgcatgggttgaccgatacagcgatcgtgattctcctgagcaggttcatttccagactgccgatcgtaagaaaaatataagttacctggctacaggagagctcagctataaacaaaaggattatagtgtgctttatttttatggcgaaagtcataactatatgcagcggcatggcgtggaagtcggttggcagcctcagtctttagctaagaatcagggccgagtacttaccatgttatatatgaaccatggtctcaaagatttcaaagcgatgagtgctgattatcgtccattcaataatgatgcatggcatgctgcattttacctggaatggaaacagcataagtggaaaaataagtttggtgcatcctggaccagggccaattcttcagacgatcaccttgggtattttgaacgacacatggcaaagaatagtcgcggaagattcaattctatggcggatgcatggggtaatgactacgtcggtaataatgaaaaatcggtgacatggacgacggaatataacttaacgccagaagtgaatatcgggttacaaagcgctattggatggggaatgaaataccactcccgaacaattgagcgtggtgagactattttgttctcaaggtggaaaccatcgtgggaaaagaatttaagtttccagttgtccggtggcccttcctggaattaccaaagtaaaaaaaatcgaccaattctaaccgacgatggtagaccaaagcgtgcagttaatcattctatcgaattccagattgattatgcatttaatctattctaa

SEQ ID NO: 92284 - DNA, 717 bp, Enterobacter aerogenes
atgtataaatataaaatgattcgttcagcggctttcgttagcgctcttattttcagtgtgccagctttttgtgccaatccggtgtcatccgataccggtatcggcgcaacattgcagcagattaccgagcaatatcctgttcatttcatttctatagagcaaattgttaaagagttaaacaataagccgccgatggatgtcggttttgatattgatgatactatttattattctactcctgcatttatccatggtcagagagaattgtcacctaaaagtaatgaattcctgaagaaaagtgagttttgggatcgacttagtaacggttgggatagtttttccgtccccaaaaaatctgcatctgaattgattaaactgcatctggaacgtggagatcgtatttggtttgtcaccggtcgaccaaaacccactaacggaaaagagacggtgactgaactgttggggagagacttttccatcccgcatgaaaaacttaataaagttatttttgccggagaagataaaggggcaaaagtacaatatatccgtgaccgaaatatcaagttatattatggagattcagatggcgacattaaggatgctcgtgaagctggcgcagaacctattcgcgtgatgcgtgcactgaactcctctaatcagcctatgcctcgcaacggcgcgttagaagaaaaagtattggttaactctgactactga

SEQ ID NO: 92285 - DNA, 2484 bp, Enterobacter aerogenes
atgttaaggatgacgccgctttcctcaatgatattgttggttttattatccggtcagctgcaggccgctgaagagacttttgataccaatttcatgatcggcggaatgaaaggtgaaaaatcatcaagctttcactttgcggataatcaaccactgcccggtgaatatgaattagatatttacgtcaataaacaatggcgtggtaaatatccaatcgtagtcgccagtaatccggatgatacctgcctgtcatcggcattattacatcagttgggaatcaaagcggatagcgcgccgttggcaaaagataaccagtgcatgacgcttaaatccgcggtgcggagcggcagttatacgtttaatatcaatatttttcagcttgatttagaaattccgcaggcctacgttatggatcttgagcgcggctacgtcgcgccggaaagttgggaccgcggcgttaacgcgctctatacctcttattatctgagccagtattacagcgactataaagacagtggcaataacaaaagcacttacgcccgcttcaacagcgggctgaacctgttgagctggcagttgcactctgatgccacctacagtaaagccgatagcggcggcggcgactggaaaagcaacaccctgtatctggagcgcagctttgcgccaattttaggcaccttgcgcgcgggcgacatgtatacctcagcggatattttcgatgcggtacgctttcgcggcgttcgtttgttccgcgacatgcaaatgttgccaaactcaaaacagaactttacgccaatcgtgcaggggattgcccagagcaacgcgctggtaactatcgagcagaacggcttcaccgtctatcagaaagaggtgccgccggggccttttgcgattgccgatttacaactcgccggcggcggggcggatctcgatgtcactatccgggaagccgacggctcggtaaccacctacctggtgccttattcctcggtacccaatatgttgcagccgggggggtctaaatatgacattgccgccgggcgcagccatattgaaggcgccagcaatcaggaagactttatgcaggccagctatcaatatggcctgaacaatctgctgaccctgtatggcggtaccatgctcggtaccgactatcaggcttttactatgggaaccgggtggaatacccatctcggcgcggtgtccgttgacggtacctgggcgcgcagcgatcaggataacggtacttttgaagggcaaagttatcagattgcctacaacaaatacctcacccagactaaaacgcgcttcggtatggcggcttatcgctattcaaccagcgactatcgcacctttaacgatcatgtctgggcgaagaaccgtaatagttatcaccatgatgataatgacgtttacaacattgatgattattaccgttatgattttggccgtaaaaatagcttatccgccaatattagccagtcgctgccggaaggattagggtctttctcactgagcgctttatggcgtgattactggggaaaaagcggcagtaataaagattatcaactgagttacaccaataactggcagcgggtttcctggaccatttcggccagccagacctatgacgaggatcatcatgaagataagcgctttaacctcttcatttcgattccgctgatctggggagagagcgatagcgtgctggcgcgtcgcctgacgctgtcgaattcgacgaccttcgataacgacggttttgcctccaataataccggcatcagcggtacggctggccagcgcgaccagtttgactatggcgtgaacctaagccggcagcagcaaaaccatgaaaccaccgccggcggcaaccttacctggaacgcgccgctggcgacgctgagcggcagctacagccagtcgtcaaaatatacccaggccagcggcagcctgtctggcggggtggtggcctggtctggcggcatcaatttcgctaaccagctatcggaaaccttcgccattattcaggcgccgggcctggaaaatgcttacgtcaatggtcagaaatatcgcaccaccaacgcgcagggaacggtcattttcgaccatgtcttgccctatcgcgaaagttcgttgctgctgaataccgccaatacgcagagcaaaaccgagttgattggcaaccggaaagcggtggctccgtaccgcggcgcggtggtgctggcgcggttcgataccgaccagcgtcaaccctggcttattcacgccgaacgcccggacggtacgccgctgaaatttggctatgaaattgaagataacgacggacagaatgtcggcgtcgtcggccagggcagcatgctgtatatccgcaccgataacgttccgccgtcgattaccatcgcggtcgataagcagcagggccattactgcaccattacatttaaacataccattgatgaaggtaagacctatgtctgccgctaa

SEQ ID NO: 92286 - DNA, 741 bp, Enterobacter aerogenes
atgacacgtagcgtacttattaccggcgcggccaacggcctcgggctggttatcagccgccatctctggcaacagggctatcaggtggcgatggccgacctcaatctcgatacggtcacccgcagcgcccaggagatcgatcccagccagcagcggctgctgccgctggcgctggatattcgccagccgcaacagttcagcgacgcgctgacgcagatccgcgcacgtttcggcgaactcgacgtgctggtcaacaacgccgccttaaccctgaccacgccgatcatggagatcgacgtagaagaattcgatcgcgtcaccagtaccaacctgcgcggtaccttcgtcggctgccagaccatcggccgctatttcagccagcgccagcagggcagcattattaacctcgcgtcgctggccgggcaaaacggcggtaccgcctccggcgcccactatgcagcctccaagggcggcattattacgctgaccaaagtcttcgcccgcgccctgagcaacgccggggtgagcgtcaacgcgattgcgccggggccgctggatctaccttccgttcgcgccgcggtgccggaggagaaaatgccggcgctgctggagatgatcccgatgaagcggcttggtgatccgctgctggtcgcccgcgcggtagaactgctggcggcgccctccgccacctttatcaccggcgcgacctgggatatcaacggcggcatttatatgcgttaa

SEQ ID NO: 92287 - DNA, 456 bp, Enterobacter aerogenes
gtggcgctgccgcttaccggggctacagagttgtgctatttggtagcccggattagcgtagcgcaatccgggaggccgggtggcgtatcgctgacaccggtgctggtggcttcaaaatccccggtggcgctgtcgcttaccggggctacagcgctgtgcgatttggtagcccggatgagcgtagcgcaatccgggaggccgggtggcgtatcgctgacaccggtgctggcggcttcaaaatccccggtggcgctgtcgcttaccggggctacagagttgtgcgatttggtagcccggattagcgtagcgcaatccgggaggccgggtggtgtatcgctgacaccggtgctggtggcttcaaaatccccggtggcgctgtcgcttaccggggctacagagttgtgcgatttggtagcccggattagcgtagcgcaatccggggacctgcacgtttag

SEQ ID NO: 92288 - DNA, 1593 bp, Enterobacter aerogenes
atgacggcgaaaacagcacctaaaattaccttatgggagtttttccagcagttaggaaaaacctttatgttgcccgtggcgttgctctcgttttgcgggatcatgctggggatcggcagctcgttaagcagccacgatgtgattacgctgctgccgtggctgaacgtgccgctgctgcaggcgatttttgtctggatgagtaaagtcggctccttcgcttttagcttcctgccggtcatgttctgtatcgcaattccgctcggcctggcgcgtgaaaacaaaggcgtcgccgctttcgcgggctttgtcggctacgcggtaatgaacctcgcggtcaacttctggttgacggcgaaaggcatcctgccgaccaccgacgcggcgatcctcaaggccaacaacatccagaatattatcggtattcagtcgatcgacaccgggatcctcggggcggtgatcgccgggattatcgtctggatgctgcacgaacgcttccacaacatccgtctgccggatgcgctggccttctttggcggcacgcgctttgtgccgatcgttaccaccgtggtgttaggcctggtcgggctggtcattccgctggtgtggccggtgttcgcgatgggtatcaacggactgggccacgttatcaatagcgccggcgattttggcccgatgatcttcggtaccggagaacgcctgctgctgccgttcggcctgcatcatattctggtggcgctgatccgctttaccgaagcgggcggcaccatggacgtttgcggccacagcgttagcggcgcgctgaccatcttccaggcgcagctgagttgcccgacgacgcacggcttctctgaaagtgcgacccgcttcctgtcgcagggtaaaatgcccgccttcctcggcggcctgcccggcgcggcgctggcgatgtaccactgcgctcgtccggaaaaccgtcataaaattaaagggctgctcatttccggcgtcattgcctgcgtggtcggcggtaccactgagccattggaattcctgttcctgttcgtcgcgccggtactgtacgtcatccacgccctgctgaccggccttggtttcacaatcatggcggtacttggcgtcaccatcggcaacaccgacggcaacattatcgacttcgtggtgtttggcatcctgcacggtctggcgaccaagtggtatatggtgccggttgtcgccgccatctggttcgcggtgtactacggtatcttccgtttcgccatcacccgcttcaatctgaaaacgccgggccgcgatatcgaaacggcggctaacatcgaaaaagcggttgccggaacgattggcaaatcaggttataacgtgccggcgattctggccgcgctcggcggtgctgataatattgtcacgctcgataactgtattacccgcctgcgcctgtcggtgaacgacatgagcaaagtcgataccgccgcgttaaaagccaaccgcgcaatcggcgtggtccagcttaacgatcacaacctgcaggtggtcatcggcccacaggttcagtcggtaaaagatgaaatggccaccctgatgaataccgttcaggcctaa

SEQ ID NO: 92289 - DNA, 1647 bp, Enterobacter aerogenes
atgtcgaacaaaccgtttgtttatcaggatccttttccgcttaaaaaggatgacaccgagtattatctcctcagcagtgattacgtctccgtcgccgaattcgccggccaggaagttctgaaggttgaacctcaggcgctaaccttactggctcaacacgcgtttcacgacgcctcctttatgctccgcccggcacaccagcagcaggtcgcggatatcctcaacgacccggaagccagcgaaaacgacaaatacgtcgcgctgcaattcctgcgtaactccgatatcgccgccaaaggcattctgccgacctgtcaggacaccggtaccgcgatcatcatggggaaaaagggacagcgcgtttggaccggcggcggcgatgaagccgcgctggcgcagggcgtgtacaacacctatatccaggacaacctgcgttactcgcagaacgcgccgctggacatgtataaagaggtcaacaccggtaccaacctgccggcgcagatcgatctttatgcaaccgatggcgatgagtataagttcctctgtatcgccaagggcggcggctccgcgaacaaaacctatctgtaccaggaaacgaaagcgttaatcaccccggcgaagctgaaaaactacctcgtcgagaagatgcgcaccctcggtaccgcagcctgtccgccttaccatatcgcctttgttatcggcggcacctcagcggaagccacgctgaagacggtgaaactggcctcgaccaaatactacgatggtctgccgaccgaaggtaacgaacatggccaggcgttccgcgatgtgcagctggagcaagagctgctgctggaagcgcagaacctcggcctcggcgcgcagttcggcggcaagtacttcgcccacgatatccgcgtagtccgcctgccgcgtcacggcgcttcctgtccggtggggatgggggtctcctgttccgccgaccgtaacattaaagccaaaattaaccgtcaggggatctggctggaaaaactggagagcaacccaggcaaatatatccctgagcacctgcgtcaggccggtgaaggcgaagcggtaaaggtgaacctcaatcagccgatgagcgagattctggcgctgctgtcgcagtatccggtgtcgactcgtctgtcgctgagcggcacgatcatcgtggcccgcgatattgcccatgccaagctgaaagagcttatcgataacggcgaagcgctgccgcagtatgtcaaagatcatccgatttactacgccggcccggcgaagacgccggatggttacgcctccggttctctggggccgacgaccgctggccgcatggactcgtatgtcgatctgctgcaatcgcacggggcgagtaaaatcatgctggctaagggtaaccgtagccagcaggtgaccgatgcctgccataaacacggcggtttctatctcggtagtatcggcggcccggcggcggttctcgcgcaacagagtatccgcagccttgagtgcgtggcttatccggagctgggaatggaagctatctggaaaatcgaagtggaagatttcccggcctttatcctcgttgatgataaaggtaacgacttcttccagcagatccagacgtcgcagtgctcgcgctgcgtgaagtaa

SEQ ID NO: 92290 - DNA, 1446 bp, Enterobacter aerogenes; identical to SEQ ID NO: 91264

SEQ ID NO: 92291 - DNA, 480 bp, Enterobacter aerogenes
atgtttggtaaatccctgatattcattctgcaggtcgctgccggaatcttgtggatcccggatatttttatcatcgccaccatcttcttcggcgcgttgcatccagagtgggccagcggctggttcctgtttgaaggcacagtttttctgtttatgctggtgttttttatctggtcgttgaaacgagcggatgtgctgagcctgacgacggggctggtgcgtgcgggcacagcagaagagcaaaaagccgatcgggtgctgttttggttcgatctcaatggcacgttagcgggggttatactgtcgctatcgatattcgcttttctgtttgctttcgtggtgttagacaaaggcctgccgctatatcttcatcaggttgcggtggtcgccgtgctggcgctgtgctggcgtggcaatcaccgcctcgaagcgcgcaaaagcgcgcggggatatggggattatgttaagacaaccccctga

SEQ ID NO: 92292 - DNA, 1503 bp, Enterobacter aerogenes
atgagctcacccctgctgattgcgcgcacgctggataaacaactgcatctgctgcctgcaatggctaaccgtcacggcctaattaccggcgccaccggcaccggtaaaaccgtaactttgcagaaactggcggagtcattttccgagatcggcgtaccggtctttatggccgatgtgaaaggcgacctgaccggtatcgcggaagcaggccagagctctgagaaacttcaggcgcgtctggaaaaaatcggcgttaccgactgggagccgcatgccaacccggtggttgtttgggatatctttggtgaaaagggccacccggtgcgcgccacagtgtcggatctcggccccctgctgctcgcccgcttgctcaacctgaatgaagtacaaagcggcgtgctaaacattattttccgtattgctgacgatcgcggcctgctgctgctggactttaaagatctccgcgccatcacccagtttatcggtgataacgccaaagccttccagaaccagtatggcaacatcagcagcgcgtcggtcggcgctatccagcgcgggctgttaaccctggagcagcagggcgcagagcacttcttcggcgaaccgatgctggatattcaggactggatgcgtgtcgatgccagcggtaaaggggtgattaatatcctcagcgctgaaaagctctatcagatgccgaagctgtacgccgccagcctgctgtggatgctctccgaactctacgagcgcctgccggaagccggcgacctcgaaaaaccgaagctggtgttcttctttgacgaagcccacctgctgtttaacgatgcgccgcaggtactgctggataaaatcgagcaggtgatccgtcttatccgctctaaaggggtcggcgtctattttgtctcgcagaatccgtcggatatcccggatgccgtgcttggccagttgggcaaccgcgtgcagcatgccctgcgagcctttactccgaaggatcaaaaagcggtgaaaaccgccgcccagaccatgcgcgccaacccggcattcagtaccgagcaggccattcaggagctcggtaccggcgaagcgctgatctccttcctcgacgagaaaggcagcccgtcggtcgtcgagcgcgcaatggttatcgctccctgctcgcggatgggaccggtcaccgatgatgagcgaaatggcctgattaaccactcggcgctgtacggcaagtatgaagaagagattgaccgcgagtcggccttcgaaatgctgcaaaaaggggtgcaggtcgccacagagcagcagtcggcaccgccggcaaaaggtcaacaaaacggtgatgatgacgggctactcggtggactgaaagatattctgttcggcactaccggcccgcgcggcggtaaacgagatggtatcgtgcagaccgcggccaaaagcgccgtacgtcaggtaaccaaccagatcgtccgcggcatgctgggaagcctgctcggcggaaggcgccgttag

SEQ ID NO: 92293 - DNA, 300 bp, Enterobacter aerogenes
atgaatatcgaagaatttgtgagtgaagataaccatatgtgcaatttaggcgatgatcttttttacaagatcttcgagttgggggcaatctatgatttacctgataatgaatttaacagaaagattgtttactggttaagccagtatttagtagggaatctaaggaaaccgttagatgagatctctgagcttaatgcttccaaacagatatatgtttacgagacctggttctcgttaattaaatgccctgatgaaatgaaacttttggcgaagcggataattctatatttattggattaa

SEQ ID NO: 92294 - DNA, 1056 bp, Enterobacter aerogenes
atgaaagttatagccggtagcatttcattgttatatcgattctttatgaggaaagagatcaatattgatgaaagaattcagaaaaggatatttctggctcctcatgaaattgatgatttgattgagtttacttcattcaattttaaaagtggtgtagatagtgatttttgcgtttcaaatgtcaaaaaaccaactaagtattttcggattacaacaatagctaactatctggaatggctatgtaaaatacttctttctcatacatgtcagaaagatacaatcaaagagatacttgttttcattaacaacataaaaagaaagaaaccaagaaacaatgacaaatatgttatggatatcgaaaagagcttagacaaatctcaactggattctttgtttagcattctttcgccaggaagtaacttgaatccgtttacggaaatagtacaaaaaagaaataacctaatattcctattattacattgctttggcatgagagcgggtgaacttttgaatctgcgaattggtgacatagattttgcagaatcaacaatagcaataaggaggagagcaaatgataaaacagattcacgagtttatcagccattagtgaagacttgtgagaggaagttaattgctgatgcgaaccttatatgtgaaatttcagattatatcttgaatgatcgcaggaaagtcaaaaatgctaataagcatgactttctttttattacctataaagaagggaagactcaagggcaaccgctgtcattttcttcataccataagatagtgagtgttgttcgtcaatcatcctcgcttctaagtggattaacaggccataaattacgacacacatggaattatgagttctcgaaaacaatagataaggctaaggacatatccgacgaaaaagagcaacaaatccgttcttatctaatgggatggcgacctggttcagatacttcaataatttataatcgcaggcatatttttgagctatcgaaaaaaactgcacttgaacaacaagagcaactattcaaaggaggatttgatgaataa

SEQ ID NO: 92295 - DNA, 1311 bp, Enterobacter aerogenes
atgaataatttaattaaatataactctgataaaatgtctttgcatgaacataaaatcgtcagttcgattgaaaacaatggaatcaacattagagaattgatatgtttcatgaatgaaaaattggtttgtggatttgtacatacagtacaatattattttaatagcaacagctatttgtatgtaaaaagtattgttagaaatatggagagtcttatccgtaaactatctcctactcatattgatgataggattctaattgaatatcaaaataagcaatcatcaaaagcctcagcatcatttcgtgttttacgaccatttttgattaaatggtttgagtttggatatcctggaatagatgaaagtgcagtagaactgttaaagcatttggacctaaaaataaaaaaagctggtcaatctgtgttacaagatgatccaacaaagggcccactaactaaagaggaacatacttccttgatcagggctatgaatcatacatatagaataggcgtactgtcactgtcagattatgcaatatcgctattaatgagtctgacaggtagaagacctcagcagttagttatgttgaaatataaagaccttcttcaaaagaacttagataatggtaaagtagaatatttaattttagtaccacgagttaaacaacggggtaaacaactacaatatcgaaaactgccaataatctcagaggttgcatcaattgtacaacttcaagctaatcattccgtgaggcttgttgagcaaacccttggcaaaacccttgatgatcatgacaaaggcaaggttccagtttttttgaacgaggaaaaactgcttgatttatccataatagattttaacttcctggagtctaataaaatatatgcaaaaccaacaattgctaatacagcattgaagaacattattaatactgggaacttaatttcaaatcgtacaggatctctactcaatgctactcctcgcaggcttcgctatacgatagcaaccatgctggctagagagggacataatgccaatactatagctgaattgttggatcattcttctacttcaagtacgggcatttatattaaaaatcttgctgggagtgttgaaagaattgattccgctgtttcagaacaattgtcatttgtcgctgatatttttatgaatggaataaagtctaaagagaaaaaagatttcaaattttgctcttcgagaaaatgcgaaaatcagaatttaaatgcaagtttcccttgcaataaatgtgctttctttatgccagttgatattgatgaggtaaatgaccaatga

SEQ ID NO: 92296 - DNA, 393 bp, Enterobacter aerogenes
  misc_feature (374)..(383): n is a, c, g, or t
atgatggctttgagatgtctcgaacaggctcttttgcaggttctgagcaatgctctcatttataatgttacagccgttgtttttgatgaggcaatgcagatcggaagtagacattttgaaggtaacgttctcgctcaatgtgggatacagcttgaaaaattatcaaagtttctatgtgaacataaccttgtgaaatcaggatacatatcctggaaaaaccatgtgaagcagaaggtcaaaaacaactatcttcctgagatggaggactatcacagaaacgataagttaccggatgaatcagcattacttgccattgctgatattttttctaaaaatgatgagctactgagtccaagggataaattcaccagttnnnnnnnnnngcccagatag

SEQ ID NO: 92297 - DNA, 1491 bp, Enterobacter aerogenes
atgtttagcgaaatattcgctttccttacaggtaaaatctccggtacagttcgaagagtcaaggcaagtatcagaggtagccccatttttagcttatcccaactacaactggtgaatggcactgccaaagtcacccagattgttgattttatcagcgcggcaatcatcggcggccaattattaccgggcagtcgtttaccttccctgagggaattctgcgaccaggttgaaaccagtaaatttaccgttgtggaagcactggaacgcttgcgtgccagaggactgatcacctctattcagggaagaggatattttgtcagccatgcacggcaaacgactgagattgacgccgacaagcctctttcgttagtcagccccgatctgcattcaagactgaaacacgcttttgcaaaaagtagcgatattcttcgtcctggatgcggttttttgcctgaagagtggttggatactgaatttttccgtaaagcgctacgccaaattatccgcaaaccgcagctaaaattttctgagtacggtaatccacgaggatacctgccattgagaaaaacactgcagatgaaaatgaatgaggcgggaattagcgtaccggttgagcagattattatggcgaatagcaccatgaatgccatcgacatgctgttccgtattctgatcaaacctggcgataccgtgctgattgacgacccttgctatttcaattttcgcgccagtctgagtcagcatcaggccaatgttgtctttatccctcgcggccatacaggggttgatattgatgagcttgaaaccttattaaaagagtcccggcccagggcttatctcacctccggactaatgcacaaccccaccgggcaaagttatagtctggaagagatgtttgctttaatcaccgtattaaaccgctacgattgtcatctcattgaagatgacctgtatcatgacctgatggaaccggcaaccaagccaatgtcggcgcttgccgggctcactaatgccagttatatatccggcttctcaaaattgctgagcgccaatatgcgggttgcctatattgcaacgaacccattgctggctgaaaaattagtacagctaaaacagcagactggcggcgtcacctgtgaatttaccgagcagacattacatcaattcttccgtgacggtagctataatcgccatcagcgccggcttattggtaatttgagtgacgtctcctcgcgggtaaaaagctggcttcaggaagcaggttgtcgtttcccggtcgtccattcttacgggttgtttttatgggctgaattgcctgaacatatcgatagtgaaacgctggctgaaagagcattagcgcagggtctggctctggcgccaggtacgctgttttgtcaaaaagcagaagggctacgctatatgcgctttaatatcgcccatagccacaacgataaagttgccgcgctggttacccggttactaaaaccctaa

SEQ ID NO: 92298 - DNA, 1245 bp, Enterobacter aerogenes
atgaatacgccatgctttattgtcgttggatataataacgtcagaatttatgatgttgctaaaattcgtgttgaggcacaaaaatattttgacgccaaagttgtattaattactgagaaaaaaacagcaagcgatgagcaatttgctgatctggtgattgaaacaacgcttgaagttacacaactcccggcctcagcggatgtcgttcatcaatatctggcaaccgaatcactttctcccatcggtattttaccattttccgatcgaggtgttcctttgggggcgctgctggcgcaaaagaacagactacccggcgcgctgccagaacaagcaaaagcagggctggataagcaaatattccgtcaactggatgccagggcttcattccatcccgccggttatcggacggtaaccagccagccggtaacatcattgaatgaacttaaagatctggtcgattcgttaggcggtaaggcgtttatcaagccagcgaaggagggcaatagccgcgggtgccaggtgattgagtgtattgagcaatgcgagtctatctgggcttcactggcgccttatcgcgaagcagggatcctggtggaatctcttatcgaaaatgcgaaagaatttagttgggatagtgtggcgggtaagcagtggatcacggaaaagcatactactgaaggccactaccgtgcggagtatcaacaggtggtgcctgcctgtttgaccccggcggatgaaatactgctgcgttctgcaggcgaacatatgcgtgaactggtgtcgccgtcgaatggcgcctggcataacgaaatatttttacttcccggcgcgacggccgctgttgaaaccaatatgcgccctgccggtatgcatatttgggatctggcgatgttgagctttgaaaatttcaatccatggctgctgtggctacgttgggctgcggagggtaaatatacggctgagccgctcaaacagaactattactctggtatccgcatgcttcgggcccgcgtatcaggaaccttgcaggcattaccagatgttgagcaattggcattgcaggcgggtattacgcttcatgaagccagcttttcagccaaaatcggcgacatccttaatggcgaaattaagacgaatgccgattttattggccatatcattttgcgcgatagtagtcatgagcagttactcaattcattagagacgctggcgacggctattgagtcttccgctgaaattagctaa

SEQ ID NO: 92299 - DNA, 273 bp, Enterobacter aerogenes
atgtatttttactctcatattgagtacctgttgccaatatttatcacccaccagtatagcgagtattttgttagcgtggttttcttcgttaataccttgttcgttattttcgcacagacggtatttagccgtatttttaatgaattacgtgccggtattgcatggggcgcgatggcgctatttcactggtggcggctggcgggttatttgcggccaacgccatcaacagcgtcatactcgagcactttaattttgcagctgtctggctggtga

SEQ ID NO: 92300 - DNA, 321 bp, Enterobacter aerogenes; identical to SEQ ID NO: 71838

SEQ ID NO: 92301 - DNA, 1245 bp, Enterobacter aerogenes; identical to SEQ ID NO: 71837

SEQ ID NO: 92302 - DNA, 138 bp, Enterobacter aerogenes; identical to SEQ ID NO: 71834

SEQ ID NO: 92303 - DNA, 708 bp, Enterobacter aerogenes; identical to SEQ ID NO: 27078

SEQ ID NO: 92304 - DNA, 294 bp, Enterobacter aerogenes; identical to SEQ ID NO: 15700

SEQ ID NO: 92305 - DNA, 186 bp, Enterobacter aerogenes; identical to SEQ ID NO: 15707

SEQ ID NO: 92306 - DNA, 927 bp, Enterobacter aerogenes; identical to SEQ ID NO: 71822

SEQ ID NO: 92307 - DNA, 1578 bp, Enterobacter aerogenes; identical to SEQ ID NO: 91720

SEQ ID NO: 92308 - DNA, 981 bp, Enterobacter aerogenes
atggcaattaagaagctcgatgatggtcgctatgaagtggacataagaccgcgcggtcgcgatggaaaacgcatccgccggaagtttgaaagaaaggctgaggccattgcttttgagcgatacacaatcgcgaatgctagtcagaaagaatggacaggccagcgagcagaccgtcgaactttaacggaattgctggacgtttggtggaagtatcacgggcaaaatcacgagcatggaacaaaagaatttaaccacctgctcaagacaatcagcggtataggtgatatgccagtgagccggatgagcaaaagggctctgatggattatcgttctacacgtttgcacgatggcatcagcgccgcgacgataaaccgtgacgtgtaccgattatcaggtatgttcaccaagttaattcagttggatgagttttccgggcagcacccaattcacggactgccgccgttggcggaggccaacccggaaatgacatttctggaaaaatcagaaatcgaaacactgttaaatgttttggttggggatgacttacttgtcgcgcttttatgcctgagcaccggcggaagatggacggaagttgccacgctgaaaccagcgcagatagcaagttgcagggttacttttttgaaaaccaaaaacggcaaaaagcgaaccgtgccgatttctgaggagctagagaaaaaagttaaaaaggaggccagcgctaaattgttcaaagtcgattatgagaagttttgcgggattttacgcagagtgaaacctgatataccacccaatcaggcaacccatatcctgcggcatacattcgcaagccatttcatgatgaacggaggcaacataattgcgctacagcagattctcgggcatgcgagcattcagcagacaatggcctacgcgcaccttgcgcctgactacctgcagaacgccgtcgcactgaatcctcttaacggtggagtgacgatataa

SEQ ID NO: 92309 - DNA, 294 bp, Enterobacter aerogenes
atggagttaggtcaaaaacttaaagctctgcgtaaagcagaagggctaacacagaagagtttctgtgaggcttgcggtcttgcattaggaaccgttaaaaattatgaaggcgggtataaatctccgggcatacaagtgcttatgcaggtaacaaacaccgccagatttcagaaatacacgctttggctaatgacagataaaactgccccgcaagctggtcagatagcaccagctttcgcgcacattgggcaagaaccaacagaaccagaccactccgagaaacagattggttaa

SEQ ID NO: 92310 - DNA, 273 bp, Enterobacter aerogenes
atggatgcaaataactatgtgattcagtacccgattgacgcggtacaccctgataaattcgcagaattgcttggaaagccgcgcacagcagtggttgaaatgctcaaagctaacaagctgccggtcgtcgaatttcgtgatccaactaaaccaaatgcccgcgctggcgacaaattggtttttattcctgagttcaatcgtggtgtacgtgaggcgttctacaaccgcccggtagaacaacgtgacgcgtggctgctttggatgggactttga

SEQ ID NO: 92311 - DNA, 177 bp, Enterobacter aerogenes
atgaatgagcctcgttgcattgctcagttattgcgtaacgagagtccgagggcgatggatttcactatcacccacggcagagggcgcaagggcatcatcatccgcaccaaaaaaccgagcgctataagcgccgtttttgcttttctgaaatcccggaggttctggaaatgcctgtaa

SEQ ID NO: 92312 - DNA, 501 bp, Enterobacter aerogenes
atgcctgtaatgacacttggtatcgtggagaaacagcctgcagctctgcgtggtctgattggtaaatatctggccgcgcctcgctggcaggatagttgcgatttttacaatcagatgatggaacgtgagcgcctgaccgtttgttttcatgctcagttaaagcaacgtcacgcgacgatgcgttttgaagaaatgaacgatgtagaccgtgaacgattagtttgcgctattgatgagctgcgtgctgcattttccagacgtcgacaggttggcgcgagcgagtatgcgtatattagttttttgacggtcagccaacgccgcactttgtttatgcatgccggattaactgaaaaagaatttaatcagccttactggcgtattaatgaaggttcatgttattggcgtgatgctttatttcgtgcgttgcgggagctttttaatttatttgaatatgcaccaacaatattaacctcggtaaagcctgagcaatatctgcattaa

SEQ ID NO: 92313 - DNA, 225 bp, Enterobacter aerogenes
atgcatacagtaacagtaaagcagcgcggtaacttctcattaatgctgcaacaggctcgagccgaagcgcaggccgatgcggcgacgcgcttttcctctcatctggacggcttaatccgtcacatagctggcgctgaattgtcgcgcgttgagattgtcgagttgctcagtcaggaatccatcaagtttcataatatcggcctttctcgtgaggagactctttaa

SEQ ID NO: 92314 - DNA, 297 bp, Enterobacter aerogenes
atgtctctgatgcaatccgtattacttaataactggctaaagattgcggttatgaaaaacggtgaattatcgcttgccaacattaaacgcgataaagaaaccggaataatgacggaatcaactatcgctatttattcgagtgaattaaatctcctgacggatgtggttaatttgcttgtgaaacgcgccgtttttcataagcgaatcaccaccgttgatgaattatcgaaattaaccattgagctgaccggttactgcactggtgagcttaaaaaactgaacaaagagaggagctaa

SEQ ID NO: 92315 - DNA, 225 bp, Enterobacter aerogenes
atgccggattatatggatcacattcaggagcgacagacagaatcactaactcgccagattaacgccgctcgggtgaaaccgtgcggcgctgctgcatttgtttgcgaagaatgtgacgcaccaatccctgccgaccgccgtgcggcatatccgtcggcgacacgctgtgtctactgtcagtcagcgtttgaatcaaaagctaaacactttcgggggcaggcatga

SEQ ID NO: 92316 - DNA, 276 bp, Enterobacter aerogenes
atgagcattcgtatcgagattggcgggcgctatgtcgtcacaagtgaccgttttcaattcattttgcaggagaaaaaaaccgccgaaacagggaagaatgccggtaaagagtggctggatgttgtcggatattaccccaaattaaaccagctcgtttccggtttgattcagcacgatattttgagcggtagtgttggctcttttgaagcgttgagcgctcaggttgagcaacttagtcagcagtgcttaaaggcatttgacacaaatggctattga

SEQ ID NO: 92317 - DNA, 2274 bp, Enterobacter aerogenes
atggctattgagacgcgggggcgcgttgccccctcaccacctccgccgttttcaaaaagcaccggtgataatttcgtcggtgcttatccgtggaacaaatccagagaggccattggccgcgacagaccccttacacgtgccgaactccgtcaggtgcaaggtgttttaaatcggattgaccgcctgccgtttttcctgcaaacaatgtttacttcgcgttataacttcatccgccgcacaaagagccctttgggtgggctttatttcctcaaaaatacatttgagcgcaagctgctcccgcgtcttgagcgtgttaatgagttgtgcgggatgaacgaagccgcttcgattgggtttttatctgagcgtgaccagtttgcgcgcctgcctgacatgaatgacaaggaactcagaaaatttgcggccagaatagcctcacaactctggagcaaatacgaggagttaagcgacgcatgggcagaggcacacggcggaaaagatactctattcacagatgaggcgcaggcgcatttatacggtcaggtggccggtattgctcgcgcttttaatcttaccccgatgtactggaaaaaataccgcaagggtcagatgacgatccgaatggcattttccgcaatttcccgacttattaaagacgagtggtgggtcaatcagctcaaagcacagcgtatgcgctggcgcgaggcgctgctcatcgctgccggtgaggtcaataaagaccgttcaccttatgcgagcaaaatggcgattcgtgatgttcacgcgcgccgcctggctaatctcgaatacctgaaatcctgcgagctggaaaataaagtcaccggtgagcgaatcgaccttatcagtaaggtcatgggaagtatttcaaaccctgagattcgtcgcatggagctgatgaacactatcgcagggattgagcgttatgccgctgctgaggggcatgtcggtatgtttatcacactgaccacgccatcgaagtatcacccgacgcgtcaggtcgggaaggggaaagaaaaaaccgtacagcttaatcacggctggaatagagaggcttacaccccgaaggatgcgcagcgttacctgtgccgcatctggagcctgatgcgtaccgctttcaaagataacgacttacaggtctacggtatgcgcgttgttgaaccgcaccacgacggtacgccgcactggcacatgatgctgttttgcaagcgccagcagcgcaaagaaatcaccgaaattatgcgtcgttatgctctcaaagaggatggtgacgagcgcggtgcagcccgcaaccgctttcaggccaagcacctgaacaaaggcggtgcagcagggtacatcgcgaaatacatcgcaaaaaatatcgacggttacgcgcttgatggtgagctcgataacgataccggaaagccgctcaaagataccgcctccgctgttacagcatgggcgtcaacgtggcgaatccctcagtttaagccaattggcctgccgacgatgggcgcttaccgtgagctgcgcagactgcctcgcggggtcagtattgctgacgagtttgacgagcgtgtcgaagcggcacgcgcggcggctgatggcggtgatttcgacctgtatatcatggctcagggtggcgcaaatgtcccgcgtgacggccagaccgtcagggtcgcccgtagcgtcagcgatgaggtcaacgagtacgaggaagatatagagagggtggtcggtatttatgcgcctcacctcggcgcgcgtcacgttcacattacccggtcgtcagaatggcgcatcgttccaaaggttttagccgttgagcctttgaccttaaaaagcggcatcgccgcgcctcggagtcctgtcaataactgtggaaagatcaccggaggtagtgatccagttatgcctcccacaccgtctgagcaagccacagcggtgttgaatctgattgattgcggagtacttacttgggaagacccggatgttatcgctgtgctacggggcgcgttaaaacaacattcgagaaagccaattcgaaagcaaagggattgcgcattgttgaagccatacgagattgcaccatcgggtcgcatgacaaaagctgaaagagaaacgattccacgtatcgtattagagttaactcagcaagggattcaggctaaacgttgggagcttcaggttctggcacgcggtgcaacagtaagatttgatggaaaagactttaaatttagaaagttgcggaaatgggagggttttttttga

SEQ ID NO: 92318 - DNA, 939 bp, Enterobacter aerogenes
atgccaacggttgtatcgttattctcaggttgtggtggttcagatgcgggggttctaagcgcaggtttccgtgtgcttatggctaatgatattttgccatatgctcgtgatgtctatttagcaaaccatccggaaactgattacatccttggaagtgttgctaatatcgaatcgttcccttctgctgaactattggttggttgctacccttgccaaggatttagtcaaggtggggttcgcaaagcggacagaaaaatcaatacgttatatcttgaattcgctagggctttaaatttaatcaagccaaaagccttcatagttgaaaatgtttctggaatggttagaagtaattttgagcatttgttgcaagatcaatttaaagtgtttacagaggctggttataaagttaagtcacaggttttaaatgcctcgcattatggcgttcctcaagataggaaacggatcttcatcgtaggcgtaagggatgatctgggtgtagattatgagtttcctactccaacgcatggtgaggggttaaaaccgttcactacaattcgtgatgctattggtcatcttcccgaatggcctgaaggcgaattctatgattcagattttcattggtactatctttcaaggaatcgcaggcaaggttgggagcagatttcgaaaactatagttgctaatcctcgtcatatgccactccatcccatgagtccagagcttgagaaacttggccctgataaatggcgatttgtgaatgaaaagcgagcgaggagatttagctatagggaggccgcattgttacagggttttaatgatttatattttcctgagacagctgctgcctctatgaatatgaaatacactgttgtggggaatgctgttccgccaccactatttgaagtggtggcaagaaatttaccggagatatgggattaa

SEQ ID NO: 92319 - DNA, 930 bp, Enterobacter aerogenes
atgattattggcttagattcacttcccaaactcgaaccatatttatgggcagacttcttggagctgagagcatcaacttctattgataagtcctacagtaaaggcgagctatcgagcttgatgcgagctcaagcagagcctgaagctcgagatctcagtgacaaaagatggacttatgctgttaactttataagaaatagaattgctatttttggcaaaagctacccctttaaattatccgaagatggtgataccgtttatataaaaaaaactgaccatgaaaaattgacaccatctgaaagattatatttggcactattgacttgcgccaacataaaatacatagcaccaagacgtagaaagcagataaccaattcttttgaacaaataagtttacctgtattcaaacaacttatgccacctgggatggtagtaaaccactgctgggctaatgctggggcaaatgccatctataccggacttttgtacgataaaatgattcaaatcgctaaagatattaggtgcaaaccaaatttcgaaccggatgattatgaaccaggcgatactggtgatggcggcattgatattttagcttatcatccgatgggtgatgacagagattgtatacctgttgcgatggtacagtgtggatgttctacaaccgaatgggtagcgaaacagtttgaagctcaccctagtaagttaggtaacttcttaccagttaaccatgcatgggcgtcttactattttttaccgcaagatttacgtaaagttaatggaagatgggcacacagaaatgatataggccaggttatattcgtcgatcgcttgcgtctaattaatttatccgcaagcaaccgaagcataaaccatatccaacacataacatatgtgaaggaacttatagaaacggaatatgaagaagattaa

SEQ ID NO: 92320 - DNA, 1095 bp, Enterobacter aerogenes
atgacaaataaaatcgaaccaatccaaacatcagcattaagttttgaccctgagaacccgcgattttaccgtctcaatgacaaagcaggctccgagggagtagtgatatcagaaatgcttcaagatgaaagcgttcaggaactgatgctttcaattggagagcaagactactttccaggcgaaccattgctagttgttagggatggtaaaaaaaatattgttgttgagggaaaccgtcgtttagcagcagtgaaactcctgaacggagaaataaaaccgcccagcaaaaagaataaaagcgtacaacttattcgagatgaggccacctataaaccgaaagagctaccatgcatcgtatataaaacacgcgaagaagttttaagatacatcggatatcgacatataaccggtgtaaaagaatgggactctctttcgaaagcaaaatacctcaaagagttatttgttacattctatgagggaaagaaaaagagcaaggctgatatacttaaaggcctttcaaaggaaataggtagtaagccatattatgtaggcatgcttcttacagcactgcatctttatgaagtagcagcagaagatgacttctttaatttaccaatgacagaaaaagatgttgatttttcatatataacaactgcgctcggctattctagcttaactgaatggctcaacctagaagatagaaaagattttgactgtgacgaaattgatgaagataatctcaaaaatctttttgcatggtgtttcgtaagagatcagcaaggtagaacaattgtcggtgaatcccgaagaatctcggatttagcaactatcgttgaatatccccgtgcaattgaaaacttgcttaagtcgtcaaatatagatgaagcatttttatacactaatggacaagaacaggctcttgaccaagcgattaatctcgcagaaacaaaactgagagttgtatgggaaatgcttctcagcacgcagaaattttcttcaaaccatcaagaaagagcatcgcaattatttgatatatccaaacaaataagaaatcatattgctaatgctatcagggatgaggaagatgaagaatga

SEQ ID NO: 92321 - DNA, 1047 bp, Enterobacter aerogenes
atgggtaagcaaaaatcccgtaaagccgctgcgcagaaggccagcaagtcacaacaactgaccgccagcgcaccgccaaaaacaacagcgttcaccttcggtgagccggtgccagtactcgataagcgcgatattctggattacgtcgagtgcatcagtaacggcaaatggtacgagccgccggtcagtttctccgggctggcgaagagcctgcgctctgccgtacatcacagctcaccgatttatgttaagcgcaatgtgctcgccagtacctatatcccgcacccgttgctgtctcgtcaggatttcagccgctttgcgctcgactatctcgttttcggcaatgcctttcttgagcagcgccacagcgtcaccggccagttaatcaaactgctggcctcaccggccaaatacaccagacgcggggtcgacgactcgattttctggtttgtggaaaatttcacccagcctcacgaattcgcccctgatacggtgtttcacctgctggagcccgacattaatcaggagatttacggcctgccggaatatctcagcgcgcttaattccgcgtggctgaatgaatccgcgaccctatttcgccgcaagtattaccagaacggcgcgcacgcgggttacatcatgtatgtgaccgacccggcgcagagcgcgaccgacgtcgaatcgctgcgcgaggcgatgcgtaactcgaaggggctcggcaactttaaaaacctgtttttctacgctcccggcgggaaaccggacggcatcaaaatcgtgccactgagcgaagtcgccacaaaggatgatttttttaacatcaagaaagccagcgccgccgacctgatggatgcgcaccgcgtaccgttccagcttatgggcggcaagcccgagaatatcggttcactcggtgacgttgagaaggtggcaaaggtctttgtgcgtaacgagctgtcgccactacaggacagattcagggaggtaaacgactggcttggcatggaagtcatcaggtttaaaaattacagcctcgataatccggaataa

SEQ ID NO: 92322 - DNA, 1770 bp, Enterobacter aerogenes
atgaccatttccaccgatacaaccttgttgcatgacccgcgacgacaggcatcgctgctttactggcagggcttttccgtgccacagattgccgaaatgctgcaggtcaaacgcccgaccgtgcagagctggaagcagcgcgacggctgggacggtattgcaccgatttcccgcgtcgaaagcagccttgaggccaggctgattcagctcatcgttaagccacaaaagtcaggcggcgacttcaaagagattgacctgctcgggcggcagattgagcgactggcgcgcgttaaccgctacagccagaccggcaacgaggtcgaccttaaccccaacgttgccaaccgcaacaaaggcgagcgtaagaaaccgaaaaagaactttttcagcgacgaggctatcgcaaagctggaagaaatattcttcgaccagtctttcgagtatcagctgcagtggtaccgcgcagggctcgcgcaccgtattcgcgacattctcaaatcccgccagattggcgcgacgttctatttctcccgcgaggctctgctgcgcgcactcaaaaccggccataaccagattttcctgtcggccagtaaaacgcaggcttacgtgttccgcgagtacatcatccagtttgcgcggctggtcgacgtcgacctgaccggcgacccgattgtcatcggcaacaacggcgcaaaactgatttttctcggcaccaattccaacacggcgcagagccataacggcgacctgtatgtcgacgaaattttctggatcccgaactttcagcggctgcgcaaagtcgcctcgggtatggcctcgcaaaaacacctgcgctcaacctatttttcgacgccctccacgctggcgcatggcgcttaccccttctggtctggcgagctgttcaacaaggggcgcagcagtatcgccgagcgtatcgatatcgatatcagccataccgcgctcgccggtggtcagctctgcgacgatggacagtggcggcagattgtcaccattgaggacgcgcttgccggtggctgcacgttgtttgaccttgaccagctcaaacgcgaaaacagcgcagaagactttaaaaacctgtttatgtgcgaatttgtcgacgacaaagcgtcggtgttcccgttcgaggagctgcagcgctgcatggtcgacgtgatggaatcatgggaagactttgccccgttcgccgattatccattcggatcccgcccggtctggattggctacgacccgtcacacactggcgacagcgccgggtgcgtcgtactcgcgccgccggtggtctcgggtggcaagttccgcatgctggagcgccatcagtggaaaggcatggactttgccgcacaggcagaggggatccgcaagctgaccgaaaaatataacgttgaatacatcggcattgacgcgaccggcctcggcctcggcgtttatcagttggtgcgctcattcttcccggcagcgcgcggtatccgttacacacctgaaatgaaaactgcaatggtgctcaaggcaaaagacaccattcgccgcggttgtctggaatacgacgctggggcaaccgacgtcacgcagtcgtttatgtccatccgcaaaaccatgaccagcagcgggcgcagcgccacctatgaggccagccgcaccgaggaagccagtcacgccgatatcgcatgggcgaccatgcacgccctgttaaacgaaccgctttctgccggtagcggcatgcagcctaaatctattctggagttcaattaa

SEQ ID NO: 92323 - DNA, 855 bp, Enterobacter aerogenes
atggcaaaaaaagtctcaaaattctttcgcatcggcgtcgagggtgatacctgcgacgggcgcattatcagcgccagtgatattcaggaaatggccgacacctttgacccgcgtgtctacggttgccgcattaaccttgagcacattaaaggtctgctgcctgatagcccgttcaaacgctatggcgatgtggtcgaactgaaagcggaaaaaatcgatgacgattccgcgcttaaaggaaagctggcactgttcgccaaaatcagcccatccgacgaattagtcgcgatgaataaggcgcttcagaaggtttatacctcaatggaaattgcgccgaatttcagtaacagcgggaaatgctacctcgttggtctggctgtgaccgatgacccggcgagcctcggtaccgaatatctcgaattctgccgcaccgcgaaatacaacccgctgcagcgccttaaggccaatcctgaaaacgtcttttctgtcgccacactggcggaactggaatttgaagacgtccccgacacggtgctcaacagcctggccgataaagtgaaagccattttcagccgtaagcaggtcagcgacgatgcgcgcctgaatgatgtgcatgaagcggtgaccaccgtcagcgagcatgtgcagaccaatctgaccgcacaggatgagcgactttccgctatggaaaccgcattttccaccctgaaacaggaactgaccggcaaggttgaagaaaccagccaggcattttccgccctgaaaaccaccctcgataaaaccgaaagtttcagccagccgcgacgcgcaaaagcaagcggcggcggtggcgatgagctgctgaccgactgctga

SEQ ID NO: 92324 - DNA, 1068 bp, Enterobacter aerogenes
atgcgtcaggaaacccgttttaaattcaatgcctatctgagccagctcgccaaactgaacggcatcagcgttgatgacatcagtaaaaagttcaccgtcgagccgtccgttacgcaaaccctgatgaacaccgtgcaggcgtcatccgcgtttctgcagatgattaacattctgccggtcgcagaaatgaagggcgagaaaatcggtgtcggtgtgaccggcactatcgccagcacgaccgacacctcgggcgacaaagaacgccagaccgcagatttcaccgcgcttgagtccaacaagtacgagtgcaatcagattaactttgactttcacctgacctataagcgcctcgacctgtgggcgcgttttcaggacttccagcgccgcattcgcgacgccattgtccagcgtcaggcactggatttcatcatggccggttttaatggcatcacccgcgctgatacttcagaccgcattaaaaacccgatgctgcaggatgtggctgtcggctggctgcagaagtaccgcaatgaagccccggcgcgcgtgatgagcaaaatcaccgatgctgagggtaaggtcgtatctgatgtgattcgtgtcggtaaaaacggcgactatgagaacctcgatgcgctggtgatggatggtaccaacaccctgattgacgagatttatcaggatgacccgaaactcgtcgctatcgttggtcgtaagctgctggccgacaaatatttcccgctggttaacaaacagcaggaaaacagcgaatcgctcgcggtcgatatcatcatcagccagaagcgcatcggcaacctgccagccgtgcgcgtgccgtacttcccggcgaatgcggtattcgtgaccacgctggaaaacctctctatctacttcatggatgagagccatcgccgcagcattgatgagaacccgaaaaaagaccgcgtggaaaactacgagtcgatgaacatcgattatgtggtcgaggcgtatgccgccgggtgcctgctggaaaatatcaccctgggcgatttcaccgcgcctgcagcaccggaaagcggagagtaa

SEQ ID NO: 92325 - DNA, 750 bp, Enterobacter aerogenes
atgacgagccccgcacagcgtcacatgatgcgggtctcggcctcagaagccgcgcagcgggaaaaagccccgctgcgccatgcaaccgcctacgagcagatgctggtaaagctggccgaagaccgccgcacgttaaaaaacatccgttcaaatgagcgtaaagccgagaaaaagcgcgagctgttgccgttctatgcgccgtgggtcgccggtgtgctggctgatggccgtggtgcacaggatgacattgtaatgaccgtcatgctgtggcgtctcgatgccggtgatatcgctggcgcgctggaaatagccccttatgcgctgaaatacggcctcacctctgaccatcgccgcacgacgccttacatgctggttgaagaggtggcacttgccacacagcgcctgcgcgatgccggtgagcctgtcgacctcgcattactgctgaccaccatcgacctgaccgacggtgccgacgttcccgatatggtgcgcgcccgtctgcataaagtgaccggcctgaccctgcgcgatgccggtcagagcgcggaggcgctggcacagtttcagcgcgctatgcagctcgaccgcaacggcggtgtacgcaaagcgattgagcaactggaacgcgcattaaagccaaaaccagaaacggcaccccgtaaaacgactaaaccgcgcacgcgcaaacctgccaccaaaccggcggcaaagcgcgggcgtccaccaaaggcggttaaaaccgccggttaa

SEQ ID NO: 92326 - DNA, 510 bp, Enterobacter aerogenes
atgacgacagtgatactgaatcagcccgatgaactgcaggacattccgggcgtggtgattcccgcccccgagacgggcgacgcagtgattaaaaacacgttcttttttcctgatgtggatccgaagcgggtgcgcgagctgatgcgccttgagcagacggtttccgatgcgcgcctgcgcaacgccatcaagaccggcatggcggaaaccaatgcggagctttacgactaccggctgcgccagcttgccgcagggtttaagcggctggctgacgtgcctgacgccgaggaaatcgacggcgagaatgtgcgcgttttccactacctgagcgccgtaacggcgatgacaaccgccaccctctatgagcgttatcgcggcgttgaggctaccggcaagggtgacaaaaaagccgacagcgtcgaaaccaccattgatgacctgtggcgggatatgcgctggtcggttgcgcgcctgcaggataagccacgttgcatcgtgggtcagctctga

SEQ ID NO: 92327 - DNA, 204 bp, Enterobacter aerogenes
atgaaagcctatgcgatgcagggcgataccctcgatgcgctttgcgcccggtattacgggcgcactgagggcgttgtcgagacggtgctgcaggctaatccgggtctgtctgagctgggcgtcattctgccgcatggcacggcgattgacctgcccgacgtggcatcgtcacccgtaactgaaactatcaatctttgggagtaa

SEQ ID NO: 92328 - DNA, 297 bp, Enterobacter aerogenes
atgacagaaggggaaaaaggcgtcctgtcgttgtttttgattggcgcgatgattgttgtcggaaaagtgctggccggtggtgagcccatcaccccgcgcctgtttatcggtcgcatgttactcggtggttttgtctcgatggtcgccggtgtcgttctggtgcaatttcctgatatgtcactgcctgctatctgtggaattggatccatgcttggcatcgccggttatcaggtcgtggaaatcgccattcagcgccgctttaaatcgcaaaaggggggcagtgatgccggtcattaa

SEQ ID NO: 92329 - DNA, 498 bp, Enterobacter aerogenes
atgccggtcattaatactcatcagaatatcgccgcgtttctggacatgctggcgtattcagagggaacggcgacgcatccgctgacaaaaaatcgtggttacgacgtcattgtcactggccttgatggcaagccggagattttcagcgactacagcgaccaccctttcgcgcatggccgacccgcgaaagtgtttaaccgtctgggcgaaaagtccacggcatccgggcgttatcaacagctttatcgatactggccgcactatcagaaacagctcgcattaccggatttcagcccactgtcgcaggacaaacttgcgattcagttaatccgggagcgtggcgcgattgatgatattaaggcggggcgtattgaacgtgcaatttcccgctgccgcaatatctgggcgtcattaccgggtgccggttatggccagcgtgagcacagtctcgaaaaactggtgactgtctggcgcacggctggcggggtgatggcatga

SEQ ID NO: 92330 - DNA, 414 bp, Enterobacter aerogenes
atgaaaatcctgataacgctccttgtactggccgtgcttggtctgctgtggttacgccatgagaacggcaatttatcccgcgcctttgaggcggcaaaccgtgtcgcgagcgagcaaaagacgacgattggcatgctgaaaaatcagctcagtgtcgccggtcagctcgccagacgtaatgaatccgcgcaggtagcactgcgcgaacagctcgcagaggccagtgcagaagccagtcgccgtgagcagacaattacgaggttactcaatgaaaatgaagcctttcgccgctggtataacgctgctctgcctgatgctgtgcgtcggctgcacacccgcgccgcctgtgccagcgccggtgattgtggtcaacggatgcccgagggtgagcctttgcccgatgccgggaagtga

SEQ ID NO: 92331 - DNA, 159 bp, Enterobacter aerogenes
atgccgggaagtgacccgaaaacaaatggcgacctgagcgcggatatacgccgccttgagggggcgctgaccgcctgtgcgctgcaggtcaaaaccgtcaaacactgtcaggatgaactcgatgcagaagcacaaaagtctgcgcaaagcgctaattaa

SEQ ID NO: 92332 - DNA, 468 bp, Enterobacter aerogenes
atgcagaagcacaaaagtctgcgcaaagcgctaattaacgccgtgccgcagctcagaaataaccccgatatgctgcgccttttcgccgataacgggcataccgattcccgactggcgagctcgctgtcgtttgaaaaggtgtacgtgcttaacgtagtggtgaccgacttcaccggcgacctcgatttgattttcgtcccggtgcaggcatggctgcgcgaacatcagccagacatcatgaccaccgacgagggacgggaaaagggattcacctggattattgatatcaataacgacgattcgctcgatatcagtatcagcctgaggctcaccgagcgcacgctcgtcaaagaggtcgacggcgcgctgcatgtcagttatgcccctgagccgccgctgcctgagccggtgatgcgcccggtcgagctgtacgttaatggcgaactggtgagtaagtgggatgagtga

SEQ ID NO: 92333 - DNA, 450 bp, Enterobacter aerogenes
atgagtgagttaaccgcgctgcaggaacgtcttgccggtctgattgccagcctgtcaccggcggcgcgtcggcaaatggcggctgacattgcgaaaaagctgcgcgccagtcagcaacaacgcattaagcgacaacaggcacccgacggcaccccgtatgccgcgcgaaagcgccagccggtgcggagcaagaaaggtcgtattaagcgcgaaatgttcgccaaactgcgcactaaccgctttatgaaagccaaaggcagtgacagtgcggcggtggtggagtttaccggcaaagtgcagcgcatggcgcgggtgcatcactacggcctcaaagaccggccaaaccctcacagccgcgacgtgcagtacgaggcgcgcacattgctcggctttacccgcgatgatgagcagatgatagaggacgtcattatcagccacctcggcaaataa

SEQ ID NO: 92334 - DNA, 642 bp, Enterobacter aerogenes
atgaatacgttatccacgatacaggaactcgcgcgcgcaattcgcaacctcattcgctcaggtgtggtgactgaggtcgacaccgcacaggggctttgccgggtgcagagtggcgggatccagactacatggctgaactggctgaccacccgcgccggtcgttcgcgcacgtggtgggcgccctcggtgggtgagcaggtgctgctgctggccattggcggcgagctcgataccgctttcgtgctgccgggtattttctccgatgataaccccgccccgtctgcctcggcggatgcgtggcacgtaactttccctgatggcgcggtgattgaatatgagccagagaccggcgcgctgacggtcagcggcatcaaaacggctgacgtgacggcatcggattccatcactgcgaccgtgccggtcgtgctggtgaaagcggagacccgcatcaccctcgatacccccgaggttgtgtgtaccaacaagctgaccaccggcacgattgaggtgcagaaaggcggcaccatgcgcggcaacattgagcacaccgacgggacatttaaatcaaatggcgtgcaggtggatgaccacggtcacggcagcgtgcaaaaaggcggtagctggacggagggcaccaaatga

SEQ ID NO: 92335 - DNA, 348 bp, Enterobacter aerogenes
atgacggcgcgctatcagggtatgaaccgcaataccggccttgctatcagtgacactgagcacatcagccagagcatgcgcgacattctgctgacgccggtcggctcgcgggtgatgcgccgtgaatatggctcgctcctgtcggcgctgattgatatgccgcaaacccccgcgctgaggctgcaaatcatggtggcgtgctattcggcgatccagaagtgggagccacgcatacgcctgaccgccatcagctttgagaccggcgaggctggcgaaatgtatgtcgatattaccggggcgcgaaccgataccggcgcgtcagtttctaccaccctttcactgagttaa

SEQ ID NO: 92336 - DNA, 909 bp, Enterobacter aerogenes
atggcaactgttgacctgagtcagttacctgtccccgatgtggttgaggtgctggattatgaaaccatccttgcggaacgcattgcgacgctgatttcactttatcccgaagaccagcaggaggccatcgcccggacgctgacgcttgagtcagagccgattgttaagctgctgcaggaaaacgcctaccgtgaggttatctggcgtcagcgggtgaacgaagccgcgcaggcagtgacgctggcgtattcaaccggtaacgacctcgacgtcgtggccggaaacaataataccgagcgcctcaccatcacaccggcagatgacaccaccatcccgccgacgcctgccgttatggaatccgacaccgacctgcgcttgcgcacgcaacaggcatttgagggattgagcgtggcgggtccggtcggcgcatatgaatatcatggccgcagcgccgacgggcgggtcgctgacgtctcggtcgaaagcccgtcgccagcctgcgtgacgattaccgtgttatcccgcgagggcgacggtaccgccagcgctgacctgctggcgattgttgataaggcgctgaacgctgaggatgttcgcccggtggccgacagggtgaccgtccagtcagcggagattgtgccgtaccagattgacgcgacgctctacgtttaccccggtcccgaatctgagcccatcaggcaggcatcagagcagaagctgcagagctacatcagcgcgcagcaccgtctcgggcgcgatatccggctgtcagccatttatgccgcgctgcatgtcgaaggggtgcagcgtgtcgaactggcatcaccgcaggccgatatcgtgctgagtaagtcgcaggcgtcgaactgtaccgagcaccggataactatcgggggctcagatgagtga

SEQ ID NO: 92337 - DNA, 609 bp, Enterobacter aerogenes
atgagtgaccgactgttacccgtcggctcgtcgccgctggaagttgccgccgctgccgcgctcgctgagattcagcgcgtgccggtaccgttgcgcacgttatggaactggcgcacctgcccggtcaatctgctgccttatctggcgtgggcgctgtcggttgaccggtgggatgagacgtggccggaggcgacaaagcgcagtgtttgtgcctcctcgttttttgtccatcagcacaaaggcaccatcagcgcattgcgccgggtggttgagccgctcggctatctgattgaggtgcgcgagtggtggaagctcaacgaggagccaggcacattccgcctcgttgttggtgtgctcgatagcggtatcactgaggaaatgtatcaggagcttgagcgtctgattgaagacgccaaaccggcaagccgccacctgaccgggctggctatcagtctgagttcaaccggagagctgtatgtcggcgcggcctgctatcacggtgatgcgctgacggtttacccctatttgcccgaagaaattattgtcggtggcggtgtttatccggcctcggctattcatttgattgataacctgagagtgaacgcatga

SEQ ID NO: 92338 - DNA, 1890 bp, Enterobacter aerogenes
atgacagcaaaatattatgccattctgaccaatcagggcgcggcacggctggcgaacgcgaccgcactcggcactaagctgaacctgacgcaaatggccgtgggcgatgccaacggcaaattaccgacgccagacccggcacaaacagcgcttatcaaccagcagcgcatcgcgccgctcaatatgctgaccgttgacccggccaatgccagccagattatcgcggaacaaattattcccgaaaatgagggcggtttctggatccgcgagattggtctctatgatgatgatggcgtgttgattgccgtggcgaactgccccgaaacctacaagccgaaactggcggaggggagcggccgcacgcagaccattcgcatgattctgattgtctccagtacgacggccatcacgctaaaaatcgacccgtcggtcgtgctggcaacccgtcagtatgtcgacgataaagccatcgaggttaagggttatgccgatgagctgatgaaaaatcaccttgcggcggctaacccgcatgctcagtatttgcaggcaaaaaataatctgtcagaactgaccgacaaatcaaaagcgcgtggctcgctggggttaggaagcgcagcgacaaaggacgtcggaacaggcgcgggtcaggtgattggcgtcggcggatttggtctgggtgctgagaaaatcagcaccactacgattgattttaaagcccgtatttttcgcgcaggtgagtctctgcttatcaaaatggagggcagtaccaacgtaccgaccggactgccaaccgggccgggtcagtacatgtatgcgcattgtctgggcgtcagggataacagctatggttgcacggttgtttttgttatgcacaacaatgcagcactctcttttttaggtacccgctttgataacgtcagcagcggctggatattgatgcgggtaggtaatcaggccgagttgtcgaaatacctctctttagccggtggcgatattaccggtcgcctcggtgtcagtggtgtacttgaggtcggtaaaacgggaacggaatcccttatcacccttggtgcatcaactgtgctcagagataacgcgaataatgcactggttatcagcagtgagtcgggggcgggaagtaaagcaggggtatttttacgccccattgccagcgctgacagcaccatgcaaatgcagggtaatgctgatggctggtttactgacaagttcaccccaaaaattctcaaggtacccggaaaggatgccatcatcaaaagtggggcgtattcctataccgaaggaagccagacattcaatcaggttgatggtctgtttatgcagagcgtcggcggccagtacggaaatatcagattcactgaaatggtgggcaaaaggtcatatatcggctttgaaatcaaaggcggcgataaaacggcatggctggagttccgacataacgggagctttgtgataaatggcactgacattgcgcctgtcggcattccacaaccgtggcctttggcaactgcacctttggggtggcttatctgtaatggtgccacttttgacaaggcaatgtatccatttttggcagcagcatatccctccggcaaattacctgacctgcgcggtgaatttattcgcgggtgggacaacggacgcggcgtggatcctggcaggtctttactggcatggcaggacgacatgataaaaaaacatagccatacgctcggtacatataaatccgttgacgccggaatcaagatgccagtgactgccggtgctgagctttctaattccggcgtgggtggcgctatgtataccggtgaagctggtagctcagaaacccgcccacgcaacattgcatttaactacattgtgagagcagcataa

SEQ ID NO: 92339 - DNA, 618 bp, Enterobacter aerogenes
atgaacaaatacaacactgatttacctacggcaaaactgaataaaagcggcattgccaccgttgccggctggctcacggtgtacaacgtggagcctcagcagcgcgaatttcaggcggtgacgatggaatatttagccgcgggtgtgggcttgcctgctttcagttatgccgataagccagcattaccgggtgatggctttgcactggtgcgcagcgaggatgaaaaacaatgggaaactattgcggattatcgcggtttaacggcttacagcactgagaccgggcaaccggaaattatcgcttttctcggcgaattgccggatacgctgacgttactggcacctgtcacggcgtatgataaatgggacggtaaccagtgggtgaccgacacggcggcgcaacatgctgatgaaattgccgtcgcagaacagcaaaagcaggctctgctttctgaggcgcagcagcaaatcaccgggtggcaaacagagctgcagctcggcatcatcagtgatgatgataaggccagcctgattctctggatgaattacatcaaggacattcaggcggtaagcaccgagggtgcgccggatatcgagtggccggtcaggccggaataa

SEQ ID NO: 92340 - DNA, 1179 bp, Enterobacter aerogenes
atgagtgattttcaccacggcgtgcaggtgcttgaaattaacgacggcacccgcgtcatttccaccgttgcgaccgctgtcgtcggtatggtctgcatggccagcgatgcggatagcgcaacattccccctcaacgagccggtgctgattaccaatgtgcagagcgctattgcgaaagccggtaaacaaggcacgctggcaacctcactgcaggccatcgccgaccagtcaaaacccgtcaccgtcgtcgtgcgtgttgccgaaggtaccggagaggacgccgaagcgcagaccatttcaaacatcatcggcggcacggatgagaacggtaaatataccgggattaaggcgctgttaaccgccgaggcggtcaccggcgtcaagccacgcattctcggcgtgccgggtctcgatacgcaggaagtcgcaaccgcgctcgcctcggtgtgtatcagcctgcgtgcgtttggttacgtcagtgcatggggctgtaaaaccctttctgatgccatcaaataccgcgaaaatttcagtcagcgcgagctgatggttatctggcctgacttccttgcgtgggacaccaccacgaacgccaccgcaacagcctacgccaccgcgcgcgcactcggcctgcgcgcctatatcgaccagacaatcggctggcacaaaaccctgtctaacgtgggcgtgcagggcgtcaccggcatcagcgcctctgtcttctgggatttgcaggcatccggcaccgatgctgacctgctcaacgaggccggggtcacgacactggtgcgcaaagatggtttccgcttctggggtaaccgcacctgctctgatgacccgcttttcctgtttgagaactatacccgcaccgcgcaggtactggccgacacgatggccggggcgcacatgtgggcggtcgataaacccatcaccgcatcgcttatccgcgacattgtcgacggcattaatgccaaattccgcgagctgaaatcgaatggctacatcgtggatggtgaatgctggttcgatgaggaatcgaacgataaagagagcctgaaaggcgggaaactgtatatcgattatgactatacgccggttcccccgctggaaagcctgaccctgcgccagcgtattaccgataaatatctggtcaatctggccgaatcggtcaacagctaa

SEQ ID NO: 92341 - DNA, 519 bp, Enterobacter aerogenes
atggcactaccccgcaaacttaaatatctgaatatgttcaatgacggcctgagctacatgggcgttgttgaatccgtgacgctgccgaaactgacccgcaagctcgaaaactatcgcggcggcggcatgaacggcgcggcggcgattgacctcggcctcgatgacgatgcgctcaccgtcgagtggtctgtcggtggcctgcctgatgtggcgctctttgcgcagtatgccgcgccgggtgccgatgctgtgccgctgcgttttgctggctcataccagcgtgacgacaccggcgaaattgtggcggtcgaggtggtcatgcgtggtcgccataaagaaatcgacggcggcgagaataaacagggtgaaaacacctcgaccaaactgtcgaccgtctgcacctactaccgcctcacgattgatggtagcgacgtcatcgaaatcgacaccgtcaacatggtcgagaaggtgaacggcgtagaccgtctggaacagcaccgccgcgcaatcgggctgtaa

SEQ ID NO: 92342 - DNA, 336 bp, Enterobacter aerogenes
atggcaaaagcaccacgtaaaaaacctgaatttgttgataccgatggaaatgaaattgacaccgaaaacccgaatgtcgtgattcttgatgagccaattaaacgcgcaggtcagacgatccataaggtcactctgattaagccaactgcaggaaccctgcgcggtgtcagtctggcggcgctggcacaatctgaggttgacgcactgattaaagtgctgccacgcatgacctatccagccctgacgacccaggaacttaccgcaataaacgcaccagatttgatgcaactcgctggcaaggtgattggttttttgtcaccggcttcggtgggatag

SEQ ID NO: 92343 - DNA, 2442 bp, Enterobacter aerogenes
atgagtaataacctgagaattgaggtattgctgaaagcggtggatcaggcgacccgaccgctaaaatctatccagacggcaagtaaaaccctgtcgggcgatattcgcgatacccaaaaagacctgcgcaccctgaacgcgcaggcgtcgaaaatcgacggatttcgcaaggccagtgcgcaactggccgtgaccagtcagtcacttgaaaaagccaaacgcgaagccggtgagctggccgtgcagtttaaaaacacgactaatccgacccgcgcgcaggcgcaggcgctcgaagcggcgaaacgcgccgcctctgagctgcagacgaaatacaacagtctgagaacatcggtacagcgacagcgctcagagctgatgcaggccggtatcaatacccgcaccctgtctgccgatgagcgtcggctcaaaacctccattagcgaaacgacggcgcagcttaaccgccagcgtgaggcactggcgcgcgtcagtgcgcagcaggcgaaattaagtcgtatcaaagctcgatatcagtcaggtaaggagcttgctggtaatgctgcatcggttggcgcggcaggtgtcggcattgcggcggcgggaacgatggccggggttaaattgctgatgcccggttatgactttgcgcagaaaaattccgagctgcaggccgtactcggggtcgacaagcagtcgccagaaatgcaggctctacgcaaacaggcgcgccagctcggcgacaacactgccgcctctgccgatgatgccgccagcgcgcagattattatcgcaaaaggtggcggtgatgctgaagctatagcagctatgacgcctgtgactctcaacctgtcacttgcaaacagaaaaacaatggaggaaaacgcgcaactattgatggggacaaaagctgcctttcagctctctaatgacgcggctgcacatatcggtgacgttctttcaaccacgatgaacaaaaccactgctgattttcaggggttaagtgactcattaagttaccttgcccctgtggcgaaaaatgccggggtgagccttgagcaggcggcggcgattactggcacacttcatgataataacatcagagggtcaatggccgggacgggctccgcggctgttattacgagactacaggcacctacaggcaaagcatatgatgcactcaaagagttaggtgtcaaaacctcggatagcaaaggtaatacgcgcccgttatttaccatcctgaaagaaatacaggccagctttgaacgcaataagctcggcactggtcagaaagctgaatacgtaaaaaccatattcggcgaggaggctatgaaatcagcaagtgtgctgatgacggctgcggccagcggaaaactagataaactaaccgctacgataaaagcctcggacggtaaaaccgaggaactggtcaaggttatgcaagataacctcggcggcgacttcaaggagttccagtctgcttatgaggcagtcggtatcgacctttttgaccagcaagagggctctctgcgcaaactcactcagaccgccacaaaatacgtgttaaagcttgacggctggatccagaaaaacaaaggactcgcggaaactatcggcattgttgccggtggcgcgctggctcttattggtgtcatcggcggcattggtctcattgcgtggccggttgtcatggggattaacgccatcattgccgccgctggcgtgatgggcaccgccttgactgttgccggtagtgccattgtgaccgcgctcggtgcaatcacctggccgattgtggccgtcggcgcggcgattgtggccggggcgctacttatccgtaaatattgggagcccatcagcgcatttttctcaggagtgatagagggcattatgagtgcctttgcgccagtcggggaaatgttcgctccactggcacctatttttgacggcctcggagagaaactgcgcggcgtctggcaatggtttaaagacctgattgcaccggtcaaagctacgcaggagacgctcgatagttgtaaaaatgctggcgttattttcggtcaggtgctggcctcagcgctgatggcaccgctgaacgttttcaataagctacgcagcggtgtcgactggcttctcgaaaagctcggtatcatcaacaaagaatcggacagcctcgaacagaccgccgccaaaaccaacgccgccacgcaggggaattcctacattccggcgaccagcacctatggcgggtatcaggcttatcagccagttaccgcaccggcgggacgctcttacatcgaccagagcaaaagcgaatacaacattacgctaccgggcggtgttgcgccggggcatcaactcgaccgccagctacgcgacacgctcgaacaaattgagcgcgaaaaacgtgcgcgtcagcgcgccagcatgagccacgactaa

SEQ ID NO: 92344 - DNA, 486 bp, Enterobacter aerogenes
atgatgcttgctctcggcatgtttgtatttgaacgccgcaccctgccttatcagacgatgcagcactcgaaggattatcgctgggcgtctaacgaccgggtaggcaaaccgcctgcgtatcagtttctcggcgagggtgaaacctcgatccaacttgccggcacgctttatcccgccattaccggcggtcgtatttctctgcaggccgtcgagttgatggcagatgagggcagagcatggccgctgattgagggaaccggcaacattctcgggatgtatatcgtcgacaaagtatcaaccacgcataccgagtttttcagcgatggtgcggccagaaagattgatttcacgctttcactgaagcgggtcgatgagtcgctgacggcaatgtttggcgacctgaataaacaggccggtgaacttctcggctctgccggtaatctggccgataagttgccgggtgcgctcggagggctggccgtatga

SEQ ID NO: 92345 - DNA, 1167 bp, Enterobacter aerogenes
atgatgacgggcatgaccattgatgccggtaccagtctcgcaccggcatttatgctgacgctgaacagtcaggacattaccagcaattttagcgaccgactgatatctctcaccatgacagacaatcgggggtttgaggccgaccagctcgacatcgagctcgacgatactgacggcaaagtcgagttacccttgcgcggggcggtgctgacgctgtggcttggctgggagggctcggcattgctgaataaaggcgatttcacggtcgatgagattgagcaccgaggggcgccagataccctgaccatccgggcgcgtagcgcagactttcgcggaacgctcaattcacggcgtgaggaatcatggcacgataccaccctcggcgagctggtcagcaccatcgcaaagcgtaacaaactgacggccagtgtcgcggagccgctgaaaaaaatcccggtaccgcatatcgaccagtcgcaggaatccgacgcggtatttctgacaaggctggctgaccgcaacggggcggcagtgtcagtgaaagcggggaaattgctgtttctgaaagctggtagcgcggtgaccgccagtggtaagcccgtcccacaaatgacgctgacccgcagcgatggtgaccgtcatcagtttgccattgccgaccgaggggcatacaccggcgtaaccgcgaaatggttgcacaccaaagacccgaagccgcaaaagcaaaaagtgacattgaagcgcaagccaaaagagaagcacctgcgcgcgctggagcacccgaaagcaaagccggtcagcaaaaagacaaaggccaaaaaagagcaggaagcccgcgagggtgagtatatggccggtgaggccgataacgtgctggcgctgacgacggtctacgcatcaaaagcgcaggcgatgcgcgccgctcaggctaagtgggataagctgcagcgaggcgttgctgagttttcaattacgctggcgcttggtcgggctgatttattccctgagacgccggtgcgcgtgtcaggctttaagcgcgtcatagacgagcagtcatggctaatcagtaaggtaactcacaatctgaataatagtggctacacgacgggcttagagcttgaggttaagctctctgatgtggagtacagtgaagaaagtggcgaataa

SEQ ID NO: 92346 - DNA, 219 bp, Enterobacter aerogenes
atgtttcattgtccgttatgccaacatgccgcacatgcacgcactagccgttacatgaccgatacgacaaaagagcgttatcatcagtgtcagaacgtgaattgtagtgcgacttttatcacttatgagtcggtacaacgttacattgttaagccgggtgaggttaatgccgtcaggcctcatccgttgccatcaggccaacaagccatgtggatgtaa

SEQ ID NO: 92347 - DNA, 417 bp, Enterobacter aerogenes
atgcttaacctcaaatcgacaattgcagtcgtcaccattcttttgtgtaccacagcccaagctcaaacgaataacgtaaaaaccttgcaaaagcagttaaggctatggcaaccaattgaaattaatgaaagtaataatatcgtcactgtcgttttggacacaaaccaagttacatctgaaatttatgatgcggtcattagttcaggtgtttgtatggatgtttggacaaaagacgtacccaattcctacatgaaaacgactaaagaattgcaaatactgaataaacataaggcgtttggttatgtgctcgaaaatcctctcgcaacctgtaacgagatgggtaaagagccggatgacaaagctaaagtggtgatgctctcaaaaacgcatatgtttggaatgccaaagttaaaataa

SEQ ID NO: 92348 - DNA, 1197 bp, Enterobacter aerogenes
atggcgcgcatcacacgccccctcactaacaacgagatccttaaagctaaaccccgagaaaaagatttcactctgcatgatggggacggcctgttcttactcgtgaaaacatctggtaaaaagctctggcgcttccgataccaacgtccagtaagtaatagccgaactaacctgagtctcggctcataccctgcccttacactcgcaacagctcgtcagatacgcgaccaatatttggctacgctcgcgcaggggatggatccgcaacagcaacaagagcaagcatcagagcaacgtcagattgagctggatagcattttctcaactgtggcctccaactggttcaaaatgaagagcaaaagcgtcacagaggactacgcgaaggatatttggcgttctctagataaagacgtattcccagcaataggcgcgatacctgttcaggagattaaggccagaacgatagttgaaacattggaaccaatcaaagcacgcggcgcattagagactgttcgtcgcttggtccagcgcattaacgaaataatgatttacgcagtcaacaccggcctgatcgatactaatccggcatcaggtgttggaatggcatttgagaaacccaaaaagcagaacatgcccacactacgaccagaagaattacctaagctgatgcgttctctggtcatgtcgaatctgtctgtttctactcgatgtcttattgagtggcagctcctgaccctagtgcgcccttctgaggcttctggtgctcggtgggtcgagatcgatctcgatgccaaactctggacgattcccgccgaacgaatgaaggctaagcgtgaacacattgtccctttgtcacctcaggctttaggtattttggaagtaatgaagcctatcagtggtcaccgtgaacatatttttccgagcagaaacgatccaaaacaaccgatgaatagccaaacggctaatgctgctcttaagcgaataggttatggtgggaaattggttgcacatggtttacgttcaattgcaagtacgtcaatgaatgaagctggttttaatgcagatgtgatagaagcggctctagcacatagcgacaagaatgaggttcgtagggcttataatcgatcaatctatttagatgcgagagtcgaattaatggattggtgggggcaagctgtccatcaacaagtcaaatga

SEQ ID NO: 92349 - DNA, 1959 bp, Enterobacter aerogenes
atgcaacctgtaacattagatggaatgatcgctgcatcacttccgtgggctaaagaagtcatcaaaaagaaaataatcccagtaatttcatcacgagttaaagattatttagatgatgtgagagcagctaaatttctaaatgacagcatggagaaatttctttctcgtgtcggaggacaatgttctttagtaaacacattagctttccaaaatacacctgtggaattaaaaaaaatatatgagcctatttctgtataccatgacaacgagcaatcaaattatgagtgtttaattaataataaaatagatatattgaattctttcaaccacatattaataactgactccgctggcatggggaagtcaactttaatgaagagaattgcactatattgcatcgaagaaacaaatcaaataccgatttacttagaacttcgtcgtatacaagattatagcattgctgaacaagtaaaaaaccagctgggattaggtagaaacatttctaatggatgccttaaggaaatcccattcatttatctatttgatggcattgatgaaatccctcaaggcattaaatcatctgtagtaaattccttaagggaatttgctgacgatttttcggaaagtaaaataattataacttcaagacatgatagtttcctttctgaattatatggtttctccagattcaaaataaaacctttagattcttatcaagcgtatgatttactgagacgttatgataacacaggtaatatttcatctaaattaatcaaaggacttcgtttggaagaaggaaggaattttgatgattttctttcgactccactatatgtttctttattattttgcgcatataaattcaaaccaataataccacgcaaaaaagaactgttttatagtcaagtatttgatgctttatttgagtctcatgacctaactaaggaacttggttacgttagggaaaaacattctaagcttgactcaactgattttcatcaaattttgcgtaggttaggattttggtgtctcaaggagggaggaagaattgaattcactaaggatgatctccaaataattattaaagatattgtttcaaaaataccaggaatgactatatcctcatcattattcataaaagatctaatcgaaactgtaccattatttgtcaaggaaggtgctatcattcgctggtcgcataaatctcttatggaatattttgcagctatgtttatctgccgggatactaaagagagacaacgaggaattctaagaacactttataaaaatgatgaatctataagacataaaaatctttttgaattatgcgcggatatagattactcaacatttcgttcaagtgtcattaaaaatcttttagaagattacgttgatttatataataaaataagccatcaatcaatagtaaaaaaccccaaagatattatttcaaaagttgagcttttatttcctggccgatcattgatttatattttttctaagggatcagaaaataaaacactttcaaaactaataagcggagactttagagagtttaaagaacttaatacaaaagatggctatctaaacaccacattcgcagacataggcaatgcttgggtggtcattgcaagaaatgaaacaataatttctcatgtgttaagcatactaaaagtaaaaaacccagagtatttccatagtgatcatagattaacaagcgatgataagaatcttacattagaagttcgtcgcgctataaagcatgataacgaagtaaagattgacgtaaattttgataacatacttagttgtgatgaaaaaaataatctaaacttaatttcagggattttatcgtttgataaaacgcctcaattaaaatacagaaaagctctttcagagcttgataagataatttttgatgacagcaatggaataaatcaacttttagaaggcttctga

SEQ ID NO: 92350 - DNA, 1062 bp, Enterobacter aerogenes
atgcgcaataaagaatacccccatggtttagtcatagcagttcatccatatccgagatatataaatagtgattggatcctgcatgagtacattagtgaacataaggaaccttttaaatggaaaagaaggacagagatactcgaacagtttgattatggactagtgtttagcacttatgaagaagcattaaaagtagctggggaaataaataaagtaattcaagaaagaattagcgaattagaaatcagtcaagaaaccaaagattcgtattttttaaaggctgaaaaagccataatatctaggcaaaggcttcgtaatgaagaggagttaatgcttcgtgaagcattgaatattacttcatcattgccaagacttcaagaagatgaagtgagtttgaaattaaatgcttatcgacgggcagccatatctatcaaagatgagttattgcaagagataaatattaacccactgattgaagtggctcatctcaaagaaaatagaatggttataggaagagacgcaaaaggagattggggccgatatttttattacaatgaacaaactactaaaattgcatttagagagaaaatatcaagagcttttggtttttcaggtcgtgatcattggggaaaggtaaagtctgagatcaggattcgtttattaccacgcgcaaatgagctattgcaacttgccagtgtaaaaaggatgcttgcagatgctcattcacagggtcataaggtattaatggctggagggtacgtattttggtacgaagaaactggcaatataggatggactattaaagctactaatagtaatgaatcaattaaaaatggagaaagtatttggcatgaagggacaatcatatcaaaaaatcatggtaggatcgttgtttttccatacataaaagaaaatggtgaaaaagtccaagggcatacgaaaaatgctccccatgatggaaaagctaagcctcgacaccctagtgaatatgttgaattaccatttcatgtacttgaagatgatttaatgattggtctgtttggtgaactaaaatatgagtga

SEQ ID NO: 92351 - DNA, 567 bp, Enterobacter aerogenes
gtgaccactgtgacaatacagcaggcctttgaggcctgtcagacgaacaaaaacacctggctgaaacgtaaagccgagctggcagaccttgaacgggaataccgtgaacagctccttgccggtgacgaacaaatcccgcgcagaatgcaggatttgcgcgacaatatcgatgtgaaaaaatgggagattaatcaggccgccggtcgctatatccgctcacatgaggaggtgcagcacatcagcatccgcaaccggctccatgactttatgcagcagcacggcgcggagctggccgccacgctggcacctgagctgatgggatatcacgaacagcttcccgcagtaaaacagagcgccatgcagcactcggttgattatctgcgtgaagccctgtcggtgtggctggccgccggtgaaaaaattaattattccgagcaggacagcgacattttaacggccatcggattcaggcctgatgcggcttcgcgggatgataatcgcgagaaattcaccccggcacagaacctgatttacacccgccgacgtgcagaactggccgcacgctag

SEQ ID NO: 92352 - DNA, 240 bp, Enterobacter aerogenes
atgtttcactgcccgttctgcaaaaagaccgcgcacgtccgtaccagccggtatctgtcggaaaacgtcaaacagcgttatcaccagtgtaccaatatcgaatgctcggccactttccgcaccatcgagtcggttgacggtgttatacgtgccgcaccggagaaacccgaccctgcgccggtggcgccaccgccgccgcgtaaagtacagggctgctacagttcgccgttccggcattaa

SEQ ID NO: 92353 - DNA, 744 bp, Enterobacter aerogenes
atgaaacccgaactcattatcaaagccatgcagaccgttatcagtaaacaggatgaaggcgcggaacaacgtattgccggtgcactggccgcacttaacgaagcaaaagacgcacacacggccagcatgggaaaactcagcgacattgaggcttccattcagcgttgtgagcaggaacgacagaccgccctcagtgaaagtgcacaggccgaacaggactggcgatgccgctttcgaactctgcgcggcaacctcactcctgaactgaaagctgaacacagtaaacgtatcgccagccgcgaactggctgatgagttcaccggtctgattaccgagctggagaaagacaaaagccacgccatgcttggcgcatgctcctccggtacggcttacatcagcgcccatgaaaaagcgttcaccacatacgccaacagcgagtggaagaaggcgctgaccggtatcagccccgcactgttacgtgcctttctgttgcgtatacggtcgctggaaatgagcggagaaacctcgccgcgtgcgaccgtgacccgcgagctgggtgatgccctgaatctacagtcagccctgtatcattttgatatggagcaggagccggtcctgtccgtaacgggcatgaatcgcccggtcataaccggggttgatatggcgctgttaagaagcccggccagacggatgaagcttgccgctgaactggccgcaaaagaccacgaacaggcagagggctga

SEQ ID NO: 92354 - DNA, 267 bp, Enterobacter aerogenes
atgcacaccgctttttctcccccgtcttctgcccctgccgccccgctgatgccggtttctgataccgttcacgagcgctttatccgtctgcccgaagtgatgcatctgtgcggcctgtcccgctcgaccatttacgacctcatcagccgggaagccttcccgaaacaaatctccctcggcgggaaaaacgtggcgtgggcgcagtctgaaatcaccgcatggatggcagatcgcattgccgaacgtaaccggggctatgacgcatga

SEQ ID NO: 92355 - DNA, 195 bp, Enterobacter aerogenes
atggctacgaccctcaccccgtcacacccgcagtttgtctttgtgtttgccgccgttcgtcgcgcagaccgtaaaccccgtatttgtatgcttcgcaccgttgccggtgatgagcacgccgcacgcctttccctcgttcgcgattacgtcctctcgtttgctggccgtctgccggttgcggaggtgcgcgcatga

SEQ ID NO: 92356 - DNA, 228 bp, Enterobacter aerogenes
atgagacacaccaccattaccgcccgtgacctcgaatgtctggagcatatgcgcaacgtcggccagctcgtcaatgagctgatgcaggtgcaggactgcgccaccgttcgtcgtgacccggcgcagcagttacagctcacctccgtgatttacctcatgaccgcccagctcgacggcgtggtcgaacgctgcaatcagcagtggctgaccggggagggtaacgtatga

SEQ ID NO: 92357 - DNA, 321 bp, Enterobacter aerogenes
atgaaaaagccattaccgcccgtattacgcgccgcgctgtatcgtcgtgccgtggcctgtgcatggctgaccctgtgcgaacgccagcaccgctacccgcacctcaccctcgacgcgctggaaagcgccattgccgccgagctggagggcttctacctgcgccagcacggagaggaaaaaggccgtcagattgcctgtgccctgctggaagatttaatggaagccggaccactgaaagctgccccgtcgctgtcctttctcgggctggccgtgatggatgagctttgcgcccgtcatatcaccgcaccggtactgcactga

SEQ ID NO: 92358 - DNA, 2334 bp, Enterobacter aerogenes
atgaaaatgaacgtaacagaaacggtaaaacaggcgtgcggccactggccgcgcattctccctgcgctgggtgtgaaagtgattaaaaaccgccatcagtcctgcccggtatgcggcggctctgaccgtttccgctttgacgataaagaagggcgcgggacgtggttctgcaatcaatgcggcgcgggtgacgggcttaagctggtagaaaaagtgtttggcgtgactccctcagaggccgccgggaaggtgaacgccgtgaccggcaatctgtcgccggttgccccggaagtgattgcggccgcagaggccgaaactgtggccgaccgcaaagcggcggccgcgctggccgtcaggctcatggagaaaacccgaccggccaccggcaacgcctacctcacccgcaagggtttccctgctctggaatgtctgacgctcaccgtcatgcataaaaccggcggcgtgacgttccgcgccggggatgtggttgtcccgctgtatgaggataccggcacactggttaaccttcagcttatcaatgctgacggcctcaaacgcaccctgaaaggcggtcaggtcaaaggggcatgtcatgtcatcgaagggaaaaaacaggccggaaaacgtctgtggattgcagagggttatgcgaccgcactcaccgtgcatcacctgaccggggaaaccgtcatggtggcgctgtcctccgtgaacctcctttctctggcgagccttgcccgtcagaaatatccggcctgtcagattgtcctcgccgccgaccgtgacctgaacggcgacggccagaataaagccgcagaggccgcagacgcctgtgagggcgttgttgccctgccgccggtgttcggtgactggaatgatgcgtttatacagtacggcgaggaagccacgcgcaaagccatttatgacgccatccggccaccggcgcaaagtccgttcgataccatgagcgaggcagaatttaccgccatgagcgccagcgacaaggctttgcgggtccatgagcattacggcgaagcgctggcggtggatgcgaacggccagctcctgtcccgctatgaaaacggcatctggaaaaatatccctgccgccactttttcacggaatgtggctgatttattccagcgcttacgcgccccgttctcgtccgggaaaattgcctcggtggtggagaccctgaaactgattattccgcagcaggatacaccagcgcgccgtctgattggttttcgcaacggggtactcgatacccaaagcggcgtattcagcccgcaccacaaatcgcactggctgcgcacgctgtgcgacgtggattttaccccaccggtgggcggggaaacgctggagactcacgcgccgaacttctggcgctggctcgaccgtgcggccggtaaaagtccccaaaaacgcgacgtgatactggctgcgctgtttatggtgctggcgaaccgttacgactggcagctctttctcgaagtgaccggtcccggcgggagcggtaaaagtattctggccgaaatcgcgacattgcttgccggggaagataacgccacgtcggccgatatcgacatgctggaagacccgcgcaagcgtgcctccctgattggcttctcgcttatccgtctgcctgaccaggaaaaatggagtggtgacggggcaggactcaaggccatcaccggcggcgatgcggtctcggttgacccgaaatatcagaatccgtactcaacgcatattccggcggtgattctggccgtgaacaacaacccgatgcgcttcaccgaccgcagcggcggggtgtcacgtcgccgggtgattattcactttccggagcagattgcgccggaagaacgcgacccgcagctcagggataaaattgcgcgcgagctggccgtgattgtgcgccagcttatgcagaaattcagcgacccgatgaccgcccgcgcactgctccagtcgcagcagaactccgacgaggcactcagcatcaaacgtgatgcagacccgacgtttgatttttgcggctatctggaaatgctcccgcagaccaacgggatgtttatggggaatgccagcatcatcccgcgtaattatcgtaaatatctctatcacgcgtatctggcctatatggaggctaacggctacaggaacgtgctcagcctgaaaatgttcgggctggggctgcccatgatgctgaaagagtacggcctgaattatgaaaagcgacacacaaagcaggggatacaaaccaatctgtcgctgaaagaggaaagctacggagactggttgccgaagtgcgacgaccccacagcaacataa

SEQ ID NO: 92359 - DNA, 501 bp, Enterobacter aerogenes
atggggactactttgcttcaagaaaaccatgaaaaaattttaaacatactaaatgaagctaaagatgtggcgctaaggtattacaaattaaccaataagcctctcggaatcactggagaaatagctgaacatgaagcttcaactcttctcgggttgtcactatgttcagcacgtcagtccggatacgatgcgactgagattttggacgggaaagaatatagagttcaaatcaaaggtcgatatatgcctgatcctaaaaaagtctctgcgagaattggtgctattgatatatctaagccatttgattctgttcttttagttttgcttgatgaaaattatgatgcttttgccatgtatgaagcatcacgagatgtagtagtcgcagctcttcaagctccggggtcaaagtctagaaatgagcgaaatcagctaggcatagcaaaattcaagtccattagccgtctccgctggagcaaggttgctgaacctgagatcctttaa

SEQ ID NO: 92360 - DNA, 147 bp, Enterobacter aerogenes
atgccaagacaaaccaaacctctctcagttaaagaaatcgaatcagccaaacccaaagaagcgggctacgttctctatgatggtggtgatggtgtaaatatcgcatacaggcaggtcacgtttttagatagcgaaccttactcttga

SEQ ID NO: 92361 - DNA, 1149 bp, Enterobacter aerogenes
atgaaaataaccaatatcaccacgtaccgtttacctccgcgttggatgttcctgaagattgaaaccgatgaaggcattgtcggctggggcgaaccggtgattgaagggcgcgcccgcacggtggaggcggccgttcatgaatttggcgactacctgattggccaggatccggcgcggattaacgacctgtggcaggtgatgtaccgcggcggcttttatcgcggcggcccgattatgatgagcgccatcgccggtattgaccaggcgctatgggatattaaaggtaaggttctgaatgccccggtctggcaactgatgggcgggctggtgcgtgacaaaattaaagcctacagctgggtgggcggcgaccgccccgccgaagtaattgacgggattaagaagctgcgcggcattggtttcgacacctttaaattaaacggctgcgaagagatggagctcatcgataattcccgcgcggttgacgcggcggtgaataccgtagcgcaaatccgcgaagcgtttggcaatgaaattgagtttggtctcgattttcatggccgcgttagcgcgccgatggctaaggtattaattaaagagctggagccatatcgcccattatttattgaggaaccggtattagccgagcaggcggaatattatccgcggctggcggcgcaaacgcatattccaattgccgccggcgaacgtatgttctcgcgctttgaatttaaacgggtactggaagcgggcggggtggctattttacagcccgatttgtcgcacgcaggcggtattaccgaatgctataaaattgccggaatggcggaagcctatgacgttgggctggcgccgcactgcccgctggggccgatcgcgctggcggcttgtctgcacgtcgatttcgtttcacataacgcggtcttccaggagcagagcatggggatccactacaacaaaggcgccgaactgcttgattttgtgaaaaataaagaagatttcaatatggaaggcggcttctttaaacctctgatgaagccggggctgggcgtggaaattgatgaggcccgcgtggttgagttaagtaaaaatgcgccggactggcgaaatccgttgtggcggtatgaggatggatctgtcgccgaatggtaa

SEQ ID NO: 92362 - DNA, 747 bp, Enterobacter aerogenes
gtgatctacaaatctattgctgacaaactgcgtttacggctcaactcttccgatttcaacattggcagcccgttaccgggcgagaaaaaactggcgcaggagttcggcgtggcgcgcatgacgattcgcaaagccattgacctgctggtggaaagtggattagtggtgcgccgccacggctccggcacctatgtcgcgcgcaaagatgtacaccatgagaccagcaacctgaccgggctggcggaagttctgcgccagcagggtaaagaagtggtgagtcaggtgttgatattcgaagtgatgcccgcgccgccggctatcgccagtcagctgcgaattaaaattgatgaacggatctatttctcacgccgggtgcgctacgtcgatggtaaaccgctaatgctggaggacagttatatgccggttaaactgttccgccatctgtcgttgggtcatctggaggggtcgaagttcgactatatcgagaaagaatgcggtattaccatcagcggcaactatgaaaccctcaccccggtactggcggataaacagttggcccgctcaatgaacgtgccggaacagacgccgctgctgcgcattacctcgctttcctacagcgatagcggcgagtttcttaactattccgtgatgttccgcaacgccagcgagtatcaggtggattaccacctgcgccgggtccaggcacagagcccgctaactcagcccccagaacagcacggccagtag

SEQ ID NO: 92363 - DNA, 1329 bp, Enterobacter aerogenes
atgtttgcctttttaaaagcgccgccggacgccgcgccaattagcgataaacgcgagttggacgagcgttatcgttactggcgtcgccatattctgcttaccatctggcttggttacgcgctgttttatttcacccgcaaaagctttaatgccgcggttcccgagatcctcgccagtaacgtgctgacccgcagcgatatcggcctgctggccacgctgttttacatcacttacgggctgtcgaaatttttctccggtatcgtcagcgaccgctccgacgcccgctattttatggggctggggctgattgccaccggggtggtgaatattctgttcggtttttccacttcgctatgggccttcgcgctgctgtgggcgctgaatgccttcttccagggctggggctcgccggtgtgcgcccggctgctgacggcctggtattcgcgaaccgagcgcggcggctggtgggcgctatggaataccgcgcataacgtcggcggcgcgctgatcccaatggtcgtgggcgcggcggcgctgcattacggctggcgaatggggatgacgattgccggctgtctggcgatccttgctggactgtatctgtgctggcggcttcgcgatcgcccgcaggcggtggggttacccgccgtgggcgactggcgtcacgatgcgctggaaatcgcccagcagcaggaaggcgcagggctgacgcgcaaagagattctgacccgctacgtgctggccaatccctatatctggctgctgtcgctgtgctatgtgctggtgtacgtggtgcgggcggcgattaacgactggggcaatctgtatatgtcggagacgcttggcgtcgatctggtgaccgctaactcggcggtgaccatgtttgagctgggcggttttatcggcgcgctggtggcgggatggggctcggataagctgtttaacggcaatcgcgggccgatgaatctgatcttcgccgccggaattttgttgtcggttggcgggctgtggctgatgccgtttgccagctacgtcatgcaggcggcatgcttcttcaccaccgggttcttcgttttcggcccgcaaatgctgatcggcatggcggcggcagaatgttcgcataaagaagccgctggggcggccaccgggtttgtcggcctgttcgcttatcttggcgcctcgctttccggctggccgctggcgcaggtgatggatatctggcactggaccggattcttcgtggtgattgcgattgccgccggcatttccgcgctgctgctgctgccgtttttaaacgcgcaggcgccgcgtaccgccagcgaagcgtga

SEQ ID NO: 92364 - DNA, 381 bp, Enterobacter aerogenes
atgaacacacagaacgtcaacgtcaaaaccgccaccaaagaatctaccgaaagatgggttgaaaaccttctggccaccgcgattagcgagcaaaagagcctcctgctgtatctggtagagcttaaaagcaagcgtatgagagaaagcgaaagaagtgaactggtatggggaacgttgatgcgtatggctgataacgtcctgggggcgggagtggttgactggcacgcggacgttctgcaggtgcatttcggcgttgctcaaccgtggcttcagtcccggaaactcgttgagcttctttatggtgatgctggtaaggatgcgtggaatgacgcacgcaaatacattgctgactcaatgcgcgctgaaccctatatgccatga

SEQ ID NO: 92365 - DNA, 348 bp, Enterobacter aerogenes
ttgaacttacacctgactgaatcctctgcagtcctgggaatgcagaccaccgcagaggcagaacgtgcgtactggttgagtcgtcgtaacgatgcggtgaaagcaccggaagaaatcgatgttcatgcctttcacgaggcgctcggactgatgtacccgctgaactggtcaacgagcgaaaacaatgaatgggagtccttcatgatggctgaaatgtactgctgtgacgtaaccgaaatttacgcccgctacggagccagatatttccggctgcgggatgtgtgcaacctgagccatgcgcagatcacaacgcgcattaaggaggaatttaacctgttccggaaatga

SEQ ID NO: 92366 - DNA, 231 bp, Enterobacter aerogenes
atgaacctatctattctttcaccttccactgaggctgtaaagccccgccgtcatcagcgcaacctgcgggacgacatcgccgcacaggagattgatccggcgctgaaggctttcgggcggcatattgcccggagcgttcgcaaggggcgtggtgtccatatccccgcgatgaataacaccgccttcgggcaggtgctccgcacgcttgaactcaaacgcgcatgtaactga

SEQ ID NO: 92367 - DNA, 834 bp, Enterobacter aerogenes
atgtcacagctgagttttgccgatgtgttcaatctggccagagaaaccgcggataacagccctgtcattcaggcagggcagcagatcgcggaacaggtgcctgcggttcagcgtatgatgagcgcgcagtacagccggggccgttttatcaacgtatttaaggatacgggccgccatctggggcgctgggaagtgttcagtgattttctgtcactcgccgccagtgagctggatatggcccggatacgaacgccggagagcatggagcactgccggaaaatctgcgcccggtacgaggccaccgacatcgcgaacatgcaggaaatgttctgcctgatggtgtgtgcgctggaagcgaaatttcatgatttcctcggcgcgatttttatggagctggagctgggcgataattttcgcgggcagtattttacgccgtattcggtgcagtgtctgatggcgcgaatgctgatgccaggcgtcagagacactatccgccgggaaggcattgccacggtcagcgatccggcgtgtggggccgcagggatgctgatcgcctatgcagagtgcctgcttgaagcggatattaacccctccatgcacatgttcggcagctgcattgacatcgatccggtggcggcagatatggcattcatccagctgtcgctgctggggatagcggcggaagtggtgacgggcaacacgctcacgatgcagttccggcgggtgaggtataccccggtttactacctcaatgactttgaaaaacgactggcagatctgcgccggttcagggctatgcgggactttatgcgcggaatacaggaggccgcgtaa

SEQ ID NO: 92368 - DNA, 531 bp, Enterobacter aerogenes
atgcgcacaatgaaagtcaacaccgccactcgtgaatcagacgaacagtttaaaacagacaaatatctgcgctgtgccgtaaccaatggtaaagctcgccttgattttatcccggacctcttctttacgccgttagccgataatatggccgcgagctggttacgccagcattctgaatacgacggcggttcttggtcttactgggttattccacagggtgtcggcgggaatattgcacccaacagcatccagttcattaccacgcagaccggatatatcgcacctgaaggtgagcagcgttacaggatgtgcatcccgggaaattatttcgaaggtgaggtcagcgccgatgcagcaggcattattgccacgctgatgattatgaacaggttgtcctggcgcgtggctgaaatggggccgcaatatgaccagatctgcaggcgtctggtttcacggcaggatgcactgaaggattatatcagcattattcagcatcccgaacggcaattaatatggcgggcaattgattaa

SEQ ID NO: 92369 - DNA, 480 bp, Enterobacter aerogenes
ttgagaaaacaactggtattagctaccctgcttttaatttccacgcctgcctgggctgcggattgttttgatatggcaggacgggactatcgaatagatcccgatctgctgcgggctatttcatggcaggagtctaaatggaaggtgaatgccatcgggaaaaacccgggatctggctacggtgccggactgatgcagattgactcgcaacaccaggatgaactgtcgcagtacggtattaaaccgggacaccttctgactgatgcctgtctgaatatttacaccggtgcttattatctggcactggcttttaaaaaatggggagtcagctgggaggctgtcggcgcctacaatgccgggttccggagaacggacaggcaagccatacgacgactggagtacgccaggaagattgaggccatctacctggctatcaagaaaaataaaaatgccggccagtcatatttaacaaaaaactga

SEQ ID NO: 92370 - DNA, 390 bp, Enterobacter aerogenes
atgggtaaagtgcaggcctaccccagtgatgaggtgtgtgagaaaattaatgcgattgtagaaaaacgcagaatggagggggctaaagataaggatgtcagcttttcaagtatatcgacaatgctacttgagttaggcttacgtgtttatgaggctcagatggaacgtaaagagtctggtttcaaccagatggcattcaacagagcattacttgaaagtgttgtgaaaacacaattttcagtgaataaaattctgggtattgagtgtctgagtcctcatgttaaagatgatccacggtggcaatggaagagtatggttctgaatatccaggaggatgttcaggaagccatgcgaaatttttttcctgatgaagatgctgagggagagtaa

SEQ ID NO: 92371 - DNA, 675 bp, Enterobacter aerogenes
atgtgtgcgatggatcgtagtcaaatcatggtgtacagtcaatcggaaatcatcaatcatcttgaggatttgctttcaatctcatcaagtcaatccttcgtacgcgatgctcaaggggagttaatttatttgagtcctccttttgaaagaactgtcctgaatggcaatgaattaaacatatggttttcatctatcccagttaatgttcggttagacttgtttaacgccgagctgaattctttatcaggaatgggaccatttgtttttaagaacgttaaatcaataggttgtttgctaacaatattaattgaatgcatctcagtcaataatgttaaatttgtgcgatgggtgttttttttagaatccacgaattttttatctttgggtgacgaatattttcgggcctctgtggaaattgatgatatcttttgtatgagaaagaaagtggatttagatttctggaaggtatttaatttgtatgcatatgggtttacgatatcaaaaatttgtagctctacaaaattgactgaagacaaggtgaagaaactaataaggaaaattaaaactgattgttttgtaagtgacagggattacttaggattgttggtattgaatacatttaattattgtcagcttgcttttaatgtaattaagattctatctggtaaatgttaa

SEQ ID NO: 92372 - DNA, 369 bp, Enterobacter aerogenes
atgaatgctgtattaagtgttcagggctctgctgtctctgaaaaaaccaaaccgtcttttatgtcccgcgttttcaataaaaagaaagccctgaaagtcgctaaagttgcgctgccggttgctgctgtggcggcgttcttcccggatgctgcgatggccaccaccacggcaaccgacctgatgaagtccggggatgcgaccgttaaaggcacgtttggtaagcagtccagcgtcgtcaaatgggtggttctggcagaagttgtcgccggcggcatcatgtacatgatgaccaaaaacgtgaagttcctgtttggcttcgcgattatttccacctttatcaccatcggtatgtcggtcgccggttactga

SEQ ID NO: 92373 - DNA, 306 bp, Enterobacter aerogenes
atgacgggagacgaattaaagcgataccgtttcccggaaacactgactaaccagtcccgctggtttggcttatatctcgatgaacttatcccggccgtgatttgtctcggctggggtttctggaccagcaagttcatttttggtatggctgcagcggcactggttttctggggtatcaagaaactgaaaaaagggcggggcagttcctggctacgcgacctgatttactggtatctgccaacctcccttcttaaaggtttctttcatgatgttccggactcctgtttccggcagtggattaaataa

SEQ ID NO: 92374 - DNA, 567 bp, Enterobacter aerogenes
atggaacatggtgccagacaaaataccacccgcgttatcgctgtgggatttatcagtctggggacgctcctgaccctcagtcttgcgaccaatattatccagggcataaataattaccgtcttcagacagaacagaaagtggcggtgacaccgatgttattcagtgccccctttgcggtgtctcagaaccaggctgacgcctcttatattgagcagctgggcctgtcctttgttgccctgcgtctgaatgtcacgccggaaacggttgatgcccagcatcagcagctactccggtatgtattacccgcctcgcagaacagcctcaaggtccagctggctgaagatgcgaaacgcattaaagacaataacgttaatgccaccttttatatgacgtcgatccgtgcctggccggcagagaaccgcgtggatatccggggtgagctgaaaacgtggattggggattccaaaccctacagtgaaattaaaagctatgtaattcagttcagtcgtgtcgatggtgtcagctggctggcgcgttttggagaaataaataatgaaaaaaattaa

SEQ ID NO: 92375 - DNA, 741 bp, Enterobacter aerogenes
atgaaaaaaattaacccgttatttatttcaggctgtctgctgttggccgcccccgcgatgtccgcgaccctcagcggtacgctggcgccgacagtggtccccctgaccaatggtggtcaggcaaatattgccgtgagtaacaccgacccgaatctgttcacagtacctggagatcgcatcacggcgataaacagcctggacggtggcctgacaaaccaggagcagaccgacagcggcggtgccattctggcgaccgtcagtaaaaaaccattcaccttcattgtggaaaccgaacgcgggctgaacttctccattcgtgccgtgccccgtgcgggctcaggccggacaattcagctggtcagcgagctggcgggtacccccggtccggcaaaagcctgggaagagtcgaacccctatgaatcgttactggtttcgcttaatcgcgccgtgcgccagggcagcgtacccgatgagtatcagtctgtccccgtcacctctgaagtgctgcaggtgccggctggtctgcgcgccactgccgacagggtctgggtcggccaccacctgaaagtcgtccgttacagtctggataacgtctcccggtcgccccgtatggtgcgtgaaagcgatttctggcagcccggaacacgtgccgtcatgttcagtaccccggcgggcctgctgactgccggtggtcgcatgcagatctgggtcacgacgtcagatgaaggagtgaagcgctga

SEQ ID NO: 92376 - DNA, 1425 bp, Enterobacter aerogenes
atggccaacttcaacacgctgatcaaacgtaagcaatatatctggctgggactcattctggcgggcggcgcggcagcagtcggaggcgggctgtatctgtcagatctgaacatgagctctgatgaggaagccccggctcagggcgaacccgcaccggatatgaccggggtggtcgacagcagcttcaacagtaaggtggagcagcacgcgacaacagaaatgcaggcgactgccgctgatctcaacaagcgttttgactccctgcagggggaagtggacctactgagtaaggcgcgaaccgccgaccagatacgtatcgacaagctcagcagtgacaatgaagccatgcagactcagctgaaggcgctgggcgtgaaaccggctgtctctggtggcgagcccgcgccgactcctccgtcaccgccacccggtccggaaggggagccgcagccagccagttatccgccgcaaaccggcgccgcggtaccgcctccgacggcattctatccggggaatggtatgacaccgccgccgcaggtcagctaccagtctgtaccggtaccaaaccagatacagcgtaaaacgttcagttacgacaaaggaaaaaaaacgaagtcattgccgtacattccgtcggggagctttgcaaaaagtatgcttatcgagggggcagatgccaacgcgtctgttaccgggaatgaatcaactgtaccgatgcagttgcgtatcactggtcgcgtggaaatgccaaacagcaaaacctacgacctgacagggtgttttgtgggccttgaagcctggggcgatgtctccagcgaacgcgccattgtccgtacccgcaatatcagctgtatcaaaggtgataaaaccatcgatcagcccattaacggccacgtttcctttatggggaaaaacggggttaagggagaggtggtgatgcgtaacggaaaaatcctcggctgggcatggggggccggttttgttgacgggattggtcagggcatggaacgggcttcacagccggctgttggcctgggggcaaccgcatctgttggcgccggtgacgttctgaaaatgggggtcggcggtggtgcatctaaagctgcgcagacgctgagcgagtactacatcaaaagggccgagcagtatcacccggtcattccgattggtgccggcaacgaagtgaccgtcgtgttccaggatggattccagctgaaaacgattgaagagctggaagcggaaaagaacgggcaacagcaggctcagaatcaggaggcggagccggcaccgcaggctgatgcccatcatcagtcaggcggcggtatgaacggattcaatactgacgagatgctgaagaagctgggcaaacttgatccgcgggagttctctccgggcgcagcgccgcagggggaaaataatggctaa

SEQ ID NO: 92377 - DNA, 585 bp, Enterobacter aerogenes
atgaaggaattaatgctgttaattcctctgggcggcgctttgctcttaaccgggtgcgcgggcacagagactgaatttcaatgtaatgccacgacgtcggatacctgtatgacgatggagcaggcaaatgaaaaagcgaagctgaaagaggaacgcagtgatgcaaagccggctgcggccgggttgccacaactggctgagggtaatttcagaaccacgtcagtgaattcgtacccgttgccgccacagtccaacctgacccaggccagagtggccgcggagaaagatcgagcacgtgcagtgtacctaaataatccaacggcaaagaatgaggcaacatatttcgaaaccgagaaaaggctccagtctttgccggtagtgaaaatgtctttaccagtagtggcgtcaacgtttacgtcaccgtcaacaccgccaggtaattttccccggccattaagaaaaggggaggagacaacgtcattgtggatagcgccgtatgtggatgcagatgatgtatatcaccagccagcaacggttctttttgtcgtgacaccatcggcgtggggacaacctcgccttaattga

SEQ ID NO: 92378 - DNA, 411 bp, Enterobacter aerogenes
gtgactgagtcaattaaatatctctggatgcttttgtgcgaggaatcgtcatatatttttatgttgatgctgattgttggcactgccgcagttatgtctttctttttacagcggttgtttgtgtcctggtggggtaagtcaatcattctgataatgtgtattgtcgtcgcgataacagaagtgtttgtctttattgagcctgagtcaacatacaaacagattcaaaccaataaacagaatgtcatctataccctgaaaaactgcagagtctccgcatttgaagcacagcaggcagggtttctggctaaagcaaaagatgcctggtcttgcccggatggcgtaacacggtatatggatgtgaaatacagggataagacagaggttaataaacttcgcacggaaggtaagtaa

SEQ ID NO: 92379 - DNA, 219 bp, Enterobacter aerogenes
atgcatgcatttatttttctggtgctgatgacgccgagtagtggcggtgggatttgggatattactcccatgcctaatacagatgtctgcataaaaatgctacgggtactcgaagcacgtgggggcagaggttacggaagtaatacaggagagtgcattgaaattaaaacccgcgagcctttaagcagcgttatagaaacattgaatgagggtgggtaa

SEQ ID NO: 92380 - DNA, 312 bp, Enterobacter aerogenes
atggctgaataccagttaagttttgatggttttgttcgacttttttttgcaatggcaatcattatctgcggttacggctatgtaattattggtgtttttataagagatacgcttgcctgtattttaatgttgtttgggcttacaggtctcagtgctttattttcttttatggtgtttaaggataaaaacatatgggcggactctcctgatttgacgctgtcagtaataacgggattttttacagccacagtgatcttttatatgttttatgtcttgatttattactttgatcggatgggggcaggtgaatag

SEQ ID NO: 92381 - DNA, 405 bp, Enterobacter aerogenes
gtgaaagcgtactatatacttggacataacgttgcatggcttaacggtatatgcctgattctttttgttattggtgtggtcggtgcgctggctatggttgccatccctgaaaaattcaatcttcgagttaacagaggcgatacattcatatactgtgcgcttatagcggtggttgggttttccgggatgttcgttatctccattcactcattttcgatggatgaacttgaagcaggtagacactggaaagatgactgccggacacttgaggtaaacatgccgacaggcgcttttaccagccctgttaataaactggactgtgatggcatcatcattaatgtgcctggtgggcagtattattcctatatccatcagtgggaattatataaagctaactcaaaatga

SEQ ID NO: 92382 - DNA, 153 bp, Enterobacter aerogenes
atggaaagacagcaagaaattggccagcaatttggttttttgatagttcttcttttaattgtgttaactgggtatttttttgtgcagtatattgaagattctcgcgatatgcagcccgctactccagaacaactgcaaagtattattcattag

SEQ ID NO: 92383 - DNA, 393 bp, Enterobacter aerogenes
atgatgctgtttcttcgaaagtacggatttttgtttattcctccagtctactggctcatctatctgggagccagactgacttacaatggactggcaggagagttttctcctgatttctttcagggtattcgacatgaaggcgtctatattatctgtagtttgtgtgtattttattttttctgcttagaggtggaagttggtgatggggagttctcagcgaacattctgttcctgattgttttctttcatgtggttttattatttatcactctgcttgtttgtctgtggcaaggggaggtgttgttggattcgatctttatgggtcagattattgcctccatgtgtttattgttttttattccagtgctttccattataagaaggagtttctag

SEQ ID NO: 92384 - DNA, 2643 bp, Enterobacter aerogenes
atgagtaataacatcatcgatgccgtcacccaggcagtgaattcactggtatcagcactgaagctgcccgacgaatccgcgaaagccaatgacacgctgggcagcatgaatttcccccagttcagccgtattttgccctataaggattatgattccgcgaccgggctgtttattaataacaaaaccatcggttttatgtttgaggcgcgtcctttacccggtgcggataaaagtatcgtcgccacactggagcatttactgcgcagcaaacttccccggggcgtcccggtcagttttcatctggtctccagcaaactggtcggcaatgatatcgactacggtctgcgtgaattccgctggagcggtaaacaggctaagaagtttaacgccatcacccaggcctactatctccgggcagcggagacgaagttccccctgcctcctgcactggatttacccctgacgctgcgtaactaccgcgtgtacatctcctgctgcgtgccccggaagaaaaactccaccacgcaaattgtggagatggagaaccagattaaaatcctgcgggcgtcactgggcggtgcctatattccgacgcgtatccttgatgctgccgggctggtcgaactgatgcgcgagctgataaacccggacccgcacgagatgtaccgcgtaccgtataagctggacccctatcaggatctgaactatcagtgtgtcgatgacagctttgatatgcaggtcaccgccggtcatctgaaaattggccgcctggggcgtgacgggaaagagtgcgtaacccgggtgacgagctaccatctggagagtgatccggaaatggccttcctctggacctccgcggataactacgccaacctgcttaacccggagctctccatttcctgcccctttgtcattacgctgacgctgatggtggaggaccaggtgaagacccagaatgaagccaacatgaaattcatggacgtggagaagaaaagcaaaacctcctacgcgaagttttttccgaacgtgataaaggaaatgcaggagtggggcgatatccgccagcgactggcgaccaaccagacctccctggtgtcctacttctttaatatcaccacgtacaccgcagacagcacagaggcctctctcgccgctgaacagcaggtgctcaacagttaccgtaaaggcggtttccagctgatcccggcccgctaccatcacctgcgtaactttctggccatgatgccgttcaagtgtggtgagggcctgtttaaagagctgcaggcggcaggcgtggtgaagcgggcggagacgttccaggtggctaacctcctgccgatcgtcgctgacagcccgctggcgccggcgggactcctggcgcccacctaccgaaatcagctggcgttcatcgacctgttctacgagggaatgaacaataccaatttcaacatggcagtctgcgggacgtccggggcgggtaaaaccggtctgattcagcccctcattcgcagtgtgctcgactccggcgggtttgcctgggtgttcgacatgggcgatggctataagtccctgtgtgaaaacatggggggcgtatacctcgatggcgataccctcaagtttaacccgttcgccaacgtgctggatgatgctcacttcgacatgtcagcagaacgtatacgcgatcagatgtctgtcatggccagtccgaacggcaacctcgatgaagtccatgaaggcctgcttctgcaggcagtgcaggcggcctggttaagcaagcgtaatcatgcacgcgttgatgacgtagtgcagtttttacaggacgcgaaggacagcgatgaatatgctgattccccaacaatccggggccgtctggacgagatgataatcctgctcgatcagtacacggtaaatgggatctacggggactatttcaactcagatacaccaacactccacgatgatgcccggatggtggtactggagctcggtggcctggagtcgcggccatctctgcttatcgctgtgatgttctcattgattatttacatcgagaacaggatgtatcagtcaccgcgtggcctgaaaaaactgaacgtcatcgatgaaggctggaagctccttgatttcaaaaatgaaaaagtgggtcagttcatcgagaaaggctaccgtaccgcgcgtcgacataccggcgcatacatcaccatcacgcaaaatatcgtggacttcgattccccgaccgcatcgagcgctgcacgcgctgcctgggggaactcgtcatacaaggccattctgaaacagtcagcgaaggaatttgccaagtataaccagctgtacccggatcagttcagcaagctggagaaagacatgattaacggcttcggttcggccaaagagcagtggttcagctcttttatgctgcaggtggaagcgaactgctcctggcaccgcctgttcgtcgacccgctcagccgggcgatgtactcctccaaaggcccggattttgagtacatgaaagcgcgccgggaagagggggtcgatatccacgatgcggtgtacggcctcgcgtgtcgcaactttaaagacgaaatggcagagcttgaatcccgaataccggtgaatgacattgaggataaacagagatga

SEQ ID NO: 92385 - DNA, 390 bp, Enterobacter aerogenes
atgaaaaacaacaccgaacagccggtcagtacgacctctcatacctttcgccggatacctgtcatcgttgctctcgtgcttttcgccctggcaaccagcgcgtttctctcacgcgtggttctggagtactccacgccgcgggtggtggcttttgatatgaagaagacgctcgacagctttatggacagtgtgagtcagaagcagctgacagaggcgcagtccaaagcgctctctgatcggtttaacgacgcgctggagaagagtctggcggagtatcagcagcagcatcatgtggtcattctggtttcacctgccgtggttcagggcgcgcccgatgtgacccgcaacatccagcacgacattgcccgccggatgaaaggagaacagtaa

SEQ ID NO: 92386 - DNA, 636 bp, Enterobacter aerogenes
atgttacgactgaaaggctgtctgctcgccgcctgtctgctatcgccgctgactcaggcggctgatctcggtacctggggggatttatggcccgtccgggagcaggacatgctgcagctcatcacgcagcgtctgcagtcgctgcaatcctctggccagtgggaccagacgatggacgcgtttaagcagcgggttatcgagaacagtcagcgtccggcgccggtggaaggcattaagcgtgcggagaaatacgagcagcgctggtttgatcccagcatccgcctgaccgaagacctgaaggacaatgaggggcgggtgtttgcccgcaagggcgatgtggtgaacccgcttaaaaccgtaccgtttgtccagaccctgtacttcatcaatggtgacgatgccgaccagctggcctggatgaagcgtcaggtgccggaaaccctgatgagcaaaattatcctggtgcgtggcagtatcccggacacctccgcagcgctggacagccggatctatttcgaccagaacggtgtactgagcaagcgatttggcctgacggcggtcccggcgcggatcacgccggcgccctccggtgaacggctgaatattgagaccttcccgcccgtcccgcacccctga

SEQ ID NO: 92387 - DNA, 402 bp, Enterobacter aerogenes
atgccgatgatactggccttaataatcctgctcacgatgctcttgctgacgctaatgtggtccaccatccgtaagcaggagaatgtcatacgggaactcagtacaagagaaagctggctggagagagaggttgagcgtctcaggaccgataacgagaagctgtaccgctggctgagatacaacggtgaaaaggttatcgatgaaatgacttgtgaactcgatgcactgtccgccgttcgccagacgaacagggattcataccgtcgccagctttacctcttcgactgcctgtccctgatggtgtgggccgggatggagggcgccgaagactctacacgggaaaaggtccgcaataaaaccgatgccctccgtcttgttctcagggagaaaactgacgaatga

SEQ ID NO: 92388 - DNA, 990 bp, Enterobacter aerogenes
atgaaagccatgttttttttaatctgcatcgcgttctcaacgttcagtggccgcgccgccgcagacccctcctgtgagggccggtttgttaacccgatcaccgatgtgtgctggcgctgcatatttcctttatcactcggcagcgtgcaggttggtaaaggcgatctacctgataccagcaatccgggtagtcccctgcagctgtgtccggcgccgccaccgatttttgttcgccccggcctggccatcgggtactgggagccgatggccatgacggacgtcagccgttcgcctggctgtatggtcaatctggggggcttcagtatcaatctcggcaagaccggtatggggaccgcgagaaaggacgataagcaggtgaacggcgctttttatcacgttcactggtacaagtacccgctgacctactggctgaacatcatcacctccgcaggctgtctggaaggcggagacatggatatagcctatctgtccgagattgacccgacctgggtggacagcagcctcaccaccattctgaatccggaagccatcctgtttgccaaccccatcgcacagggggcgtgcgcggctgacgctatggccagcgcgtttcatatgccactcgatattctgttctggtgtgccggctctcagggttcgatgtacccgtttagcggctgggtaagcaacgagtccagtccgctgcagtcctcgttacttgtcagcgagcgcatggcgtacaagcttcaccggcagggacaaattatggagagcatcgggaaggacaaggcggtctgctatgagtatccgtctccgatcatccccaaagagcgctggcgctatcagatggtgaacatgtacccggacagcggccagtgccatcccgtggggcgcagcgtgatgcgctgggaggccggtaaaaatccacccaacacccgtaagaactatggctatctgatgtggcgtaaacgcaattgtgtctttctctga

SEQ ID NO: 92389 - DNA, 639 bp, Enterobacter aerogenes
atgaaattaatgaatctgtttatggtcatgcttttactgaccggacgagcagtgttggctgaaacctcctctgttacagacagagaatggctgaagcagcaggagaacctcagcgaacagctgcgccagcatccggataaaaagctgcagcaggagcttgaggcgcaaatcaaccgtaatcctctgcccaaatcagaccgccagtttatcgataatctggtcagccagcagaaagcggcgaatcaggaaaagccggcagaaggggcgctgtactttgtctccttctcgatacctgaagaggggctgaagcggatgctgcacgaaacccggcagtacggcattccggcgacactgcgtgggctcgtcaataacgacatgaagaccaccactgacgcggtgctgcagctggtgaaggatggcgtgaccgacggcgtgcagatcgacccgacactatatacgcagtacagcatccggagtgtgccgtctctggtggtacggtgtcaggccggatatgacgtggtacgcggtaacattcacgtcaaacaggcgctggagaaagtggcacaaaccggtgactgcgcacaggtggcccggcaaatacttgatgcgccctcgaatgccgccgggagccagccatga

SEQ ID NO: 92390 - DNA, 1956 bp, Enterobacter aerogenes
atgaagacggttatttccgtactgactgcgcatttttttgtcctgagcgcctttatctggctggcatcccccgcctgtgctgacagtggaagcgactataaagctggttcggattttgcgaaacaggtgcagggcaatggtctgaactcactgaaaaatttcagtggtgagcaaaacctgccggggtataccgacagccctgatcaggcaaaatactatggcggcgtcactgccagcggagacagctctctgaaaagcgattcagccctggagttcagccagggagataccggcaaagcgattactgagtcgttcacgaaccggccaccggatcagatatctcaggatgcaccgtttattcaggccgcaaaggatacagaatcccgtgccgacagcattgtcggcgataccggacagtcctgtaccgcccaggttgtgaaccgcagtgagttcacaaaccatacctgcgaacgtgatctgcaggtggaaaatttttgcacacgggaagcgaccctgaaggataacgccaccacacagaaagttaaccgaacctatcagcaggtggtgacgctgaattatgcccggaatacccggcaatggagtggcaacctgacgatcccgaccaacggtcgtctgctgaatgcctcggtggatggtgagcctctggtgatcccctggattgaagaatgcgattccgaagggaaggtgcgggatagctgcaagagtgcagtgagtgaaagcctgaccctctttgaacgaacgttccccattgatgtgatcagctggccacgttcagaatcgatgtgttcaggcggtcagaacacgcattgtacgaaatatacctatgacgggaaggggaagattcatcagtcgtttggtgtggacaaagcggtcactgctgggcagaacttttcagtaagcaaaacatcacggaccgtatcatcggccagccagaaacccgtacaggtcacggtcaccctggtgatggaagaaaccgaaaccgtctatgcacctgaagtcgtctgggttgaaaactgtccgttcagtaaggatgaagggaaaaaaacgggcgaggaatgtatcagtccgggaggaacgcgaaccatcaccctcggaggcagggattactcgttcacggaggcctgctggaaatataaggatacctggctcacgcagccggcggacaacggctcctgtgaaagcctgatgaaaaatacggcctgtactctgtcatcccgccagtgcgccttctccagcgaggaaggcacgtgcctgcatgaatatgcaacgtattcctgcgaaaccaggacgagtggcaagcaaatgatctgcggcggtgatgtcttctgccttgatggtgaatgtgacaaagccacgtccgggaagagcaacgactttgggcaggcggtgtctgagctggcggcactggctgccgcggggaaggacgtcgcggcactgaacggggtggatgtccgggcattcaccggaaaagcgaagttctgtaagaagtttgctgccggcttcagtaactgctgcaaagacagcggctggggccaggatgtggggttggcacgctgcagcagcgaggaaaaggcgctggccaaagcgaaaaaagacaagctgacggtcagtatcggggaattctgctctaaaaaggttctggggatttgcctggagaaaaaaaggagctattgccagttcgactcaaaactggcgcagatcgttcagcagcagggaagaaacggtcagctgcatatcggttttggcggcgccagcagtcctgactgtcggggcattaccgtcgcggaactccaggggattgattttaacaagctggatttcaccaactttatggacgacctgatgaaaaatcaaaaaataccggaaaacgatgtgctcaccaataagaccagagaacgaattaaggaaatcatgagtcagcaatccgcgcaataa

SEQ ID NO: 92391 - DNA, 255 bp, Enterobacter aerogenes
atgaaaatgagttttcacaaaaagcctgttattgattttgtcctgagattaacgctaacaataatcattatttctccggtgatttatttctcctgggatgccgtcaaagggacgtcgggaagtgattatgtcgaaagtgtggtctttattcttatggctgggtttgccatgtctgtatgttgtttgtttttctcagtcctggagaaagttataaatgcaaggaaaagcaaagatgaatcaatatatcacgattga

SEQ ID NO: 92392 - DNA, 267 bp, Enterobacter aerogenes
atgcaaggaaaagcaaagatgaatcaatatatcacgattgagaaatttatagacattctgaatgaagagaatttaccccaggagcatcatgttatggtgctggctgttcttgcggatatctctctgcatacagacaggttcctgattaactcgtccgaactggttcagatggccgctcagtactcacctgctttccagaaactgccagcggaccggcaggcttttatatcttcagtactgagcatgccgctattccttattatgtga

SEQ ID NO: 92393 - DNA, 327 bp, Enterobacter aerogenes
atggaagagaaaaaagcatacgggctggtcatggtgtttgtcggggtgtttgtctttctcctggtcagcattatgtcgtacagcctgtggcgggacaggcaggttaacgcatttatgacaaccaaccgggcctgggggatccagtgcgacactgtttctcaggccgcgtgggtgatcagggacggggagcgggtggaccttcagataaattatctgcctctgtactgcagcggttatcgctttgaagcccgtgatgatgcaggaaaggtacagcgccagctcgataaatacagtgtctatcagcatctgtcacgccagtcgcattaa

SEQ ID NO: 92394 - DNA, 753 bp, Enterobacter aerogenes
atgcgaacaatacatgccgccatgctggcggggtgcctttgctgcgccctgatgccggctttcgccaaagacgcgggctggcagtggtacaacgagaaactgaagccccgtgatgaggacaggaaagccgtaccagcggcaccaccgccgcaaatggatattctggagaaactcgccacactccaggcggccaccaaacggtcgttgtacgaagccattctgtatccatcgtctgaaaacttcgtgaagtatttccggctgcagaactactggacgcagcaggcaggtttgttctcgatgagtgcgaagaaagccatgctggaaaaccccgaactcgattacaacctgcagtacagccactacaacggcacggtaaaaaaccagctcgctgccgactatgccgaacagcgacaggctatctccaccctcgcacagcactacggcgtgatgttcttctaccggggccgggaagcgatcgatggccagctggtccaggtgattaaaaattttcgcgaaacctatggcctgagcgtgataccggtgtcggttgacggcgtgattaaccccatgctgcccgacagccggacggaccagggccaggcagagcagcttggcgtgaagttcttccccgcgatgatgctggttaacccgaaaagtggccaggtgaagcctctcagttacggctttatcagtcaggacgacctggcgaaacagttcctctatgtctccagcgactttaaaccgaatttctaa

SEQ ID NO: 92395 - DNA, 240 bp, Enterobacter aerogenes
atgcgaaatattcgttttccggatttagatatcaccgggatgtgggtgctggccgtgggcgtgtttttccacctgatagcccggcttgtcagaaaacagcctgagctggccgtccaggccggggaaatcttcgggctgggtatggtggtgttcgggggataccgcattctaaacgccctgattgctgaagccgaaaaagaggagaaagcctgtgaaaaacagcctgatgaacctcgctaa

SEQ ID NO: 92396 - DNA, 558 bp, Enterobacter aerogenes
gtgaaaaacagcctgatgaacctcgctaagacgccgctggcggcactggcgctttcccttgcactggctggggtggcacatgcgggaacgctcgatgaggtgaagtcgctctgggatccgcggggtatctccggtactgaaacggcctccccgcagagcgacactccccaggcggtgagcggggcatctcagcctcgctggttacgactcagcaacggaaagcaggtggacctgcgcgactggaaagtggtgctgttcatgcaggggcactgtccctactgtcataaatttgacccggtgctgaaacagctggccggacagtatggcttctccgtgttttcttacaccattgacggacagggtgatgatgcgtttcctgaagcgctgccggcgcctcctgacgtgatgcagacctttttcccgaatatcccggtggccaccccgaccacgtttctggtgaacgtaaacacgctggcagcgtacccgatcctgcagggcgccacggatgcgcagggctttatggccagagtggatacggtatttcagatgatgcactga

SEQ ID NO: 92397 - DNA, 444 bp, Enterobacter aerogenes
atgaacaaatatatacgttcgacgggactgtatgcgtttttatttccagccagtttaaaagcacccgggcagacatcagcagaaaaaatagaacaactgaagccggaatttattcaccgggaaaggcgtctggaaatctatctggaattattcattgtgtttctcactgcaggtgctctgttgttatggataatgagaattttatttaatctctgcgtggatgactggatagccagcggtgacctgcgagtaaaagacctgtggaatattatgatgtacgccatcccttatgcgctgatcgctgttggggtggggttctttgttgccggagtgacattagcgatccgcaattttttcagttatcaccttaagaccctttttattctgagaaatgacagagttaaaaagaatgctgtgcgtaatggaggacaggatgcgaattaa

SEQ ID NO: 92398 - DNA, 1368 bp, Enterobacter aerogenes
atgcgaattaaacttctgtcacttttctgcggtgccgcgcttggcctgtcatttagcgccgccgccgatgtgaatggcgacatgaataacttcttcaataagctcgggtttgcgtccaataccagccagccacaggtctggcaggggcaggcggcgggttatgcctctggcggttcgctgtatgccagaacgcaggtgaaaacgatccagctggtcagcatgaccctgccggatattaacgccggctgcggcggcatcgatgcgtacctgggggcgttctcctttatcaacagcgagcagctgcagcggttcgcaaaacaaatcatgagcaacgccgcggggtacttttttgatctcgctttgcaaaccacggtaccggagattaaaaccgcaaaggacttccttcaaaagatggccactgacatgaacagcatgaacctcagttcctgccaggctgctcagggaattgtgggtggcctgtttcctcgtacccaggtcgctcaacaaaaggtctgccaggacattgccggtgaaagcaatatcttttcggactgggccgcgtcgcgccagggttgtacggtgggcggcaagatggacagcgtccaggataaggccagcgataaagacaaagaacgtgtgatgaaaaacatcaacatcatgtggaatgccttatcgaagaaccggctcttcgacggcaataaggagctgaaggaattcatcatgacgctcaccggtacgctgattttcggggagaacagtgaaatcacgccgctgccggcacgcaccactgaccaggatctgattagagctatgatggagggcggcacggctaaaatctaccactgcaatgattcggataagtgtcttaaggtcgttgctgatgcgaccgtgaccatcacttccaataaagcgctaaaaagccagatttccgctttgttaagcagtatccagaataaagcagtggctgatgaaaaactgacggatcaggagaaagggtttatctccagcaccaccattccggtattcaaatacctggtcgatccgcagatgctcggggtgtctaactcacttatttaccagctgacggactatatcggctacgacatcctgctgcagtacattcaggaacttatccagcaggcccgggcgatggtttcaaccggtaattatccccagtcgacaatggatatgatcatggaaaacctcaatcaggcgagtgtccagattgccgcttttcagtcccgtgttcaggttcagcaggacgccttgcttgtggttgacagacaaatgagttacatgcgccagcaggtctctgcccgcatgatgacccgctaccagaataactatcattttggggggaatctgtaa

SEQ ID NO: 92399 - DNA, 2850 bp, Enterobacter aerogenes
atgcttgagatatatgccattgctggcggcgactggttacggggcaacctgaacgcgattgcggcgtttatggggaccagcacatggtcgactatagaaaagatgtgtatcgccatctcggtactcattgtggcggggaactgggtaaaaaaacacaacgtaatggaccttattggctgggtcttttccctcaccctggtctctatgctggttttcattcgtacccctgtgcagatcatcgattacagtaacgttgcgcaggtctatgaagtcgataatgtgcctattggtctggcgattccggcgtcgctgacaacacgggtaggaaacgcgcttatccagagttatgagatggtcttcgcgctgccggacagtgtcacgtacagtaaaacggggatgttatttggcagtaatctggtcgcgaaaagtacggattttttgtcacaaaatcctcagattacgacgctgttttccgattacgtacaaaactgtgtgatgggcgatattttcctcaatcataagtactcttttgaagaattactgaattcacctgatccgtataccctgatttttgcaaacccaagcccactgcgtggcgtgtttgataaaaacaaccagttccagacatgcgaagaggcctcacgggatctgaaatcggctcttgcgctggatactcagacaggcgggaaaacctggaactactatgttcgtcagctgtttggcggcaaacctaatcccgatctgcttttcagccagatgattggcgacagctacaattacttctacagctcgggacagagcgccgggcagattatccgccagaacgtcacgatgaacgccctgcgcagtgggatccagagttatgcggcccgcagcggggacaccgccagtctggtcaatatggctaacacatcatcccttgaaaagcagcggctggcacaggccacaatggggcaccaggcgcttcgcgcacttccactgatgcagaccgtcattatgggtttaatgattgggatgttcccgatcatggtgatggccgccatgtttaacatgatgacgctgcaggtgcttaaagggtatgtgtttgcgcttatctggctgcagacgtggccattactgttcgccatcctgaacagcgcgatggcctactatgcgaagcaaaatggcgtgccggttgttctctctgagttgtcgcaggttcagctcaaaaactcggatattgcgaccaccgcgggttatattgccgtgatgataccgcccttgtcgtgggggatcgtgaagagcatgggggccgctttctccagtgcctacagccatttttcttcttcggggctcagtgcaacatcgcaggcggcctccggcgtggtggacgggaattactctttcgccaacatgcagatggagaacgtcagcggctacagctggggtaccaacagtacaaccagtttcggacagatgtcgcggcagctggcgaatgggggtatgagcacgcagacgcgggatggatcgatggtctgggacagtggtggtgcaatgtcaaaactgccggtggatatcaacgtcggtcgtcagatagccagtgcgcagcaacagatggcccgtgaggctgatgtccaggccgaaagcgcgctgcatggctataacagcagcgtgacaagtgcctggaatagtctgcagcaatttggcaccaataaagggaacagcacatcaacaacgactggggccgatactaccgagtcttcgcaggattcgatggccagaagcaagatgtggaatgcggttgttgctaatgcgaaagccaacaatatcagtaatgaggagtctttccagcagttgatggatgattcggctaaaagtacgcagggcgttgatttatacggatcaggtaagtggagttcaggggatcagctgtttggtaagctaggtaaatggggaactggattatctgctgaggccggatttaaaggcagtgtgggttgggcccacagctcaggtaatacagataacgttggaacttccggtcgggaatctcatgacagccggcatgataccagcagtcaggcagcgaaagactttaaggaagcatccgattactttaccagccgcaaaaccaccacatcgggcaatattaccgataataatgccagctcgcgtgttgaccagtttgccgcgtcactctccagtgccaaaaacagctatgaccagtatacaaccagccggacacgcagccatgaatacagtgagatggcgtcacgcacagagagcatgactggccagatgaacgaaaacctgactcagcagtttgcgaactttgttcagcatcgtgctccacaggatgccgaggccattctgaccaataccagttctcctgaaattgcggcgcagcgtgaagccctggcgcgtgaattcgtcaaagagcaggtagaacccagggttgatgctgcatatcaacaggggcgtgaaagcatcggacagaatatgacaggggtgtcaggaggtggagacaatggttcggtaatggccgactacagacataattccgcccgtatcgatgcgatgacgcaacgggcagatattaaggataatgtgggtcagaaagtggatgggatgattacagagaataaacaacagcatcaggaaacccgtgaaaacatacaacggcaaggcgcagaggtgaaaaatgagaatgctgaaatggaaaaggaccataaaacaaaagcaaatgagtttaaaggtgattataatgaaagaaagagtaaggtgaaaactttaccaggagctgactcgcctgctgagttagaggcgaaagcggcgaaaattcaaaaggattatcttgatggtaaaaggtaa

SEQ ID NO: 92400 - DNA, 531 bp, Enterobacter aerogenes
atgatgattacgaacaaaatacttattgaggaagtggaggaactgaaaagtctactttcacaagggaaggctgaaattccatctttttgggagtgcctttggccaggcgtagtgttagttgcatggaatatactttgcgctgtaattagtgtggatactgtgtatttgtcaggaaagtatatgtttcatgttttggtttttcctgttggggtcagtaccattatgctcctgggcattgccagttcacgttctctgtttttgtcagttccgaaaaattttagagaaaaatcggatgtatatcgtttttttgctaagaaagtttttatttatactgttgtttacatgacggtgattatgttattggctatttgtaatagagtgttttatgactcaccattctcttttgcatttatggttattttaacgtccgttttttttggttttgtcatgaatctggattttggacgatatcagctatcattactcacctctgcaataaattcttttcgagtagaaaagttgggggggtaa

SEQ ID NO: 92401 - DNA, 147 bp, Enterobacter aerogenes
atgaagcttaataaagtcatggctgttatggtcgtcagctctgcgctggtgttatctggatgtagtgcaatgggaaccgccattaaaaagagaaatctgggtaaaaacccagatgagcgaaacaatctggctggaaccttcaaataa

SEQ ID NO: 92402 - DNA, 618 bp, Enterobacter aerogenes
atgagcgaaacaatctggctggaaccttcaaataataagacggtttatctgcaaatcaaaaatacctccgataaggatatgagtggcctgcaggcaaaaattgccagcgctgtcacttcaaagggatatcaggtcgtcagtaaccccgatacggcgggctactggatccaggcgaatgtgctcaaggccgataaaatggaccttcgtgagtctcagggctggttaagccggggttatgagggcgctgtgacaggcgccgctcttggggcggggattaccgcttacaactccagttccgcgggagcaaccctgggagtagggcttgcagccggtctggtcgtaatggcggctgacgcgatggtggaagatgtgaactacaccatgatcaccgatgtacagatcgcggaaagaaccaaaacacaggttcagactgataacgtggccgtattacgtcagggaacatccggagcaaaagtgcagacaagtactgaaacgggtaatcagcataaataccagactcgcgtcgtctctaacgcgaataaagttaacctcaagttccctgaagcccagcctgttcttgaagaccagctggcaaaatcgatcgctaatatcctgtaa

SEQ ID NO: 92403 - DNA, 690 bp, Enterobacter aerogenes
atgacaatatctgtgcctgtcaggtctcttgatacacatgaactgatgcctggcgatatttacccacatcctgcagcggggggaattgattccctgtcacatcgcgaggtctgttctctcttcagtgaccacatcatgtatatctgcagcgcgttagttattcttctgcttgttttcatcgcaggtgtctttttccgaaaaataatgacgtcttccgtggagcgtaagcgaaacacggcgtcagttatttccgatgcaaagccagaagtacagagcaaaccggaatacttccatctttccatatgtgtggaaggcccggccagcacggatgactccgccttgtcctctcttgcctcccgtgttgtccgcgaagcagaaaatctgtatatccccggcgtcaatcgccgcgacagcgctgacgacgtgtttgcctggtccgtgcagactcagtttccttctgacaggctcttcggcacacggattttcccgtcaaccggctggtttgaacgtccggatatgattaaacatccggtgaaatgctactgcgtctgcctgcagtacacgactgaaacattgccatccacactgtatgccctggtcgatgaggccggacggcaggtggcgaagtcgtatattaaaggcgggcactgccctggctcagagggctataccttctgcataacctcttaa

SEQ ID NO: 92404 - DNA, 2310 bp, Enterobacter aerogenes
atgagtttcaatgccaaagatatgacgcagggcggtcagatcgccaatatgcgctttcgcatgtttggtcagattgccaatattattttctacgtgctgtttattttattctgggtgctgtgcgggctgatgctgatgtaccggctcagctggcaaacctttgtgaacggctgcgtatactggtggtgtacgacgctgggtccgatgcgcgatattattcgttcccagccggtatacaccattcagtattacggccagtcgctggaatatacctcagaacaaatcctggctgataaatatactatctggtgcggagagcagctgtggaccagtttcgtctttgcagccgtggtttctcttgttatctgtatcgtgacgttcttcatcgccagctgggtgctgggccgccaggggaaacagcagagtgaggatgagaataccggcgggcgccagctttccgataagcccaaagaagtggcccgccagatgaagcgtgatggtatggcctccgatattaaaattggcgatctgcctattcttaaaaactccgaaatccagaacttctgcctccacggtaccgtaggctccggtaaatcagaagtgatccgccggctactgaactacgtgcgtgcacgtggcgatatggccatcatttatgatcgctcctgtgagttcgtcaaaagctattatgacccgtcactggataaaatcctcaacccgctggattcgcgctgcgcggcctgggatttgtggaaagagtgcctgacgctgccggacttcgacaacatctccaacacccttatcccgatgggtaccaaagaagacccgttctggcagggctccggtcgcactatctttgccgaaggcgcgtacctgatgcgtgaagacaaggatcgcagctacgagaagctggtcgataccatgctgtccattaaaatcgacaagctgcgcgcctatctgcagaacacgccggcagcgaacctggttgaagagaaaattgagaaaacggccatctccattcgtgccgtgctgaccaactacgtcaaggctattcgctacctgcagggcattgagaagaacggcgagccgttcactatccgggactggatgcgcggtgtccgtgaggaccgacccaatggctggctgtttatctcctccaacgctgacacccatgcttccctgaagccggttatctcgatgtggctgtcaattgctatccgcggcctgctggcgatgggggagaaccgtaaccggcgcgtgtggattttcgccgacgagctccccacgctgcacaagctgccggacctggtcgaaatcctcccggaggcgcgtaaatttggtggttgttatgtgttcggtattcagtcctatgcccagctggaagatatctatggcgtcaagcctgccgccacgctctttgacgtgatgaacacccgggccttcttccgctccccgagtaaggagattgcggagtttgctgccggtgaaattggtgagaaggaaatcctcaaggccagcgagcagtattcttacggtgctgacccggtgcgtgatggtgtatcgaccgggaaagaaaaagagcgggaaacgctggtcagttactccgatattcagacgctgcctgacctgtcctgctatgtcacgctgcccgggccgtatccggccgtgaaactcgccctcaaatacaaaccgcgtccgaaaattgccgaaggatttattcctcgcactctcgatgcgcgggtggatgcgcggctcagtgcgctgcttgaagcgcgggaagctgaaggcagtcttgccagggcgcttttcacgccggatgccccggcatccgggccagatgatgccggcagtcacgccggtgaacagcctgagccggtcagtcagcctgcgccagcagtaatgacggtaactcctgcaccggtaaaatcgccgccgacaacaaagcgtccggcagcggaaccctccgccaggacagctgagcctcccgtcctgcgggtcacgaccgtaccgttgatcaaaccaaaagcagccgcagcggccggaactgccgcaacagcatcctctgccggtacccctgctgcagcggcaggcgggacagaacaggtactggcgcagcagtccgcagaacaggggcaggccatgctgccggccggtatgaacgaggacggtgtgattgaagacatgcaggcgtatgacgcctgggctgatgagcagacgcagcgggatatgcagcggcgtgaagaggtcaatatcaaccacagccaccgccacgatgagcaggatgatctcgaaattggggggaatttctga

SEQ ID NO: 92405 - DNA, 5259 bp, Enterobacter aerogenes
atgctcagtttcagccaggttaaatcggcgggtagtgccggtaactactacacagagaaagacaactactacgttatcgggagcatggaggagcgctggcagggtaaaggcgcagaagcgctggggcttgaaggaaaggtagacaagcagatcttcacggagctactgcagggaaagctacctgatggcagcgacctgacccggattcaggatggcgtgaataagcacaggcccggctacgatctgacgttctcagcaccgaagagtgtatcgatgctggctatgctgggtggtgataagcgtcttatcgacgctcataatcgcgcggtgacagtggctcttaatcaggtggagtccctggccagcacgcgggtgcagaaagacggcgtttctgaaacagtcctgaccgggaatctgattattgcccgctttaaccacgatacatcgcgcgctcaggacccacagatacacacgcacagcgtggttatcaatgcgacacagaacggcgataaatggcagacgctggccagcgataccgtcggtaaaaccgggttttccgaaaacatactggccaaccgcatcgctttcggaaagatataccagaacactctcagggccgatgttgagtctctgggttacaggacagtggatgcgggtaagaacggtatgtgggagatggagggcgtgccggttgagtcgttttccacccgcagtcaggaactcagggaggccgccggacccgatgcctccctgaagtcacgggatgtggccgcgctcgatacccgcaagtcgaaagaagccatcgatccggcagagaagatggtggagtggatgaacacgctgaaggagaccgggtttgacatccgggggtaccgtgaggccgccgatgcgcgagccgcagagctggcccgtgcacctgccgcgccggtgaacactgacggtccggatatcacggatgtggtgacgaaagcgattgccggtctcagcgaccgcaaggtgcagttcacgtatgccgacctgctggcacgcacggtcggccagctggaggcgaaggacggtgtgtttgagctggcgagaaagggcatcgatgccgccattgaacgggagcagcttatccctctcgatcgcgagaaaggcctgttcacctcaaacatccacgttctcgatgaactcgccgtcaaagccctgagtcaggaggtgcagcgccagaatcatgtctccgtcacgcctgatgcgtctgtggtgcgccaggtccctttcagcgatgccgtcagtgtgctggcgcaggatcgcccggtaatgggtatcgtttccggtcagggtggtgcaaccggccagcgggagcgggtggccgagttaaccctgatggcccgggagcaggggcgtgacgtccatatcctggctgccgataaccgctcacgtgattttctcgccggtgatgtgcgtctggccggggaaacggtgaccggtaaatccgccctgcaggacgggacggcgtttattccgggcggaacactcatcgtggatcaggcggagaagctgagcctgaaggaaacgatttccctgctcgatggcgcgatgcgccataacgtgcaggtcctgctctccgacggcgggaagcgcagcgggaccggcagtgcgctgacggtgctgaaggacagcggcgtgaatacgtatcgctggcaggggggccatcagaccacagccgacatcatcagtgaaccggataaaggagcacgctacagccggctggcacaggagtttgccgtcagcgtgcgtgaaggacaggaaagcgtggcccaaatcagcgggacgcgtgaacagagcgtactcaacggcctcatccgagactccctcagacaggagggggtgctgggtgagaaagacacgaccattacagccctgacgccggtgtggctggacagcaaaagccggggcgtgcgggattattaccgggaggggatggtgatggaacgctgggatccggagacccggacgcacgatcgctttgtcattgaccgggtgaccgcgagcagcaatatgctgaccctgaaagaccgggatggggtccgtctggatctgaaggtttccgcggtcgacagccagtggacgctgttccgggcagatacactgccggtggcagagggggaacgtctggcggtgctcgggaagataccggacacacgcctgaagggcggggaaagcatcacggtgatgaaagtggaggacgggcagctgacggtacagcggccggggcagaaaaccacgcagaccctggccgtgggggcgggcgtgtttgacggtattaaagtcggccacggctgggtggaaagtcccggcaggtcggttagcgagacggcaacggtctttgcgtcggtgacgcagcgtgagctggataacgccaccctcaaccagctggcacagagcggaagtcacctccggctgtactcggcgcaggatgcggcgcgcacgacggagaagctgtcgcggcataccgcgtttagcgtggtctcagagcagctgaagtcccgatccggcgagacggatctggatgcggccattgcgcagcagaaggccgggctgcataccccggcagaacaggccattcacctggccatcccgctgcttgagagccaggacctgaccttctcccggccccagctgctggcgacggcaatggaaaccgggggcgggaaggtttcgatggcggacatcgacacgaccatccaggcacaaatcaggtcggggcagttgctgaatgtaccggtggcacccgggcgtggcaatgacctgctgatatcccgtcaggcctgggacgccgagaaaagcatcctgacccgggtgctggaaggtaaagacgcggtggcccccctgatggaccgcgtgccggacagtctgatgacggaactgaccgccggacagcgggcggcgacccggatgattctggagagcacggaccggttcacggtggttcaggggtatgccggggtggggaaaaccacccagttccgggcagtcatgagtgccatcagtctgctgccggaagagacccgcccgcgcgtcatcggtctggcgccgacgcatcgcgcggtcggggaaatgcagagtgccggcgtggatgcgcgcacgacggcgtcgttcctccacgacacgcagctgctgcagcgcaatgggcagacacccgatttcagcaacaccctgtttctgctcgacgagagctcgatggtggggctggccgatatggcaaaagcccactccctcatcgccgccggcggtggacgggcggtgcccagcggggataccgaccagctgccgcccatcgcgtcgggccagccgttcaggctgacgcagcagcgcagcgccgccgacgttgccatcatgaaagagattgtgcgccaggtacctgagctgcgaccggcggtctacagcctgattgagcgggatgtgcaccgcgccctgaccaccattgagcaggtcacgccggagcaggtgccgagaaaagaaggcgcctgggcgccgggcagttctgtggtggaattcacacagaagcaggaaaaggagatagaaaaggcactgagcgaggggaaaaccctgccggaaggtcagcccgcgacgctctacgaggcgctggtgaaggactataccggacggaccccggaggcacagtcgcagacgctggtgatcacccatctgaataaggaccggcgggcgctgaacagtctgatccatgacgcacggcgggagaacggggaaaccggcaaagaggaaatcaccctgccggtgctggtcacgagtaacatccgtgacggtgaactgcgcaaactgtcgacctggacggctcacaaggaggcggtggcgctggttgataacgtataccaccgtatcagcaaagtggataaggataatcagctgatcaccctgacagacagtgaaggaaaggagcgatttatctcaccccgggaggcatcggcagaaggcgtcacgctctatcgtcaggaaaagatcaccgtgtctcagggggaccgaatgcgcttcagcaaaagtgacccggagcgcggctatgtggccaacagtatctgggaagtgcagtctgtttcgggtgacagtgtcacgctgtctgatggcaaaatcacccgtacgctgaccccgaaggcggagcaggcacagcagcatatcgacctcgcctatgccatcaccgcccacggagcccagggggccagcgaaccgtatgccatcgcgctggaaggggtggccggtggtcgggaacagatggccagctttgagtctgcctatgtggctttatcccgcatgaaacagcatgttcaggtctacaccgacaaccgtgagggctggataaaggccatcaagaattcacctgagaaagcgacggcgcacgatattcttgaaccccgtaacgaccgggcggtgaaaacagccgatctgctgttcgggcgggcaaggccactggatgaaaccgccgcgggccgggcagccctgcagcagtccggtctggcacagggaaattcaccgggaaaattcatttctccggggaaaaagtaccctcagccgcatgtggcgctgccggcatttgataaaaacgggaaagccgccggtatctggctcagcccgctgaccgatcgggacggacggctggaggctatcggcggggagggacgaattatgggcaatgaagacgcccggttcgtggcgctgcagaacagccgcaacggtgaaagcctgctggccgggaatatgggagagggggtcagaatggcccgcgacaatcccgataccggggtggtggtgcggctggccggtgatgaccgtccctggaaccccggggccattaccggcggacgggtatgggctgaaccggcgccggtggctccggtaccgcaggtcggggctgacattatcctcccgccagaggttctggcgcagcgggcggcagaagaacagcagcgccgcgaaatggaaaaacaggcggaacagactgcccgggaagtggccggggaggcgcgtaaagccggcgagccggcggaccgggtgaaagaggttatcggggacgtcattcgcggactggagcgtgaccggccgggtacggagaaaacgacgctaccggatgatcctcagttccggcgccaggaggaggcgattcagcaggtggcctcagaacgtctgcagcgtgagcgtctgcaggctgtggagcgggacatggttcgtgaccttaaccgcgagaaaaccctcgggggcgactga

SEQ ID NO: 92406 - DNA, 726 bp, Enterobacter aerogenes
atgagagcacaacacacatttccaggcgcgacagacagctggcttcagcgcctgctgacctggacaccgggacaaacggatatgattaaaacggtcgcactggtactgatggtgactgaccacaccggcttactgctggccggaaacaatgaagtgatgcgcctgctgggacgtggttgttttccgctgttcggtctggcatggggaatgaatctggcacggcacgcggaaatacgccagtctcaactgaacaacctgtggggctgggcgctggtcgcccaggtgtcgtttatgctcatcgggtacccgtggtataccgggaatattctgtttgcctttgccgttacgggccaggtcctgcggtgggtcagccagccgtcctggtattacaccctcccggcggctggactgctggtcacctggatacccctgtcaaccggcagctacggcatggctggagtgggcatgctcaccgccagctggctgctttgtcgcgcacagcatgcaccggaacggctgggatacggggtgttgtgggccctcatggtgttgctgatgaatatgcatgacgtgagtgaatcagtggccgggctggcgattgcgctgctgacgctgatggtgtgctcatctgccggagaacgtgtgaaacgcttctggccgcggcagttcttcgtgatgttctatgccgtgcacctggcggtactgggtattgtcgtctcaatgtga

SEQ ID NO: 92407 - DNA, 594 bp, Enterobacter aerogenes
atggcagaagaaaaacgccctgtactgagcctgaaacgaaaaccggcggagaacagcacggcccccgcagaggcaacccctgctcctggtgtggtgcgccgaaagaaggtcgtggtggtctcgtccccgccggcctggaaggcaaagaaagcgaaacttgagaaggctaaacaagcggccgaagccgacgcgcgcaacgctgcgccggcgccggataaagcggtaaagacgccacctccggtgcgttatcttcgcctgctgccgccggaacaggccatcatgaccctgaaggcattctggccacagctgttcgacggaaactcaccccgtctgctggcgacgggaatgcgcgagcagctgtttgccgacattgtgaaccgcgacctgccgctgtcgcataaacaggtcattaagtgcctgaagagtctgacccggtctgcgggctatctgtcccggatgaaggtgggggcctcccgctatgatctgcaggggaatgccgttgcgaccgtcactgcagaggaagcgcagtacgccagtgagcgcatgatgaaggagctgctgcgagctgaacgaaagatgagtcagaccctttaa

SEQ ID NO: 92408 - DNA, 222 bp, Enterobacter aerogenes
atggtaatcagtaacgatgaagtgctgcacctgaccgataaagtccagtcattaagtaaaaaatctgcagggaaccgcccggcgaatacttcatccctgatgaattatattaaatccctgtccggtaatacaaaaggcatggcgctttatggtcgcgttaaagaggaattaatcaggcgtggtgtgattgcggtgtatgagaaaacagtggtctggcgataa

SEQ ID NO: 92409 - DNA, 645 bp, Enterobacter aerogenes
atgttcagatatttcattctgcgccctgagcagcagttattctgttatttatacggctgcgcgctggcactggttcagatggttttattttctcctgtatcccgggcaagcggattttatctggttgcgttatctgtcgcgctgttctgggccggtctggccctgtacacccggcacatcgaccggatgagaaagccagaggtctcaccgctggtcagtattcgcgacggtattcaggtggtggccgaggtgccgcgccatgaaaaggcccggctggaatgggaaatcctccgggatgatgaggtgtttcgccagcaaaggtgtgagcttacaggcctgaccggacgggttatcagccgggggctgttgtatacgccggcggtgatgctggtcggtatcggtattctcgcctggggttccccacaggatgccatccggctgattaatgctcttcgtaatatgcctgctgcggaactggtgcatcagattggttttgtcctgtgccacttcctgcagattagcgtcatatcagttctgattgctgatgttgtagccgggagaggactgccgaatgtatttcgccgcgcgttgctcgacaggctgccggcagagttctgccttatcagaagagggacagaaagatga

SEQ ID NO: 92410 - DNA, 651 bp, Enterobacter aerogenes
atggcaaagatattaatgatggcgggcagtaccgttgttgtgctgagtttgctgggatttctggtgctgcttctgaaaggacgtgcagtaacgaagacttccccggttctgaggtcactgaaagccctgggtattcgcccctcagaggctgagcaacggttgtgtcgccagcgggtctgggtgggtaatgacacactgatgacgccacgggaacaagattttttccgggcattgctgaggcataccagccgaacacgctggctgttgtgtcctcaggtccgggtggcagatattgccacactctctccccatatccggccacgatcccggacctggtggcaactcttccggatggcatcacagtggcactgcgatgtggtcatcgttgacatccataccttcgctatcatcggcgcagttgaactggatgatgcctcacaccagaaaaaacaccgtatccggcgcgatattctgctggaagaggttctgaggcaggccggcattccactactacgcgatcgggattcggagagtctggtaagaaaggtcgtagagtttctgaaataccgggaagccggtgctgaagaaaaatccataaccgttatgaaatcaacgacaaagcatagcgaacacaaggagaaagaaaaatga

SEQ ID NO: 92411 - DNA, 309 bp, Enterobacter aerogenes
atgattatcgccgctgaagtgaaacgtgatgaacaggggtactggacacatcctgcgctggtacgaagtggctgtgaaacttccgcagaattaagttactggctcagaacccataaactccagtgctttgtgatgacaatgcgcgatgaagcgcctgaagctttcgctgccggatttacggatgaagccccggatgcccgtggctggataccggagccaccggatgatgatggctggtttctgggatctgtccacgataccggcgacggacccgtctgctactggtttcgtcataccacaaaatcctga

SEQ ID NO: 92412 - DNA, 561 bp, Enterobacter aerogenes
gtgaaaaaaatgaaccgtacgctccgcagatgttgtctgtacgggcttatcagcctgtctttgtttgcaccagttccggccgtgtatgccgccagcatcgagacggggtattcgccggaaggaacggctctgcagctggtcctgaagactattaattctgcacagcaggaaatccggctgatgggctattccttcacctcacccgaagtcgccggcgcgcttgtcagggcaaaacagcgtggtctcgatgtgaaagtggttctggactggaaagccaatacaggcaggcaaaacaaggcgagtctggcggccatgaatcttctggtcaatgccggtatcccggttcgcacagtgtcgcagtacaaaatcatgcacgataaagtcattattgctgacggccgtaatgttgaagtggggtcttttaactacactcgagccgctgatcgggtcaattcagagaacgtgcttgtcgtgtgggatgttccagtcgttgctcaacactatctgcggcactggcagtcccgctggaatggcggtactgactggtattcatcgtactaa

SEQ ID NO: 92413 - DNA, 252 bp, Enterobacter aerogenes
atgtcacaggtcgttaacggagttacttcctcatcgaaacgtccctaccgaaaagggaacccacttagcgctgctgataaacagcgatcttcagtggcaaagaaaagggccacccataaagaagttaaagtgtttctggaaccacagctcaaagaaatattgatgaaaatgtgtcatgacgatgggttaacacaggctgaagtactgtcccggttgatccaccgcgaagcattagccagaaacatagcttaa

SEQ ID NO: 92414 - DNA, 1014 bp, Enterobacter aerogenes
atgagtaatgcgcacaatccgcaacactggagtcagctggatacggaagaacagatccgtttctggcaggaggtagaggacggccatgtggcatcttttctggtttccccggagaagaaatctacccgtcgccggcgtggcgagcactccacaaaacccaaatgtgaaaacccgacctggtttcgaccggagcattacaaaaaactgggtggccagctggggcacgcctataaccgtcttgttcaaaaagatcgcaccactggtgaggtgcgactgcgtatgcacgtatcgcttcatccgctttacgtcagagaacgccgtcgggctggccgccggtatggcttccggccagaaaagcaacgtctgctggatgctatctggccagtgctgatcagcttctgtgatgccggcaagctgacggtcggtatgtgtatttctcgtctggcaaaagaactcagccagaaagacagttatggaaaagttattccggaaacagaggtaacagtctcacgtctgtcccggttgattgacgaacaggttcgttttggtgtcctggctgtatctgaagaaaatagctgggacagggaatcccgtacctggcttcctaaatacgtctatatcaccgcgttagggtttcagatgctgggagtggatctggaaaaacttgatgcggaacaacaaaaaaagctccggcaaagcgaagagcgtcgtcgtcttatcgaggaggggattctgcgtgaagatgaggagatctccccgcgtgcagcacgtgagcgctggtaccgtcaaaaaactctcgatgcactgaggttccgtcggcagcgtggcgccgaacgtaaacgagctaaccgcctggccagatattctcgtgagcgccagattcacgaaatgtcgcttcatatcctgaagacaatgccggcagacgaggcttactggtgtacaacggagcggctgcagcagctggccattcagaacctgtatcagctggagctggccctggctccgccgtcctga

SEQ ID NO: 92415 - DNA, 141 bp, Enterobacter aerogenes; identical to SEQ ID NO: 36145

SEQ ID NO: 92416 - DNA, 2898 bp, Enterobacter aerogenes
atgtcacgacgccatattttcaccgaacggcagcgagcagcgctgttcgatctgcccacggacgaactgtcgctactgaagttctacacgctgggcgatgatgacctggaaaacattaggcagcgccgcagaccggaaaacaggattggctttgccctgcaactttgtgccttacgatatccgggccgtgcactggctcctagtgagatgatcccgcgtgaagtcctttccttcgtcggtgctcagcttggagttccggctgatgcgcttctcacttatgccacacggcgccaaacccgtcagcagcacatggacacgctgcgcgaaatttacggctacaagaccttcacgggccgtggtgcccgtgatctgcgggagtggactttcggccaggccgaagatgccagatcaaacgaggatcttgctcatcgttttattgtgcggtgtcgggaaacttccaccattctgcccgcagtatcgacaatcgagcgcttgtgcgcggatgctctggtcgccgctgagcggcggattgaaacgcggattgcggaaaatttaacagcggatgttcgcgatcacctggacaaacttctgagtgaaatgctcgccggcaatatcagtcgtttcatctggcttcgcaacttcgaggttggtaacaactcggctgctgctaaccgtttgctcgacaggctcgaatttctgcgtaccctgaatatcaatcatagtgctttggccagcatacctgcccatcgcattgcccggctgcgtcggcagggtgaacgctacttcaccgacggtttgcgtgacatcacttcggaccgccgctgggcgatccttgccgtctgtgttgtggagtgggaagcggcgattgctgatgccatagtcgaaacccatgacaggatcgtaggaaaaacctggcgggaagcgaagcgccagcatgacgaaacaatttccggctctaaagccacactcacggatacgatccgtaccttcaccgcgctgggagcttcgttgcttgaggcccgcagtgacggaaccccgctggagatggctgtcgccagttcggttgcatgggaccggctcgctcaactggtagcgacagggactcaactcagcaacacgctagccgatgagcctcttgcatatgtcgggcagggataccatcgctttcgtcgttatgcgccccgcatgttgcgctgtctgaagctcgaagccgcgccggtcgccggaccattggtagcagcagctttgtcgatcggagagatgaaaggtgttgcatcgccagaaaggcgtttcctgcggcccagctccaaatggaaccgtcatttacgagctcaggaaaaaggagatacccgtctttgggaagtggcggtactctttcacctccgggatgcttttcgttccggagatgtctggctcgctcattcgcgccgctatggtgacctcaagcaggtactggtgccgatgatcgcggcgcaggaaaatgcaaaactggccgtgccttccaacccacaggattggctggcagacagaaaggcgcgactcacgatcgctcttaagcggctggcccgggctgcccgtaacggcactattccgcacggtagcatagaagatggaacgttgcggatcgacaggttgacagcagacgtgccggatggtgccgaggcactcatactggatctgtatcgccgaatgccgtccgttcggattaccgacatgctgcttgaagttgatgcagcccttggtttcacagatgcgtttacccatctgagaaccggggctccatgtcgcgaccggatcggtctgctcaacgtcctgctcgctgaagggctcaatctgggcctgcgtaagatggcggaagctacaaacacgcatgattactggcagctctcacgccttgcccgctggcatgttgaaagcgaagccatgaaccaggcattggcaattgtggtggccgcgcagggtaaactgccgatgtcacgcgtctgggggatgggcacgtcagcatcgagcgatggtcagtttttcccgacagcgcggcatggcgaagccatgaacatggtcaatgccaaatatggttctgttcccggcctcaaagcgtatactcacgtaagcgaccagttcgcgccattcgcttgtcagtcgatcccggcgaccgtgagcgaggcaccgtatattctcgatggactactgatgaacgaggtcggtcgccatgttcgcgaacagtatgccgatacagcaggattcaccgaccatttgttcggagccagtagcctgctcggctacaatctcgttctgcgaatcagggatctgccatcgaagcggttgtacgtatttaatcccgatacgacccccagggagttacgcaagttggtaggtggaaaagcccgggaggatcttatcgttgcgaactggcctgatattttccgttgtgccgcgacgatgaccgctggcaaaatcaggcccagccaactcctgcgcaagctcgcttcttacccacgacaaaacaaccttgcagttgcgcttcgtgaagttggtcgtattgaacggacccttttcattattgagtggatcctggatacggacattcagcggcgtgctcagatcggtcttaacaagggagaggcccaccatgcgctcaaaaatgcgctccgtatcgggaggcagggggaaattcgcgatcgcacgacagaggggcagcactaccgaatcgctgggctcaatttattgactgcggtgatcatttactggaataccgtccatcttggtcatgccgtcacggagcggcggaacgaagggttggatgttccccctgaatttcttccccacatatccccattgggctgggcgcacattctactgactggcgaatatctttggcccaaggaaccgaaagcttag

SEQ ID NO: 92417 - DNA, 606 bp, Enterobacter aerogenes
ttgggacatcgtgccgccatttactgccgggtttcaacagcggatcagtcttgtgaacgccaggaatttgatctgcgagccttcgccggccgtgccggctacgacgtggtgggaatatttaaggaaacaggttcaggaactaaactcgaccgggccgagcgaaagaaagtcctggcgcttgcccagtccagacaaattgatgcaatcctggtcactgagctttcccggtgggggcgctcgacgctcgatctgctcaatacgctacgtgaactggagaactggaaggtttccgtgatagccatgaatggaatggcgttcgatctttcgtcgccgtatggacgaatgctggcgacgtttctttccggcattgcggagtttgagcgggatctcatcagcgagcgggtcaagtcaggccttgctgttgcgaaggcacgtggtaagaggcttggtcgtcaggccggagtgcgaccaaaatcagaccgacttttgcctaaggtggttgctatgagggccgagggacgcagctatcgctggatcgcacgcgagctcggtatcagcaagaataccgtcgctgacatcgtgcaacgacacagagctaacgcttag

SEQ ID NO: 92418 - DNA, 1182 bp, Enterobacter aerogenes
gtgacagaaaacccaatcggattaaccagaaaagttatcaagcccgtttctaattttttcagttcacctgtagcgggcggtattgtgcttattattgcttcggcagccgctatcatcgtggccaattcgcccctcagggaaggttatgaaacactcctgaaatacaaaacagcaggcctgtccgttgagcactggataaacgatgccctgatggccgtattctttatgatggtcgggctggaaatcaagcgtgagcttgtcaccggccagttagccacctggagccagcgtgcgttgccgggctttgccgcactgggtggtctggccgtacctgccctgatttacgtggggtttaatgccggtcatgacgaaaccctttccggctgggccatcccggcggccacggatattgcttttgcgctcggtgtactcgccttactgggcagtcgtgtgccagtctcgctaaaaattttcctgtcggcgctggctattctggatgacatgggggcggtggctatcatcgcgctcttctataccagcaacatttcgcttctgatgctgggtggtgcagcggcaatggttgctctgctgtttagcctgaaccgtgccggcgtgacgcgcctgctgccctatctgctgacggggggagtactgtggtttttcatgcttcagtcaggcgtgcatgccaccgtcgcgggtatcctgctggcgttctttatcccgctgcgaaccaggaatgcggctgatgaagtgcctctggacaggcttgagcatgccatcaacccctgggtcacgtttatgatactgccgctgtttggcttcgccaatgcgggcgtcgcgttgtcgggcatgacgatgaatgacctgttgtcgccggttccggtaggcgtggcgctgggcctgtttttgggtaaacaggcaggtatctttggcctgtcgctactggccgtcagcctgggcctggcgaaacgaccagagaaaagtacctggttacaggtttatggtgtctcggtactgtgtgggattggttttaccatgagcctgtttatcggcaatctggcctttacaggcagccctctgctcgttgatgaggtcaaggtgggggttctggcagggtccatactggccgctctggccggtattttgatactgcgctttgcgccttctaagcaagtcaggtaa

SEQ ID NO: 92419 - DNA, 291 bp, Enterobacter aerogenes; identical to SEQ ID NO: 16838

SEQ ID NO: 92420 - DNA, 2967 bp, Enterobacter aerogenes
atgccccgccgttcgatcctctccgccgccgagcgcgaaagcctgctggcgttgccggacaccaaggatgagttgatccgtcactacacgttcagcgaaagcgacctctccatcatccggcagcggcgcggcccggccaatcggctgggcttcgcggtgcagctctgctacctgcgctttcccggcgtcatccttggcgctgatgagccaccgttcccgccattgctgagactggtcgccaaccagctcaaggtcggcatcgaaagctgggacgagtacgggcagcgtgagcagacccgacgcgagcacctggtcgagctgcaaacggtgttcggcttccagccgttcacgattggccactaccggcaggctgtccagttgctgaccgagctggccatgcaaaccgacaagggcatcgtgctggccagagccttgatcgagcacctgcggcggcagtcggtcattgtgcccgccctcaacgccgtcgagcgggcgagcgccgaagcgattacccgcgccaaccggcgtctctacgacgccttggctgagccgctgacggacgtgcatcgccgtcgcctcgacgatctgctcaagcgccgcgacaacggcaagacgacgtggctggcctggctgcggcaatccccggtcaaaccgaactcgcggcacatgctggaacacatcgaacgcctcaaggcgtggcaggcgctcgacctgccctccggcatcgagcggctggttcaccagaaccggctgctcaagatcgcccgcgagggcggccagatgacgcccgccgacctggcgaagttcgagccgcagcggcgttacgcgaccctggtggcgctcgccatcgagggcatggccaccgtcaccgacgaaatcatcgacctgcatgaccgcatcctgggcaagctgttcaatgccgccaagaacaagcatcagcagcagttccaggcatccggcaaggcgatcaatgccaaggtgcggctgttcgggcgcatcggccaggcgctgatcgaggccaagcaagcgggccgcgatccgttcgccgccatcgaggccgtcatgtcctgggatgctttcgccgagagcgtcaccgaagcgcagcggctcgcgcaacccgaggacttcgatttcctgcaccgcatcggcgagagctacgccacgctgcgccgctacgcgccggaatttctcgacgtgctcaagttgcgggccgcgcccgccgccaaggacgtactcgacgccatcgaggtgctgcgcagcatgaacagcgacaacgcccgcaaggtgcccaccgacgcgccgaccgagttcatcaagccgcgctggcagaagctggtgatgaccgacaccggcatcgaccggcgctactacgaactgtgcgcgctgtcggagctgaagaacgcgctgcgctccggcgacatctgggtgcaaggctcgcgccagttcaaggacttcgaggactacctggtgccgcccgcgaaattcgccagcctcaagcaggccagcgaattgccgctggccgtggccaccgattgcgaccagtacctgcatgaccggctgacgctgctggaaacgcagctcgccaccgtcaaccgcatggcgctggccaacgagctgccggacgccatcatcacggagtcgggcctgaagatcacgccgctcgatgcggcggtgcccgataccgcacaggccctgatcgaccagacggcgatgatcctaccgcacgtcaagatcaccgaattgctgctggaggtagacgaatggacgggcttcacccggcacttcgcccacctgaagtcaggcgacctggccaaggacaaaaacctgttgctgaccacgatcctcgccgacgcgatcaacctgggcctgaccaagatggcggaatcgtgccccggcacgacctacgccaagctggcctggctgcaagcctggcacatccgcgacgaaacctacggggcggcactggccgagctggtcaacgcgcagttccgacatcccttcgccgagcattggggcgacggcaccacgtcatcgtcggacggccagaacttccgcaccggcagcaaggccgagagcaccggccacatcaatccgaaatacggcagcagcccagggcggacgttctacacccatatctccgaccagtacgcgccgttccacaccaaggtcgtgaacgtcggcgtgcgcgactcgacctacgtgctcgacggcctgctgtatcacgaatccgacctgcggatcgaggagcactacaccgacacggcagggttcacggaccacgtcttcgcgttgatgcacctgctgggcttccgcttcgccccgcgcattcgtgacctgggcgacaccaagctctacatcccgaagggcgatgccacctacgaggcgttgaaaccgatgatcggcggcacgctcaacatcaagcacgtccgcgcccattgggatgaaatcctgcggatggccacctcgatcaagcagggcacggcgacggcctcgctgatgctcaggaagcttggcagctacccgcgccagaacggcctggccgtcgccctgcgtgagctgggacgcatcgagcgcacactgttcatcctggactggctgcaaagcgtcgagctgcgccgccgcgtgcatgccgggctgaacaaaggcgaggcgcgcaacgcgctggcccgcgccgtgttcttcaaccgcctgggggaaatccgcgaccgcagcttcgagcagcagcgctaccgggccagcggcctcaacctggtgacggcggccatcgtgctatggaacacggtctatctggagcgggccgcgaacgccttgcgtggccacggtcaagccgtcgatgacggcctgttgcagtacctgtcgccgctcggctgggagcacatcaacctgaccggcgattacctctggcgcagcagcgccaagatcggcgcgggcaagttcaggccgctacggccgctgcaaccggcttag

SEQ ID NO: 92421 - DNA, 1005 bp, Enterobacter aerogenes
atggaaaacattgcgctcattggtatcgatctgggtaaaaactctttccatattcattgccaggatcgtcgcgggaaggctgtttaccgtaaaaaatttacccggccaaagttgatcgaatttttggcgacatgccccgctacaaccatcgcaatggaagcctgtggcggttctcactttatggcacgcaagttggaagagttggggcattccccaaagctgatatcaccacaatttgtccgcccgttcgttaaaagcaataaaaacgactttgtcgacgccgaagctatttgtgaagcagcatcgcgtccgtctatgcgttttgtgcagcccagaacggaatctcagcaggcaatgcgggctctgcatcgtgtccgtgaatccctggttcaggataaggtaaaaacaaccaatcaaatgcatgcttttctgctggaatttggcattagcgttccccgaggagctgccgttattagccgactgagtaccattcttgaggataatagtttgcctctttacctcagccagttattgctgaaattacaacagcattatcactatcttgttgagcagattaaagatttggaatcccagttgaaacgaaagttggacgaagatgaggttggacagcgcttgctgagcattccctgcgtcggaacactgacagcgagtactatttcaactgagattggcgacgggaagcagtacgccagcagccgtgactttgcggcggcaacagggcttgtacctcggcagtacagcacgggaggtaggacgacattgctgggaattagtaagcgaggtaataaaaagatccgaactttgttggttcaatgtgccagggtattcatacaaaaactggaacaccagtctggcaaattggccgattgggtcagggatttactgtgccggaaaagcaactttgtcgtcacttgtgctctggcaaacaagctggccagaatagcctgggccctaacggcacgacagcaaacttatgtagcataa

SEQ ID NO: 92422 - DNA, 204 bp, Enterobacter aerogenes
atgagttacggctggctcttcgaaagtccggatgatgacatttcgggtgataatcatatcaatctggaacacctccctcctgagctaaaacaggttgctatccagataggggtcgcctcagaaaacggaatctatggtcactcccgtttttgcaacaccgattttgacgacaagttggcttgcttgaatctatccggcgtctga

SEQ ID NO: 92423 - DNA, 204 bp, Enterobacter aerogenes
atgacgaaacaggaatggattttacgactacggcgctgtacatcgaaggaaaccctggaaaggattatagaaaaaaataaatattctctgtcagatgatgagcttgagcatttcaatgccgcggttgatcaccggctggcggagatgacgatgggaaagttgtatgaccgggtaccgtcaggtgtctggaaatttgtgaaatag

SEQ ID NO: 92424 - DNA, 369 bp, Enterobacter aerogenes
atgaaaacagcgatatgggtggtggtgtatttaacgatgtgttttctgcttttcaccggatggatgttcgcctttgcgcagtatgcgccctataacgggcaggaacacgcgttttctctgacgtatctgcttaatttattttttcttcatgttgtgatggtaccttactacgagttttttcagactgaaacatacagcaatgtattaatgagtctggcagatgaatccggtcagatgatacgttttcatcacgtggtacctgttctccggatatatagtctgtccgcactcttaacttttgtgggttacatcatatatgcaaaatggttcactcataactggctgaaaggaaagcttcttccaaaatga

SEQ ID NO: 92425 - DNA, 495 bp, Enterobacter aerogenes
atgaaagtcactgaacccgggctgaataagctgatcgataacctgaacaccctgatttgcgaggacagcctgctcacgcgccaggagcgtgaaacgctggtactggccgtcgccgctatcggcgccatgaaagcgcgcgtcggcttgaaaaaaggcgatgcgccgaccgttgccagacgggaaaaaagggagaaaaaagaccgccagcctgatccgcgttttccgcgagccggtcatccctggcaggaagacgaaaaaaccttactgagtgatgcgctcgattcggtaccggacgaagagattggcaggcatctgttctggctttccgagaaactgggcagaacgcctttcagtgttgctttccagatcgcggcaatcagggagctgcaggacggctgggaggagcagttcagggagatttctgataaaattcgcttgtccggcctgagcatcagtgattatctgaagcagaacggcacgggccataacgcctga

SEQ ID NO: 92426 - DNA, 573 bp, Enterobacter aerogenes
atgatgcgggaaaaatcccgacgtccgtcgccgctgcagcgccgggtgctgattgtgctggccgcccttgatgcgaaacggccgggcccggtggcgacgcgggatattgagcgggtgctggagcagggcggggacgccccggtgtacgggccgaacctgcgcgcctcctgccggcgcatggaagccgcgggctggctgcgcaccctgcgcgccccgaacctgcagctggccgtcgagctgacggaggccggtcgctgcactgcagaaccgctcttccaggaagcacgcgaggctgaaacggcacgaaaacgactgacagacgtccggcgtctgccgttacgccagacggctgccggtgacgcggtggagctgcagctggatgacggccattacacgatcagggaagcggcctacgtgatccgtctggacggtaccacctgcctgcagctgacggatgccggcggcatacgccggataaaagagggcgatcccctgcaggtggccagctggtatcaggcctgttttgatgcaggcctgccggtcaccgtccaggtgaatgagagccgggactga

SEQ ID NO: 92427 - DNA, 249 bp, Enterobacter aerogenes; identical to SEQ ID NO: 17230

SEQ ID NO: 92428 - DNA, 690 bp, Enterobacter aerogenes
atgagttcaaaatcaggggtaaacccaaacgacgaagttaatcagactgttgaaacttctctaaatgcaggcatgaatgaacaggacgtggcatctctcgataaaatcgggaagttacaggacgaacagctccagcggtgcggaatgactgtgccatcaggaactgaggtgttccggcttcagctcggtagtcacggcggaagcagtgtctttttcaatcgtaatggcgaggattgccgttacagtcttaatgatggtgagaatggctctatgtacgtggccaaaactcccgacacggcaatgaaggaagtttttcagcataaaacagggctcagggaatcagatctcgataattacataatgggtacagtagtcattgagaaagatattcgggtccttcaggtcagtaagctgattaaatgcagtgatttaaggttgaatgatgtaacaacttcaacacgtgcagtgactcatcaactggctgaaaaagttcattcagcagggtttgatggaatggagtttccgtcaaatgtcaccagtgacccatgccttgtgctatggcatgacgatccggccggaaccgggatggccataacccggagccagacaagtctcagtcagtttgagtatcagggtaaggaagcggcagatattcttgtttatgacctgggaattcctgttgaggaataa

SEQ ID NO: 92429 - DNA, 690 bp, Enterobacter aerogenes
atgaacacatcaactcaaaaacgaaacggtaatgatcgttcctccactatgcataattttttggacaacagcattgctgcagagcgtcttgagaatttttttcaggatctggtagaggaagttcggtcaggtaaaacaccgattgctcctgaaagtatggggaataccgatgcggtttttaccatggatgtcatcctgaagttacttgaaaatcgcgcagttaacagcctgacgcctgaaaaaaaacgtcagcagcgacgtttacacagtaaggcccttttccttcagagactggaaaatgacggcggggtttacacctcagctaaagctgcagaaatggtgggcaagagtaaacccacagttaaaacctggaaagataccgatcagttacttgctcttgatattgacggtgagttttactacccggtgtttcagtttactgatgaggaagggatctcggacaaaggcgtgctccggggtgtggccgaactgctgactatgctgagcagcttcagtgaccgaatgaagtattctttctttatggaacagagaaatactgtcctggatgggctgaaccctgcagggcgttcgtttaccgtcgccgaggttctgaaaggcaatccggatgaaaaagtgatgaatgaattacgccggctggctcgcaactatggcacacagaacgccgtttaa

SEQ ID NO: 92430 - DNA, 219 bp, Enterobacter aerogenes
atgaagcagcgcatcactgtcaccatagacagtgacagttatcagttactgaaatccgcagacgtcaatatctccgccctggtgaacagggccatgcagaatgaggcccgtcgtctgcgttccgaacgctggcaggctgaaaatcaggaagggatggccgaggttgcccgctttattgagatgaacggttcattcgccgacgaaaacagggactggtga

SEQ ID NO: 92431 - DNA, 396 bp, Enterobacter aerogenes
atgaacagaactgatggcgaaccagagacagacgtgatggccaccgctttcagcaccatgcgcaagtacggcatgaatatcatcaccgccacgcagcatatggatattaatgcttacgtgaaatccgatccgcggatgccgagaacgcggctgcgtcgttacctgggacagtacggcctgcgcggtgaggccctgagcgcggaggtaagacgtatcgtcgctggccctgaacgaccagataacacgctgaaagccggaatcttctatacgtggccctatggctgggagcctgcggatttcacgccagtgatgaggcgcattttcaagggaaagcgcacccgccatgtgatgttgtttgatgaactgcctcagctgtttggcaagaatgactattga

SEQ ID NO: 92432 - DNA, 324 bp, Enterobacter aerogenes
atgggtacaccaacatttagctcatttaacgatgtggtccgggagcttgaggatgtatatggccaccaggagctgtggctttattctggccttaatgaggacagccccatcgagacagcccgcaggcgtcagaaatggcgatctccaaaaattctcaaacgaaacggcagaatggtggcagaacaatcaggccagcctgatttctgggtgctcacgggtgactaccatctgccgcagtctgaacacagcgctccgccgtggaaagcctgcctcatcaataaggtctttaaagtgtattgttcactgttagggaaaaatacatga

SEQ ID NO: 92433 - DNA, 1017 bp, Enterobacter aerogenes
atgaccgactgtgttacccggactggtgacgacaaaacaatgtggctcgtgacattgccggagatcattacaaataacagtacccgccaggaggaaaatctggtcgttattctgagcagggaggaatcgtgggggccaacttctgaccattttcccgacggattgtaccgggtctcctgcataatgacactgtacctggccgataccgaactgacgaagactcagactttcactgcaatctactggcctcaacagaaggccctgcatctgtttacagatgagttcagactggaacgccgcctgcagggactcggcctgggtagctggatcacgcagcagtttgttctctgggccagaggccttccgccagcaaccctggttttgccgattgaaatttcccgggttgatgaagaaaacgaagaaaacaagatccggagggacaggctgtggcacgcaatgggtttccggttcccggcgggggataccagctcaatgccgctgcgggcagacgaactgcagttgccacggggcaggtgctcaacgctccgggtggagcccctggtatccgcggtacgccggctggaagactgttatcgcgggctgcaggaaaaaatcgcgcagctcgaaggcaaaaaacggtcgcaaaaacagttaattacttcacttaagaatcgtccattttatcatctgttgcacaggaaagagggccagctcccggacgataaatgtgacgccctgccgctgcgggcagaaaaactgtctctgccgcagagcggggattcagacctggaggtggcgcaacgggcaaccggggtcatccggctggctaccctgtgtgctcagtcgcagaaaagaatcctggagctggaaagggagcttgcctcgcaaagtgaggagctcgttgacctgcaggcacatccattttttaacctgcgggataaataccgcggccagatcctgttctggggatgggggatgggttttctgtgctttatctactggatgttggtgtcatga

SEQ ID NO: 92434 - DNA, 144 bp, Enterobacter aerogenes
atgactaaccagccagcgacggccagccagaaaacagacgaagtcacaaacaaaactaccccgtcaatgacggtagacacgatattttcgggcacaggtttcactcctcttcagtgggtggctatggaacgtgaacattcatga

SEQ ID NO: 92435 - DNA, 627 bp, Enterobacter aerogenes
atgataatagtattgggtagtcaaaagggtggggttggtaaaagtacactggcggtatctatagctgcgtatctgatgtcactgggcaatcgagtgatcattgtcgacgcagatgaccagaaatctgtattgacctggtacaacaatcgtcctgaagatcttccccatattccggttactggcgcaacaggcaacatcaaagccatgctaaaggaacacgagaaatcttatgactttgtcatcgcagactgtgctggccgcgacagtgcagaaatgcgtagtgggttgatggccgctgacgtattcatttctccgttgcggccttctcagatggacctggatgtagtgcctcatacatgctctgtttttacagcagcaaaagattttaatgaggacgtccggggatatctcgttttaaacatgacgcccacgaacatgtttgtcaatgaagcaaatcaggcagctgacgtactcaaggattatcctgaaatgcgtctggctagttcccgagtttgtgatcgaaaagcgcatcgagatgcctgggcagaatcaatgacaatttttgaaacgcaaaatgacaaagcacaacaagaaatcgaatcgttagttaaagaggttattctgtga

SEQ ID NO: 92436 - DNA, 876 bp, Enterobacter aerogenes
atgaatgagaatgtttatattggcgaggttataggtccagattgtgaaagtgttaacaataaactcaccgtcacaagtaaggccacagttcagcctgtagccctgatgagattaaatgtttttgttccctcaagcaggcctgcaaagggcaccagaacatcaatcgatgcgacctctgttctcaaggatctggaattctcaaggcgggaggggtacgacgatattcgtataaccggtgaacggttgagtatggccatcgacttcaaggtatgggtcggtatcatagaagctttcagtaagtacggtttaaaaaccaacagcattaagcttacttttcatgagtttgctggaatgtgccgctttgagtctaagagattcgattcccgtcttagaaaaagtatttcagaagctttgaccaggatacgtggcaagaccattacctttacccgtagcgattcagagggccttcaaaaagtttccgtaacaggtttgcttaagacaggtgaactggattttgcaaacgacctggtggaacttgaagctgatcagcgactatgggagctctaccaaactgattacactgttctgctacgacataagccgataaacgctttaacccgaaaggaagcagctcaggccctgtatactttcatcgaaagcctgcctacgaacccagtccccatatctttcaaacggatacgagacaggctctcattgctctctccggtaaaggaacagaaccgtatcattaaactggccctcaagcagttgcaggatattgggtaccttgaccacagcatcaccaaaaaaggtaaagagactttcattctgatccaccgtcgctcagcaaatctgaaaccaggaacagctgtataa

SEQ ID NO: 92437 - DNA, 1272 bp, Enterobacter aerogenes
atgtttgccctggccgatgtgaacagcttctatgccagctgtgaacgtgttttccgcccggatttgaaaggaaagccgatagtcgtcctgagcaacaacgacgggaacgtaatcgctcgcagtgccgaggcgaagccctggatcaaaatgggaactccgtggtttcagataaaaaacgaaaggtacccggaaaaaatatatgcgttttcaagtaattatgaactttacgcctcgatgtcggcgcgcgtgatgaactgcctggaggaactggcccccagggtggaacagtattccattgatgagatgttcctcgacctgaccggcgtggagcactgtatggggcttgaggacttcggccggcagctgcgtcagcacgtgtatgactgtacccgcctgaccattggcgtgggcgccggaccaacgaaaaccctcgcaaaatcagcccagtgggcctcaaaagagtggaaacagtttcgtggcgtactcgcgctgaccaggggaaatccgcaaaggacgcggaaactgctttcactgcagccggttgaagaaatctggggggtgggtaaccgtattgcacgcaagctaaatgtgctgggcataaaaaccgcgctcgatctggctctgacgaacccggccttcatccgcaaaaatttttctgtggtccttgagcgaacggtacgggaactgaacggggaaagctgcctttcgcttgaggaagcccctccgacgaaacagcaaattgtctgcagccgcagttttggcgtgaagatcacggagtacgagtcactccgtcaggctatctgtcagcacgcagagcgggcctctgaaaaactgcgtaaagagcaccagtattgccggcatatttccgttttcatcaaaacgtccccgttcgccattaaagagccttactacggcaacgtggctacggaaaaactgcttacacccactcaggacaccagggacatcattgcagccgccacaatggctctggagcgtatctggagggatgggcaccggtatgccaaagccggagttatgctgaatgacttcaccggctccggcgtttcgcagctgcagctgtttgacgaacgcccgccacgccctcacagtgctgagctgatgagggttctggacgggatcaacaactcagggctgggtaaagtatggtttgccggtagaggaattgcgccatcctggcaaatgaaacgcgatatgctctcccctgcgtacaccactcgctggagagatatccccgttgcgaggatcggttaa

SEQ ID NO: 92438 - DNA, 432 bp, Enterobacter aerogenes
atgaaactacaacttttcagcaccgggaaagaactcccgccacaggcccatccattgtttgccgatctggccagctgcggttttcccagccctgctgctgactatgtcgagtccgatctggatctccatgattactgcatacggcatccgagcgcgacgtactacctgcgtgccagcggagacagcatggccgacggcagtctgtacaatggcgatctgctggttgtggacagtgctgaaaagccgcggcacggcgatatcgttgtcgccagcgtacagggggagtttacggtgaaacggcttctgctgacgccgcgactgacgctgcagcccatgaatgcctcctggtcgccgatttatcctgatcccgacgagctggatatctttggcgttgtcacgcatatcatccaccgcccgagggagatgtactga

SEQ ID NO: 92439 - DNA, 1485 bp, Enterobacter aerogenes
atgtacggagaggagaagtcggactcgctcatagtagctgcgaatctggcgaacaatccgcaaggagcggagtcagtggagcgaaggagcggggccaagggaaacgcggaacagccacacatgcgccggacgcagagccgggaaagtatgtcacagaggctgtcacgcgtgcgggaagctgcgaagcagcggaagaaagaacggtttaccgcattgttccacctcctgacagcagaggcactggagaacgcattcctctccctgagcaggaaagcggctgccggagtggatggtgtcaggtggaaggactacgccgaaaacctgaaggtcaacatagcagatctgcaccggaggcttcatcagggtagttacagggctcagcccggcaggcggcactacatcccgaaagcggatggaaaacagcgcccgctcggcatcgcctcactggaggacaaaatcgtccagtatgcgctggttaagatcctgaatgcagtctacgaaaatgactttatggggttttcatacgggttcagacccgggcgaagccagcacaatgcgctggacgcactggccacagggctggttcggaccaatgtaaactgggtactggatgccgatattagtcagttcttcgacaaggtaagccatgaatggctaatcaggttcatagaacacagaatcggcgaccagagggtaatcaggctcatacgaaagtggctcacagccgggacctcagaggaaggagaatggcgggcatcggaggaaggcaccccacagggtgcggttatctcgccgctgctggcaaacatatacctccactacgtcttcgatctgtgggcgcatcagtggcgacgtcgctatgccacaggcaatgtggtaatggtcagatacgccgatgacatcgtcatcgggttcgacaaacgatacgatgcccggcgcttccgtatagccatgcagcgcagactgagggagttcggactcacggttcacccggagaaaacccgtctgatggagttcggccgcttcgctgccgaaaaccgtgccatcaggggaaaaggcaaaccagaaacgttcaacttcctcgggttcacgcacatcagcgggaaagatcgcaacggcaggttcatgctgatacgaaagacccgccgggatcggatgacggcaactctgaaagccatcaaagacggtctgcgaaggcgctggcattactcaatccccgaacagggaaaatggctcaggagagtggttcagggatacctgaactatcactcggtaccgggcaacttccccaccatgcagaagttcaggacacacgtaacaaacctctggcgccgggcgctcaggcgcaggagccagaaggatgatacgacctggacgaaagcaaacaaactggcagccgcatggctaccaggggttcgggttcttcatccatggcctgtggagcggttcaccgccagacacccgaggcaggagcccggtgcgtaa

SEQ ID NO: 92440 - DNA, 972 bp, Enterobacter aerogenes
atgaatatttactgcgatgatggttcaactaatgttaagctggcatggtttgaaggcgatgagcttcagacacgggtctctgcgaactctttccggcatggctggaaagtggcggaattcagtgcggcaacgttcaactatcaggtgggtacgctgaaatacacctgggacagcgtcagccgggatgccatcccgacaacaaacgtggaatatcagtacggtgatctcaacctgctggccgtgcatcatgcgctgctgaacagcggactggagccgcagccggtgagcctgaccgtgacgctgcccctgagcgagtattacgacggggactgccagcggaacgaggagaacatacgacgcaaacgggaaaacctgatgcgtgagctggttctgaataagggcagggcatttaccgtaacggacgtgaaggtgatgccggaatcactgccggcggcgttctcccgtctcgcggagctgaagcccggccccgctgagaccaccctgattatcgatctcggtggcaccacgctcgatgccggtgtgattgtcggccagtttgatgatatcagtgcggtgcacggtaatccgtctgtcggcgtgtcacaggtcacccgggcagctgcaggggcactgcgggcggcagacagcgaaaccagcgccctcatcgctgacactatcatccgcaaccgcaatgatcgtcagtatctgcagcgtgtgatcaacgatgccggtaaaatcgacgaggttcggaacaaaataacagaggcgatcacttccctgggggcgcgtgtcaccagtgaactgacggccttcaggaacgttaaccgggtattcctggtcgggggaggggcttccctcatagaagaagctatccgtcaggcctggcctctggctcctgaccgtatcgaggttataggcgatccgcagatggcgctggccagggagattgccctttacaataaagaggactaa

SEQ ID NO: 92441 - DNA, 672 bp, Enterobacter aerogenes
gtgccggacggccagtattctttctatctgcacagcgacgatcgcaccgacatcgcagcaatggcaaccatcagcaccatctcacagcccctgcgcggtgagttcatccgtaccgccgccaccgccggggcggtggtataccaggtggatgcccgtttaccggcgctgatcccggtgttctttgccgggcagctgagcgctgtccgcctttgcgccgtgatggccctggtctccggaacctggtcctcactcaccggccttccggatgagcccgaaaatggtggggctgctctgcccgtgtcaccggagacagaataccagcgccggcgttacaccctgacgcttcagaatggccggagtggagaacgggtggaaagtgtgctgacggaggcgtcatcccgtctgcgtggcgatctgctgagaaacctgattatcaccggtcttgccctccacacgacggcgccggagctgccgcgcctgctggccagtatgccggtaccgcccacctcggtcagtgagctgcaggcactggttcagcagatggccggcaccgctgacgtgaacagggctgcagctgcagtaccggatactccgacagcatctgccgcgccggtgtccgggtcggatacccgggaaataaagaaaaatatgcggcgtgcattcggtgactaa

SEQ ID NO: 92442 - DNA, 231 bp, Enterobacter aerogenes
atgtcaccaggattcagaaatgttctccgtctcgcccgcattcccgtcgacagcagtgaaccggtgcgaagaaaatttggcagccggctgattggcattgtgacggtatgtctgcttccgcttctggttttcgacgttccgcagtgggttttcattttgtcgcaggtcatctggggggcgggcgtctatattggcctgtccctggccggggataaatccctgaaccgctga

SEQ ID NO: 92443 - DNA, 234 bp, Enterobacter aerogenes
atggaaaaacgcatgaccgtgaaagcctttatagaccgtttgtcgcagtaccccgacgacgcgctgtgctgcggcacgttctggctggccgatgattttctttcactggacggctcgctcacggaaggcgacatcgatgcagcgatggagcgggcgcaggacagtcatgatgcgaatgacggatttaactggagccacctgcaggcggcgattgatgaggtaaaacgtgtatga

SEQ ID NO: 92444 - DNA, 336 bp, Enterobacter aerogenes
atgaatacctggctggtcggctttgccgttgaaatcagcggcgtggaaatgatggtgcatcacatgatatcagcaaccggcctggcgcaggctgaatcgggcgcgatacagatgggccggacgtggtgggacagtctgctgctcgaggatgaccgtcaccgctggcaatatccggatggcgtggtctggtttaacagcatcatcctgctcgatgacgtggagagcagtatcctgcgcggactgaagtttctggatacgtgggcagtaaccggtgtaacggatacgcccggcctctgcgatgagtacggaaatgactggcgggatatcacacgctga

SEQ ID NO: 92445 - DNA, 702 bp, Enterobacter aerogenes
atgtccagattcattctcgggaactgtattgatgtgatgcgcggattccccgaccgtgccgtggaccttattgtgaccgatccgccttacctcgtcggttttaaggaccgtcagggcagacagattgccggggatgtgacggacgaatggctgcaaccggccacgctggagatgtaccgcgtccttaaaaaagacgcactgatggtgagcttctacagctggaaccgtgtggaccgctttatggccgcgtggaaggcggcaggattctatgccgtgggccagcttgtgttcaccaaaaactatgcctccaaccgtcgtaacgccagggcccgacgcggatttgtggactactgccatgaaggggcttatgtccttgccaaaggccgccccgtgccgccccttaaaccgctgccggatgtgctgcccttcccgtataccggtaataccctgcatccgacgcagaaaccggtggaggcgctacagccgctgattgagtcattcagcgccccgggcgcgattgttctcgacccgtttgccggaagcggttcgacctgcgtcgctgcataccgtgccggacgccgctatatcggcatcgaaatgctggcgcagtaccaccgggccggaaccgaacgactggccgccatgcaccgggccgtaaataccccggcggcgaacgatgaatggctcccggaggccgcgtaa

SEQ ID NO: 92446 - DNA, 222 bp, Enterobacter aerogenes
atgaattacgacggacacgaagccctgcgccgcgatatggccgggctggcgaacaatctttgcgacctgaaaaccaccctgaaagtgctggaagacacgtaccactaccggtacgacggactggcggaacggcttgccggtatcagtctgcgacgtctcagcgtcctgatggatgaggcgttcaatattgcactgatgctcgatgaaagctttctggattga

SEQ ID NO: 92447 - DNA, 420 bp, Enterobacter aerogenes
atgtacggaacccgtgaagatctttgcaggatgctgaatgagcaatatcccgcagaaaccccgctgaacctgattatctggaccccggcggatattgaagcactggctgacgggatggaatattccttttcagaacatgacgtaagggcagtactggaacgcatggacactataccggaagaacaacggcttgagtcgggcgtgtcagccggcctggtgatggcactgatagaccaggtgaaagagaacgggcagagggtgactgtgccggttgacctgcttgaaaccctgctgattaccgccgaacaggcattgtgggacagggaatggaccgcacgggatcgcaatctcccggtgccggaaagcgtaatgcgccgcctggcggatacagcaaaagtgcgggcattactgaaaagctga

SEQ ID NO: 92448 - DNA, 768 bp, Enterobacter aerogenes
atgatgaaaaaagaaacccttaacacgcttattctgcgtcacggcgaccggatgctgcgccaggctggctggcccgacactgttgatatggcgcccgtcgcccccgaaaccgtacccggctggcttgccgcctgcggctctctcagtggcgtggaaatcctcacgcttacggaacagctttgtcagccgctgacgtatggccgggcagcgttgttgctcgccagcgcccggcggctggcgggaaccccggctcgtctgcatctctttccggtgcaggcatatccgcatccggagcggctggctgactgtcaggttatccgcctgccttacgctcaggagtggctgacagcggcggaatgtgacgatctgctggccttcctgaaagcctccctcacgcagatatcggaaatcgtccaccgggatacgaagcgcatcgccgccgcgctgacgccgtccgtcactccccgtctgatggacaggcggatcggtgactggcgcttgctggccgtggagtatgatcatgataactgcctggacgaagacgaaaccgacaggctggatcaggtcctcgatgccattcttattcgcgatgcgcgattctgcccggtcctgctcaccctggttaacgagcgggaggaaactatcaggagcgcaggggttatcgctgatcatctgcgttttacggacactccggtccggcgctggtttgatcgccgggttttaagggaaatggtgagagaggcccgcgccagcagaactcaggagtga

SEQ ID NO: 92449 - DNA, 429 bp, Enterobacter aerogenes
atgcagtatgtgaatacatgcccggtcctgaatgttgaggagtccgaccgcctgtcttttatgccgtacctgttcggcacggatttcatgctcgcggaattacaggtgtacgctctggccaaaaaatggatgcccggctatgagggcggcttctggcattttattcgcctgccggaggggggcggctacatgatgccggattgtggccgggtacatctggtcagtagcgaaaactggtttgatcgcactgtcagcgccgacgcggcgggcattattctgaccagcctggcgattaatcgccgtctggcggcccatcatgacagcagtaacccggcgctgactcgcctttatatgctgcgtgatgcccagctctggaatcacatcacctttcaccccgaatgcagtgctatttacgccgcgctggactga

SEQ ID NO: 92450 - DNA, 507 bp, Enterobacter aerogenes
atgacttcatcagtaaccgttccggccgtctacgtgggcacatatcaccagtacaacggcggcagtatttttggcaaatggtttgatttaaccgacttcgacgacgaagacgaattttatgacgcctgccgggcgttgcatgcctccgaggatgaccccgagtttatgtttcaggactgggaagggatcccgtctcagtttgcctctgaatcctctgttaagtgggcgtttatcgaggcattccggcaggcgcaggacgaaggacgcgctgccgcgtttgtggcctgggcggactataccggcgagtgcgactatgacgcctttgatgaggcgtattgtggcgaggctgaaagcgaggcggattttgcttatggctttgtggaggatcacggcctgttaaacgaggtgcctgaatccctgcgcgtctatttcgattatgaggcttatgcgcgggatctgttcagcagcggctatgtcttccatgaaggctatgtattcagcaactga

SEQ ID NO: 92451 - DNA, 192 bp, Enterobacter aerogenes
atgaaacttgcaccacaaagccgcgatatcctgcgacagtacaaagccctgattaatgcccgccgccgcgatgccggtcagcgggaactgaccactgcgcaggtgatggatgaaatctgcgaatacatgacctgtcagtgtgccgtctatattggcggccatttcattcttcaggggggaaaggcacgataa

SEQ ID NO: 92452 - DNA, 261 bp, Enterobacter aerogenes
atgcatatgtcaaagtggaatatcgcctctttttcaaaggaggagcaggataaagttgccgtcgataaggtggctgctgctgttgcctggcaggagcgcatgaacaagcccgtcgtgccggaacttgttgaacgggaacagcctgaacacctgcgcgaatatttccatgaacggctccgcgtacatcgactgaacagtcagcagctgccgcgcgtaaatgcgcccgaatataataaaccgggcgaggatcagcagaattga

SEQ ID NO: 92453 - DNA, 321 bp, Enterobacter aerogenes
gtgcgtatgtctctgatgtttgctgccgtgacgcttttaaccggtattaacctgttttttattccgtttcagccggtaccggctttgtggggggctatcctggccgttgcttttgttctgattaatgtcgtggcggataagctgcgcctctggagtggtattgcgtggattatcgttgccggcatcatcataacgctgatgctgaaggggaaagagccgggtgacgaatttcgtgtcctgatcaccgttttcgctttcctggcttcggcctggtactgcgttgtacagtacagaaaagagcagagcgaatctcagtcctga

SEQ ID NO: 92454 - DNA, 543 bp, Enterobacter aerogenes
atggcagcacgtggcgttaacaaagtcattctggttggacatctgggacaggatccggaagtgcgttacatgcccaacgggggcgcagtggccaatctgacgctggccacgtctgaaacatggcgtgacaagcagacgggagagatgcgcgaaaacaccgagtggcaccgtgttgtcatgttcggcaagctcgcggaagtggcgggcgaatacctgcgtaaaggcgcacaggtctacattgagggccagctgcgcacccgcaactggcaggacgatgccggagtcacgcgctacgtcaccgaggtgctggtcgggcagaacggcaccctgcagatgctcggcggccgccgtgaagccggtgtgcctgagagcgccgcgcagtcgcagagtcctgccaccccggcacaacctgctcaggccgcgactaaatccccgaaagcaaagggtggtaagaaaggccgtcaggacgccgccccgtctcagcaaccgcctcagccacacccggatgatttcccaccaatggatgatgaagcgcccttttaa

SEQ ID NO: 92455 - DNA, 249 bp, Enterobacter aerogenes
atggaccataacgttttgtccccgcttgaatccctgccggatggcacgtttacccgcgagcaggctcaggttgtcgcagcgcagtatcagaatgtggcgattgaagatgaccaggggacccattttcgccttgtcgtccgtcatcaggatgacggcagcatgatctggagcgtctggaattttgaaccgggcggcgaggacatgatgaaccgctacatccgggattacggagtacgcaaaacgaagtaa

SEQ ID NO: 92456 - DNA, 2001 bp, Enterobacter aerogenes
atgtcagtgaccgagtctaaagcaaaagcgccggttaaaaccagcaaaaaatcggtgaaccctgccgaatccgccgccctgaaagccgcgcttgagactgctcaggttgagatggtgccgctgtcggcgctggtcaaatccccgctgaacgttcgcacgatcccctatccggctgacagtgtccgggagatggctgactccatcatggcggtcggcctgatccagaatctggtggttcactcgctgccggacggtatgtcaggggtggctgcaggtggccgccgtcttgccgccttgcaacagttgctcagcgagcagcgcatcgatgccgggtatctcgttgtcgtcaagcgtgtcagtgacgacctggcggtggtcgcctcgatggtcgagaacaaccagcgggtggccatgcatccggcagagcaaatcagcgggttccgcaccctgtcagaacaggggaaaaccccggctcaaatcggggacctgctgggctacagtgcccgtcacgttcagcggatgctgaagctggcaaacctcgccccggaattgatcaccctgctggcagaggacaaactcgacgtggagcagtgtcaggccctgagtctggagagcgacccggcacgtcaggtgcaggtgtatgaccaggtgaaaacctcatacggcagtactcccgctcacctgctgaagcgggccatcacggatacggaaatcgccgtaacccactcccgctttgtgtttatcggtcgtgaagcgtatgaggccgccgggggcgtggtgcgtgaggatctgttcagcgcccaggagggagacggaacggcggacggggtactggttgagcgtctggttcaggagaagctggcggcggctgcgctggccatcgaacaacaggaaggctggtcatggtcactggctcgtgagggatccgtcagaaactacggcgatgaccgggagcattatctggtgctgccggcgccggagggggaattcagcgctgaggagctgcagcgtcttgatgaactgtatgccacgctggaggcaacggaaacctttgaggatgaagccgcgattcaggtgctgattgatgagattgaaaatgcggcatcggttcgggcgtggacaccggagcagaaagcggcctgtggcgtggtggtcagtctgtatgacggtgagctttgcgtccagcgtggtgtccagaagaagatccagacggcggtctctgacgtcggggaacacggtggcgatcaggctgccgtacatgttgtcacccgcagtatcccggatgcggcagagggcatcagcgtgccgttgctgaaaaaaatgtcttcagaaaggactctggcggttcaggccgaactggttaagcagccacagaaagccgtggccctgatggtctggcggctgtgcagttgcgtgtttggctactgcaccaccacccgacatccgtttgtcctgcgccttgaggtgcatcacagcggcctgaccagtgaagccccgaccggagaggaaggtcaggcatggcggtatctgatgcaggagaaagcccgtctggaagccctgctgccggaggggtgggaggatgatttcaccaccttctttaccctcgacggacagaccctgatgtcgctgatggccttctgtactgcctgttccgtagacggtgtccagacccgtgaatgtggacatacccgccgcagtgacctcgatggcgtggaggcggcgctgggatttcatctgcgcgactggtggcagccgacagcggataacttcctcgggctgctcagcaaggcccagattgtggcggcgctgaaggaggccgggctgaccggagccgcctcggatgccgaaaaaatgaagaagggtgatgctgccagccatgctgaacaatggctctccggctcccgctgggtaccgggctggatgcagtccccggatgccgcaaagccggacgatgcacatgctgccccggacactgacgaaccgacttcacacgctgcctga

SEQ ID NO: 92457 - DNA, 432 bp, Enterobacter aerogenes
atgaaaacgttactgactctggatgtcctgaaaaccatgtcttctgatgagctggaagactaccgcgccgccggtgaagactttcgccgggagctgagtcacgcagtcatgcgcgatctgacctcaccgtccggctggtccgtgaatgccgaataccggtgcgaatttggcggcttctttcctgtccagatccgttttaccccccctcatggtcactttgatgtggcggtatgcagcccgggggagctgaatcctcgctggatagtggtctttgttacccgtgacggtcagccgttctctgtcgttcgcgtgatggatgcattcaaccctgaactcatcacccatactctggatctcatcgagtgtcttgacgccggtggctactcgtttgccagcatcatcagcacgctgtcacaggagggcgcacaatga

SEQ ID NO: 92458 - DNA, 729 bp, Enterobacter aerogenes
atgatcccgtcatccagtgctcttgtatccctgaagccagcccgtcaggcagcgctgcaggccatcatgacggtggaagaggctcgccagcacggcgcacgtctgccatcgatgccacacgtccggacattcctgcgcctgctgacaggctgtagccggattaacagtgacgttgcccgccgtattcctggccttcaccgtgatccaaaagaccgcctttccagcctgaaacaggtggaagaggcactggaaatgcttatctccagccacggggaatactgtccgctgccgctgacaatggatgtgcaggctgaacttttcccggaagtccttcatacccgaacagtacgcaggctgaaacgtcaggactttgccttcacccgaaaaatgcgccgtgaagcccgtcaggtcgagcagtcctggttactgcgtcagaacctgctggggcaggctgtcacagaactgaattttcagtcaccggaaaccgtctgcacctggtacacccggtggagcgacgagtttgacgcggcagagcttgcagcaccgttctggcgctggcagtcgcgattcgcatcgctgaaggaacttgactggcttcgcatcagcggtgagccgctgtatgcagtgatgtacgaaattccgtttattgtccgggaaacacctgagcatattcgtgttgctgaacgctggcaggtgccaaataagctggctgatcggagtggtgtatga

SEQ ID NO: 92459 - DNA, 327 bp, Enterobacter aerogenes
atgaagtggcgctattctctgcgctggaaactgccgcacaggccctgcccgggcccacaggaactgatttccgttgtcgtggaggcagggcaggcggcacctgaagaggtgatgtcacgctgggtggctggctcaggttacgctgtatgcgtggattttctcggccagaaacagatccaacgctggagcgatgaacggaaagcagcggtgagaaggcgcaacatgcaggcacgtattaatcgtgttgcccctttgtttgccgacgagttaatcgagcgtgaactggctgcgcgtccggagtatttcaatggcaagtccgcccgatga

SEQ ID NO: 92460 - DNA, 375 bp, Enterobacter aerogenes
atgaggtactggttgctcgttatcttaatgaacgtgctgttctggttgatcgtgaagcatgttgctccggaatggtatggttcccctggttattatgcaggccaaatcatctgcacactaatagctgcggtcatcacatggcgtgatccgcctgactggttagatggaatcctgctcggcgttataaaattcggcgttatgattgccgggattgtattctttgtctggggcatcgggtacaagctggcattctgggggcaacatgatcctaataccatatatgcaagtgcaaacgatgtgattttgcctaatcttgcgctgggcacgggcgtcttgattgcgggatgggtatacattagctatttaaagcgctaa

SEQ ID NO: 92461 - DNA, 522 bp, Enterobacter aerogenes
atgtcaaagccaaaataccccttcgaaaagcgccttgaagtcgtgaatcactacttcacaactgatgatggttacaggatcatctctgcacgttttggtgtgcctcgaacccaggtcaggacgtgggttgccctctatgaaaaacatggagaaaaaggtttaattcccaaacctaaaggcgttagtgctgatccagagttgcgcattaaggtcgtgaaagccgtgaccgagcagcagatgtccctcaatcaggctgctgctcactttatgcttgctggtagtggttctgtagccaagtggctgaaagtctatgaggagcacggagaagctggtttacgcgcactcaagatcggcaccaaaagaaacattacaatgtcagttgatccagaaaaagcggcgttagcattggagctgtcgaaagaccgacgtattgaggatcttgaaagacaagttcgattccttgaaatgcggcttacgtatctaaaaaagctgaaagccttagctcatcccgcgaaaaagtga

SEQ ID NO: 92462 - DNA, 852 bp, Enterobacter aerogenes
gtgaaagtactcaacgagctaaggcagttttaccctcttgatgagcttctcaaggcagcggagataccgcgcagtacgttttattaccatctaaaggctctcagcaagcctgataagtatgcggatgttaaaaagcgtattggtgagatttatcacgagaataaaggtcgttacggataccgtagggtaacgttgtctctccatcgagacggggaacggattaaccataaagccgttcagcgcctgatgggaaccctctcgcttaaggcagcgattaaggtcaaacgatacagctcctacagaggagaggtagggcaaaccgcccccaatgttctccaaagggatttcaaggctacacggccaaacgagaagtgggttaccgacgttactgaatttgcagtcaatgggcgaaagctgtatttgtctccagtaatagatctcttcaacaacgaagttatttcttacagcctgtcggaaagacctgtgatgaacatggtcgagaatatgctcgatcaggcattcaaaaagcttaagcctcacgagcatcctattctgcactctgaccagggatggcagtatcgtatgagaaggtatcaaaacatccttaaagaacaaggcattacacagagcatgtccagaaaaggcaattgtctggataatgcagtcgtggaatgtttctttggaaccttaaagtcggagtgtttttatcttgacgagttcagtaatataagcgaactgaaggatgctgttacggaatatattgactactacaacagcagaagaattagcctgaaattaaaaggtctgagtccaattgaatatcgaacccagacctatgtgcctcgtgtttaa

SEQ ID NO: 92463 - DNA, 1080 bp, Enterobacter aerogenes
atgttgatgcagcatatcggtgtcggctattttgggtattaccgagcaactgcttatgcgatgaaacactctcttatgcccgagattgcgaagttaagaatgaaggctctgaacttctgggataagcacgggatccgtgccgcagctgatgcttttgacgtatcaacgcgaacactctactggtggcgccggttactgcgcaccggtggtccagaagcactaattccaagaagcaaagcccctctggttcgccgttcaaggcactggcatcctgatgtactcaaggagatcaggcgtctgagaactgagttacccaatctcggcaaagagcagatttttgtcaggctgaaaccatggtgtgaagcgcggcattttacctgtcccagcacgtcaaccattggaagaatcattgctggtgctcacgataaaatgcggatgatccccgtacgcctcagcgccaggggcaaagcccggttgataaaaaaacgctcagtgaagcccagaagaccaaaacaataccgcccggtaaaaacaggcgaactcatagggatggacgcgattgaactcaggatgggggacctacgccgctatatcattaccatgatcgacgagcacagcgactatgcgctggccctggcggtcccttcactcaacagcgatattaccagccatttcttcagcaaggccacaaagctctttcctgtcgctatcagacaagttgtcactgacaacggtaaggagttcctcggtaactttgataaaacgctacaggaagcctcgattaaacacatctggacctatccgtacacaccgaaaatgaatgcgacctgtgagcgatttaaccggacacttagagaacaatttattgaattcaatgaattgttgctttttgaggacctgaatttgtttaatcaaagaatggctgaatatctggtgctgtataacagcaaaaggccacataaatcactcgaactgatgacgccagtggactatattttacgtgagagtaaaaattgcaatatgtggtggacccatacacctccttgcattgagcacggtaagaggccatactgttgttga

SEQ ID NO: 92464 - DNA, 162 bp, Enterobacter aerogenes
atgaaactaccgcgaaacgccctggtctggtgcgtattaatcgtgtgtttaacgctcttgatattcacatgcctgacccggaaccgcttatgcgaagtccggctaaaggacgggaacagggaggtcgcggcaagcctggcttacgaatccaacggtaagtag

SEQ ID NO: 92465 - DNA, 135 bp, Enterobacter aerogenes
atggcacaaacctatttgcaattgaaaatgcaatcaaacaagcaattagctattacattaacaaactcattaagaaacattcacgccaaccatatgtctaccatcgaaaagggaaaccaggcgcagagcggctag

SEQ ID NO: 92466 - DNA, 381 bp, Enterobacter aerogenes
atgattattaccaccgctgacgcgcctgccgctatcggcccgtacgtgcagggcgtcaatctcggcgcgatgaccatcacctccggtcagctgccgattaatccgctggacggcaccatgcccagcgatatcgccgaacaggcgcggcaatcgctggaaaatgtgaaagccatcgttgaagctgctggactcacggtcgggcagattgttaaaaccacggtgtttgtcaaagacctgaaggattttgccgccatcaacgccgcctatgaggccttctttaccgaacatcaggccacctttccggcacgctcctgcgtggaggtcgcaagactgccgaaagacgccggcgtcgaaatcgaagccatcgccttcgctcgttaa

SEQ ID NO: 92467 - DNA, 789 bp, Enterobacter aerogenes
atgagtgaaaatagcgtcgatgccgcgatgcgccagcgcgtgcggcggcagttagccgacatagaacaacgctaccaggtcagggtgctgtatgcctgtgaatcgggtagccgcggctggggttttgcctcgccggatagcgattatgatgttcgctttttatatgttcatcaatccgaatggtatttacgcgtggaagcgcagcgcgatgttatcgaactgccgatagatgatgagctggatgtctgcggctgggagtggcgcaaagcgctggggctattgaaagcggcgaaccctactcttatagagtggctggattcaccggtggtgtatcagcaggacgcgtcgacagtggcggcgttaaaagcgctggtgccgcagtggttttcgccgctgcgcgcccgttggcactactattcaatggcgcggaagaactttcgcggctacctgcagggtgagcaggtacggttgaaaaaatacttttatgtactgcgcccgctgttggccgtgcgctgggttgaagctggtaaaggcgtgccgccgatgcgttttagcgaactgctggcgggtagcgaactggaacccgcactgcgtaatgaaatcgatgagctgctggttcgcaaacaacgtgccggcgaagcagagtacggtatacgacgcccgcttttgcatgcctttattcaacatgagctggcgcgtggcgaggtagcgccggagctgccggatagccgaacggggcgcgttgagcaactcgatcgcttgctgatgagcacggtactggcgccataa

SEQ ID NO: 92468 - DNA, 1227 bp, Enterobacter aerogenes
atggcgcataacgattatcacctgctgacggcggaaaatagcgcgccgatcaaaatgtggacccgcggcgtgccggtagagccggaagcacgcgtccagttgctgaatacggcaaaaatgccgtttgtctttaaacatctggcggtgatgccggacgtgcatctcgggaaaggctcgaccattggtagcgtgatcccgacaaaaggggcaatcattccggcggccgtcggcgtggatattggctgcggtatgatggcggtgcgtacttcgctcattgccagcgatctgccggataacctgggcggattgcgcagcgcgatcgagcaggcggtaccgcacgggcgaactaatacgcgctcccggcgcgataaaggcgcctgggagacgccgccgcaggaagtcgatcagcagtggtcgctactggctccgcgctttaagcgcctgacggacaaatatccgcagttgttgaaaaccaataatcatcagcatctcggaacattgggtaccggcaatcactttattgaagtgtgcctggatgaacagcagcgggtatgggtgatgctgcatagcggttcgcgcggcgtcggtaatgctatcggcaacctgtttattaccctggcgcagaacgatatgcagcagcatatcgctaatctgccggacagaaatctggcctactttcaggaaggtagcccgcactacgaggattacatcgaggcggtggaatgggcgcaggatttcgccaggcataatcgcgaggtaatgatggcgcgggtactggcggcgctatcggccattgtgacgaaaccgtttatgacccagcaggaggcggtcaattgccaccataactatgtgcagaaagagcggcactttggcgaagaggttctggtcacgcgtaaaggcgcggtatcggcgcagaaggggcaaatgggcatcattcccggctcaatgggggcaaaaagcttcattgtgcgcggattgggtaataaagagagtttctgctcatgtagccacggcgcaggacgcgtgatgagccgaacggcgtcgaaaaagcggttcaccgtcgcggaccagatccgcacgaccgcccatgtcgaatgccgaaaagatagtgaggtgatcgacgaaattccgctggcttataaagacattgaggcggtgatggccgcgcaatcgtcgctggtagaggtggtacataccctgcgtcaggtcgtctgtgttaaaggataa

SEQ ID NO: 92469 - DNA, 1143 bp, Enterobacter aerogenes
atggctaagaaaatgacgatacgaaaaggtcaattaggtctgctggcgaaagcgggcgactattatcaggtgctggaagccggcgagcatcgcttaccgtggttttccacaccggaagtgctgatcgtcaccaccgatggcagcgaagtaccgcaggcgttggccgactatatgcgccgcttccagcctgaatggatcgaccgttactgcctggcggctgatatggcggaagaggaagccggcgcgctgtatatcgatggcgtactgcaggagatcatcccgccagcgacgcgccgtctgtactggcaatatgacaatgcgctgaagctggtacgtatggatactcgcgcggtgctggtacccgcagaggtgatgaacgcggtactgcaacctcgacgcagcggcgcggtaaaagggcgtgagtcgatactgacggtacaggttcctgcctggcatgttggggtgttgaaaattgacggcgagctgcagaaagctctacctcccggtttgactgcctactggaagattaaccatctggtggaagccgaagtggtggatactcgtctgcaggtgctggaggtcagcggtcaggagatcctgaccaaagacaaagttaatttacgtctgaatctggcggcgaactggcgttatcaagacgtgctgacggcattttgccagttaactaaaccgctggatcatctgtatcgtgaactgcagttcgcgctgcgcgaagcggtcggtacacgtacgctggatgagcttctggaaaataaacagatgattgatgaagtggtgagcgcgcaggtgaaagagcgtatggcgccattcggcatcgaaatcgcctcgttgggagtaaaagatatcgtcctgccaggcgacatgaaggccattttgtcgcagttggtggaagcggagaaatcggcccaggccaacgttatccgccgccgggaagagacggcggcaactcgttctttattgaacacggccaaagtaatggaaaacaatccggtcgccctgcgcttaaaagagcttgaaacgctcgaacgcgtcgcggagcgaatcgataaaatctccgtatttggcgggctggaccaggtattacatggacttatcaacattaatggagtgaaccatggcgcataa

SEQ ID NO: 92470 - DNA, 1572 bp, Enterobacter aerogenes
atgagaaaacgtcgggtggttattggcgtactggggacggtactcgataaacgtggcaagcgcgccaaccgttttcgcaagtggcggccaacggttgggttgtgccaacaagctgaaatgcccattgatcggctggaactactgcatcagccgcgtgacatcggcatggcgcagcagctcgccgaagatgtggcgttggtctcgccacagaccgaagtacatccgcatgctgtagccatcgctaatccctgggatttcgaagaggtgtatgccgcctttcttgattttgcgacccgctacccgttcgataccgacaatgaagagtatctggtgcatatcaccaccggaacgcacgtggcgcagatctgctggttcctgttgaccgaggcgcgctatctgcccgccagtttgctgcagaccgggccggcgccaaaaggcgccaccgacgagcagatcgcggccggtaccgcctcggttatcgatctggatttaagccgctatgccactctaaccagccgttttcagcgtgaacaacagcagtccgtttcatttcttaaggacgggattgaaacccgcaacgccaccttcaataagcttatcgatcgcattgagcgggtttctctgcgttcaaccgatccgattctactcaccgggcctaccggcgcgggcaaatcctttctcgcgaaacgcattttccagctacgccagtcacgccacctggtggcgggtaagtttgtcgccatcaactgcgccacgctgcgtggcgataacgccatgtcgacgctattcggccacgtcaaaggcgcttttactggcgcgcaagcggcgcgtagcggcctgctacgcgaggccgatggcggcgtgctgtttctcgatgaaattgccgaactgggcctcgatgaacaggcgatgttgttaaaagcgattgaagaaaaaagctttttcccgtttggctccgacaaagaagtgcacagtgattttcaactgattgcgggtacccaccgcgacatgcgccagtgggtcgccgatggccgctttcgtgaggatttatacgcgcgtatcaacatgtggagctttgcgctacccggtctggcgcagcgtagagaagatattgcgcccaatattgagtacgaattgcaacgtttctccagcgccagacagcagcaaatacgttttgataaagacgcgcgcgtgcgctatttggctttcgccagttcgccgcaggcccagtggcgcggaaattttcgcgagcttggcgcctcggtgacccgcatggcgaccctcgccgaacagggccgaattacgctggatgtggtcgatgaggaaatttcgcgactgagcgagagctggcagatcaacgatcctcttcccgccgtcatcgacgagatcgatctgttcgatcgccgtcagttggaaacggtgctggaggtttgccgccgcagcgcttcgctatctgaagccggccgtgagttgtttgcggtctcccggctgaaaaaggccaatccgaatgatgccgaccggttacgcaagtacctcgcccgctttggtctcagttgggaaagcctgggctaa

SEQ ID NO: 92471 - DNA, 1077 bp, Enterobacter aerogenes
atgacagcactgatacacgtactgggatcggatatcccgcaccacaaccagaccgtattgcggttctttaacgacgaactggccgccgacgcgcgggccaggacgtttatggtcgtgggtgatgcgacaggtatgcgcgaggcgtatccggcgctggaaattacctgctatccgggtaagaaatcgctggcgcaggcggtgattgccaaagcgaaagccgatcgccagcagcgcttttttttccacggccagtttaataccggtctgtggctggcgttgttgagcggcgggatccgcccgtcgcaatttaactggcatatctggggcgcggatctgtatgaaaactcagccagcctgaaattccgtctgttttatcctctgcgccgcatggcgcaagggcgggtaggacgcgttttcgccacccgcggcgatctcagctggtttgctaaccgccatccgcgagtgccgggcgaactgctgtacttcccgacgcgtatggatccgtcgctaaattcccttgccgataccgccccgcgcggtgacacgctgaccattctggtggggaactccggcgatcgtagtaatgagcatattgcggcgctaagggcgattcatcagcaatttggcgatacggtgaatgtcatcgtgccgatgggttatccggccaacaatgaagcctacattgatgaagtgcgtcagacgggagcggcactgtttagtcgcgagcatctgcagatccttagcgagaagcttgagtttgatgattatctggcgctgctgcgccgctgcgatctgggttatttcctgtttgcgcgccagcagggtatcggcacgctgtgcctgctgattcaggcgggtattccctgcgtgctcaatcgcgaaaatccgttctggcaggatatgaccgaacaacagatcccggtgctgtttaccaccgataccctggacgccaacgtggtgcgcgaagcacagcgtcagttagcgagcgttgataaaacgcaaatcgccttcttccgcccgaactatctggcgggctggcagcgggcgctacagctggcagcggaggcgcgggtatga

SEQ ID NO: 92472 - DNA, 885 bp, Enterobacter aerogenes
atgatgaaaggtattattctggcaggcggttccggtacgcgcctgcatcccatcacgcgcggcgtgtcgaaacagctgctgccaatttacgacaagccgatgatttactacccgctgtcggtgttaatgctggctgggatccgtgaaatccttatcatcaccacgccggaagatcagcgcgatttccaacgcctgctcggcgatggttccgagtttggtatccaattgcactatgccgttcagccgacgccggatggtttagcccaggcgtttatcatcggggaagcgtttctcaacggcgaaccggcgtgcctggtgttgggcgataatatcttctttggccagagctttagccctaagctgcgtagcgtcgcaacccgcaccgaaggggcgacggtatttggctatcaggtgatggatcctgagcgcttcggcgtggtggagtttgatgacaacttccgcgccttgtcgctggaggaaaagccgaaacaaccgaagtcgaactgggcggtcaccgggctttatttctacgatggaaaagtggccgagtatgctaaacgggtcaaaccgtccgagcgcggcgagctggaaattacctccatcaaccagatgtatcttgaggatggcgcgttaaccgtcgagctgcttgggcgcggctttgcgtggctggataccggcacgcacgatagtctgattgaagccagcatgtttgtgcagacggtagaaaagcggcagggctttaaaatcgcctgtctggaagaaattgcctggcgtaacggctggcttgacgatgacggcgtcaaacgcgccgcgaagcggctggaaaaaaccggctatggccaatacttgctggatctcctccgtgcccgcccgcgccagtattga

SEQ ID NO: 92473 - DNA, 1068 bp, Enterobacter aerogenes
gtgagaacgattctggtcaccggcggtgcgggctttattggctccgcggtagtgcgtgaaatcatccagcacaccgccgatcgcgtcgtggtcgtggataagctgacctatgccggcaatttgatgtcgctggcgccggtggcgcaggatgcgcgttttgcctttgaacaggtggatatctgtaaccgagccgagctggatcgcatcttccaacagcatcaacccgatacggtgatgcatctggcggcggaaagccatgtcgatcgttctattgatggcccggcggcgttcattgagactaatatcgtcggtacctatacgctgctggaagccgcgcgcagctggtggaatacgctggcggcggagcaaaaatcggcgtttcgctttcatcatatctcgacggacgaagtgtatggcgatctgcatggcagcgatgatttctttaccgagaccacgccttatgcgccaagcagcccttattcggcctcgaaagccagcagcgaccatctggtgcgcgcctggcagcgtacctacggcctgccgacgcttatcactaattgctcgaataactacggcccgtatcacttcccggagaagctgatcccgttgattattctcaacgcgctggcgggaaaaccgctaccggtttacggtaacggccaacaaattcgcgattggctgtacgtcgaggatcacgccagagcgctgtatctggtggcgacccgcggcgagccgggcgaaacttacaatatcggcggtcataacgagcgtaaaaacatcgaggtggtggaaaccatttgcgaactgctcgaagagctggcgccgcataagccgcagggcgtggcgcgttaccgcgatctgattaccttcgtcgctgaccggccaggccacgatctgcgttatgcgattgacgcggcgaagattgcacgcgagctgggctggacgccggatgagacctttacttccggtatgcgcaaaactgtccagtggtatctggcaaatgaggcatggtggcgacaggttcaggacggtagctatcagggcgagcgtcttgggctgcacggctaa

SEQ ID NO: 92474 - DNA, 2448 bp, Enterobacter aerogenes
atgggaagatcaactcgtttcaataagttattcttttatcgccgcacgacattctcgctttcaattagtttattgttgttaacgcctattctggcacagggggctgagtcgatatatgatcggcatgtgctacaggcgcgtgaaggtaattactccccttttctcgattatcttcagcaatatcaacaacaacatgctttgacgcctgagcaagtcgccgactggcttcaaattgcctcctgggctggacgtgatgaggaagtaatccaggtctggcagcgttatcaggtttatatggcgctaccggcacgcggtacggcggcagcggcacaggctttccgtaatcaaaaacggtggtcttcagcgctggcgctctgggatcaggcaattggccagcagccgatgaacgacgattatcttattggtcggattaaaacgctggccgatgcgcgccatgacgggcaggcgctaagtgaagcccgccgcttggtcgccaccacgcccagcgccgctcacctgcagacgctctcctacgtctatttacgtcagggaaaaagctgggaccagctgctcaccgatatgcgcgcgcaggaactcgcgccgcaaaacagagaaacactcaatagcctgcttgatagcctgagcagcaatcgcatcaattcgcctgcgctgcaatggtcagcgaaaaccaccttaacgcccgcgcagcagcgaaagctggaaatggacgcggcggcggagtgggtacggctggcgcacaccccggcccgcggtgaacaggagcgctttcgcctcgcgcaaacggcgctcaaccgctacgacgcgctgttcgcccgttggcgtcaggatccgctggccgcagaggatcttgcccgcgcgcgtattgaccgcctcggcgcgctatacacccgcggctattacgcccaggtcattaaggaatatcagtcgctgaccgccgctcaacagcccgtccctgactgggccatcggctgggttatctcctcttatcttgcgcaacagaacgtcgaggccgcgctggcgatcgcccgccaacatccactttaccggcctgacccgcaagatgatcagcatgaattattttacgcgctgctggacagcggccagtatcaggccgcccgcgagtatctcgctaaagtgacgaatggcgttccctacacccgccgcctttacggctcgccgacgccgcagccaaacgacccgtggctgaacgctcaatcgctgaaggtacagtatctactgagtactaacgcgctgccggaagccgaacggctctccgaccgactggccaccaccgcgcccggtaatcaggggctgcgcattgactacgcggcgatactacaggcgcgtggtttaccccgcgccgccgaacgggaactgaaagcggcggaagcgttggagccttcgaacatccccctcgaacgtcagcaggcctacgtggcgatggatcttcaggagtggcggcagatggagctattaaccgatgacctgctggcgcgcagccccgaagacctgagcacgcaaaaattagctcgcgctcgcgaggtgcaccatatgtcggaactgcgccttaacagcacgcaagggatccactcggataacccggtcagcggtagccacgactttagctgggatgcggcgatttacggcccgccaatcgccgataagtggcgacttttcgccggtaatcgcttcgccaaagggaattttgatgaaggaaaaggctccagccgccagctatttggcggcatcgaatggcgcccgcgcgatgcctgggctgaactggaaatctccaacaacaatttcgccggcgacaacaaacccggcgcccgactttccgcctggcaaagcttcaacgacagctggcaaattggcggcgaggtcgaacgtctgtcgcggcagacgccgctgcgcgcgctgcgtaacggtatcagcgccaaccgcggcgagggctgggttcgctggtatcaaaacgaacgacgcgaatatcgcttcagcgccgccgccacccgcttctccgaccacaaccgtcgtcaggaatatacattctccggcaaagagcggctctggcaatcgccaaccatcacgctcgatctggaacctgggctctccgccagcgtcaacagccgggcggataccctgtactacaacccgaaacgcgacttcgccgccacctcggcgctggtcgccgatcacgtcatgtatcagcactacgataccgtctggagccagcagcttgcggcaggcggcggcgcctactggcaaaaagcgtattcgaccggcgctatcgccatgctcggctacggccagcgtattcgctggaacaacgtgatcgacaccggcgtgatgctgaactgggacaagcgtccctacgacggcaaacgcgaaagcaatctctccattgcccttgatgcgaatttacggttttaa

SEQ ID NO: 92475 - DNA, 2016 bp, Enterobacter aerogenes
atggtcaacaaaagtatccgcatcagcctgatggttatcggctggctcctgatgacctgcgcgcttcgcgcagaaacgattccttttctgccgccggacgcgcggccgcagccggaggcgaataagccctggccacagaataagtttctggtattggcctatcacgatgtagaagacgatgccgccgatcagcgttatctggcggtgcgtaccagcgcgctcaacgatcaaatcggctggctgctgcacaatggttataaggccgtcagcgtgcaaaatattctcgacgccaacgcggggttaatcaccctgccgccaaaggcatttctgctgagtttcgatgatggctacagcagtttttacacccgggtctggccgctgttaaaagcctggaacgtcccggcactatgggcgccggtaggcagttgggtcgatacgccggagcagaaaaaagtcgatttcggcggtctgatgaccccgcgcgagcgtttcgccacctgggagatggtgcgcgagctcgcgcaatcgccgctggttgaaatcggcgcgcatacctgggcttcgcactacggtattcaggccaatccgcaaggtagccgcgaaccggcggttgccaaccgtttttatgataaggccagcggacgctacgaaagcgaccagcagtttcaccagcgcatcgataccgacgtgcgcaaagtgagcgacaaaatcgccgacgtcaccggcaaagcgccgcgcgcctgggtatggccctacggcgccgccaacggcacatcgctggctatcgcgaaaagccgcggctatcaactggcgtttaccctcggcgatggtctgggcgatgtgcgggatttggataacattccccgtctgcttatctccggcaatccgtcgatcaaggccttcgccagccaggtgacgcaaatccaggagcgtgagccggttcgggtgatgcacgtcgatctcgattatgtctacgataaagacccggctcagcagcgcaaaaatatcgataagctgatccagcgcgtctacgacatgaaaatcactcacgttttcctgcaggccttttccgatccgctcggagacggcacggtgaaagcgctctacttccccaaccgccgcctgccgatgcgcgccgatctgtttaatttcgtcgcctggcaattgcagacgcgcggcggcgtcaaagtgtatgcgtggatgccggtgctggcgttcgatctggacagtgcgctgccgcgcgtacagcgctgggatgcgcagagcaacacgctgcgccaggccactcgcccctatgtacgtctgtcgccatggaatagccaggtgcgcgatgagatccgcgatatttatcaggaccttgcccgctacgcgacctttgacggcgtgctgttccacgacgacgcggtgctgacggattacgaagatgccggcaccggggcgatggccgcctggcgggcggcgggccatcgggaggatatcgcgcagatccgccaaaaccccgccgcgctgcacgcctggacgcggtttaaaagtcaggcgcttatcgacttcacccgcacgctcagccagagcgtgaaagcgattcgcggcccacaggtgagaaccgcgcgcaatatcttcgccctgccgatcctgcagccggaaagcgaggcctggttcgcgcagaatctggatgattttctggcggcctacgactggacggtgccgatggcgatgccgctgatggaatccgttccggtcgcggaaagcgatgcgtggctggctcgtctggtgcgcgccgtcagcgccaggccgggcgcgctgaagaaaaccatttttgagctgcaggctaaagactggaccctcccgcagcagaacgccatccctgaccaacagctggttgactggatgcggacattacagctcaacggcgtcaacaattacggctactaccccgacgatttccttaataatcagcctgatatctcgaaaatcaggcccctgttttcatcgtactggtatcccaacaatgactga

SEQ ID NO: 92476 - DNA, 1653 bp, Enterobacter aerogenes
atgtcatttgctaaaagccttgctctgaccatcaacagaaaattttctgggcactttatcgccttattggcgatatctatcctcatccagctctggcctgtttttttcacgcagcccatccgatttgcattacgcatcgccatctgcaacacgcttttgttactaagcgtgtcgtggatttatcgctatacatccgggaaagtcattctctttttgttaaccagcgccctgacgcttaatttcgccatcgctttcagtacctgggatatctacaaaagcgagttcaataccgttttcgccatgagtattttggcaactaattattctgaagcgaaaagcatagccggtttgtacctctatattctgccaatagcggctttctacttcgtgattacctggtgggcggtgaagttgctcagcgagaagctatcaacgcgaaccaaaggtatcagcgttattctactcgcgctctttatgggctatttctccatctccagcatcatcaaaaagaaccaggatttagaggtttattacccgcttagttcgcgaattctggttaacactccgttgtatactgcttctgaattcgtcatcgccgatcgcgataattcactagccgaacacattacgcagtcaacgcctcactatcctgcgctacaggcacatgatacgggcatcgacacttatgttgtcattgttggtgaatccgcacgcagaagtaacatgcagctctacggtttctcccagcaaacgacaccggttgccagcgcatttacccacaacgcgcttatttttaaacacgctatcgcacctgcctccgccacggtacttgctgtacctatggttctcagcaaggccgatccggataactttaccgccgactcgatggccgataatatcgtgaatatttcccggcaatccggcttttataccgagtggatcagtgcgcagggcaactcaggaaaaagtaataactatattgtggcgatcgcctcaaccagcgaaaagcatcaatggatacatacccaatacgatagtgacctgcttcccgcgctggatgaagcattaaaagtgccgggcaaaaaagtcatttttttacatattaacggtagccatgaaatggcctgcgaccgatatccacagtccgccgcaattctcaataccggtgataaatacgaggattgctacaataacgccatccgattcaccgactcttttatcggcgaagtcgttaagcgcatacaaaatagcgcctcttctctaatttatttttccgatcatggtctggaaaaaaatcccgatctggcttcactgtatatgcacggttcccgtaatcccagtaaagaggcttatgacgtgccacagttcatttggtatagccaaagcgccctggccaaccagaaacgacgtattggctgggtaaacgaacgctggccaaccaccaacaactacgccctgatgttaagttggttaggtatcagcaccggtatcgaaaattgtgattctctcctcgagaagtgctatcaacccgaatcgcaaatttcggtcatggacggcggacggcatatattcaattatgaccagttacgcaatacattcagcgcaccggaccaaaagaccccatggcgtaaagtaaaaagaaattcgctatag

SEQ ID NO: 92477 - DNA, 1611 bp, Enterobacter aerogenes
atgatgactttacaccgcaatcttatacgtacattactgctgacggtcgcttttgccgtgctgttcgcgctgccagaaatcattatcctgttaaaggaccacgtctatagcccgaaggctggagacctctcgctttatctgattatttcgctgctggcggcggtaagtatacgcttctttatcacccgcttgctgttggcgattaccttcatcgtgcaaattagcgaagcgatttactatcagttttatggccagttctatggcccaagcgaggtatggctggcgttcgtcgaaaccaaagatatcgccagcggcattaccgacagcctcggcacgttgggaatttacttcgttatcatgtttatcgctgttgtttttgccctgttctttacgcgccgttttgcgccgcagtggcctaagctgctggccgtgccatgtctggtagcgattctggtgatgtttgtcggccagttttacaaagcgatcaacggccagatgtataagttcaacccggatctgcgtcactcgcttctgcgtaacggcctttcggccatgagctacagcgctattcgcctgataccagaggcgatttccggtgataaccagaaactaacaacctacgagccgtataaagtcacgccgatcccgcaaagccaggtcggccgctactctattattctcgctatcggtgaaagcctgaacccgcaccacattagcgcgttgggttatgaacgagataccacccctgaattgaaagcgcttatggagcaatatcagggaaccggacggctaatcgtctccaatgccgtctctactcgcgtggctattccgatgttggtcaataacctgcgcgagcctgacaactacgccgcctacaagaataaatcagcgaacatttttgttaatgcgcagaagggtggttatcaaacggcatttatctctgcccaagggctggaaggcttaagtaactggattggcatccacgcgctcaacctgtgggaagatacacaggtgcgaccggcgccagaaatcggcgctgatgtggttcttaccccctcagtagaaaaagccgatattaactgggcgaagccgttcctgatggttcttaacagccgggcgccacatatcccttacgaccgcaacattccgcagggatttgcccgcttctcaacaccggaagccggcgatgaagtcacccagaagaaaaacgagtatgatgacgcggttcgcctttacgatcgtgaactggcctcggcgattcgcacggtaatggccaagtcgaaattacccgtcctggtcttcgtcacctccgatcacggtgaacgcgtcggcgatggcggcttatttggccactctatcgtttcaatgccaatcgcgcaggttccgttcctctactttagtaacgacccggcctattcaatgcacaatattgcgcctcagatgccgttgaaccactatcaactggcaacgctgatcaacaaaatgttagggtacaccattgaaaaccctaatctgaaagatgacagttactttattactggcggcgatattcgcggtctttctgagcgtgtaacctatcatttgaatgcactccctcctgcggaacaataa

SEQ ID NO: 92478 - DNA, 972 bp, Enterobacter aerogenes
atgaataagcttaaattgcacgccgtttctcgcagcgattttatcgctaaaaattatgctgacttccagacgctgctcgataaccgggtcgatcccaacaccattccagagcgtttttattgcggaggacgcggtggctggacattccagacgacgctggccctcaattattattatggcgacgcgatagaatgctctttcggctctgaatgccgccccgatgctatcaatctgatgcataacgatgatttcggttctcgcgtcaagccctggcgaggtgtcaccgtcgtcgcgcgcgctgaccgaccaccggttatcggcgcggattatgtcgttgaccaaaatccggaagttgacggtcacagtaatcgtatcttcgtcccttattggccgcagccgggtgttcagccgcgcgagcgcacggataacactattcaaaccgtggcctatttcgggcgcgtcgatagcttcccggcggaatatcaaagcgatgaatttaaacaacgcctggctgaacaaggtattgccttgcgtatctcgttcaacaactggacagactaccgcgatgtcgatatttgtgtgagtttccgtaaatcacacgaccataagctagcgcgcaaaccggccagcaagcttatcaataactggttgggcaaaacggtaatgatttgcgacgatgaacaatcgttccgggcaattcgcgaaagcgaactcgactatctgatagctaagaatccggacgaagccttcgcagcgatcatgaagttaaagaacgaccccgagctctatcaaaagatgcgcgaacaaggggagaaacggcttcaggtctattcaagggaagccgttgccgcccgttggatggcgctttttgaagatatctggcgcaagggtttgaatgcacgttcaatgccggtccgcgccctccgctttggttttggcaaagcgattcgtcctttgaccaaaaagtactga

SEQ ID NO: 92479 - DNA, 984 bp, Enterobacter aerogenes
atgtcagacattcctgtcctgagccttatcgtcgcggtttataacggtgagaaattcctgagcgcattttttgacagcataaaagctcagcaaattagcggccttgaaatcatcgtcgttaatgacggttcaacggacaactctgcttctgttatcaaccactacgccggtgagtttgcccagttccacgtcatcgatcaggccaacggcggcgtgtccgcggcacgtaatagcggtcttgcggtagcgcggggagagtatgtcgccttccccgatatcgatgacgtaatctacccggggatgtattcccgtttactggagatcgcccaccagaacaaccttgacgtcgctacctgtaacggtaattacatttatgatgatgggcgtcccagcaaaaaaatattcccttcagaccgtcttgcgtccactggcgtccttgaggggccggattggctaaatatggcgctggagtcgcgcaagtttttgcacgtcacctggctaaatatttatcgccacgcgctgattaaagaaaataatttttctttcgaaccggggctacgccatcaggatattccctggacgaccgaaatactgctggtagccaaacgcgtgcagtacatcgatgaagtcttttatgattatctgatccactcagcttcggtatcccatacccctggtaccgacgatacgcggatgcgctcttcacgtcactatatgaaaatactgacaatgctggatgccattaatcagcgctacccggaacaggtgaaacgcgttcccggctgtcattggcaaatcgctaaagagggtttaggtattctgcatagcatcaataatatcgaagacctcgccaaaaaaagggaaattacgcaagaactctttgaccgcggcatctggtcgatgatctggaaaaatgcgcgtggattacgcctccgctggcgtctgggacgtcgttattttcgtttaaaaaaactggtcaaataa

SEQ ID NO: 92480 - DNA, 1332 bp, Enterobacter aerogenes
ttgtacgtcctggcattatgttttgtctggccgattcctaacgaccaactccttttcaaccgcaatggttttatctacaccattattttatgcagtttcggcctattctttaccagccgcaccgctcgccagaagcttgatacacaccaaataaagtttgtattgattaccctctggctactaacgctttatatcttgttcaacggcctgttcgtcgccccggatctaaaagaaatggtcggtacctgggatggacaatggctgcgcccggtcctgctgttttgttccggtctgattctgatgccggtactgcaaacccagttcccttccctaaccagcgcacggctgttcacactgatcgtgctgtgtttctggggcgtgatttgtattcatctcctggattccgcctggctgtactggcgcgatggctatatccactggggcgaaacgcggattgtttataaccgcacccgtatgagcttccaggtcaatatgataaccggcttcctgctggcggaattactggcccgagcgttaatcaaaaaacgcttcctgtgtctgaataccccgatcgttacgctgttgttgatctctaacctcatctgtaccgcactggttgatacgcgctggggcacaatagggctggtcggcagcctgttctcgacctttatcctgcttagcctgaacgcccagcgccgcagccgcgtcgtacttactttaggcctgttagtcgctctgttctgctccgcgattttcctcggttacgcctcctggaaaaccgatccgcgctggcagagtctggaaagcgatgcggtcgctggctggaacgcgccatttaccagcttctgctataaccgcgttgacggcactatcccgctcaacgcccagggtaaagagatcgatcactctaacggctgccgagccagcttcttccatcaaggctggaagcttgttggcgagcacccggcaggaattggccctcgcaaagaggcgtttcgctatattctgcgtcgcgatactcaggatatgcatattacgattccgcacagccattatgggctaatcgaatttggcctgcagaacggcgtggtcgggattgccggctggcttatcttactggcgggctgctggtatatcggctggcgtgaattccgccatggtaaaactatggttgggttattcctgctgctgtttaccatcggcttcttctcgcgaaccatggtcgaccacaatctcaaagaccattatctcgagcaatatatgatgttgactggtttgctcatcggcatcgccgcgctgcgaccgcgtgagaattattcgccaaacgactaa

SEQ ID NO: 92481 - DNA, 1104 bp, Enterobacter aerogenes
atgcacatcgttcacactgaagccgatggcggcaagggcggccagcctctgcgcatcattaatgaatcgttaggtatggtggcccggggtcacaccgtgaccatactgtgcccggaatctgcgccgttgcatcagatggcgcaggcggcaggattaaccgtcgtcacgatgccattaaagcgtaaaaatctgagtaatctgatgcggctgcggcgctggctgttggaacagggtaataatattgatgttattaacagccataactcagccgatacctggctggtggcgttggctaacttgactctggcaaatcctattccgttagtacgtacgcgccatgcctccggcgtcccgcgtaataactggacaacgcgttggctgtttcgcaccgcctgtgcgcacatcgttacgactggcgaagcgcttcgtcatcaaatgacggcactgggcgtaccgcttgaacaaaccacttcagtaccgagcggtgtggatacgcagcgtttctatcctgatgacaaatatgatgcccgagcgtattgcgagctctcgcagaacgatttttggctaggtgtcgtatcgcatctgcgccctaacaaaggccacagcgtgttgctgaaagcgttagcgcaaataaacgatcccacggtgaagctggcgattgtcggtgaggggccgcaccgtgaggccctggaggagcagattattcagctcaatctgctatctcgtgtggtgatggcaggacatcgccctgacccgcagcgctggttcccggcttttgatgtggcaattagtccttctcatgatatggaaggcgtgccgcagggggtcttacagtctctggcttcgcggatagcgacgattgctactgatgctggtggtactggtgatgcggttatcgaccgccggacggggttacttattgcgcagaatgatgttgatgcgctacgggaagcgatcgttactctctatcaggacgcatcactgcgccgccagttagcggagcagggctatgagtatctcacaacccattttactcgcgaatgtatgttagaggcgatggaaagcgttttccgctcggcggctcagcgtaaaagatcgcgataa

SEQ ID NO: 92482 - DNA, 1113 bp, Enterobacter aerogenes
atgatgaaactggctatcgttcgccaaacctggaaccctaacggcggcgcagagcgttttgtctcgcgcgcgcttaacgtgttagcgcaggattccgcgctggacgtcacgctgatcgcccgctcatgggaggagtcggcaaactggaaaacgttgacggtaaatcctcctttccgtaaccgcacggtacgtgaacgcggcttcgctcaggccgctgccgctcatttcgcagactttgatatcgtacagtgccatgagcgcatccccggtgcgacgatcttccgcgctggcgatggcgtgcacgcggcctggcttgagcaatataaccgtatcctttcgccgctctctcgtctggcgcagtcctttagccattaccatcgctatattctcagcgctgagcgggagatgttcacacaccccgcgttacgcaaagttatctgtaattcaaaaatggttcgcgatgatatcgcgcgccgctttcaactcgccgacgatcggctaaccgttatctacaacggtgtcgataccgcgcattttcatccggacgttaaagcgttgtccctgcgtagctcactggggatccccgagtcagcgccggtactggcctatgtcggatcaggattttcgcggaaaggcgtcgcgacagcgctgcgcgccgtcgccgctcatgctgacgtttggttgctgatcgccgggcgcgataaacatgcgcatcgttttagcgcgctggcgaagcggttgaagattaccgatcgcgtcaaatttctcggtccggtttccgatgtacgccaggtatatggttcggccgacgctctgatcttacctacgttgtacgatccattccctaacgtctgcgtcgaggctatggcctgcggactaccgctgctaaccagtttcggctgtggcgcagcggagtggattgaacaaggcatcaacggctgggtatgcgatgcgctcgacgtcattggctatcaggatgccatcggcgaatggttaaagggccgcgagcgcaacgttgattttgcggccaacgcacgcgccaccgccgccccctatacgcttgaacgcatggcggaagaactgcaggcgctttatcgcgatcttttacgctga

SEQ ID NO: 92483 - DNA, 1101 bp, Enterobacter aerogenes
atgtctgattttttttcagagcaacgtccgcctaaacgcgtgctgatcatcaagcttcgccaccatggcgatgtacttttaacatctccagtctttacggtaatgaaaaaaaactggccagacgccgaagtggatgccctggtgtatgacgatactcaggcgatgttgaccagtcatccgtatattaatcaggtgcatacgattggccgccagtggcgaaaaaaaggctggctcgcgcagtttcgcttatatcgcgaactgctcaatacgctaaaagcgcgtcagtatgacgtgttgattaacctgaccgaacactggcacggcgcgcgtctggcgcgtcgcctgaagccccgcgtgtcggtcggtttcaaacccgataagcgcagcggcctggcgcgtcgtcgttgggtaaaatcatttaccacgctgtatccggcgattcaggataactctcgtcatatggttgaggtgaatctcgatgcgttgcgccgtatcggtatccacccgcaaaacgcggcggacaaaaatacgctctttgtaccaggagaggcggcagagaaatcgatcgctgaaaaactcgacgccttcggccttagcagtaaatcctatattctggtgcacccgacctcgcgctggatgtttaaggcctggcaaatcgacaaactggcaaggaccattgacaccctggccgctcgcggattgcctgttattctttctgccgcgccgtcgaaagaagaaacggcctacatgaacgagttacgcgccgctctcacccagccggttttcgatttgagcggacagttaaatctgaaagagcttggcgccttgatgaagcacgcccgtctctacttcggcgttgattcaatgccgatgcatttagccagcgcggtcggaacgccgacggtggccattttcggcccaaccggcgctatcaagtggtcgccgtggggcgtgccatatcgtgtgattaccgccgggtttacctgccagccgtgcggcaaagccggctgcggcgacagtcaggtttcggactgcatcactgctattactccgcagcaagtcctgagcgcgattgacactctgttactggaatctccatga

SEQ ID NO: 92484 - DNA, 1059 bp, Enterobacter aerogenes
gtgcgcgctgataaatcacttaagccatttgagatccgtctgtatcgtcattaccgaattgtgcacggtatccgcatcgcgctggcttttgtcctgaccttcctgctggtgcgtctgctgaacgtgccggagggcacctggcctctgatcaccctggtggtggtgatggggcctatctctttctggggcaatgtggtgccgcgggccttcgaacgtattggcggcactatcctcggttcggtactggggctggtggcgctcaaactcgagcttatctcactgccaatcatggtgctgtggtgcgcggtggcgatgttcctttgcggctggttggcgctcggcaagcggccctatcaggcgctgctgattggcattacgctggcggtggtggtgggcgcgccgccgggcgatatgaacaccgcgctgtggcgaagcggcgatgttatcttcggttcactgttggcgatgctgtttaccggtatctggccgcagcgggcgtttttgcactggcgcatccagatggcgaattatgtcacaacgtttaatcggctgtatcaggccggtttttcgccaaatctggttgagcgcccgcggctggaaaaacatcttcagaaagcgctcaatgatgtggtgaaaatgcgtgggttgataaccccggccagcaaagaaacgcatattcagaaagcaatcttcgaagccattcagaccgtcagccgtaatctggtatgcatgctggaactgcagatcaacgcttattgggcctctcgtcagggccattttgtgatgcttaacgcccagactttgcgtgaaacccaacagatgactcagcaaacgttgctgacaatcgcccatgccctgtatgagggaaacccgcagccggtacgcgccaacaccgagaagctcaacgagatcgtggttgagttgcgacagcttatcaaagagcatcagggcgataatctgtcggaaacgccgattcacggctatgtttggctgaccattgagctggcgcgccagcttgagctgctgtcgcaccttatttgccgcgcgctgcgcaaataa

SEQ ID NO: 92485 - DNA, 1443 bp, Enterobacter aerogenes
atggataacgaatcgattatgcaagacagcgccaatcagcctggatttttattccacgactacgaaaccttcggtaccagcccttcgctcgaccggccggcgcagttcgccgccatccgtaccgatagcgatctgaatgtcattggcgaaccggaagtcttctactgcaagcctgcggacgactacctgccgcaaccacaggccgtgatgattaccggaattacgccacaggaagcgctggccaaaggcgacaacgaggccgctttcgcccgccgcatcaacgatctgttcacggtgccgaaaacctgtatcgtcggctacaacaatgtccgctttgatgatgaagtcagccgtaatattttttaccgcaacttttacgatccgtacgcctggagctggcagcatgataattcgcgctgggacctgctggatgtgatgcgcgcctgctatgccctgcgcccggaaggtatcaactggcctgaaaatgaagacggtctgccaagcttccgccttgagcatctgaccgtcgcgaatggcatagagcatagcaatgcccacgatgcgatggccgatgtgtacgccactattgcgatggcgaaactggtgaagacccatcagccgcgcctgtttgactatctgtacagtcatcgaaataaacgcaagctggcgacgttaatcgacgtgccgcagttgaaaccactggtccacgtttccggtatgttcggcgccgcccgcggcaacactagcctggtcgcgccgctggcctggcatccggataaccgcaatgcggtgattatggttgacctggcgggggatatgtcgccgttgttggagctcgacgccgatacattgcgcgagcgcctgtatactccgcgagacgaactcggcgatttaccggcagcgccaattaagctggtgcatttaaataaatgcccggtgctggcgcaggccaatacgttgcgtccgcaggatgccgaccgtttaggtatcaatattcagcgctgcctggagaacgcccaactgctgcgtgcaaatccgcaggtacgtgagaaagtggtagccctgtatgccgaagccgaaccgttcgtgccatcggataatgttgacgcccaactgtacaacggattctttagcgatgccgatcgcgcggcgatgaagatagtgctggaaaccgaaccgcgtaacctgccagcgctggatattacgtttgcggataaacgcattgaacgcctgctgtttaactaccgcgcgcgtaacttccccggtacgcttgatgaaaacgaacagcagcgctggttagagcaccgccgtaacgtctttacgccggagtttttgcaggcctatgccgatgaactgcaggtgatgtatcaacagtatgctgacgatagtgaaaaacaagccctgttgaaagcgctgtggcaatatgcgcaggaaatcgtttaa

SEQ ID NO: 92486 - DNA, 1359 bp, Enterobacter aerogenes
atgtcgcataacgctactccaaatacctctcgcgtggaattacgtaaaacccttacgttagttccggttgtaatgatgggcctggcctatatgcagccgatgacgctgttcgatacgtttggtatcgtctctggtatgaccgacggtcacgtgccgacggcctacgcctttgcgttaatcgctattctttttactgcgctgagctacgggaagctggtacgccgttatccttccgcgggttccgcgtatacctacgcccagaaatccattagcccgaccgttggcttcatggtgggttggtcctctctgctcgactacctgttcgcgccgatgatcaacatcctgttggcgaaaatctactttgaagcgctggtgccttcgattccatcgtgggtgtttgttatcgcgctggtcgcgttcatgaccgcctttaacctgcgcagcatcaagtccgtcgccaacttcaacaccgttatcgtggtgctgcaggtggtactgattgccgtgatcctcggcatggtggtatatggcgtatttgaaggcgagggcgccggtacgctggccagcagccgtccgttctggtccggcgatgcgcacgttatcccgatgattaccggggcgacgatactctgcttctcatttaccggctttgacggcatcagcaatctgtctgaagagaccaaagatgcagaacgcgttattccgcgcgctatcttcctgactgcgctgattggcggcctgatcttcatttttgccacctacttcctgcagctgtacttcccggatatctcgcgctttaaggatccggatgcctcacagcctgaaattatgctgtatgtggcgggtaaagccttccaggtgggcgcgctgatcttctccaccatcaccgtgctggcttccggtatggctgcgcatgcaggcgttgcgcgtctgatgtacgtgatgggccgtgatggcgtattcccgaaaagcttcttcggctacgtgcatccgacctggcgcaccccggcgatgaacatcatcctggttggcgcgatcgcgctgctggcgattaactttgacctggtgatggcgactgcgctgattaacttcggtgcgctggtggcgttcaccttcgttaacctgtcggttatctcgcagttctggatccgcgagaaacgcaacaagacgctgaaagaccacttccagtatctgttcctgccgatgtgcggcgctctgaccgtgggcgcgctgtgggttaacctggaagagagctcgatgatcctgggtctgatctgggccggtatcggtctgatttacctggcgtgcgtaaccaaaagcttccgcaacccggtaccgcagtacgaagacgttgcgtaa

SEQ ID NO: 92487 - DNA, 1116 bp, Enterobacter aerogenes
ttgagagttctacacgtctataagacctactatcccgatacctacggcggtattgagcaggtcatttatcagctaagtcaaggctgcgcccgccggggaatcgcagccgatgtttttacttttagcccggacaaagagacaggtcccgtcgactacgaagaccatcgggtcatttataataagcagctttttgaaattgcctccacgccgttttcgttgaaagcgttaaagcgttttaagcagattaaagatgactacgacatcatcaactaccattttccgtttcctttcatggatatgctgcatctctcggcgcggcctgacgccagaacggtggtgacctatcactctgatattgttaaacaaaaaaggttaatgaagttgtaccagccgctacagcagcgattcctcgccagcgtagactgcattgttgcctcgtcgccaaactacgtggcctccagccagaccctgaaaaaatatcaggataaaacggtagtgatcccgtttggtctggagcagcatgacgtgcagcacgatccgcagagggttgcgtactggcgggaaaccgtcggcgataatttcttcctcttcgtcggtgctttccgctactacaaagggctgcacattctgctggatgcagccgagcatagccggctgccggtggtgatcgtcgggggcgggccgctcgaggcggaagtgcgtcgtgaagcgcagcagcgcgggctgagcaatgtggtgtttaccggcatgcttaacgacgaagataaatacattcttttccagctctgtcgtggcgtggtattcccatcgcatctgcgctctgaggcgtttggcattacgttgctggaaggcgcacgttttgccagaccgctgatctcctgtgagatcggcaccgggacctcattcattaaccaggacaaagtgaatggatgcgtgatcccgccgaatgatagtcaggcactggtggaggcgatgaatgagctctggcataacgatgagaccgctagccgctatggcgaaaactcgcgtcgtcgcttcgaagagatgtttactgccgaccatatgattgacgcttacgtcaatctctacactacgctactggaaaggaaaccctga

SEQ ID NO: 92488 - DNA, 1158 bp, Enterobacter aerogenes
gtgtcatttattatgaaaattatttttgctactgagccaattaaatacccattaacgggcatcggtcggtattccctggagctggttaagcggctggcggttgcccgtgaaatcgaagagctgaagctgtttcacggcgcgtcgtttatcgatcagatcccccaggtggagaataaaagcgataccaaagccagcaatcatggtcgtctgtcggcgtttctgcgtcgccagccgctgctgattgaggcgtatcgcctgctgcatccgcggcgccaggcgtgggcattgcgcgattacaaagactacatttaccatggtcccaatttctatctgccgcatcgcctggaacgcgctgtgaccacgtttcatgacatctctatatttacctgcccggaatatcatccaaaagatcgggttcgctatatggagaagtccctgcacgagagcctggattcggcgaagctgatcctgaccgtctccgacttctcgcgcagtgaaatcatccgcctgttcaactatccggcagagcggatcgtcaccaccaagctggcctgcagcagcgactatattacgcgcagcccggcggagtgcctgccggcactgcaaaaatatcagttgtcatggcaggggtatgcgttatatatcggcaccatggagccgcgtaaaaatatccgcggtctgctgcaggcctatcagctgctgccgatggagactcgcatgcgctacccgctgatccttagcggttatcgcggatgggaagacgatgtgctgtggcagttagtcgagcgcggtacgcgagaagggtggatccgttacctgggctatgtcccggatgaggacctgccttatctgtacgcggcggccagaacctttgtttatccctccttctatgagggattcggtttacctattcttgaagcgatgtcttgcggtgtgccggtagtatgttcaaatgtcacttctttgcctgaggtggttggcgatgccggcctcgttgccgatcctaatgatgtagacgcgattagcgcgcatattttgcagagcctgcaggatgatagctggcgggaaatcgccaccgcgcgcggtcttgcccaggcgaaacagttttcgtgggagaactgtacgacccagaccattaacgcctataaattactctaa

SEQ ID NO: 92489 - DNA, 3642 bp, Enterobacter aerogenes
atgcgtattgtcatagatttacaaggtgcgcagacagaaagccgctttcgtggcatcggtcgttatagtattgctatcgccaaagctataatcagaaataacatacagcatgagattttcatcgcactatccgccatgctggatgagtcgattgcggatattaaggtgcaatttgccgatctcctgccagctgaaaatatagtcgtctggcatgccgcaggccctgtgcgagcgatggaccaaggtaatgaatggcgtcgggagagtgcggaattgattcgggaagcgtttcttgaatcattgcgtccggatgtcgttttcattacgagcttgtttgaaggtcatgtcgacgatgcggccacatcggtacacaaatttagtcgtcagtataaagtagccgtgctgcaccacgatcttatccccctggtgcaggcggagacctatctcctggacgatgtattcaaaccctactatttgcagaaagttgaatggttaaaaaacgctgaccttttattgaccaactcagcttataccgctcaggaagcgatcgagcatctacatttgcagggcgatcatgtacagaatattgcagccgcagccgaccctcagttttgtatggcggaggtgacaacgagcgaaaaagagactgtccttggccattacagtattcagcgcgagttcgtgttgtatgcgcctggtggatttgactcaaggaaaaactttaaacggttaattgaggcctatgccgggctcagtgatgccttacgtcgcactcatcaactggttatcgtcagtaaactttccattggcgatcgtcaatatctggaatccctggcatcaggtaatggtttacagcagggcgaactagtactgactggttatgtgccggaacatgagctgatccagctctatcgcctgtgtaaactgttcatctttgcttctctacatgaaggttttgggctgcctgttctggaagcaatgtcgtgcggtgcgccggccgttggctcaaatgtcacaagtattcctgaagtcatcggtaatcctgaagcattattcgacccatattctgtctcttccattcgagaaaagatcgcgcaatgtttgactgatgatgcattcctggcgcgtctgaaagaaatggcgcagcagcaagcgcgtaatttctcttgggataaagcagcggtgactgctctggaagctttcgagaagattgcgacagaatacactggtatcgcgcaggttttgcctgaagcattgattcagaagatccttgctatttctcatgggcaaccagatgagcgcgatctgcgcttgtgcgcaacggccattgattacaatctgaagacggctgaactttatcaaattgacgataaggcgctgacctggcgtgtggaaggtccattcgatagctcatatagtctggcgctcgtcaaccgggaatttgcccgggcactctcagccgatggcgtagaggtgttattgcactccactgaaggaccgggggattttgagccggatgcctcgtttatggcacagccgaaaaataacgatctcttggcattttataatcaatgccgtacccgcatgagtaacgaaaagatagatattcttagcagaaatatctatccaccgcgggtttcggaaatggatgccaaagtaaaactccttcactgttatgcctgggaagaaacgggatttccacagccatggatcaatgaatttaaccgggaacttgacggagtgctgtgtacttcggaacatgttcgtaaactattgattgataatgggctgaatgtgcccgcattcgttgtcgggaatggctgcgaccattggctcaatacctcggccgaaacgacaaaaaatgtggatgacggaaccttccgtttcctgcatgtctcttcgtgtttcccacgcaaaggggtacaggcaatgcttcaggcctgggggagggcattcactcgtcgtgacaatgtcatcttgatcattaagacatttaacaatccgcacaatgaaattgacgcgtggctggctcacgctcaggctcaattcgcggaatatcccaaagttgaagtgatcaaagaagatatgtctgccagccagcttaaggggctttatgagagctgcgatgttttggttgctccaggttgcgccgaaggctttggcttacctatcgctgaagcaatgcttagtgggctaccggccatcgtcaccaactggagcgggcaacttgattttgttaattcacaaaattcatggctggttgattatcattttactcgggtaaaaacgcactttggtctgttttcctcaacctgggccagtgtggacattgacaacttaacggatgcgttaaaagcggcagtctcgaccgataaatcagtgctgcgtggcatggccgcttctggacgcgagcttattctgcagcagtttacctggaaagctgtggccgatcgttcttgtcaggcggtcaagactctgcgcgcgcatattgatattgctcagcatcgggcgcgtattggctggttgacgacctggaacacgaaatgtgggatcgcaacctattcccagcatctggtggagaatgcaccgcatggcgcggatgttatttttgctccacaggtcaatgctgaagatcttgtgtgtgcagacgaagagtttgtactgcgcaactggattgtaggtaaagagaataactatctggaaaacctccagccacaaattgatgccctgcgacttaatgtaatcgtgatccagttcaattatggattctttaatcatcgcgaactgtcggcctttattcgtcgccagcatgacgccggtcgttcagttgtcatgacgatgcactcaactgtggatccgcaggaaaaagagccgacctggaatttccgtcttgccgaaatggcggatgccctggcgctttgtgaccgattgttggtgcattcaattgccgatatgaaccgccttaaaggtttaggcctaaccgataatgttgctttattcccgcacggtgttatcaactacgctgctgggagcgccgcgcgtcaacagcaggctttaccgttaatcgcgagctatggcttctgcttaccgcataagggcctgatggagctggtagaatccgtccatcgcctcaagcaggccgggaaaccggttcgtttgcgtctggttaacgcggagtatccggttggagaatcacgcgatctggtggcagaacttaaagcgttagctcagcggctaggagttaccgacctcattgagatgcataatgatttcctgccggatgcggaaagtttgcggctgctctcggaagctgaccttctgatttttgcttatcagaataccggggagtctgctagcggggcggtacgatatggtatggcgactcaaaaacctgtcgcggttacgcccttggcaatatttgatgatttggacgatgcagtctttaaatttgatggatgcagcgtcgatgatatcagtcagggaattgaccggatcctgcattccatccatgaacaggacgcctgggcgactaggactcaacaacgtgccgatgcatggcgggaacaacatgattattatgctgtttcacgccgcctggttaatatgtgtcaaggcttagctaaagctaaatattttaaataa

SEQ ID NO: 92490 - DNA, 1278 bp, Enterobacter aerogenes
atgggttcgtcgttttatcgttcatttgaagaacgacacagaggttcggttgaagatatcaagagccgcctgagtttttatttaccttttctctcacgtctgaaggaaatttatcctgatggcgtgattgcggatattggttgcgggcgtggcgaatggctggagatcctgactgaaaatggcattgcgaacatcggcgtcgatctcgatgatggcatgctagcgcgtgcccaggaagccgggctgaatgtgcagaaaatggattgtctgcagtttctgcaaaatcaggcggatcagagcctgatagcgttgaccggttttcatattgcagagcatttgccttttgaggtactgcagcagctcgtcatacataccttgcgggtgctgaaacctggtggtttactaatccttgaaacgccgaatccggagaatgtaagcgtcggcacctgttcattttatatggacccaacgcataatcaccctctgccgccaccactgcttgagtttttacctattcattatggttttagccgggcaattaccgttcgtctccaggaaaaggaggctcttaaatctccggatgccgccgtcaatttggtcgatgtacttaaaggggttagcccggactacagcatcattgctcagaaaaccgcgtctgaagatattcttgaacgctttgaaatcctgtttacccaacagtacggcctgacgctagatgccctgagcaaccgttacgatgagattttgcgcaaacagttttcgtcctatgcctcacggctggagacgttgaaccatacctatacgcgccagataagcaaaatgtcggagactattcagacgttgcaaggtcaggttgacgaactgagccatgtcatcggtcagaatcatcagcttcatcagcaaatggcggacttacataacagtcgttcatggcgtatcactcaaccactacgctggttatctttgcaacgtcaattattacgtcaggaaggggcgaaagtgagagcccgtagggcggtgaaaaaaatattgcgcaaaggaatggcgctctcgctggtctttttccatcgctatcctaagtcaaaggtttatctgtttaaggttttgagaaaaacaggctgctacacattgctacaaagtttgttccagcgggtcatgctggtgcactctgacacgatgatgatgcagtccagaagatatgatgtggatactgatgaaatgacaagtcgcgcgttgagtatttataacgaactaaaaaataaaaatacggagaaataa

SEQ ID NO: 92491 - DNA, 1215 bp, Enterobacter aerogenes
atgagttatatcagagtaaagaatgtcggtaaggcttatcgccagtatcattcaaagaccgggagactgatcgaatggttatcccctcttaatactaaacgccataatctgaaatggatcctcagcgacattaattttgaagtggctccaggcgaggccgtcggtattatcggtatcaacggtgcgggcaaaagtaccctgctaaaactcattaccgggacttccaggcctacgaccggagaaattgaaatctctgggcgtgtcgctgcattactcgaactggggatggggtttcattctgatttcactggccggcagaatgtttatatgtctgggcaactgctggggttatcctctgaaaaaataactgaactgatgccgcaaattgaagagtttgcggagattggtgactatatcgatcagcctgttcgtgtctattccagtggtatgcaggttcgattagctttcagcgtagcgacggctatccgtcccgatgtgctaattatcgatgaagcattatctgttggggatgcgtatttccagcataaaagctttgagcgtatccgaaaatttcgtcaggaaggtaccacacttttgctggtgtcccatgataaacaggcgatacaaagcatttgcgaccgggccattttgttgaataaaggccacattgagatggaaggcgaacctgaagcagtgatggattattacaatgcgcttctggccgataagcaaaatcagtccattaaacaagttgagcacaatggtaaaacgcaaactgtttcaggcactggtgaagtgactatctctgaggttcatcttcttgatgaacagggtaatgtgactgaatttgcctcagtagggcatcgtgttagcttgcaggtcaacgttgaggtcaaggacaatattcctgagcttgtcgtcggatatatgattaaggatcgactagggcagccgatttttgggaccaatacgcatcatctcaaacagacgctcatctccctgaagaaaggagaaaagcgttcgttcttattctctttcgatgcgagattgggggttggatcctattctgtcgctgttgcgttgcatacttccagtacgcacctcggcaaaaactatgaatggcgcgatctggccgtggtattcaacgtcgttaacacggaacaacaagagtttgtcggcgtgtcctggttgccacctgaactggagatttcttaa

SEQ ID NO: 92492 - DNA, 795 bp, Enterobacter aerogenes
gtgagagatttactaacgacgatttatcgttatcggggatttatctggagcagtgttaagcgtgattttcaggcacgctatcaaaccagtatgttgggagcgttatggctcgttttacaaccgctctctatgatcttggtttataccttggtcttttccgaggtgatgaaggccagaatgcccgacaacaccgggccgtttgcctatagtatttatctctgttcaggggtgctaacctgggggctatttacagagatgctggataaaggtcagagcgtattcattaataatgctaatttgatcaagaaactaagttttccgaaaatttgtctgccgatcatcgtgacgttatcagcagtgcttaatttcgcgattattttcagcctgtttctgatctttatcattgtcactggtaacttccctggctggctgtttttctcagtgataccggttctgcttttgcagcttctgtttgccggtgggctgggtatgatcctcggagtgatgaatgtctttttccgggatgtggggcaactggttggagttgcactgcaattttggttttggttcactcccattgtttatgtactgaattcattaccggcatgggcgaaaaatctgctgctctataatccgatgactcgagtcatgcaatcttatcagtccatcttcgcctaccatcaggcgcctaactggtattcgctatggccagtattggctctcgccattattttctgtgtcatcggttttaggatgttccgcaaacatgcggcagatatggtggatgaattataa

SEQ ID NO: 92493 - DNA, 1377 bp, Enterobacter aerogenes
atgacacagttaacatgctttaaggcttatgacatccgtggtgaactgggcgaagagctgaacgaggatatcgcctaccgtatcggccgcgcctacggcgaatttctgaaacccgggaagatagtggtggggggcgatgtgcgcctcaccagcgagtcactgaagctggcgctggcccgagggctgatggacgccggcaccgacgtgctggatatcggcctgagcggtaccgaagagatctactttgccaccttccacctcggggtggacggcggtatcgaggtgaccgcgagccacaacccgatgaactacaacggcatgaaactggtgcgcgagaacgcgaagcccatcagcggcgataccgggctgcgcgatattcagcgcctggcggaggaaaaccagttcccgccggtggatccggcacgtcgcgggaccctgcgccagatttcggtgctgaaggagtacgttgaccacctgatgggctacgtggacctggcgaacttcacccgtccgctgaagctggtagtgaactctggcaacggggcggcggggcatgtgattgatgaggtggagaaacgcttcgcggcggccggggcgccggtgacctttatcaaggtgcatcaccagccggacggccatttcccgaacggtatcccgaacccgctgctgccggagtgccgtcaggacaccgccgacacggtgcgcgcgcatcaggcggatatggggattgcctttgacggcgacttcgaccgctgcttcctgttcgatgacgaggcgtcgtttatcgaggggtactacattgtcggcctgctggcggaagcgttcctgcagaagcagccgggggcgaaaatcattcacgacccgcgcctgacgtggaacacggtggacattgtgacccatagtggcggccagccggtgatgtcgaagaccgggcatgcgttcatcaaggagcggatgcgccaagaagacgccatctacggcggtgagatgagtgcgcaccactacttccgcgacttcgcctactgcgacagcgggatgatcccgtggctgctggtggcggagctgctgtgcctgaaaaacagttcgctgaaatcgctggtggcggaccgccaggcggcgttcccggcgtcgggagagatcaaccgcaagctggggaatgcggcggaagcgattgcccgcatccgggcgcagtatgaaccggcggccatcgacatcgacacaacggatgggatcagtattgaatatcctgagtggcgctttaacctgcgcacgtccaacacggagccggtggtgcgtctgaacgttgagtccagagcggatactgcgttaatgaatgagaaaacgaccgagctgttacacctgttaagcggggaataa

SEQ ID NO: 92494 - DNA, 1416 bp, Enterobacter aerogenes
atgttacttcctgtagttatggctggtggtaccggcagtcgtctctggccgatgtcccgcgagctttatccaaaacagttcctccgcctgtttgggcagaactctatgttgcaggaaaccatcacccgactctcgggccttgaaatctatgaaccgatggtcatctgtaacgaagaacaccgctttctggtggccgaacagttgcgtcagctcaacaagctgtcgaacaacattattctcgagccggtcgggcgcaacaccgccccggccatcgccctggcggcccttcaggccacccgccaaggagatgatccgctgatgctggtgctcgctgccgaccatatcatcaataaccagccggtcttccacgacgccattcgcgtcgccgagcagtatgccgatgcaggccatctggtcaccttcggtatcgtgccgaacgccccggaaaccggttatggctacatccagcgcggcgtggcgctctccgacagcgcccacaccccgtaccaggtggcccgcttcgtggagaaaccggatcgcgagcgtgctgaagcctaccttgcctccggggagtactactggaacagcggcatgtttatgttccgcgccaaaaaatatctctccgagctggccaaattccgcccggatatcctggaagcctgccaggccgcggtgaatgccgccgataacggcagtgacttcatcagtatcccgcatgacattttctgcgagtgcccggacgagtccgtggactacgcggtgatggagaaaaccgccgacgcggtggtggtcggtctcgatgccgactggagcgacgtcggctcctggtccgccctgtgggaggtcagcccgaaagacgagcagggcaatgtcctcagtggcgacgcgtgggtgcacaacagcgaaaactgctacatcaacagcgacgagaagctggtggcggccattggcgtggagaacctggtgattgtcagcaccaaggacgcggtgctggtgatgaaccgcgagcgttcccaggatgtgaagaaggcggtcgagttcctcaagcagaaccagcgcagcgagtataagcgtcaccgcgagatttaccgcccctggggccgctgcgacgtggtggtccagactccgcgcttcaacgtcaaccgcatcacggtgaaaccgggaggcgccttctcgatgcagatgcatcaccaccgcgccgagcactgggtgatcctcgccggtaccgggcaggtgacggttaacggcaagcagttcctgctgaccgagaaccagtccacctttattcccattggcgctgagcacagcctggaaaacccgggccgtattccactggaagtgctggagatccagtcggggtcttacctcggcgaggacgacattattcgtattaaagaccagtatggtcgttgctaa

SEQ ID NO: 92495 - DNA, 1005 bp, Enterobacter aerogenes
atgaaatatttagtgactggtgccggcggatttatcggatttcatgttagtcaacgtcttttaaaagatggccatcatgtagtagggattgataatcttaacgattattacgatgtaagtctcaagcaagcacgtttgaatctcttacaatcttctttgttcacttttcataaaatggatcttgccgatcgtcctcaaatggaacagctttttgtttctgagaaatttgaccgcgttattcaccttgctgctcaggcaggcgtccgttattctcttgaaaatcctcatgcttatgcagactcaaacctcatgggcttcctgaacattctagaaggttgtcgccataataaggttcagcacctgatctatgcgtcctcaagttctgtttatggattgaaccgtaaaatgccgttctcgaccgatgattcagttgatcatcctgtatcactctatgcggcaacaaagaaagccaatgaactgatggctcatacctacgcacatctctacgggattccaactactggtcttcgtttctttactgtttatgggccatggggccgtccagatatggcgttatttaaatttactaaggccatgttggaaggaggcagtattgatgtttacaatcatggcaagatgaaacgcgacttcacttatattgatgatattgttgaggctattattcgtttgcagaatgtcgttccacagcctgatcctgactggactgtcgagagcggctctcctgcgaccagttctgcaccatatcgcgtttataatattggtaatagttcaccagttgaattaatggactacattacagcactggaagatgctttaggtatcgaagctaagaaaaatatgatgccgatgcaacctggcgatgttatggaaacaagtgctgatactgccgatttatataatacgattgactttaaaccagagacttctgtgcgtaaaggcgttgaaaactttgtgtgctggtataagaaatattatcaatattga

SEQ ID NO: 92496 - DNA, 1167 bp, Enterobacter aerogenes
atgaaaattactatttcaggtacaggttatgttgggttatcgaatggtgttctgatcgcccagcaccatgaagtggttgcgctggatattgtacaagcaaaagttgacatgcttaatcagaagatatcacctatcgtcgataaagaaatacaggaatatctgaaggataaacagcttaattttcgtgccacaacagataagcacgatgcttaccgcgatgcagattttgtcattattgccacaccgactgattacgatcccaaaacaaactactttaatacatctacggttgaaactgtcattcgtgatgttactcaaatcaatccggatgcagtcatggtcattaagtcaacgattccggtgggcttcactcgagatatcaaggcgcgcttgggtattgataacgtcattttctcacccgaatttctccgcgaaggccgtgcattatatgacaaccttcatccatcccgtattgttatcggtgaacgttctgagcgtgctgaaatttttgccaacctactgaaagaaggcgctatcaagcaggacatccctacgttgtttactgattcaacggaagctgaagcgattaaattatttgctaacacttatcttgctttacgtgtggcatattttaatgagcttgatagttatgctgaaagccaggggctaaatagtaagcaaattatcgaaggagtctgtttggacccgcgcatcggaaaccattataataatccttcatttggttatggcggttattgtttaccaaaagatacaaaacaacttctggcaaactatgagtcagtgccaaataatataatctcagcgatcgttgatgcgaatagaactcgcaaagattttatcgcggattctattttagcacgcaagccaaaagtcgttggcgtatatcgccttataatgaagagtggttcagataatttccgtgcatcctctattcaagggatcatgaagcggattaaagcaaagggaattcctgttattatatatgagccagtgatggaagaagacgaattttttaattctaaagttgtaagagatttagatacattcaaaaatgaatctgatgtgattatttctaatcgcatggcggatgagctttctgatgttacagaaaaagtttatacgcgcgatctttttggtaatgattga

SEQ ID NO: 92497 - DNA, 906 bp, Enterobacter aerogenes
ttgtattggaatgatcttgagaagcaagatggcgtttttagcattccagaaaaccgaactaaaaccgatcactacttcaaaaaattacagtcaaataatgttagtgctttactcgttttggattatggtaataatctccataccaaaggcggatttcctgctaacgatcagcagatagagaagtttgcttcttatgctgcttgggtagctaatcgttataaaggaaaagttcgctactatgaagtttggaatgagtggtatcttggtactggtattagttcttggtttttaaaaaaagcaaagcctgatgatacaacctactttaaattaataaaagctacttcggaagcgattaaacgtattgaccctgatgcaaaagtaatcgccggaagctttaatcctttgaaaactcaagaagttgcatggtttgatcatattattgacctgggagtactgcaatatattgatggcatttcagtgcatgcgtactcatatggtaataaaaataccgagttgagaacacctgaaggcaatttagctgctcttgatcgctatgataaacacattaaaagtaagactggtaaggatattgacctctatattactgaaattggttatcccactaacaaaaaaagcggtggggttgaccctattgttgctgcccaatatatgatcaaatacactcttcttgctaaggaaagagattacattaagggcgtatggtggtatacccttatgaatagtgctgataatagctccaatcgtgaatctaatttcggtattcttatgcataatgaatctgaaaaagcttcggctaaatgtcttaaacttaatgagttacctattgctgcagctctgaccaataaattcagtaaatcctctcctattagctgtgatgggcaataa

SEQ ID NO: 92498 - DNA, 966 bp, Enterobacter aerogenes
atgaacttccccggtctgctgtcacctgacagcactctgccaaattattctttctctcgcagccttggcctacagaccggagctgatatcgattttaaaaaactggcagagaaactcgactgtacccgtaatttttaccacgtcggtattattttcgatgatggtaagcagcgctggctagtgcgcccttcgcgccgtatcgccaacgctaatcaaagtaccgttagtcatgtggtaataagcaaagtacccgaattaaaacaacccgtagcagaaaaagccatagtatctacgctagcaaccccatcactggcaactgaaattacctctaccggcttcgcctgtggtgctatgctcgttacgctgattatggcgtttggagctggtgcagcagtaccttttactgcaggaggttctggggtgatcgccgcgataagcttgtccggcacgttggctactggcgcacaatgtatgattggtgccggaagactactagctctacacaacgagcacggctcagatgttgcctggctggacagccaggaatggtacgtagccaccacaacagtactagatgtcatttcgctggctgcagctggaactgcactcagaagcactgtagaaacttacaagctgatgaaggcggcatcctcaagtaaagttattgagtggttccatagtctgaatcgcgctgagcggaaacgcattactgaagcaataatcagagcacagaaccctggcatttccaattctggcgtgaaggccgcgatccgcgccggggtttacccgaaacgcttcccgagcgaagctctacaaaaatcactgcaacgtgaattaatgggtgcatttaccaatgcgtcgacctttgttggcagttcgctgacagggaccattcgtaacccacagaacacaatccagtctggacgctatgtggtggggctgttgcaatcgttctcccccagctaa

SEQ ID NO: 92499 - DNA, 186 bp, Enterobacter aerogenes
atgactgtaaaacgtaaaactcaaaaagtgaccgtcgccctcgaacgggatttactcgatcgtgcgcgcgaagccggtataaatatgagcgctacattagccgcagcgcttgaagctgagctgaaaaaacatgccaccctgcgttggcgcgaagcaaataaagacactgtagcaaatcacaattag

SEQ ID NO: 92500 - DNA, 780 bp, Enterobacter aerogenes
atgaacatcactcatatccgtaatgctacacaggttattgaatacgcaggtaaaaaattcctgatcgacccgatgctggcggacaaaggcgcctggccgggatttccaggaaccgcgcgcagcgaactgcgcaatccgctggtggcgctgccgtttccccgcgaaaaaattatcgacgtcgatgcggtaatcgtcacccatacccatgacgatcattgggacgaggcggcgatcgcggcgatcccgaaaatccttccggttttcgtccagcatgaggccgacgccgcgctgctgcgcagccagggatttcaggatatccgcctgctgtcggcagacagtgaatttgccggagtaggcctgcagaaaaccacttccgggcaacatggcagcgaccgtacctacgcggtaccggcgatggctgaacgtctgggcgaggcctgcggcgtggtgttccgtcatccgcaggagaagacgctgtggctggttggcgataccatctggcgcgatgagattgaagccgacatgctgaagctgcgcccggatgtggtggtgctgaacgccggctacgctcacgttatcggctttggcccgatcatcatgggcaaagaggacctgctgaaggcgcatttcgccctgccggaagcgaaaatcatggccatccacctggaggcggtcaaccattgtctggtgagccgcgaagagatgcgccagtacgtcgcggataatcagattgccggggtagtcagtattccacaggatggggaaaccgttgtttattaa

SEQ ID NO: 92501 - DNA, 447 bp, Enterobacter aerogenes
atgactaaactgaaccttccggacccgctggagagtgaacttgcccagcgcgggcagcgtgagctggcggcatacctttctactcatcttgaaacgcagcgtattgcgattgtgggtgaagatgacaaaactcataccattgagttgccaaccagcgctctgactatgctgatggagatccttggggaattggcttgtggcaacgcggtgcagattgttcctgttcatgctgaactcaccacccaggaagcagcgaatatactcaatgtttctcgtccgcatatggttaaactgctggaagcgaggaagcttccatttcataaaactggacgccatcgccgggttctgtttgccgatctgatggagtataaaaaacgtagggaacaggaaagcctggacgcgatgcaagcgctggcggatcaggcgcaggacttagggatgtattaa

SEQ ID NO: 92502 - DNA, 576 bp, Enterobacter aerogenes
atgcgacattcaccttatccggtgattttagatgcttgtgtattatatccagcacggctcagggatttattaatgcacttagggatcgctggactttatcaaccaaaatggagccgcttcattcacgatgaatggtgcaggaatcttcttataaatcggcctgatatagcacctgaagcgctgcgtcgtaccgttgatctcatgaatgcagctttaccggatgctaatgtaacgggttttgcaggattaattaacggactagttttacccgaccctgacgatcggcatgtccttgctgcggcaatcagagcgaaggctgaaattatcgttacgttaaatcataaagactttccagcagaatcattgcttccatttgaaatcgaaacacttcatcctgatgtattcatatcggacctgtttgaccttaatcatgctctggcgttggaggcggtgagaaggcagcggcagtctctcaagcatcctccaatgaccgtcgatgagttcctggagatgctgctaaagcagggcttgccgatgacggtaaaagagttagccaattaccagtacgccatatag

SEQ ID NO: 92503 - DNA, 1038 bp, Enterobacter aerogenes
atggcaaaggaaaatataacgtcgtccccagcaggtgagttcattatgtttgccagcggtgatgggaaagtgcgcgttgaatgccgctttgagtcagacacaatctggttatcccaggcgacaatggctgaactgtacgataaagacgttcggactattaatgagcatttaatcaatatcttctctgaaggtgaacttgctcaaaattcaactatccggaaattccggatagttcgccaggaaggaaaacgccaggtttccagagagatagaccattacaaccttgaagccatactcgctgttggctatcgcgttcgctcctctcgcggcacgcagttccgccagtgggcgacccagacgctccaggaatacctgatcaaaggttttgtgatggacgatgagcggctgaagaatccgcctgtgggttcatcggcagtacccgactatttcgatgagatgctggagcgtatccgcgatattcgcgccagcgaacgccgcgtttatttgcgggtgcgagagatttttgcattagcggctgactatcaaccgtcgttaaaagaaaccacgcagttttttcaaacaatccagaacaagttacattttgcctgtaccgggcataccgccgctgaactcattcatcaacgtgctgacgccagtcagccgcatatggggctgaccaactataaaggtgaagaggtgcataagtgtgatgtgacggtggcaaaaaattatctcactcaggatgaagtcaatgagcttaaccgcgtagttaacatgtggctggattttgccgaggatcaggcccgtcgtcgtcagcaggtctttttacgcgactggcaggataagctggatcagttcctgcaatttaacgaccgtgaggttttgcaaggcgcaggtaaagtcagtcagaaaatggccgatgaaaaagcgcaggcggaatatagtcagtttgctgaacaacagcggcgcttaaaggaagccgaaggtgaaaaggatatcgccggtttgctacagtggaaaacagagcctaaaaagtag

SEQ ID NO: 92504 - DNA, 1572 bp, Enterobacter aerogenes
atgcaaatggttacctcgcgacagaacagattattaaaatttctcttgcctaaacgagaatacgttacgttattaaaaatggctgaatacttgaatgtttcagaaaaaacagttcagcgtgacctacgttttcttgaacaatggctctctgactggaaaatcagtattgataaacgtgccggcgcgggcgtcatgctattggctgataacgtcgccgatctgttgcaattagaccagttactcagtagcgaaagcgatgatacagatgccatgatgaataattcccggcgtgtgaaaattgcttctcagttattaagtgaaacgccgcgcgaaacatcgatcagtaaattgtctgaacgttattttattagcagcacctcaattgtgaatgatttaaaagtgatcgaatcatggattaggccactaggtctgatgctcattcgtagccagagcggcactcatattgaggggagtgaatcacatgttcgccaggctatggccttattaattaatggtgttattaaccataatgaaccaggaaatattattcactcccgtctggatagcggtagctataaagccctggtgcattatttcggtgaagaagatgtcatctttgtgcagtcgcttctccaggatatggaacgaaaattaagttggtcactgggcgagccgtattacgtcaatatttttacccatatcctgattatgatgtatcgcatcacccgcggcaatgcattaccgcgccgggaacagggacatccgttatttgatgagtccatctttcgtatcgcgcagaatatgctgcaaaaaattgaggcccgcattgcccaccctttaccagaggacgaaagctggtttatttatcaatacattatttcgtccggcatgctggtggaagagcgtgatgatgtcagcatgctgcgcaatatacgctccagcgatgaggcccggcaaatcacctcccggctgatcgccctgttttcctcggtggttgatatcgatctgacgcatgacaccgcgttatatgaagggttgctcattcatatcaagccgctgctcaaccggctgaattatcgtatctatatccgtaatccgctgctggaagatatcaagggcgaattaacagaggtgtggccattaactctgcgggtggtgaatcaggtatttgccgcctggggcgagaacgcggtttcggaagatgaagtgggttatttaaccgtgcatttccaggccgcgatggagaggcaggtggccagaaagcgggtactgctggtgtgttcgaccgggattggtacctcgcatctgttgaaaagccgggtcctcagggcctttcctgactggaccatcgtcggcgtactgcctgcgggtagtctacatacgctacagcgacaggatgatattgaattggtcatttcaaccattcatctgccggagattgcgttaccggtagtctatgtcacggctttttttaacgatgccgatattaagcgggtaacagaaaaagttatcaccgagaaattacaccatgctgcaacgtcaactgccagcaatgaaattttatatccatga

SEQ ID NO: 92505 - DNA, 1092 bp, Enterobacter aerogenes
atgagtgagaataaaccacctgtctcgcaggaaattaaaaagcatttgttaacgggtatttcatggatgataccgctgattgttgccgccgggatctgcattgccctcggtcaggttctgggcggtaccaatgtcgccgagaaagtcggcaccattccatggatgttgaatcaaatcggcggctgggggatggggctcatcgtcccgctcatctgtgcggcgattgcctattctattgccgacagacctggttttgcccctggactgattgttgggtttgtctgcgggcaaatccacaccggtttcatcggcggaatgctgggcggtttcctggtgggctatacggtgctgctgttaaagcattacgtgcggttgccaaaatcgatgcaagggctgatgcccattatggtgctgccggtattaagcaccattatcagcggtctgttgatgatgaccctgataggcaagccgattgcctggctgcaggaggccttgattcatctgttggagtcgatgcagggcggttcacgattcctgttgggggccattcttggcgcgatggccacctttgattttggcgggccggtgaataaaaccatgtcgttattcgccgatggcttgctggtgagcggggtctatgggccggaggcggtcaagtttgtcggctccatgatcccaccgttcggtattacgttgtccttcctgctgacccgccataaatatacccgtgccgaaagtgaagcgttaaaggccgccttcccgatgggtatttgcatgatcaccgaaggggtgatccctatcgcggcccgcgatctgctgcgggtggtgggatcctgcgtcgtggcttcagcggtggcaggcggcttgattatgacctggggtgtggaaagcccggtgccacatggcggtatgtttgtggtgccgctattcacccatccactgctgttttgtctggcgctggcgattgggacggttatctgcggcgtgatgttgtcgctatggaaaaaaccggtcacggagcgtgatgaagagtttgatgaactgagcgaccaaaaagtcgccgatgatgaaatcacctttacccttgagtaa

SEQ ID NO: 92506 - DNA, 852 bp, Enterobacter aerogenes
atgtttgccgatatgaagcagatggttgagaaagcctggcgtgaacagtatgccctgctggcgattaactgtatgaatctggagagcgcccgcgccgcggtacgcgtggcggaaaaataccgcgcgcctattattctcaatctctatcagggccatctggcgcattttccgccagcgacagcgatggcggtggccaggacccttgccgaagaggccagcgttcccgtgaccttgagtctcgatcatgggaaagaaccggtgaagatccgccaggcttttcgcgctggattcagcgggttgatgattgatgcttctgcatttccacttgcggaaaatatccgccagacccgagaggtcaccactctggctgccagcatcgggctgtgtgttgaaggggaattggggcatctggctgatgctccgcgctatgactctgcgacgaacgccgacctgatgacgcaacctgaggacgtcgccccgtttatcgagcaaaccggtatcgacttactggcggtctccgtcggcacggcccacggcatgtatgcgcctggggtcacgcccgcgctggactttgaccgtctggcgcaggtgcagcgagcctcttcggtgcccctggccctgcacggcggcagcggcacgccatttgatcagcttgcctgctgcccggcatttggcgtggcgaagattaatgtcggcgcggcggtgtttgaggcaggtaaagccgcactactccataccctttgccatgacagctctattgaactggccgatgccatggcggtgatggaacacgccagcgctgaagctatcgtcccttacttacaagcatccggcgcgataaaccgcgcctga

SEQ ID NO: 92507 - DNA, 918 bp, Enterobacter aerogenes
atgaattacctcggactggatgtcggtgggacgaaaatcgccgccgtcgtgatggatgagcagggacgggagcggggtcgttaccgctgcgcaacacggaaagaaaaccgtcgggcatttatgtcgtgcatcgtggatttcgttgccgatattcgcgcgcggacgggaacgccgatggctattggcatcgcgttgccgggtagcgtttcgccacagcattgcgtcattcgtaacgccaacattcaggtgattaacggctatcgtttacaggatgcgcttgaacaggcgctcggtcagccggtggtgttagccaacgatggcaattgtttcgccttatcagaagcatgcgatggcgccggagaagggttttcatcggttttcggcatgacgttagggaccggctgcggaggtggtattgccctggagcggcagcctttcgtcggcgcctcaggtattgccgcagagtgcgggcatatcgccttgcccggctattctcctgaggaggatgggccgccgacacgttgttattgcggcagatttaactgtgtggagtcttttatttccgcaacggggctacgtgaacgctatcgactgctcagcggagagtgtgtgtcgagcgagcagattctcgcccgcgcgcaggcgggagaatccgccgcttgccatcaggtccaccgctttcgtcaacagctggcgcggacgctggcgactattgtcaatatcatcgaccccggcgtgattgtgttgggcggcggtttatccaacgcgccgcagctggtagcggatttaccatcggcggtcgcaccgctcgtcttcaccgaccatttttctacccctatcatttctgcgcggcatggcgacagtagcggtatgcgcggcgccgcctggcttgccgtgcgaagcggagttaaaccatga

SEQ ID NO: 92508 - DNA, 723 bp, Enterobacter aerogenes
atggacttagaaaatatctttcgtgacgtgaagttgagtaaaaccgaaatgaccgtgctgcgttttattcaaaatgacccgcagctatgtatccgcgaagggatccgcaccgtcgcggagcgctgctacagtaatccttcttcgctggtgcggctggcgaagaagcttaagttcagcggctggctggagctggtctatttcatcaagttcaatatcaccatgccaaagctcgatgtcaccaacgatatcgattatatgagcattcagccggcagaagcgctgacgccgctgctggcaggccttgagcagcagcgtattttgatccacggcagcggtttttcgcagctaatcgcccagtatatttataataagtttctcgttaccggcgtgaacgccagcctggcattgtggcccgattacgaaatccttgagcaaaaaaacgctgcccgctttgattctatctggatcatctctaaatccggacgcagcagttcggcgttaaattgggttaaggcgctggaaggcaaggagataaacctggtttgctttaccggcgattatcaaagcccgctggcgcaggccgcgaatacggcgtttattattcatgacccgcagaagttcgacgatgatatttactggagcaacccgttttttggctactgcatattgggctttgagcggttgttaaaaatgtggtttaccagcgtacgtagcaataggtag

SEQ ID NO: 92509 - DNA, 498 bp, Enterobacter aerogenes
atgttaaaccagctggaaaacctgacggaacgtgttggaggcaataacaaactggtcgatcgctggctgcttgtgcgtaagcatttgctcgtggcttactacaacctggttggcctgaaacccggcaaagagtcctttatgcggcttaatgaaaaggcgctggatgacttttgccaaagcctggtggattacctctcatccggtcattttaatatttatgaacgtattatcggagaaatggaagggagtacccctcttttagccgccaccaaaatctacccgcagctggaagccaatacccagcagatgatggactattacgatacctgcctcgaaaacgccatcgatcatgataactatctcgaatttcagcaggcgctgtcagatatcggcgaatcgctggaggcgcgcttcgcgcttgaggacaagctgctggcgctggtcgtcgctcacgatcagaaagacaacgttggcgacaatatcgcgccgaccgcttga

SEQ ID NO: 92510 - DNA, 213 bp, Enterobacter aerogenes
atggcttttagatattttaaaatttatttatcgcctgactcgatttcaatgattattcgtattggtgatttaaccctttcctcgacaatcagggcaaattactttaacttcaatatcttttttttgtacagcacaaccataatctattgcttttttctcaatgtaagtatgaatgaggtggtcagtatgttggattattgttccgcagtttga

SEQ ID NO: 92511 - DNA, 423 bp, Enterobacter aerogenes; identical to SEQ ID NO: 74986

SEQ ID NO: 92512 - DNA, 312 bp, Enterobacter aerogenes
atgtgggaacagaagtgggcaacgcgatggaataacgcttatctattaagccgggaagatgtcgttacagtgacaacactttcaccgcgtggcgttgcatactggcataaggggctgacatgttcttcctggcggagttctcagggatactttgaaatcatgctttgttctgaggtagtagatattctgccgtgtgataccacggttgagtcactggctttatttatcaggcagtcaattgagcacggtttacccgcagcgaaaatagaagtccatgcctttgagggagtggggaaaggcgctattgcctga

SEQ ID NO: 92513 - DNA, 1044 bp, Enterobacter aerogenes
  misc_feature (1012)..(1021): n is a, c, g, or t
atgtcatcagtaagaaataaaacagcggttacagattcagatgaaattgatttaggacgtcttgtcggagaattgatcgatcatcgtaaattaataatttctgtcacatcgctatttacgttattagcattagtctatgctttatttgcgacaccaatttatcaagcagatgcattagtacaagttgagcaaaaacagggtaatgcattgttaaatagcttgagtcaagtattgcccgatagccaaccacagtcggcgcctgaaattgcattgttacggtcacgaatgattttgggtaagacagttgatgatctgaatctgcaggcaaaaattgaagaaaatcattttcctatatttgggcgaggcttggccaggttattagggaataaagcaaataatatagcaatatctcgtttatacctttcaattcctggggaagatgttccagaagttgaggtccaggttttagataaaaataaatttagcgtaacaggggaaggtattgagctaacaggaacagtcggtcaactacttgaagcgaaaggtatatcgctgctggtgtctgaaatcgatgctgagccgggaactaccttcactgtttcgtatatttcacgtctcaaggcaattacaaatcttcaggataatttgactattgccgatgaaggaaaagatactggtattttaacgttatcccttaccggcgatgatcaaacacaaatcaagaatatcatagatagcattagtactaactacttagcacaaaatatcgcaagacaggctgcgcaagatgcgaaaagtttagagtttctaagtgagcagttacctaaagttcgcagcgatttggatcttgcagaggataaattaaatggttatcgtcaacaaaaagattcagtcgatctttctcttgaagctaaagctgtgctcgatcaaattgttaatgtcgataatcagttaaatgaattaacaatcagggaatccgaagtttctcagctgtttacaaaggagcaccctnnnnnnnnnnacaaaggagcaccctacctataa

SEQ ID NO: 92514 - DNA, 1008 bp, Enterobacter aerogenes
atgcaactgctgaatcgacaacaggagttgagtattgcaaaatcaagcgcgatcgggaatgtcagaattattgataatgcgataacgcaacctaagccagtcaaacccaataaagtattagttattctgttgggtatcgtaattgggttactcatttccgtaggcttggtactcgccagagtagttttacgtaaaggaattgagtcgccagagcaactggaagaattagggattaacgtctacgcaagtgttcctgtttcagaagaatttgccaaacgcgtagagcgttctagcaaatggaaaaataagaatcgtgatgaagctgctgtgttcctggcgattgaaaacccagctgatttggctatagaatccattagaggcctacgtacgagcttgcattttgcaatgatggaggcgaggaacaatgtattaatgattactggtgcgagtccaaatgctggtaaaacatttattagctcgaatctcgcagaggtaatcgcacagactggaaaaaaagtactatttatagatgcagacttgagaaaaggatatacgcataaattattcaatacagagaataataatggcttatcggacatattgtcaggtaaatcctcaatagagaaagcggtacaaaagatatcaaaaattggcttcgattatatttcaagaggcatggtgccaccaaatccagctgaattactaatgcataagcgttttggagagttgattgcttgggcgaatgaacactatgatttagttgttatggatacaccgccgattctagccgtgacagatgctgcagtgatcggaaattatgcaggaacaactctattagtggcacgctttgaacaaaatactgctaaagaaatagctgtcagtattaaacgatttgaacagagcggtgtgaatattaaaggttgtatacttaatggtgtggttaagaaggcaagtaactattatggatatggttacaaccattacggctatacatataccgataaataa

SEQ ID NO: 92515 - DNA, 996 bp, Enterobacter aerogenes
atggcattatataatattgctgataaaaatttagttgcgctggaaaaaactacctactcaatagaggggcttcaggaacgttacgatttgcaagaagctataaaaaataatattgatatccttgcacctgattgtcttgtcattgctgaggagttttcagattgggaggacagcagaagacggattgacttattagcgattgataagcaggctaatcttgtcgtaatagagttaaagcgagatgaaatcggcgctcatatggaattacaagcattgcgttatgcagctatgatttctacaatgagttttacaaaagcatgcgaatattatcagtcatatttaggtactgattcagatgttaatgctaaagcaaaaatattagaatttattggtcttgaggagaatgagctctctgactttggtaaggatgttagaattgttcttgcttcagctgattttgggaaagaactgaccactacagcgatttggctgagagataaaggtgttgatattcgttgtgttcgtcttacaccttacaagtttaacgatgatatactaataaatgcagagcaaataattccggttccagaattagaagaatatcaagttaagttcagagaaaagctggttgagcaaaatataagtagccagaagtctgaaaaagattactctgaatataggtataatggtggtatttataataagcgtaagttagcccttgagctatttactgattggataaataagcataatccccacagccttgaggacatttatactaagctgggtgaaattctcaaaaatcgaacaattgttttggctgatcaagttcctgatgggcgaaagaatcgatatcatttgagtgaagatgcggtaattgagcttcaatctggcgaagttatcgcaatatcgaaccaatggggccttggtaatatccagcgtgtaattgattttttacgacgtgatggttttattattgaaaaagtggagcaatag

SEQ ID NO: 92516 - DNA, 633 bp, Enterobacter aerogenes
atgaaacggttgccagatcatctatcgcgagaatgcatcatcgaagccatccgcgcgtacgacgagggtatagcgcatcagtttaaagacgcgcgtctgtatgaagtcgaattcgaaggacgtcgttatccctctaaagctatcgttgggatagcggccactatggcgacgaaaacggagttcacgccggcggatttcagcggtgggatcaaatccaaatgcgtccgtctgttgctggagcaaggattcaagatcgttcaggagcgagtagatgatgctggtattacccctttccccgacgagctacagacgaaaagtgagtttgtagaaggggctgcggttcaggttatggttaaccgctatgagcgcgatcgccaggcccgcgaggccgcgttgcgctatcacggtacccggtgtcaggtgtgcggccttgatatggcgaagcgctacggtgatatcggccagggctttatccacattcatcatctggtgccgctatcggagattaaacaggactatcgtctggatccgaaaactgacctgatcccagtttgccccaactgtcacgcgatgctgcatcggcgaaacccgccatatacgccagatgaattaaaaactctgatacaatcatag

SEQ ID NO: 92517 - DNA, 870 bp, Enterobacter aerogenes
atgccttccagtaaaactctgcaacaagcgatcgccaatatcactatctggcgcaaaggcgaacagcgcgcgccgcataaacctctgctgttgttgcacgtgctgtcgcattaccagcacggacattcgcggatgttcgattacgcctcagaggttcgtgatgagttacatagcctgctggagcgttttggtccacagcgcgcgcaataccgccccgatatgcctttctggcgtctaaaaggcgacggcttctgggaattacgcaacgctgagcaatgttcaactgaaggcagcagacagcccccctctaaagaactggaaacctatcacgtcgcgggcggctttgacgaagagcacttcgcgctgctgagcaagaataagaggctgattaacaccctggcgcatcagatcctgcaggcccatttcccggagagtattcaggaagagatcgccgacgagatggggtttgatatccagcaaattcgcaaagaacgagacccgctgttccgccaacaggtgctacgcgcttataactatgaatgcgctatctgcggctttaatatgcgccatgacaatacctccgtcgcgctggaggctgcgcatatcaaatggaagcagcacggcggcccatgtgaaattcccaacggcctggcgctatgcgccattcatcataaggcgtttgataaaggctcgattggcctggatgagcatatgcgggtacagatttctccagcggttaacggcggcgggattgtcggaaagctgttctgggattttgatggtaagcaaattggattgcctcaggggaaggactgttacccgaaagagggatttgtggagtggcacaggagagaggtatttaggaggtga

SEQ ID NO: 92518 - DNA, 558 bp, Enterobacter aerogenes
atgcctgtaaacgagaggattaacgcgacatccgggacacgtattaagcccggtggaacgaggcttataaccactggtgagattgggttatcaagagctctatacaactgcgggattcggtacaatacagtgtggattcatcgagaaagttatttgccatttaatctacaacctattgatattgctatgagccctaacggggaaatgtggtttagggaagatacctattcgcatgatttttcaatggatatattggaaaagaaacataggttcatgcatgaaatgatgcatgtatggcaagcacagcgggggatgtttgtcagaacaagaggattattctctcatttcgctgattacagctatagcttagataaagctgatatttgccattacggcttagaacagcaagcctctttagttagtgattattggctcctgttaaactatggctttaaaggaaatactaatttgatcaagtatcgagattatgatcctgatgagtctgcccattcattgatcgaaaaatataaatcagtaatgaaaggatttccggtatga

SEQ ID NO: 92519 - DNA, 1464 bp, Enterobacter aerogenes
atgtatttaggtatcgatctcggcacttcggaagttaaagcgctggtgctggatgaaaataatacggtcgtcgccagccatagcgcgccgctgaccatccaacggccgcatccgcaatggtctgaacaatcgccgcaggcgtggtgggaagcgacggaatacctgattgccactctgcgcgagaagtgcgcgagccattggtcggcaattaaagccatcggcctttccggacagatgcacggcgccgtactgctggatgccagcggcgaagtgattcgcccggcgattttatggaatgatacccgctgcgcgcaggagtgcgccgagcttgaagagatggcgccggagctgcgtcaggtggccggtaatctggcaatgccggggtttaccgcgccgaaactgctgtgggtgcggcgtcacgaaccgcagcatttcgcccgtaccgcctgcgtgctgttgccgaaggattttctgcgctacaagatgaccggcaaaaaagtctccgatatgtcggatgccgccgggacgctgtggctggatgttgcgcggcgggactggtccgacgcgctgctgcagaagtgcggcctgacgcggcaacaaatgccggaactggtggaaggatgcgacgtttccgccacgctggcggcagacattgccgaacgctgggggcttaatccttcggtgctggtggcggggggcggcggcgataatgcggtcagcgcgattggcgttggcgcggtgtcgccgggagacgcttttatctcgctgggtacctccggcgtactgtttgtcgtcaccgatcgctatcgtccggcgccgcagtcggcggtgcatgctttctgtcatgtgctgccgaacctgtggcaccagatgagcgtgatgctcagcgccgccagctgtctgcagtggttctgtcgtctgaccggcaccaccgaagtggcgctgctggaggaggtcgcccagttaagcgaagacgaaaaagccaatgcgccatacttcctgccttatctttccggcgagcgtaccccgcataacgatcctctggcgcgcggtatgttctggggaatgacccatgccagcctgcgcgctcaactgggatatgcggtgctggagggagtgagcttcggtattgctgacggcctgcgcgtgttgcaggagagcggaacccgtatcgaccagtgctcactggtcggcggcggcgcccgcagtccgttctgggcgcaactgctggcggatatcctggcgatgccggtggtgacgcataaaggcggagaaaccggcggcgcgctcggagcggcgcggctggcctgcctggcggcgggcaagccgctggccagcgtttgtcataagccggaaatctggcaaacctggcaggcggatctgcagcgtcatcaggcgctgatgcagcgttacgcccatttccagtctctgtacctcaacgaccgacattttcgacagcaataa

SEQ ID NO: 92520 - DNA, 654 bp, Enterobacter aerogenes
atggagaaaacagacgaggctgtggtaattcctctggacgctggttggaatgatgtcggttcatggtcagcactctgggatgttaatattaaaaacattgataacaatgccttgattggcgatgtttttacgcataacactagtaattgttatattaatactgatgaaaaacttgttgctgcaattggcgttgataatctggtcattgtcaatacaaaagacgccaccttggttattaacaaagataaggtgcaggatgtaaaaaaagtagtcgaatttttaaaaaaggatgaccgtcgcgagtatagaatacatcgtgaatcataccgaccatggggtgtgcaggataaagtcgttgatactcctcgttaccatgttaataaagtgactgttaaaccgggcggaaaattttcattacaaaagcatattcatcgtgctgaacactgggtggtattgtcaggtactgctgaagttactcttgatgaacaaacatatttattaactgaaaaccaatcaacttttattccggttggtaaaactcatatgcttcataatccaggtaagattccgcttgtcatacttgaaatagtctcaggggcatacttaggcgatgacgatattatccgcttgaaagatcattatggccatttttga

SEQ ID NO: 92521 - DNA, 1902 bp, Enterobacter aerogenes
atgggcatggctgacattgccgaagtcctgtggcgtgatttcctgaaccataacccgcagaacccgtcctgggccgatcgcgaccgcttcgtgctgtccaacggtcacggctccatgctgatttacagcctgctgcacctcaccggttatgatctgccgattgaagaactgaaaaacttccgtcagctgcactccaagactccgggccacccggaagtcggctacaccgcaggcgtggaaaccaccaccggcccgctgggccagggtatcgctaacgcagtcggtatggctatcgcggaaaaaacgctggcggcgcagtttaaccgtccaggacacgacatcgtcgatcacttcacctacgccttcatgggcgacggctgcatgatggaaggcatttctcacgaagtgtgctccctggccggtaccctgaaactgggtaaactggtggcgttctatgatgacaacggcatctccatcgatggtcacgttgaaggctggttcaccgacgataccgcgaaacgctttgaagcctacggctggcacgtggtgcgcggcgttgacggtcacgacgctgacgccatcaaacgcgcggtagaagaagcgcgcgcggtcaccgacaaaccgtccctgctgatgtgcaaaaccatcatcggcttcggttcgccgaacaaagcaggcactcatgattcccacggcgcgccgctgggcgacgcggaaatcgcgctgacccgcgaagcgctgggctggaaatacgctccgtttgaaatcccgtctgacatctatgcgcagtgggatgcgaaagaagctggccaggcgaaagaagccgcgtggaacgacaagtttgccgcctacgccaaagctttcccgcaggaagcggctgaattcacccgccgtatgaaaggcgaaatgccgtctgacttcgacgcgaaagctaacgagttcatcgctaagctgcaggcgaatccggcgaagatcgccagccgtaaagcatcgcagaacgccatcgaagcgtttggcccgctgctgccggaattcctcggcggttctgccgacctggcgccgtccaacctgaccctgtggtccggctctaagccgatcaacgaagacaccgccggtaactacatccattacggcgtacgtgaattcggtatgaccgcgattgccaacggtatctcgctgcacggcggtttcctgccgtacacctctaccttcctgatgttcgtggaatatgcgcgtaacgcggtacgtatggcggcgctgatgaaacagcgtcaggtgatggtctacacccacgactccatcggtctgggcgaagatggcccgactcaccagccggtagagcaggtcgcttccctgcgcgtcacgccgaacatgtccacctggcgtccgtgtgaccaggttgaatccgcgattgcgtggaaatatggcgtagagcgtcaggacggcccgaccgcgctgatcctctcccgtcagaacctggcgcagcaggagcgtaccgcagagcaactggcaaacgtggcccgcggcggttatgtgctgaaagattgcgccggccagccggaactgatcttcatcgccaccggttcagaagtggaactggcggttgccgcgtgggacaaactgaccgctgaaggcgtgaaggcgcgcgtggtctccatgccgtccaccgacgcgttcgacaagcaggatgcggcctatcgtgaatccgtactgccgaaagccgtttctgcccgcgtagcggtagaagccggtatcgcggactactggttcaaatacgttggcctgaacggcgctatcgttggcatgaccaccttcggtgagtctgcgccggcagagcagctgtttgaagagttcggcttcaccgttgacaacgttgtcgccaaagcgaaagcactgctgtaa

SEQ ID NO: 92522 - DNA, 171 bp, Enterobacter aerogenes
atgtataacaatcagttcaatgcctcaactttcattccggtcgttgggcttctaactggcggttcacagactcagtctaaaactcttgaaatagattttaaaggcgaaattgtcagtaaatggacattctctactgataataataatacaaaatctggcattcttcagtaa

SEQ ID NO: 92523 - DNA, 1005 bp, Enterobacter aerogenes
atgagcagaaggcaagcatacacgagggttgaaaggatcaacttcaatttacctgaacatgttaaaggtaaaggtgatgtaggatatcgcgtatttgaatgcttgaatccacaatgtcgtaacatgatacagattcaaactgaggatttaccacctgattttgagtttgaatgcgaagaatgcggttttcaacataaagcaggtgaggtgattaacatttatgaatataatttaattaataatacagaaaaccgtgttattgaaaatggagagttttcaatattgcatgatgattatatagctgaagcattagagtataaatattgcattatttgcggtttattaaagcctttgcaatcttttgatatacactcaagacgaaaaaccggtaggcagggcgaatgtagattatgcaagcatgtatataattctataaaaaatcaaacgagattgactgagcagcatagagaagcgtctcaaaaaagaagactatatgtgcaattcgattctaaaaataaaattgatgttaacgagatatatagaagatttgataataaatgtttcaaatgtggtttggatttaagtgctgatttagtagccaactctgagaaaaaaatgggtaatttggatcatacattgcctgtatattacttatggcctttgactactaataatgccacattgctctgtaaagtacataatggagaaaaagcagagaaatggcctggcgagttttattcaaggcaagaattggcatcactctcaagattgaccggggttgaagctcgtgttttggctggggcaccaatatttaatccagaagcaattgatattttaaaaaatcctaaattcgttgaaggtttagtcgataagttttccagatatccgaatgaggtatataatttacgcaatcgaattaagagagttacagggttcgatttcttcgataaccctaatttgaaaatttctgccaattgggttatcgaagccgataaacttatctaa

SEQ ID NO: 92524 - DNA, 153 bp, Enterobacter aerogenes
atgatgggttgtcgtgcctttgtctttaattccgtgactttcgcaatgttcaacactttcgtcaaatatatctataaggctaagataattactaccaattttagcaatttgtcctgccatatcactttttttacttttgccaacgtgcattaa

SEQ ID NO: 92525 - DNA, 237 bp, Enterobacter aerogenes
atgacctcatcattaaagaaaactgcagttactggattaatctggagtgcaattgaacgcttctcagtccagggtacacagttcattgttaccattatcctagcaaggctgatatctcctgaagactttggccttattggtatgataactgtgtttattgttttgtcggatcttattatcaatggtgggttttctcaggcactgatccaaaccatttacccgggtaataggcattaa

SEQ ID NO: 92526 - DNA, 249 bp, Enterobacter aerogenes
atgagtcttgttgggccgaggccaataatcactgctgaacttgagcgttataatgatgaggtcgattattatttactcagcaaacctggcatgacaggtctgtggcaggtgagtggtcgtagcgatgtagattatgagactcgtgtatacctcgacgcctggtatgtaaaaaattggtcaatgtggaatgatatagcgatcttatttaaaactgtaggcgtcgttttgaaaaaagatggtgcatattaa

SEQ ID NO: 92527 - DNA, 414 bp, Enterobacter aerogenes
atggaaaaatctaatcatgacgatcagcatcgtgatcgatttaggaaagataaaaatctaaggttattacgccatttttgtatcagtgtgcgtttgaatcaggcagagcttgagcttttaaacaacagaaggggcaagcataaaaaaggggagtggttaagattaacctttttaaatcataccccaaccaacatcccgttactaaatgttgaagcttggaaaatgttgtcagacatatcgcaaaagctaaatcgaattgcgaaccatatcgatggtaagagcaaagacagcaagcttactcatacagagcttttcgcagtgaagcgactactcgtagagcttcgtaataaccttctaagaactgattttgggagtatctatcgtgaagggtatgcagaagatcaagaggggtaa

SEQ ID NO: 92528 - DNA, 645 bp, Enterobacter aerogenes
atgaaaaataaatattttagtaaaaaatgggagcaattcaagaaagaattaccccatcaatcaggtgaaatggtaaagagaaattggggccataactggcactctatgtgttcataccaagggaaactaaaaccatcaatagctagatctttaattgatacattcatgccatcaagtaagggacgtatattagatgtcttctcaggtgttggcaccattcctttcgaagcaagattacttggtcatactgcatatggatttgatattagtccagcagcagttaatatttcacgcgcaaaactagaagttataagtaaaaatgaaatccaagaggtaattaataaattatctgattttattgagcaaaacaaaaattcaatagattataacgaacataatttaataaggtttaatggttcaattgaatcctattttcatcctgaaacttttaaggaaatactgtgtgctcgtaaattctttttaataaaaggtgaattaaatgcatctgaatcgttagtacagtcatgtttattacatattttacatggtaatcgtccgtatgcattgagtagaaagtcccatcctattacacctttcgcgcctactggagattttatatacagtctgtctcttatacacatctga

SEQ ID NO: 92529 - DNA, 252 bp, Enterobacter aerogenes
atgatggttgaaaactacttttgggacatgttcaaattcttatcaaaactcccaaaattactaactaatgatgcgactatctgtatagatttaggtgattctgtttattgtaacgtctacatccctacacaagatattttgaaagaaatgatgtcaaagttaggttttgaagagaacgaaagggtcattcttcgtgaacgaaaatcccgcaatggaacaaagttagtccagactgttcaggtttttaaatga

SEQ ID NO: 92530 - DNA, 609 bp, Enterobacter aerogenes
ttgactgggcctgatcaattgcatataagttacgttcattcgccaattcgttatgcttgggatttacagcatcaatatcttagagagtctggtctgtctgaaggtttgaagggatttattgcaaagtatttactgcataaaattagaatttgggattatcgtacagcgaatggtgttgatcattttattgcaaattcaaaatttatttcaagacgcattcataaggtatacggacgctcctctgatgtcatatatccacctgtagatgtaaataacttcacccttaatgaaaacaaggacaactattactttacagcttcgagattagtaccttataagagaatcgatctcattgttgatgcattcaacgaaatgcctgaaaagaaactggttgtagtaggtgatggctcagagatggataagataaagtccaaagccaaaggaaatattgaaattcttggttaccaaccgaacaatataatgcaaaagcatatgcaaaatgctaaggcatttgttttcgcagctgaagaagactttgggattacacctgttgaggcccaggcatgtggtacaccagtcagctacaataccgatattaatatcatctga

SEQ ID NO: 92531 - DNA, 378 bp, Enterobacter aerogenes
atgaccggcaactgcgcggcgctggcggcgctggcggatgaaccaggctatgcgcaaatcaacaccgccgacgccgaacggttaggtatcgaggatgacgcgctggtgtgggtcaattcgcgtaagggccgcatcatcacccgcgcgcaggtcagcgatcggccgaataaaggcgcggtgtacatgacctaccagtggtggatcggcgcctgtaacgagctggtgtcagagaacctgagcccgataaccaaaacgccggagtacaagtactgcgcggttaacgttgaacggattgccgatcagcgcgcggcggagcagtacgtgatcgaggagtacaacaagctgaaagcccgcctgcgcgaaagcgcgatgggttaa

SEQ ID NO: 92532 - DNA, 387 bp, Enterobacter aerogenes
atgctccggcgattttttaacatggaagagtattttaatgaagctactagagaggatttagataactttatcggtaatgatatatttcatgtagaaaatgctgaagattttatgacgtttgcagattctgcaattaaaaagaaagtatctttgataataagttctggaattctaaacgatcagcctattgaaaatctaattgagtgtgctcagaagattggatatcaattaggtataactaatgtgaatggtgataataaaatcactatgccaaactctaaaagagaagtgaagcaactattatatttccttgatcagggctacttcaattcaataatcacaaatgagctaatgctgacgaattcgaagcgaccaataagaatttga

SEQ ID NO: 92533 - DNA, 501 bp, Enterobacter aerogenes
atgaaaatacaaaccattgaagatatttttattcatttattatcggatacctacagcgcggaaaaacagttaacccgcgcgctggctaaactatcccgcgccagcgcatgtgaagagctacaaacggcattcagcgctcaccttgaggaaacacagggccatatagaacgtattgataagctccttgaacaaaatgatcaaattcgcctgaaacggatgaagtgtgtggcgatggaagggcttatcgaagaggccaacgaagtgatcgaagcgacggaaaagaacgagatccgcgatgctgcgctgatagccgccgcgcagaaagttgaacactatgaaattgcggcctacggtacgctgtgtacgctggcagagcagctcggctataaagccgcggtgaaactgctggcggaaacgttggaagaagaaaaagacgctgatatgaaattaacggacatcgccgttggacacgtcaatcaggatgcccaacagtccgcttaa

SEQ ID NO: 92534 - DNA, 1626 bp, Enterobacter aerogenes; identical to SEQ ID NO: 91965

SEQ ID NO: 92535 - DNA, 378 bp, Enterobacter aerogenes; identical to SEQ ID NO: 91975

SEQ ID NO: 92536 - DNA, 273 bp, Enterobacter aerogenes
atgatgaaaattgaaccttcagcgatttctgaagctgatattcgttctgtctcaccggctcttgcgcgctttggtcgagaagctattactgaagatctgtggacacgcgatgccctctcgcccagggatcgtagtatggtgaccgtcgccatgctaattgccagaaaccagcctggcgaccttaagcactatatagacattgcccttgataatggcgttacaccagcggaattgtcagaaatcattacgggctcccactttatgcaggattaa

SEQ ID NO: 92537 - DNA, 909 bp, Enterobacter aerogenes
atggatataaatcagctgcgttgctttgtggtgttaggtgatgagcttcactttggccgggctgcccgtaaactcgaaatgatgcctgcgtcactcagccgtttcatcaaactgctggaagaagatctggggataaggctactgaatcgatcaacccggaatgtgtcgctgacgcctgaaggcgcagagtttttaaatgaggccaaagccgtgattgctgatttcgatgcgctacggttgcggttccgtaaaaatgtgctgccgcaaaagaggacgctgcggatcggtgctattgacagcgcggccagaggattactgccggaattacttaatctttttgtcaggcagtttcctgatgcggatatccatattacggaagataaatctcacaatcttatcccgcggctcatttccggatggctggacgtggtctttgtgcgtccgcctgaacatactgatgctaagctgactacccgttttatcgcgaatgagacctgtgtgcttgccgtacctgctgaccaccggctggtcagttatgacgaagtcagtatcgctgattttcgtaatgaacccgttatcgtgccggaaagacgtacccggcgtcacagccatgatctgacgatgaatatattcaaggatggcggctgcgtgcctattattgcgcagtatgccgaagagaagcagaccatcctgagttttgttgccgccgggctgggcgtagccctggtgccagcatcctataaaaatatgaatgctgacggtgttaagtatcttgctctctcgccgatgaagcatgttgaagggctaccactgagcgcaatgtggcatcagggaaataataatatttatgtcagatccctgctggatatgctttccgacaacatcgaagaactgacccgtaatttgtga

SEQ ID NO: 92538 - DNA, 279 bp, Enterobacter aerogenes
atgtttggaaagctccttaacagcgtgacctggcagatcagatctgacctgcgccgcaaactcaaagccaaccgggaccataaaaatctcagctggaatctggcggaaaggctgcaggtttattgctccacgcattacattcgggccatgctgatactctggggagtggcagctggcgcggtggcggtggctcactatgcccgccctgtctttgatccgtttgcccgtcaacatgtagatgttgggttagaggtacgctgggaaatggttcttaaatga

SEQ ID NO: 92539 - DNA, 2634 bp, Enterobacter aerogenes
atgaagggtaaatataaagccgctcttgcgctgttattagctctaattttgctgccgttggccctgttggccacattaacgcattgggttccgacgctggcgggtatctggctgccggtcggcacgcgtatctcgcttagcgaaagtccgcgcctgacgcgctcctcgttgattatccccgatttacgctacctggtgggcgattgtgaaattgctcgtgtcagcaatgcgcgccttacccgtcccagccgctggcggctacacctgagtgaactggatatcaatagcgcctgcctggctaagctccccgccagcgagccgctctccggcgcgccgcgaaccctcgccgagtggcaatcgatgttgccttatagttggttaactatcgacaatctgcgcctgtcgccgtgggaaaaatggcaggggaaactggtgatgtcgttgacgcctgggcagcaggatatcggttattcaggcaaagaggtcacattacaggcgaaactgcgcggccagaccttaacggtcagcaatttcagcgcgcggctggtagaagatcaggcgccggttaagctggtcggtgaattcgaaatgccgctggtgccggatggcctaccggtcgatggccatctggtcagcaccttcgaattcccgcaaatgccgggtctggtggatgcggaactggaatggcagaaaaaccgcggccagctgctggtcacgccgcgcggtgaggtcgagccgatgctcgacctgccgtgggagatcacccctgaacgtatcaccatcagcgatgggcgctggaacacggtgtatgccggctatccgcttagcgggcgggtggcgctttcgtttggcgactggcagaaaggcaccgaggagatggaaatcagcggccggctcaacgtgttaacgcacggcgaagcgggtaaaggcaacgccgtgctgaatattggcccaggtaagctaagcatggaccacagcgacatgccgctcagcctgaccggcgaggccaagctcgacgatatgattttttatgccgtgctgcccgcaaaactcagcggcccgctgatgacgccagagctggctttccatcccggcgcgctgctgcgttcacgcgggcgggtgattgactcgctgaacatcgatgagatccgtctgccgttggcgggggtgaaagtgacgcagcagggggtggatggccgcctgcaggcgatactgcgcgcccatgaacaggaaatgggcgattttaccctgcatctggatgggcaggccgacaattttatgcccgaccgcggtcgctggtcgtggcgttattggggcgatggtcacttttcgccgatgcaggcgcgctgggatgtgaaaggcgccggtgagtggcgggatagcgccattattcttaacagcctgtcgaccgggttcgataagctacagtacggcaccatgctggtcagcacgccgcgcctgaccctcgataaacccattcactggctgcgcaatgaacagcatccaaaattcagcggcacgttgtcgctggatgccggtaaaaccaccttcagcggcggcagcgttctgccgccgtcaacgctcaaattcaatattgatggccgcgatccgacctggttcctgtttaacggctcattgcacgcggagaaaatcggcccgattcgtctgaccggccgttgggacggcgaacgcttgcgtggccaggcatggtggccgaaacaggcgctaagcgtattccagccgctgatcccgccggactggaaaatgaccctaagagaaggtgatatgtatgcgcaggtagccttttccgcagcctccgggcagggctttgaggccgggggccatggcgtcttaaaaggcggtagcgcctggatgccggacaaccagatcaacggcgtcgactttgttctgccattccgcttcagcggcgggagctggcagctcggtacccgccgtccggtttcactgcgtattggcgaaatcgtcaaccagttcaccgccaaaaatctgagtgccgatctccagggaacatggccctggagcgagcaggatccgctggaattgagcaacgttaatgttgatatccttggcggcaagctgtccatgcagcagctaaggatgccgcagcatcaaccggcgctgctgcgtctgcagaatatctccagcagtgagttgataagcgccatcaaagtaaaacaatttgcggtctctggcgcgtttaacggcgcgttaccgttatggctgaacaacgataaatggatcattaaagacggctggtttagcaaccccggcccgatgaccctgcggctggataaagacaccgccgatgcgttggtggccgataacgtctccgccggcgcggcaattaactggctacgctacatggaagtctcgaaatcatggacgcgcatcaaccttgataatctcggcaagctgacgatgagcgcggcgattagcggcaccagccgggtggacggaaaaagcagcaccgtgcatttaaactatacccatgaagagaatattttcgatctgtggcgcagcttgcgcttcggcgataatttgcaggcatggcttgagcagaatgcgaaactgcccgccccgcgctgtacggatacatgtaaggaaccaaaatga

SEQ ID NO: 92540 - DNA, 294 bp, Enterobacter aerogenes
atgaacgggtcttcatcacatgatgtagaatggttgtttaggcagatttttgactaccttacagaaaagcaaggtacacctggttataagttaagcaaaattgagaaggttgttttagactcattgatcaaggatgccgggatcacttgctatgatgatcttgacgaggagttcgaagccattcaggcgcaagtagtggctgtggaaaatgaccctgagaaaaaagtccttaaagagctacttctgcgatatgccatgctgctctggtatgactttaaaccttatcgctactaa

SEQ ID NO: 92541 - DNA, 1401 bp, Enterobacter aerogenes
atggcaactcaaatcaagagcaataaaacttatcagggcgatgctgccgtacttccttccccgcaggcccctatgccgaaactggccagcctttacctggactttgagaaagagctttatattgccctcggcagaacaaccggtaatgcaattcgctcccgccgtctggctgacgtggtaacctttactcgcgcatcggaaacaacacgggtaaataaaagcggattaatcgagtatctcgcagcgggcgaggccgcgatcgagtatgacccgatcacaggtgagtgccttgggctgcgggttgctgcgggaacaaccaaccaggtggcaaacagcgaaaacttttccgggtctacatggacaaaaacgaacgtttctaccaccgcagcaaaaacaacagctcctgacggaaacccgacagcatcgccattcaatgagacaacggatagctccgacctgattcactccatgctcgaaaatgccacgccagcggcaacgataggctctccggtaacgttcagtatttttgcgaaggccaatactgccagtattattcagctcgttgctcagggcgctgttgcaaccccacagtatgccaactttgacctggttaatggcgttcgcacccgtagctcgacgggtatcctgcaaaccagcgtccgtaaatttaaaaacggatggaaccgcatcagtatcacgatcactccgactgtagccgcttcaccgaaatttaccctggcactggtcaatgatgtgacgtctgcggcggcattaccggcctacaccggcactggaaaagggatctacatctgggctggacagattgaaaactgggatggtgtgacgccgtatattccaacagctggtgcgacggtgacacgcccggatgaagtttgcacggttcggcaggatctggattttatggcagcggaccgtggctctattttcgctgattacaacatgccagctagcctgcaggcgatgagcggggtatataatgccgggcaggccattgtctgttttgacaatgattctgtggctgagtatgtgaattttatgaatcgtcgtatcagtaacagcatcaccaatcagaaccttactgcagcagctaaaattatcggcagttcagagatgaccgtggaagttaaacgtttggggcaagtgagaaacggtcaccaggccttcatcagttcgtttatcaacggcgatatgcgtgtatttgacggcatcaacaagtacagtggcgaaccgctggtatcaactcaactgaaccggctgatgatcgggcgagcaagaacgacacctccagcggtttccaatacatatctcaagcgtctggtgtattacccggttacattagttgatactgatatggtgtctcagtttaatgcactttcataa

SEQ ID NO: 92542 - DNA, 2052 bp, Enterobacter aerogenes
atggcagggatggaaaaagatgcagacgagaatcttgaaaaagtttctgccgatgcttccagagttgttgaagaaacccgacagaaccttatccccctcagtcgccagtacatgacgcttgctgatgctcaggcggatataacgaatatccctgaagggagcacaacctattaccgcagccctgatgatagtgcgctggctattgaggtcgtcaacaatagcggtgtactgtcggcgacgggcagagtaatgccatctcaggggtatgttgatgccaccattagtgagtccattgataaaaataatgacagtaatttatcaaaatccattactgctgacggaatgaccactgagttggaaacagaatctggagaaaaattcttctccggaatgaatgaaagtcttcaggaaatggcatcgcgaagctggaaagacaactcctcgaatcttcattcagctacggataaagacggggtacagctcgttattaccgatgcggaaggtaaaatccgtatccctcttactaattttccgttgcaggatctgctggctcaggttcagcctgtcccagggccgtttctcaacacgctgagcgcggccgataaggcggcatatggctatatcgacgaactgggcggtcttaaccttccggggcttccgacatccgttaataacatgctggtcagcctgtctaaacgccttcagcagcagacagatagccggtttctcaccagcatcaaagattacggctgggacccgtccagtcaggaggatgcgcgacaggttatccagcgcgcaatccgggacatggctagaaatccttacggcggggtgatttatcttcctcctggagtgtaccgcctgagctcattcctcacacccgcgccgaacgtatcgattattggcgccggtactggaaaaacaatcctgatgccgtatggctcatattcggctctccagttcaccacatcaccgacgaatcccgttccggaattgacggattttgtgtattccgattttgaggtggattgtcaggaccaggtgttgcctgatgaaggttatctcccacggacgaaggggctgtattttaacttctaccgccgcggccacctgcaccgcctgcgggtgagaaactctggcgcgactgggatcggcatcgactttgcgcgcgattccgcgattaccgaatgcgttgtggagaactttgggcggctggcaccatccggtaatgataaccctgccggggcatctggccttggtttgggcgctggtggcacgcagagtgaaccgctctatgttgctggaaacttttgccgcaacggtaagaacttcggcatattccttgagaaacagcatggtactaacgcaccttacagctctgaacacaccatcatcatggggaacacctgtaccggtaataacggcgggatgggtgattgcggtgtggacggaatgattatgatcgggaataacttctctgaaaataattacggagtcgttatcagtccggggaccgtgctggcatatcccggttcacgcgggcgcctgcagggcaatattatcgccaaaaatgccaggcatggcgtctattacaacagcacgactgaacagcgtgacggcgaataccagattgacggcaataccatccgcgataacggagaggatgggattaactttaaagcgccgggacaagaagtccgaagtatgtttatccaggggaatgacgtttaccgcaatggtcgccatggtttccatctggaagacggcacagccatcaatatggacgtagttaataaccgcttctggaataacggcctgaccgctgccggaaacggaattaacctggcctcagaggtaaaactcagctcgttcagtggcaataaaattcgcgacatccagtctacgcctactcagcaatacccagttaatgctactggcgcactgaccgatgtcgatatttcctttaaccactgcgttggaaatgcacagaacaccttgaatctgaccggcacgcaaacccgcgtcaccatgctgaacaatccggggatttga

SEQ ID NO: 92543 - DNA, 198 bp, Enterobacter aerogenes
atggtaagcaagtatgctgtcctgaaagaaggtgtggtagacaatattattgttgctgatgatgattactctcctgatgatttgggagttattaagtatggcgacgagacattttgccagccaggcatgttttataataaggcggacggcctattttacgatgataaagaatattctaaaataaatagcaagaattaa

SEQ ID NO: 92544 - DNA, 882 bp, Enterobacter aerogenes
atggccaaaaatgattttaaagcctttgcaattggcaatggtgcaaatgtgatgtctcaagcagattatgaggatctttcggctctggcatctggttttctttctggcaaagcctcatcggcacaagtaaacaaagcaattagacaatcatccactattgcggcggttgtggcgcagtttatttctgataacagcggggatgacgtccttgataacgggaatttacctgccttgctggccagtctcgaaagtgcccttcgcaattctgtccctggccggttgcagaatattgttagctttaccgcaaatgggacctacatcccatcgccaggaaccaaacatgtaaaagttattgttactggtggtggtggcggtggtggcggttgtcagggaacatccggaacagaatcaatttcaggtggcggcggcggcgctggcggtacggccattgcgtattttgctgtaactgaatccagctatacagtcactgtaggtgccggtggttctgctggtgttggtgctttccagggtggaacaggcggaacctcaatcattaacggcatcagcggattgggcggagagggtggtcagaaatcaggagtcacaacgctggcaggcgggaaaggcggtgtttctattggtggctcggttaaccttcctggaggttacggcactgatgggcaaaatggctccctgattatccccggcaatggtggatcatcatattggggtggcggtggtcgagggggtgcacgtgtgggcgtagcaggggattgttatggttccggtggtggtggtgcatatgacgctgccatgtctggaaactcttacaatggcggacaagggaaatcaggaattatatatattgaggaatattcgtaa

SEQ ID NO: 92545 - DNA, 774 bp, Enterobacter aerogenes
atgagcaaatacacagaccggatatcaaactatcatgccggaaagccgaaattcttttctcatgtagatctttccacgcggcccctaattgatatctcacagacgatgacaggaatgatatcggcttttgatattgatacggcagttggtaagcaactggatattcttggcgagtggatagggcgaaagcgaagggttaacacgccaatctctggtgtgtatttctcctgggatactgaaaagcttggatgggatcagggtgtatggcaggggccatttgacccggatgatggttttcttgacctgagcgatgaagtttatcgcctggtattgaaggttaaaatcgctatcaatcactggaacggtcagaacgacacattaccacctattctcgactctgcgctggctggctccggcatacgtatggcgattattgataaccaggatatgtcgatttctatctggatactcggtgacccggcagcggtcatgagcgagacggacagacttattctggacagtgcagtgaatagaggtccgtttatcaagttgccacctggttatgtcccctcacggtatgacgcaaatccacttgaccaggttaacagtgaactctggtgggccattcgtggcggttatatgaccatcaaagctgccggagtgagagtaaaagaaatagagacaaccagtgatggttatcagttttttgggttcgatattgataacgaatttatcgcgggatttgatcaaggctcatggggagaaaaattttaa

SEQ ID NO: 92546 - DNA, 1200 bp, Enterobacter aerogenes
atggctctggaccttgaatcactcggcttatcggcaacggtaaccgctgaggggataagtgcgcctgactatcaaaccatcctgtctactgtgacgggatattttcagcagatttacggcagtgatgcttatatcgatccggatagtaaagatggtcagctaatcgcgctgttggcgttggcaatccatgacgccaacaacacggctattcaggtatataacagtttctcaccatcaaccgggatcggcgtgggactgtccagcaacgtaaaaattaacggcatcgagcggcacgaggcgacgaactcaacggttgacttgctattaaccggcacggctggagccacaatcactaatggctctgtgaaggatgcaaacggggttgtctggaatcttcccgaaacagtatcaatcggcattgatgggacgattgttgctaccgcaacctgtgcaaacactggtgctgtcgccgcactggcgggaacggtgaacaaaatcaacacgcctacgcggggctggtcatctgcaaataacccacaggccgctactgttggcgcggctgcggagaaagattcagagcttcgcatcaggcagtcacaaagcgttgccctggcctctatcacgccgtttgaagcagttgatggtgcaattgcgaatattaaaggcgtcactcgtcacaaattgtatgagaacgatcaggacgtgcctgacgccaatggcctaccgccgcactcaatagccgcaattgttgaaggtggagacgctacggagattgcaaacacgattcgtggcgtaaaagaccagggaacgacgccatacggcagcacaatcatttctgtgccggacatgtacggcagtcctcacccggtcggattctcgcgcccggttgatgtgcctatttttgtcagcattacgatcgaacctctaaccgggtatacctctcaggtagggaatgaaataaaagctgctgtagcggcgtatatcaactccctggctataggcgcgaatgtagtgataagccgtgtctactccccagctaatctgggagtggtcagtggcggtaactctcgttattacgacattacagagctgctgatcgggacgtctgctgatacggttgctgctgctaacgttgtgattgccttcgaccattcagcatcctgtagtatcgataatatccatctggaagtgacgccatga

SEQ ID NO: 92547 - DNA, 354 bp, Enterobacter aerogenes
atgcgctaccgtcgagaagatgatgacggggattatacgtttggtcagggtgatgatacctggctggttaactctccggaggccgtcgcgcaggccattaaaacgcgcttcctgctctggtacggcgaatggttccttgatacgacagaaggaacaccctggatacaatctgtcctcggaaagcacaagccagaaacctataacctcgctattcgaaaacgcattcttgaaacgcgcggggtgaaatccatcaccgactttaatactaccgttgacagccgcacacggcgcgtaacattcacagcaacggtggaaaccatctacgggacaacgacagtaacctcggaggcgtaa

SEQ ID NO: 92548 - DNA, 654 bp, Enterobacter aerogenes
atgccttcgtccaatcaaactcgaagcggctcccttgatgaaactttcgagtcagaacggaaagttttaaaggaacaaatccgcgtcgcgctacccggcattattcagtcatttgatcctgaatcagtaaccgcagttgtgcagccggctatccgctatgttgagcgtgataacgatggtgctactgaaacacaggattacccactgcttaccgatgttccagtgattttccctcgtggcggcggctgtacgctgacctttccagtcaaagagggtgatgaatgcctggtgatattcggtgaccgctgtatcgatttctggtggcaaagcggcggtattcaggagccggtagacgacaggatgcacgatttatctgatgcgttctgcattgtcggcccacaatcacaggcaaagaaaatcggtggcatcagtaacagctcggtagaactccgtagtgatgatggcggtacaaagctgagccttaatccttcgagtggtgaaatcaatggtaccgcgcctggtggattcaatctgaatggcctgaaaatcctcccggatggtcgcctgcagctggtggatggttccattgtcgataagcacacgcacggcggcgttgaatctggtgggagtaatacagatccgcttgggggataa

SEQ ID NO: 92549 - DNA, 1227 bp, Enterobacter aerogenes
atggaagcgctgtacgcaattttgatagttttgggattaggtgcattgttcgcctggtatttcacatcaaaatattacaaaaagacttacacaagcaaaattgaaattttagaaagtaatcatcgacgttcacttaatgaagaacgagaagaaaaggaagaggctatagaaaagttcaggaaacacgaaataattcgtgagcttgaacacgagaacttaaaaaatgaacttagagatactatcgagaaaaatagggctaagagcaaagagatcctcgcaagagcagttgattacgcattcaatttcgaaaagagttttctatctgagcatcagacagcacagtatgaaatacaaaaagttcttgatgatacctaccgttataaaaggaaaacgcttctctcttctgtaactttgagaaattttgagaaaaaactcgaagatatcaaaaaagaaaaagcaatttatcagactcttatcgcgaaatatgacttcttcgaacttgttgataattccgactggaattcggttgaaaaagaattcagggacaaagttttggccctacaggaagctcaagatgagcgtgaggcacagaatgagctgaaacgtcaaatgcgagaagagcgtcaaagagctgaagagcttgagaaacagcagcaagaggctgaggcgaaagaacaggagcttgaggcaagaagaaaggcggtagaagaagcacttcttgcggcagatgaagaacatcgccttgaactggaagaaactcgccgccagttagagcaggaaattgaagatgttcataaacagtatgagcgagcaaaatctatggcgcaaatgactaagcagggacatgtttatgtcatttctaacatcggttcatttggtgagaatgtctataaaattggtatgactcgtcgccttgaacctctagaccgtattagtgagttaagtggtgcaagcgttccatttgaatttgatgttcatgcaatgattagttgcgatgatgcacctgcactagaatcaacgcttcataataaactaaatggggaaaggctgaataaagttaatcttcgtaaagagttctttaaaactgatttggataaaattattaagtgcgttgaggaacatcatgggaaggttgaatatgttgccaatcctgcggctctccaatattaccgcagtttagagatgaatgatgagtctgttgctgaaaagcaagcggctgtggcataa

SEQ ID NO: 92550 - DNA, 234 bp, Enterobacter aerogenes
atggatatggtcaacggtgagcgtgtgacctcccagaaaatcacaaacttggggactgatggcatcaaaattgagatgggtttgatgccagccaaagacgggaataactacggatttgagtacattcaccgccctggtagcgataagcgttttttgaacgttcaactgctgcagaacagcatggatgcaccgaaaatcattggttcttatccatgcaaaaaagtggataattaa

SEQ ID NO: 92551 - DNA, 1062 bp, Enterobacter aerogenes
atgtcacaaaactggatgcggcatttcgaactgcagctactggacgaaaacgggaagggaatagacctgggtgacttcaaagttactttcacaatcgactggttcaacatcagcagcgctacacgaaccgggacgtttaagatttataatctgtctgcggatacggtgaaccggatcaccggtagtgaatttgccactattcgcgtaatcgctggttatgatggtattgccgccgatgttgacgccagcgacgtaggccgcgttcgtgaggtcgatgcttctcaggtggggcagtctgacggtcgtaactggggattgctgtttacaggcgatattcgctacaccatcacaggcaaagataacccggttgattcgttcgtactgattcaggccgcagataccgatctggcgtttacctcttcaatcacggtgcagacgctggcggcaggatataccgtagccgatatgaaccgcgctttgatgaaggacttcgaggcgaagggcgcgactgagggcgtcaccccgccaatgcctgctaccgtcttcccacgcgggcgcgtgctatttggtatgacgcgagacctgatggataacgtcgcaaggcaatgcggcgcaacctggcaattcgttgatggtcagcgccagatggtggcaaaaaatgagtatgtgcacgaagctattgtgttgaacagcgcaaccgggctaattggcatgcctcaacaaacgatcggcaacggagtgaacgtacgcgctctgattaacccaaacattcgggttaatggcctgattgagcttgatcaggcatctgtctaccgcaccgcactcgcgaataatgatatcgctatggctggtggacgcattaccgatcaggacaataacgggaacatctcaataaccggaaccacctcacagcctgccagcattgctacggacggcgtttatattgtgcgcggcattatgtacactggcgacacaaggggccaggcgtggtacatggatatgatgtgtgaagcgcgtggggctcaagatttgagaactcaggattcgctcaaccgggggtaa

SEQ ID NO: 92552 - DNA, 303 bp, Enterobacter aerogenes
atgcaggtatacgaaatccccctcactgctgataaccagcaattcagtaccattctggcgggtgttacctaccagataagcatcacctggcgtgatccgtgctgggttctggatatcgccaatagcagcggtaaccaggtggttaaaggtatcccccttgtgactggcgctgacctgctggctcagtattcctatctcgggtttggtttcaaactcgccgtggtttgcgacgatgcgaaccaggattacccaacccaaaccgatctcggtaccgccagccacttactggcaataacggagtaa

SEQ ID NO: 92553 - DNA, 588 bp, Enterobacter aerogenes
atggatatcctttctacgctgtttcagcagcagtcccggcgtattggtctgattgttcccagcgttgtagtttctgagaagcataacgacacgctggaaattactgagcaccccgtcgaaacgggggctcctgtttcagatcatgcctataaacgtccctcagaggtcgtgatggaagtggggtttgctggtggtggttcgctgctggatttcattgatacgtcctctctgggcttaacgcttggcctgagccctaaagaaacctatcagcaaatactggacctgcagtccagccggatcccttttgatgtcgtcacaggtaaaaggctatacagcaacatgctgatcagggcgattgaggtcaccactgaccgtacatcagaaaatgtactgatggcggtattaacgctccgtgaagtgattatcacccagactcagcagatagcggtagccgataaagccgatatgaaagagggggccaatacgtcagccgttatcaactccggcacaaaagccgcaaagcctcaaaacgaatccttgcttagctctggctggcaggggctcaaatcaattattggaggcggctga

SEQ ID NO: 92554 - DNA, 1917 bp, Enterobacter aerogenes
atgaacgctgagacgattaaagattttctcgtgtcgctcggcttcaaagtcgatgaaagcggcgagcggaaatttaatgcagtgctggcgggagtcacttctaacgccattaaaaccgggttcgccgttgaagcggcggcactctctgttgtcgcctttacggcaaaaatagcccaggcatcggacaagttgtactgggcctcccagcgcactggcgcgacggtgcaggggcttaaacaggttagttatgccatttcgcaggttggcggtagtgctgactcggcgatgagttcgctggagagcctttcacggtttatcagaaccaatcccggcgcggagggtttcctaaaccgcctgggtgtgcaaactcgcgacgccagcggcaatatgcgcgatatggcgagcattttcaccggggtaggccagaagcttagcagcatgccgtattaccgggctaatcagtacgccagcatgctgggtattgatgaaaataccctgatggcgatgcggcgcggtgtcggcgggttctccggcgaatattccgctatggcgaaagcgatcggctttaatgctgatcaggccgcggtaagttctaaccggttcatgacctcgcttcggtcgttcggcgaaatggcagggatggcgcgggataaaatcggcgctaacctggctggtggcctcgctgggtcactggataaattacgccgtcaaattctcgataacttcccgaaaattgagcagacgctgacggcggctatcaaaggggtattgtggctgggtgaccttattgcccggttattctcccggctgatggaagggacttctgatctactggactggtggaaatcactggataagcagacgcgggaactgatcacgctgtttggcgcattaacggtagcgctgcggatccttaacagcacgttctggatgtctcctgtagggcttgttactgcgttcgctgccagtatcgctttgctatgggaagactataaaacctggaaagaaggcggcaaaagcctgattgactgggggaaatggaagccggaagtagacgccgccctgaagatggtaaaagacctccggcagaccgtcgtcgatctggggaaggcactggcaaaacttctgaatattgaccctaaatcctggtctctgaagtgggatttcagcaacttcatcagccagatgggcgaattcagtaagatgctgagcatgattggtgacctgctgagcgctatcaaggatgggcgctggtccgacgctgccagtattggtaagcaactactgagccagggcaacaataacccggatgctctgccaggtgtatctgatagcgctaatggagcggctgactggattaaggataagtttggttttgaccctcgtagcgtcggacgatttttccgtggtgaaggtaacacgcttgcagaccgcaacaacaaccctggaaatattcgcccggtaggtggtaacggcttccgttcctttggctctgcgctggaaggatggcaggcgatgaaaaaccagctgatgcgatatttcaccgggaaaacgacggggcgcatgctgcaaacggtccaggacatcgtgagtacctgggctcctgctggcgataacaacgatcctcagctttacgccaaacaggtagctggctggatgggcgtttcccctgatgccgtattgaatctgaataaccctaatacgatggcttccctgatgcagtctatggcccgtaaagagggatacgccaactggcaaagccctttagcgtatcaggctgcaggcgcatcaattcagcaaaacaacacctataacattcacggcggtaacgctatggaagttggtcaggaggtcggacgccgccagattgatgcaaatgccagggtaatgcgcaaaaaccagagcggggtaggttga

SEQ ID NO: 92555 - DNA, 486 bp, Enterobacter aerogenes
atggaatgcacgattaaaggcgttaattaccgcgccaataagctgggcgtatttgaacagttgaaggtatcccgcaaattattaccgatcctcgctggcctgatgactgattttagcagcatcaaaaatcttcttccggctggtggcgtaaaagagctatttccggaaggcggagaggaaggtggcgaagccgttaatttggaacggttggagccagttttcaacacgctgctaccgcgtatcgctgacgaactgtcaaaactcaccgaagaagacacgaacgctatcatccatccctgtctcgctatggtggtgcgtgaaaacggcaaacaatggacgccagtcttccgcagtggtgaattgatgtttgatgacattgatctgttcagcatgctgcaactggtggcgcgggtggtcgccgatagcctgggaaattttttgccagaactccccgacaacgcgacgcccaccccgaaagcggactga

SEQ ID NO: 92556 - DNA, 441 bp, Enterobacter aerogenes
atgtctgcttattcgtttcttgatatctcggcttccctggctggacctacgggagctattgaactcggtgctggttcagcgaactccgaagaggggatcgtggttgcgatgaccgaggcaaaaaacaccatgaccatcggcgcagatggtgagggtatgcacagccttcacggcggcaagagcgggacgattaccgttacgttgctgaaaacttccccggtaaataaaaagctttcgctgatgtacaacgcgcagagccagtcctcttccacctgggggaacaacgtcattgtcgtccgtaacaaagcaagtggtgatatcgccacggcacgcggtgtggccttccagaaacaaccagactggaacaaccctaaagtcgccggaacggtcgcatgggtatttgactgcatcaaaattgatgaactgcttggggaattttaa

SEQ ID NO: 92557 - DNA, 1152 bp, Enterobacter aerogenes
atggaaaaagggcttccccttaaccgtatcgctaacgtgacggtgacgctttccgcacgggccgcgcaggggcgcaattttggctcgatgcttatcctgggtgattcaaccgtcatcccgatcgccgaacgcctccgggcttactcatcgcctgatgatattggtgatgatttcggggtggacagcgaagagtataaagccgctgttatctggttctctcagcagccacagccgacactggtttatgtcggtcgctgggtgaagacgcttgaaacaggcgaagctggcgaagttgaaacacttcttgaagcggtcaatgcactgatggactacaacgcctggtatggtctgcatctggcagtgcctgaagcggattatccgaatgacgccgatatcatcaccgtttccgctgcgattgaagcatctaccgtttcccgcatctttggcattaccactgatgaagcgacgatcctggatgcggcgacaactacggatctggcctcaaaactgaaagccgcgaaatacagccggacgtttattcagtattcaaccagtagccgctatgccgcactttctgcctttgcacgtgcgttcacggttgatttcactggcagcaacacgacgatcaccctgaaatttaaacaggagcctggcatcacctacgaaacgctgggtacgtcgcaagccaataacctggaagcgaagaactgtaacgtttacgtctactacgagaacgatacagcgattcttgagcagggcgtcatgagcaatggtgacttcttcgacgagcgtcacggcctcgactggctacagaacgcggtacagactgccgacttcaacacgctctataccagtacaaccaaaatcccacagaccgacgccggaaccactacccgtattgcgaacattgagctggtgctcgataaagccgtgcagaacggcctgtttgcgccgggcaaatggacgggtggcccgatggggcagctcaacactggcgacatgctgacgaaaggctattacacctgggcggaaaacgttgatgaccagttacaggtcgatcgtgaagcgcgtaagggtgtgccgattcaggttgccgggaaactggctggtgctgtccattacggcagcgtggcaatcacagtggttcgctaa

SEQ ID NO: 92558 - DNA, 552 bp, Enterobacter aerogenes
ttgagtaacgacagcacagagcccggataccttacgcccgttggcagcgagccggattacgacgaagagctggagcgacagctaagtcgctgggtgaggggagttacggggatgcctgcaaaaatggttttcccgcgctttacggatccccagcaaaagataccgctgaacggggaaacgtggtgcggttttaacttctccacgctctcacggcctggcatgccagcaaacatccaggtaagcgaagagcagagcgagcaatggtcgtgggaagggattcaggttctgctctgtttctacggccctggtggttctgcgatggctacgcgcttccgtgacggaatattcattgagcaaaactcagatacgtttcgacgaatcacaggtttgtcgctggtggatgccggagatatacgaaacctccccgaattaatcaataaccagtgggtgcgccggtacgacgtgaccgtgaccctttcccgcaaaaacacccgtacttacaacgttaaatctatcgttggccctaacgtcacgatagttaccggagactaa

SEQ ID NO: 92559 - DNA, 405 bp, Enterobacter aerogenes
atgccgcttctcgatgttaccgatgtgctgctggatccggactttatggatacctctctggtctgtcatcggcaggtgcaaacggtcgatgaagataattacccgaccaacaccgctcaagctatcccgttctctggtgtggtgacggtagaccgctctcttgaagccaaacgaatggcggcgggacagaatatcaacggagcaattctcatcgtgacgcaattccggctcacgcaggggatgccagccagtgattcaacacctgaactagatgccgatatcgtgacgtacagcggacgtaattaccgtgtgacgtttgtcgatccatatacccgatacggtgccgggttcgttcaggcgcattgcgaattgctcgaatttaacggaggtattcccgttgagtaa

SEQ ID NO: 92560 - DNA, 507 bp, Enterobacter aerogenes
atgaaatccggattaacgattaccacagataacgctgagtctgttctggagtctctacgccagctttcaggtatggatgtgctggtgggtatcccggatggcccaaagcgcgaagacgctccgctgacgaacgcagagctgggttatctgcaatcgacaggggcaaccattgaaattgacggtgcggtagtgacgctaccgcccagacctttcctggacatgggtattgaagactctttacccagaacaacggcacacctgaaggccgcagcagaggcaaccatggagggcaaaacggatgcagccatgcgggaactcgaaagcgccggacagattgcccgtgatgcttctaaagcggtgatcggttccggcgatcgccttacccccctttctgataagacgattgctaaccgcagggcagcaaagccgccgatcccaggcgataagccgctttatgctcgtgggttcctgctgcgttcgattacgtatgtcgtgaggaaaaaataa

SEQ ID NO: 92561 - DNA, 417 bp, Enterobacter aerogenes
atggcaaaaaacaaaagcctgccgacgcctgagaaattccgtaccgacttcccgcaattttctgatgaagataaatacccgacaccgatgattcaggtcagattgaatctggcggatgtcctcatgagtgaggcgcggtttggtgaggatattttcccctacgtagtagagctgtttgtcgcccattacatggcgttatacgcggctgatatgcgaagcgctgctgttggcgcttcaggtggggcgaatagtggcgttcagacatctaaatcagtggataaggtctcagtgggctatgacgccagcatgacgcttaacccggatgcaggtttctggaataacacgcgctatggctcagagttttgggaatacctcatgatcttcggtgccggggctattcagttaggtacgccgtaa

SEQ ID NO: 92562 - DNA, 261 bp, Enterobacter aerogenes
atgaagaaaatctatgtactgaccgcgtttaatttcaacgacggcgacaaaataacgccattcgctgcaggttttcatgatgttgatgatgctgttgcagagcattggtttgtgaaagcgcattgctcgcccgatggtgaagcgcctgcacaggtagacgatccgcgcattgcagagtttgaagccagaatcgccgagcttgaagcacaactcaaagaggctaaagccaatggcaaaaaacaaaagcctgccgacgcctga

SEQ ID NO: 92563 - DNA, 942 bp, Enterobacter aerogenes
atgccaatgacatttgaccaggcaacagtagacagttctggtgcctttctcatcggagagctggagcgcttggatcagacgctgaacctgccgctgacctcacagacgtggagccgcgatattcaacttcgcgaagacgtgtctatcgctgacgaaatcagctctttcaccaacaccacctttgcggctgccggcacaccgaatgctaacggtaaaaactggatcagcccgctggccactgcgattgcaggcgtcaacgttgatatcgagaaaaagggcttcccgctggaactatggggcatggagcttggctggaccgttatcgaactgaatgctgcggcacaggtaggccgtcctatcgatacccagaagtacgacggtatgcagttgaaatggaatatggataccgatgagcaggtttatatcggtgacacggcaaaaggtgcgaaaggtctgctgaacctgtctcaggtgaccccgaccaacgcgactaaaacgtgggccacgtcaactccagatgaaatccgcgccagcattaaccaggtactgagcaacgcatgggcccgttctgcttactctaaagtgccggaagacttgcttatcccgccagaacagtattcgttcctggcgagcaccatcgtttccagtgcaggtaaccagtcacttctgacttatctggagacaaacaccatcgcttaccaccagaacggcaaaccgctgaacattcgtccggttaaatggatgaaggggcgtggtgttggcggtacggatcgcatggtggcctacaccaacgataagaagtttgtgcgcttcccgatggtcccgctgcagagcgtcccgatccagtatcgcggtctgtatcagttggtgacttactacggcaagctgggcgcggttgagccggtttacccggaaaccctgaactacatggatggcatttaa

SEQ ID NO: 92564 - DNA, 495 bp, Enterobacter aerogenes
atggataacacttttctctaccggatgcctgcgggcatccccggggcaatctcacgtccgcaggatctgacggttgaacctcaaacgctggatagcactaaagcattcagtgcctatggccttgccgggaagttctccgcaggtaaattcgtgccgatcgaggcatcggataccgcagccgtagtggttggtatttacgtccgtccttatccgaccacaacacagccagataaagttcgccagatcggtactggttacaactttgctggtgattgcatgaagcgtggttatgtcacggtaaatcttggctctgatgcaagcgccgttacgcttggtggggaggtttatatgcgtgtagccactccgaccgcatccagcccactgggcgccttcctggcagctgctgatggcgataacactgtccagcttaccaatgcttacttcaatggccctggcgatgctaacggcaacattgaactggccttcaacatttaa

SEQ ID NO: 92565 - DNA, 1200 bp, Enterobacter aerogenes
atgaaatatttctttaaaacccgactggggaacacccgtttccagctcgctgatggttctgtgctgttcaaggatgtgcctattgggcgcactggcgagcaggagtacgacaaaaccgaaaggccagaactaaccccgggcgtgtggggaaaaatcattgtccgccgaactcctgaagaagttttcagcgaacgcgcgatggcctcgtttgaagggatggcggtaacgataggccatccacgcgattttaatggcgacatcatttttgtttcccctgaaaactggcggcaactggcacacggacacatccagaacgtcaggcgcggtgagggggataaatcagacctgctacttgctgatgtcattgttaaaagtcctgaagcacttcaggccattgatgatggcgatgatgaggtgagctgcggttatgacgcagattacgaacaaatttcacccggcctcgcaaatcaatctgcgataaccggtaaccatctggccctcgtccctaatgggcgggctggtttccgttgcaaaataggggatgctatgcctagcactactaaacactggtttacccggcttcttaaggcccgcaaaaccaacgatgccgccgaaatggcgagcttgattgataatccgccagatagcgtgactggggatgatgatgtttcaacgtctgtcactcctggtggtgtggttattaacttatcacctcaaaacccaatgccagcgccaacactgccgggaacaggtgacgccgaggaagacatcccggaatggggtaaagcgctgatcgccgcggtcgccaagctaactcctgcagcctccgctactggcgatgaggaggacgaggaggagaaaaaagaagaggaaggcgctattacaggtgacgccgcttatcgtgccgatctgattcaaccgggtatccagttaccgtcaaaggcaaagcctaccgccttcaagcgctcggtgctatcaactgccgatcaggcgatggtgcgttctatcgtcggtgatgctgatatcaccaaactgaaaaaagcgaccgttgatatggcgtttaacgccgtgtctgaagtggcgaaaaatcgtaataccgcagctaaaaccgctgacggcttccgctcaatgaacaccaataccaccaaaaccatcgcggagatcaacgccgccgcgaaagaaatctgggctaaacgctaa

SEQ ID NO: 92566 - DNA, 1452 bp, Enterobacter aerogenes
atggcgaagaaaacgggacgagtcgccacggcggattcgtacgataactttattgcacgtgttggcatgcagcagccgaaccagcatgcagcatctacataccgggcgaactataccagccgtaaccgcctgctgattgagtacgcgtaccgttcctcctggatcattggtgccgctgtcgatgcaaaagcggacgatatgaccaaaaagggcgttcgcatcaccagtgagattgacccgaaacgtcgtggcattctggaatcacgttttgatgaacttcagttgtgggattgcatcaacgaaacgctgaagtggtcacgactatatggcggggccgtagcgctgattctgattgaagggcaagcaccactgacgccactgatgctggacaaggtagggaaaggcagtttcaaaggcctagctgttcttgaccgctggatgattaacccgcagcttaccaggcgcataaaagcgcttgggcctaacctcggtaaacctgagttctacgacatcgtgacgacggcacaggggcttcctgcgtggactgttcaccatagtcgcctgattcgcatggatggtgtgaaactgccttaccagcagaaaatcaccgagaacgagtggggcatgtctgttgttgaacgtatttttgaccgcctgacctcctacgacagtaccagcgttggcgctgctcagttggcctataaggcgcatctacgtacggcaaaaattaagaagctgcgtgagattatcgccatgggcggtaaaccattcgaagcgctggttaagcaaatggaattggttcgccagtatcagacaaatgaggggatgtcgctttttgatgccgatgacacctttgaaacccactcctattcttttgctggtctgtcagatctgcttagtgaatttaaagaggatatcgcgggggctgtggggatcccgttggtccgcttgttccgccagtcgccgaagggtttttcaaccggtgatgctgacctggcgaattactacgatgacgtgggaactctgcaggagcgagatttacggcctcacatccgcctgttattcgatgtactgcatcgctcagagtttggcgaaccgttgccggaagatttcacgtttgagtttaatcccctgtggcagatgagcgaccttgatcgctccacggtggcgacgaacacaacctccgcgctggctactgctgtgcgtgacctgggtatgtctcccgccgctgccttgaccgaccttcgagaaatgtcggatgtgactggcgttggcgcgtcaatttcagatgaggacatagaaaatgcgaagtcccagtgggaggaggatgaatctgaaaccagccctccgccgacgttcggagacccaataccgaaagagcctactggcgatagcaaaccagataggggaaatcgtagcgggctcttacgatggttcacaggcaagcgctga

SEQ ID NO: 92567 - DNA, 1614 bp, Enterobacter aerogenes
atgccgctgcctttcccctttgatttcaaaaatcctgactacaacatggtttttgagtggaggatggagcgcctgcagcgcatcagacaaaaccctgcagcgctccctgcactcaaacagttttatcgtgacgatccggcccagttcattatcgactgggggatgacgaccgacccacgaaacctcgactacggtctgcctgccactatcccgtttctgttgttcccacgccaagaggagtggattaactggataatggacaggcgcagcaagcttgaacatgggctgacagaaaagagccgcgaaatggggctgagctggacgtcaatcgggctggcctgttcgctatgtctctttaacaaagaaatggttattggtttcggttcccgtaaagaggaatacgtagacagcactggtgaccctaaagcgctgttctggaaggctcgaaagtttgttgagctgttgcccgttgaattccgtggtgactggagtgagaaaaagcatgcgccctatatgcgcgtggagttcccgacgacaggagccgttatcaaaggcgaggctggcgataacattggacgtggtgaccgaaccactctctatttcgtggatgaagcggcgttcctgcagcgcccactgctgatagatgccgcattatctcaaacgacgcgctgccgtatcgatctttcatcggtgaacggtatgaataacccgtttgctcagaaacggcatagcggcaaaatcccggtattcacattccactggcgcagcgatccgcgtaaggatgacgaatggtaccggaaagaatgcgagaaaattgataacccggtcatcgttgctcaggagctggacctcaactatcaggcatcagccgaaggcatcctgattccttctgaatgggttcaggccgctgtagacgctcatatcaagctgggtattgagcccagtggtcaacgcctcggcgcgatggatattgcggacgagggcaaggataaaaacgggttctcagctcgttacggattcctcctgcaggacgtcaaagaatggtcaggcgaaggtagcgacatttacgcttcagtggtgaaggtctttggctattgtgatgattttgggcttgatgaattccggtttgatgaggatggtctgggggcaggtgcccgcggtgatgctcgtgttattaacgaacttcgttctggtgaacgcctgccacaaatcaccgcaacgcctttccgtggtagcggtagtgttttcgatccggaagatgaagccgttcccggcgacaacgggaaacctgcccgcctgaataaggacttctttgctaacgcaaaggcgcagagctggtggcatcttcgtaaattattccgcaatacctaccgcgcactgcagggcatggaatatgaccctgatgagatcatttctatcagtagcaagatagaaaacaaggaccgtctcctcatggagctttcacagcctacctggtcaaagaatgccgtcggcaaaatccttgtagataaacagccggatggaacgaaatcacctaacctcgccgactcagtgatgatcaactatgcgcctatgaatacggcgatggatatctgggcgaaactcggagcataa

SEQ ID NO: 92568 - DNA, 474 bp, Enterobacter aerogenes
atggctgcactaaaaccagaggtgaaagccttcatcattcagcagcttgcatgctttgatagtctctctgtagtagtcgagtccgtccaaaaagaatttggaattaaggtatccccgcaacaagttgaaacgcacgacccaacaaaggttagcgggaggaaattggctaagaagtgggtggagctattttttgatactcgtaagcgatttcagactgaaatatcagatattccgatcgccaacaaggcatatcgtcttcgcgtgcttaatcgcatggcgacgaatgcagagaatatgaaaaaccttggtatgactgcgcaacttctggagcaagcagcaaaagaggttggtgatgcttacacaaaccgcctgaaggttgaaagcactggcaaagatggcgggcctatcaagactgaagtaacaaacctttcaccgcaggaagctgctgaagcttacaaaaagctcatgggctaa

SEQ ID NO: 92569 - DNA, 639 bp, Enterobacter aerogenes
gtgaccaccattaatgtcagcaggccatatcctccggttaacttcatcggttccgataactggcagccatacaccagactcattcccgccaacgaagtgcatgagtgggttagccggcaaatactcatcgacaccggaagcatctacaacccagaccatgggcatcttctcgatgctgacctctgctttatgtgggcgtctgattctttcgcgaagaaaggtcgctatgttctcggtcaggccgaacaggtaatgcttcgcgccggaggttggcagaaagccagaatggaacagcagatgtatgaatggttcggacgcataccgaagttcatcatcacgctggcggccgattactgttcacagtgcagcgaccttgaattttgcgcgctggtggagcatgagctttaccacattgcccaggcgaccgatgatttcggcgcgcctaagttcaacaaagagaccgggatgccagttcttactctgcgcggacacgatgtcgaagagttcgttggcgtggtcaggcgttacggcgcaagtaatgatgtgcaggagttggttgatgcggcaaacaggccggcggaggttgctcatctcgatgttgccagggcgtgcgggacttgcatgctgaggctggcataa

SEQ ID NO: 92570 - DNA, 201 bp, Enterobacter aerogenes
atggcaaagcaaaactggtttttttcctggaatgcatatgatgcaatcacgggacaacacctccctgagtattcccatagcgaaacttacgttagtgacaactcgatatcccctcatgaagtatttgaagatttgatggagcagaaaggtaggttgcgcgaaaacctcagaattcactgcattgcattcaataagctttaa

SEQ ID NO: 92571 - DNA, 462 bp, Enterobacter aerogenes
atgagtcgtatcacagccattataagcgcagtgattatctgcctgatcgtctgccttggatggttggcgaaccactactacaccaacgcaaccgaattcaaacggcagcgtgatgaaaaggttaaggcgctggaactggcgaacgccactatcaccgatatgcagacccggcagcgagacgttgccgcattggatgctaaatacacgaaggagttagcagatgcgaaaagccagcttgaagatctgcagcgttgcgttagctctggcaagtgtgggttgcgtctcaacgccacctgtccaaaaaatggagcgaccacctccggcagcgtgggcgatgcttccggccccagacttacagactccgctcaacgggattatttcacccttagagagcggatcgctaccatcatcgggcaagtaaactacttgcaggactacattcgaacgcagtgtttgcagtaa

SEQ ID NO: 92572 - DNA, 498 bp, Enterobacter aerogenes
atgaatcaatccttgcgaaaatatgttttttctgcggtcggtggtggcgcaattgccatagcgtctgcgcttatcactggtcctacgggtaacgatggtcttgagggggtgcggtatcagccttatcaggatgtggtcggcgtctggactgtctgctatggacacacaggcaaagacatcatgcttggtaagacttacacgaaatcagagtgtgatgctcttctggataaagacctcaacgccgtcgcccgtcagattaacccgtacatcaaaaagccaatccctgaaacgatgcgcggggcgctttactcgttcgcttataacgttggtgctggcagcttccagacttcaacgctgctgcgcaaaatcaaccagggcgattcgaaaggtgcctgtgagcagttgcgcgtctggatttacgcggggaaaaagatctggaagggattggtaactcggcgggagattgagcgtgaagtgtgtttgtggggccaaaaatga

SEQ ID NO: 92573 - DNA, 303 bp, Enterobacter aerogenes
atgaaaatgaacgattccgggaacatcttcacgcaattctttgcgtgggtagggacctttgccgcagcgctgggctttaccacccaggatgttgtttacatgttctttggtgctgtcggcttacttatatcccttgcgtcatacattaacgggcgagtagatgcacgacgaaagcgccgggaagacgaaaagcgtactcagatggtcaatgactacctgaaaggcgtcagtgacaaacctcaccatgaacgcccagcggcggcaagcgtagttgttgaggcattacaaaaggcgggagagtga

SEQ ID NO: 92574 - DNA, 609 bp, Enterobacter aerogenes
atgactccgcgccaacaacgtaatcatatttctgccattcaaaaagcggcatcagcaccgcataagcgttggctgggtcgatccctgctgctgacttccgttcaggccggatggattaaatcacttttaacggtatggggagagtgtgtcggcggtaaaactcgcgcagagtatcgccttcagaactgcaatcaattctgggggaaactgaaggaagatggatgggatgaaagtcagctaacgcgcataaccgaggcgctgaaacaggcgagagaagagggctttagcggccctcaggcaatgggaagggcgcgagcaatactatggcctaccacactaagcgacatgatagagaaagccgaacgacatgatgatgccgactgcatagagcaagctgtactccgaacctttgagttagaggatccggtctacgtcatagggatgaattattacaccacccgtaaaaaaatatctgacttggcgcgagagctgcagcatgccgctccctggctaactccgccaatggcgagagagcgtgttaaatggtgccttcaaatattccaggcgaaaacgttcattgcagtacgccagagcctgaaatctgagtaa

SEQ ID NO: 92575 - DNA, 645 bp, Enterobacter aerogenes
atgagttatcaacttatttatgtcgatccgccgtgggactacaaaaataaggcgagcaacggtgcagccagcgaccactactcaacaatgaagttagaagacataaagcgtattcctgtctgggaagtagccgcaaaagatgccgtgcttgcaatgtggtacacgggaacgcatacagaagaggcgatagagcttgctcaagcctgggggttccgtgtacgcaccatgaaaggttttacctgggtgaagctgaatcagtacgctgaacgccgatttaatacggcgcttgaatcaggtgagctggtggacttcagcgatctccttgccatgctcaacaacgaaacccgaatgaacgggggaaattacacccgcgccaatacagaggatctgttgattgctacgcgcggtattggtcttgagcgcgtcaatgcgtccattaaacaagttgtatacacctgcctcggagagcacagcgaaaaaccgtgggaagttcgtcaccggttggagttgctttacggggatgttcggcgcgtcgagttgtttgctcgcgactcctggcctggctgggatcgttggggtaatcagtgcaacaactcattcgaaattattcctggacgtattttaaacaatgaggtgaagggatga

SEQ ID NO: 92576 - DNA, 168 bp, Enterobacter aerogenes
atgaacgaagaagaattattagaggcgatccgcatacctggtagttacgtgctggatagtcttcctggtggcgtttatgttctcactccaatggagtcaggagaaataaagaacaccgaatcctctcacgaggaatgcaaaagctactttctgaaagatagaagctga

SEQ ID NO: 92577 - DNA, 234 bp, Enterobacter aerogenes
atgaaaattgaactcacaattgctaaggacaaaaaactccctgatggtgcggtgccagcccttgagaaagagctgctgcgtcgattatcccagtcgtatgatgactgtaagctcacaatcagacgtacaagtaacgatgggctgagcgttctgggcggtgctgacggcgataaaaaacgtgtagagcaaatcctgcaagagacgtgggaaagcgctgacgattggttttactga

SEQ ID NO: 92578 - DNA, 330 bp, Enterobacter aerogenes
atgggattcccgtcacccgcaaaagactatgcagagcaaacacttacaataaacagactttgccagattgatgctaactgccgcgtactggagacgagttcgggttatgccgttatcgatgtttcccggagaccaaagcagggcgatcacgtgctcgtttctttctgcgggataattcagtttggcatcgttcgcggtcgcgcgctaattacttccgatggcgaagcgatcgagggtgacgccctggacgatgtggaggtgaaaggcgttctgacgttcctgattaaccgtgcaacttacgttgatgaagaccctaaccccgttatctaa

SEQ ID NO: 92579 - DNA, 552 bp, Enterobacter aerogenes
atggcggatggctggtgggcgcgcgtcgggtgccttcgccgcatcacgattgccgcccggacgatgaaaacccttctttacttggtacataatatcagcctgccgccgggggagtttggcggcccgtggattgacgcgctatttaccggtacattggatgccgacgcgcatccttacttcgccgggattgctcatctgcgcgtttcggcgcattgtctgattcgccgcgatggcgagatagtccagtatgtaccctttgataagcgcgcatggcatgcgggcgtctccagctatcacggccgcgagcgctgcaatgatttttcgatcggcattgagctggaagggacggatactcaggcttacaccgaggcgcagtaccagcagttagtggtgattacccaggcgcttatccagcgttatcctggtattgctgataatattaccggccattgcgatatcgcgccgatacgtaaaacggatcccggcccggcctttgattgggcaaaataccgcggtatgttggccgcatcgtcacataaggagataccatga

SEQ ID NO: 92580 - DNA, 219 bp, Enterobacter aerogenes
atgaaattccatttttgtattgatttctttacggaaagcaaagcggaaattccctcaaagacctttcgcctgatgaagaataatggtaagggcgtgcgaatgcacctgctttatgaagggatgatgacggaacgaacaaaaagacaccgtttgtcattttttcttaccatcgccgccgctacccttaattggttatctattcactttattggtttataa

SEQ ID NO: 92581 - DNA, 2319 bp, Enterobacter aerogenes
atgaaaatcagtgatggaaactggctcattcaaccagggctcaacctgatccaacccgtacaggtttacgaggtggagcagcaggggaatgaaatggtggtctatgccgcgccgcgcgatgtccgcgaacgcgcctggcaactggatacgccattgttcaccctgcgctttttctcgcctcaggaagggataatcggcgtgcgcatggagcacttccagggcgcgctggataacggcccgcactatccgctgaacgtgcagaaagacgtccatgtcgaaatagaaaatacggccgagttcgccgagctgaaaagcggcagcctcagcgtgcgggtgactaaaggtgaattctgggcgctggattttctgcgcgacggcgtgcgtatcaccggtagccaactgaaaaacaacggctacgtgcaggatagtaagacccagcgcaactacatgtttgagcgcctcgacctcggcgtcggcgaaaccgtctacggcctcggcgagcgctttaccgcgctggtgcgcaacggccagacggtagaaacctggaacgaagacggcggcaccagcactgagcaatcctacaaaaacattccgttctacctgaccaaccgcggctacggcgtgctggtgaatcacccgcagcgcgtctccttcgaggtgggctcggagaaagtctctaaagtccagttcggcgttgaaggcgaatatctcgagtacttcgtgatcgacggcccgacgccgaaagcggtgcttaaccgctatacgcagttcaccggccgcccggcgctgccgccggcatggtcgttcggtctgtggctgacgacctcgttcactaccaactatgacgaagcgacggtaaatagctttatcgacggcatggccgagcgccatctgccgctgcacgtcttccacttcgactgcttctggatgaaggccttccagtggtgcgattttgaatgggatccgctaactttcccggacccggaagggatgatcaagcgcctgaaggcgaaagggctgaaggtctgcgtgtggatcaacccgtacatcggccagcgctcgccggtgttcaaggagctgaaagagaagggctatctgcttaagcgcccggacggttcgctgtggcagtgggataagtggcagccggggctggcgatttatgacttcaccaacccggaagcctgccagtggtacgccgacaagttaaaaggtctggtagcgatgggggtcgattgcttcaagaccgacttcggcgagcgtatcccgaccgacgtgcagtggtttgacggttccgatccgcagaaaatgcacaaccactacgcattcatctataacgagctggtgtggaaggtgctgaaagagaccgtcggcgagcaggaggcggtgctgttcgcccgttccgcctcggtgggggcgcagcagttcccggtgcactggggtggcgactgctatgccaattacgaatcgatggcggaaagcctgcgcggcgggctgtcgatcggcatgtccggcttcggtttctggagtcacgatatcggcggtttcgaaaacacagcgccggcccatgtttataagcgctggtgcgcctttggcctgctctccagccacagccgcctgcacggcagcaaatcctatcgtgtgccgtgggcctacgacgaagagtcctgtgacgtggtgcgccacttcacgcagctgaaatgccgcatgatgccgtatctctatcgccaggcggcgctggccaacgagttcggtactccgatgttgcgtgccatgatgctcgagttcccggacgatccggcctgcgactatctcgaccgtcagtatatgctcggcgattcggtcctggtggcgccggtgttctctgaagcgggcgaggtgcagttttatctgccggaagggcgctggacgcacctgtggcataacgatgaattgccgggtagccgctggcataagcagcgtcacgatgcactgagcctgccggtctacgtacgtgacaacaccctgctggcgctgggcaacaacgaccagaaacccgattatgcctggcatgaaggcaccgccttccagctgttccagcttggcgatggcaatgaaacggtctgtcaggttccggcggccgatggttccttgattttcaccctgaaggcgaagcgccagggcaacaccatcaccgtgagcggcgaaggcgaagcccgcggctggacgctgtgtctgcgcaatatcccgcagatagcgggcgtggagggtgggactcaggcgggcagcgaactgggtgtggtagtgagcgcccagggcaatgcgctgacgattacgctgtaa

SEQ ID NO: 92582 - DNA, 1395 bp, Enterobacter aerogenes
atgaaagatcatattctgtccgtcaaagagaaaattggctacggtatgggtgacgccgccagccacatcatttttgataacgtcatgttatacatgatgtttttctacaccgatattttcggtatccccgccggctttgtcggcaccatgttcctgctggcgcgggcgctggatgcgatttccgacccgtgcatgggcctgcttgccgaccgtacccgcagccgctggggtaagttccgcccgtggatcctcttcggcgctatcccgttcggcctcgtctgcgtgctggcctacagctcgccggatttaagccacaacggcaagctgatctacgccgccgtgacctacacgctgctgaccctgctctacaccgtggtgaatatcccctactgcgcgctgggcggcgtgatcaccgacaacccgacgcagcgcatctcgctgcagtcctggcgcttcgtgctggcgacggcggggggcatgctctccaccgtgctgatgatgccgctggtcaactttatcggcggcgaagataaagcgctcggcttccagggcggcattgcggtgctctcggtggtcgccttcctgatgctggccttctgttttttcaccaccaaagagcgtgtcgaagcgccgccgagcagtacctcgatgcgtgaagacctgcgcgatatctggcgcaacgaccagtggcgcatcgttggcgtactcaccatcctcaatatcctcgcggtctgcgttcgcggcggcgcgatgatgtactacaccacctggatcatgggctcggcggcgctgttcaccgtcttcctcaccacctactgcgtcggcaacctgattggctcggcgttggcaaagccgctgaccgactggaaatgcaaagtcagcgtcttctggtggaccaacgccctcctggcggtgctcagcgtggcgatgttcttcgtaccgatggacgccgaaatcaccatgttcgtctttatcttcatcattggcgtactgcaccagctggtgacgccaatccagtgggtgatgatgtccgacaccgtcgactacggcgaatggtgcaacggcaaacgcctgaccggcatcagcttcgccggcaccctgtttgtgcttaagttggggctggcgctgggcggcgcgctgatcggctggatgctggccggcggcggctatgacgccgccgctaaaacccagaacagcgccaccctcaccatcattatcgccttgttcaccctcgttccggcggtgtgctacctgctgagcgcggtaatcgccaaacgctactacacgctaaaaacgccgttcctgaaaaaaatgatggccgagctggccgagggcgcgcgtcgcaacgaacaagaattcacggcagccccgatcgaaaaagaatggcaaaactaa

SEQ ID NO: 92583 - DNA, 1998 bp, Enterobacter aerogenes
atgagtgaaaatgatacaatcccaaagaagtctacaagccagattaacaaagcggtattctatacatctgctttgctaattttccttcttgttgcctttgccgccgtattcccggatgtcgccgacaaaaattttaaactacttcagcaacaaatcttcacgaacgccagctggttttacatccttgctgtggccctgattttactgagtgtcacgttccttggactctcacgctacggtgatatcaagctgggtccggaccatgcgcagcctgatttcagctaccactcctggtttgcgatgcttttttcggcagggatggggatcggcctgatgttctttggcgttgccgaacctgtaatgcattatctttcgccccccgtcggcaccccagaaaccgttgcggcagccaaggaagcaatgcgtctgaccttcttccactggggactgcacgcatgggcaatttatgccattgtggcgctgattctggcgttcttcagttaccgtcacgggctgcctttaacgctgcgctccgcactctatcccatcattggcgatcgtatttacggtcctgtaggccatgcggttgatattttcgctgttataggcacggtctttggcgttgcgacatcgctgggttacggtgttttgcaggtgaatgccggtttgaaccatcttttcggggtgcccatcaatgaaacggtgcaggtcattctgatcgtggtcatcacggggttagcgacgatttcagtggtgtccggcctggataagggaatacgtatcctgtctgagctcaatctgggtctggcgttgttgctcctggcgctggtcctgtgtctggggccaaccgtgcttctgctgaagtcatttgtggaaaatacgggcggttatctttcggaactggtgagtaaaacgttcaacctttatgcgtatgagcctaagtcgagcaactggctggggggctggacattactgtactggggatggtggctttcatggtcgccgtttgtggggatgttcatcgcacgggtctcccgcggacgaaccattcgcgagtttgtcaccggcgtgctgtttgttcccgcaggttttacgctcatgtggatgacggtgtttggtaacagcgcgatccatctcattatgaaccagggggccacagatctcgccaatactgttcagcaggatgtcgcgctggccctgtttaatttcctggagcatttcccgttctcttccgtgctgtcattcattgcaatggcgatggtaatcgtcttctttgtaacgtctgctgattcgggggcaatggttgtagacactctggcatcaggtggagtggcaaacacacccgtctggcagcgaatattctgggcctcgctcatgggcattgtcgcaattgcgcttctccttgcgggagggctaagcgcgctgcaaacggtgacaatagcgagtgcattgcccttctcagtgatcttactgatatccatatacggacttttaaaagctttgcgccgggatttgaccaagcgtgaaagcctgagcatggcgacaattgctcctacggctgcacgtaacccaattccctggcaaagaaggttacgcaatatcgcgtatctgccgaagcgctctcttgtgaaacgttttatggacgacgtcatccagcccgccatgacactggttcaggaagaactgaacaagcaggggacgataagccacattagtgacgcagtcgatgatcgtattcgtcttgaagtcgatttgggcaacgagctgaatttcatatatgaagtgaggcttcgcgggtatagctcaccgaccttcgcgctcgccgcgatggataatgatgagcagcagactgaacaacatcgatattatcgcgctgaagtttatctcaaagaaggcgggcaaaattatgatgtaatgggctggaaccaggaacagctgattaatgacatactggaccagtacgaaaaacacctgcacttcctgcacctggttcgttaa

SEQ ID NO: 92584 - DNA, 1278 bp, Enterobacter aerogenes
atgatttcacgttggaaatggattctgaagcagacatttaaaagactatggttcagggcaacattattcgcaattgttgcgataataacggcccttttatctattctttttaaatcaatgatacctgagtcgatttccgtaaaggtgggtgcggaagcagtcgataacattctgaacatactggcatcgagtatgctggcagtgaccacattttcactgagtatcatggtcacagcttacggttcagccactactaatgtgactcccagagctacgcgtttagttgttgaagacgtaaccacacaaaatgtactggccaccttcatcggttcttttctcttcagtctggtagggattattgccctcaatatgggagcttatggagaaaggggaagagtcattttattcattgtcacactggttgtcattgccttaatcctcatcacattgcttcgctggatacagcatttgacctctctggggagggtaggtgagacaacggcaaaagtagaacaggcggccatcgaaacatttattgcgagagcaagaaatccctgtctcggcggatatccatggcttgagaataataaacaaccgaaaggaacggttgcagtttatccgaagaagattggctatgttgaatatattgatatggagaaactcagcaagttgctgaccaatgatccccgtcatgtatacctcgtggcgcagccaggcagtttcatacatccgtccatgccagttttgtacctgagtcagggccaggagtcattaatcagcaccgatttacttgagacgattattgtctcggatgtacgttcatttgctcaggatccccgattttgtcttagcgtcatggccgaaatagcctgccgggccctttcccccgctgtgaacgatcctggaaccgccattgatgtcattggcagaggtgttcgtatactttccgcttacgcgcagaataaatctgaggaaatagaagtgaaatatccttcagtacatgttgcaccacttcagaataacgatctactggaagactttttctcacctgtcgcgcgcgatggtgccagtatgagggagattcagataagagtccttaaaggactgtatatgctgagtacgggttggcctgggatgtttgctgaagccgcacataccctggcatctgaaacattagaacatgcaagtcgtgctgaccatatagattctgacagatatctaataaaatcaatttattataatttatttggtggcgaagattctaatgaaaaaccataa

SEQ ID NO: 92585 - DNA, 894 bp, Enterobacter aerogenes
atgattgatgatatccgttacctgattgtttttgcaaaaattgtacaagctggatcgatttcaggtggcgcagacgctttagggctcactaccgcgacagcaagcacacatctttctaagctggagagaaatctgggaagtgctttgctatacagaaacacgcgaaaattatcgctgacccatgatggggcaagtttgctcgaaactgcaaactctatgttagaactgtatgaaaaggggtttatcgagtttaaacagcgttctatttcaacaagtaataagctgaatctgtcaattcctgcagtttttataaatagtgtttttactcgtcatcttgcaggatttataaaggaacatccggacgtttccctgagtatttcttatagcgacactcgtaaagatattattgccgatagtatagatgttgcatttcgaattggcgaactgcccgacagcacactcaaagcacggcatctttttgtattaccccgacacgttgttgcttcaaagaaacttcttagcaattatcagcctatcaaccatcctaatgacttagaaaaaatgccctggattggtctgagcatgctgaagggcagtcgagagttcaggcacaaaaatggagagatagctttaattaagtatacgccaacggtgtacgttgataatgtcgaggctgcctacactctagcaaaacatcaggttggaatcgcagcccctccttgctatctcagcaaagaggatattaagcgagatgaaatacagttggttctccctgactggtcattggaaccactaaaagtctatgcaacctggccttctaatatatctaccaacagtgtcgcttacacgttaattaataacatttacaactcctttgaattcaaaatattatga

SEQ ID NO: 92586 - DNA, 588 bp, Enterobacter aerogenes
atgactttaatattagcaatgtttttgttctcccttaccatgtcaatttctccagggccagtcaatatggtcattatatcatctggggcgagctatggattcagaagaactttcccattcgtctcaggtgctacaataggatttactctattacttatagtcattggttttgggttctacgcttccattgagaaatatccacttttcttcaaatatctcaacgtggctggctcagcttttataatatacataggttataagatagcatcatcaagatctgagttatcattaacaaaatcagaggcgcctagtttcactcagggttttttacttcaatggctcaacccaaaagcctggattgcctgcgcatccggagtggtattattttctgaaccatcaaataacacttcgttaataatcttcataataatatattttatcgtttgctacctctctttagctgcatgggctgtccttggaaagaacatctcaacattgcttaatagcattggacgcatccgtgcatttaatttctgcatgggtgggatactgattaccactgccttctacatgtttctggctcaataa

SEQ ID NO: 92587 - DNA, 1143 bp, Enterobacter aerogenes
atggctaacattagtgacgaattggcggccagcattcagaagtgcttcgaccgcacttatgttgatttagcgaaccaacagcaatatttgttcggggcaggcaatgtgacaatcactaagccggacggaacgacggccaccgtcaagtcgtgggcgcagttcctgagcgaatacgtcacacgacagcagaatatcgacacggcgctgacggcggccaacaaggatcaggccaaatataccgccaccaatacgtggacgaagtcgcaaaccttcaacgccgtgaacacatttagagagcttgtcacattcgagaagcaggtgaatatcggagggaaggcgacaatcagaaatggccttgagctgttttttgatactccttacattgattttcatcatgggaatagtgaggccgattttacacacaggatcatcactgaagacggagcgctgactatctctcccggactgaggatcaggaatggcggcctgggtgtgtacgcaggaactatcacaaactatcacggcagctatgcccagtcgtatgtcgcaatgttgcagaatgatccgcccaatgcctcgacgggggatataattgcatccccggctatgacatggcggttcaataaccgaggtgctgacaataatggtgattcaggggcgtgctcaatctggtatgaggagcatgttggcgtagcgcataagttagtgattcaggttcgcgggtttaatgctccggtacaatatactgcattccttccagacggaaggattcagaacagcacgaaagggttcgtccagtttcagggaacatccgacgctcgccttaagcacaacattgaaccgaccgacggacaactgtcagtcgaacgcatccgggcgcttgagcttgtcacgttcgtctataacgacgatgagcatgaaaggacgcgccgggggattatcgcgcagcaggcgcaggacgttgatccgcagtacgtcaagaacagcaaaatggtgtacatgaaggacggggaaaagatcgaaactgaatttcttcaactggacaacaacgtgatcatgatggatacgctcgcggcggtaaaggtactgattaagcgagtagacgaactggaggagaaattatctgcatttgaaatccagtaa

SEQ ID NO: 92588 - DNA, 666 bp, Enterobacter aerogenes
gtggaacggcgtggatcccagcatgtcacgaattgtttttttcttcggtccttaattatgtatggaatgcaaattgtcgatgaaaacggcgccatgtggatgagtcctgactttacgccgatgaatcttattgaccgggtcgttattcctggtaataacggatatgtttttcaatcgcgtatacccgacaacatgcaatgcatgtttttcattcgctttgacaatgacgcggtatgtatcacgcgtgaattttcacaaaacgggtttaaatgccttcagataatccgaacgacaggaacagggaatatcacggtctacgcctttggaaatatggttatagatgttcccaggtatggcggttttatttttgatgcgtcaggccggatggtttatcacgcggggatgaaaccgttagaagtacaaaccacagcgattagtggaaatatgaaaccgcgcgatatgggtcaacctattgcggtttcgccatgcgcctcttcgcttatttctcagcgaaccggacagctgtggacaatattcagaagtttcactggagcctatgggaatttcttgtcgaataacgcaattcctgccggtcaatccgctggtccagctggttttgtttaccagaccacggcgctgttcattttttccagtaaatatgactga

SEQ ID NO: 92589 - DNA, 276 bp, Enterobacter aerogenes
atgggctacggcgctcgaatgtacgacgccagtggtagggatataaccggggtattcaccccggttttttttctcggttcttacacgcaggcttcgggttatgtcaattatggaaatccaccaccgggtaaagcactacggtattacgtggtgggtacagcggactggaaaggaacgccaggcagttcaccttcagtatccatttctggaggggccgcgtcgtggaacggcgtggatcccagcatgtcacgaattgtttttttcttcggtccttaa

SEQ ID NO: 92590 - DNA, 2247 bp, Enterobacter aerogenes
atgaatttcatggttcgccgatttaactaccaggggaatgtggccggaacgtatgaaaaccgccagttctccgccacggatacctgggcgacgtacgccgctgagtttagcgcgccatcgtcggcggcagtggatggttctgtttttgcgctctactgctacccgaacgcgtcggctattcagattgattacatcgccatctatgacatcaccgatgcggtggccatcgatgcgaatacgtctgcggtcacgcagctgcagcagacggtcacgcagcagggcaagtatattgctgcgaatgccagcgccacgaccgccgtttctgcaagcctgaaatcggcgctggcggatgcggataataaaatcgccggcaaccttgtaccaaacggcgggtttgaacgtgattttgataactggaactacccggccaatgcgtccgttatgactgccagcgccccgcatactggcagcaagattgttaagatggtagctgcgccgtcggcaatggtttcgagccagcaaaccatcagcgtaatcaaagggcgaacgtataaatttggcgccttcatgcgtgccaagagcggtacagcaatgctccccggtactcaagggaataacaaagtacggttcgccttcacggacaactctaccattcgggaggctgcattcgatccggctaaactgccgacaggctccacctggcaagatgtcagcgcggtttacaccgccggtaaagatgggcaaatgctcttcggcgtaatgaccgccctctcagctggtgagatttatttcgacgacgtatacgttatcgatattactgaccgggtcgatctcgatgccacggctggcgccgtatctaacctgcagtcgaccgtgacacagcagggaaaagatattgcctctaatgccagcgcgatcacgtcggtcaacgcttcaatcggtgcgctgcagagccagggattaaacccctggtgtgatggttcctttgaatcatacaccgcaaaccagcaactgggcagcagctcgctggcgcgcgtctcaaccgatgtttaccgcaatggccagaagtcgctcaaaatcacgcgtaacaacggcgagaacggcaacagcgacaagatgatcgggaactggcttgctgttcgcggtggcggtaagtatcggttttctctctgggcttacatggccagcgatatgtcgacaccgaacggctggaacgtgtctgtcggcctctttgctcgcggagagaatggcggcgcaaaccaatggccggaagccgtccgtatctccgagacaaacatctcgcgcggcaaatgggttctcctgacgggagtagcgaccgtcggtgccgaccggagcattgcgcagatgtggatctccaccagggggccgaacggtggagccggttattcgctgtatctggacgatatcagcattgtcgatgtgaccgacgcacaggaggcgcaggataccgccactggcgccgcgaacgccgttacccagctgactgcgaccgtgacccagcaagggaaggatatcaccgcgcaggcagggcaaatcaccagcctcggctcgcgtgtgggtgatgcagaatcgcgcatcacccgacaggacgaaaccatcgcatctaacggcctggcaatggcgaccggctttaaccagatgcgcagcatgattggcgacaacagcgcggcaatcaccacgacgaacaaaaccgttgccgacctggaaaaatcaaccactgagcaaatcaccacgctgacctcgcaggtcggggatatgtctgcgaccgttcagcagacggcatccaccgtggcggatttaaacgggaaattgggagcgcagtggggcgtgaaggtcaacacgtcttccggtggtaataactacgtggcgggtatccagttggggattgacggcagcggccagtcacagttcctggtccaggctgatacgtttggcgtttatgtgcctaacggcgatcaaaaaaatatggtcttcggtatcgacgggaacggcgcttattttcagcaggcaatggctcgtaacctgacgattaactttggtcagatttctgacagcctgcagtcaacaaactatcaacccggctccaccggctggcgtttgccaaaaaatggggctttcgaaatgaatagcaatgtacctggtcaagggaggattcaactggatgaatcagggcttaaagtttttgatcaaaacggtgtcctgcgttttgttggtgggcggtattag

SEQ ID NO: 92591 - DNA, 285 bp, Enterobacter aerogenes
atgcaaaatatcaagattgaatacgttaatggcgtcattgctggccatttagtttctggctcaatattcggtacaacaatccccgcattgagcatcaagccaggcgccgattgtaaggaaaaacagacttcaaccattacgataaaagttgatatggatgctagcgcagccctgaagacgatagatgatgtcggtaacgacatatctaagcggattgataccgctttaaatattgcgtttagaccgggtagtaaagcctggtctgcgattaagaataaccgctaa

SEQ ID NO: 92592 - DNA, 123 bp, Enterobacter aerogenes
atgaataaaaaagcctcgcatctgcgaggctactggttaaacatcatggtgttgctgggcggcgttgagaaaactctattcaaaggctatttggcaaaagaaacatccggatttagaacttga

SEQ ID NO: 92593 - DNA, 204 bp, Enterobacter aerogenes
atgacgatgttgatcgggagctgcgcgaaaactttacccgccccggtggtggttgatacggcctgcagctgggtacgaattatctacctgaccgaccacgatatcgacgtgctggataagcagaccaagcgcgacattctggcgcacaataaattggtgctagctaactgccagagcattaactcctctcagcgagtgaaataa

SEQ ID NO: 92594 - DNA, 348 bp, Enterobacter aerogenes
atgaagcttattattttcttcctgcttgcactggtggctgttttaacgttgttgctgttaagaaagtatacccgtcttgagtttgtgggacatgctcgcctgttacttagaacttggtctgttcgtctggggacagctggtgcactggttggtgtatgggcgcagtcattcccgcatgcagcacttcatgcctgggcgatgctgccaccggacatcaaaaacatcttgccgccaaacatcgttgcgatgattagtcccgccctggtagtgctggcggtgctctcacaatacgtacgccagccagcattgaaagataaggccgacgaacagaaggagccgcaacaatga

SEQ ID NO: 92595 - DNA, 543 bp, Enterobacter aerogenes
atgacagcagaccagatcattgaagccatcctcggcaaagaagggggttacgttaataacccgaatgataaaggtggtcctactcgttggggtatcacccagaacacagcccgtgcatacggttacaaaggcgatatgaaagagctccctagggatactgcgaaagaaatctatatgcagcagtattggttggagcccaaatttgacaagatcgccgaactgtcaccatcaatcgcagaagagttatgcgataccggcgtcaacatggggccgcgtgtttccacaactttcctgcagcgttggctgacggcactgaaccaacgcggcaaactgtatcccgacctgaaaccagatggcgtcatcgggaacatcacgatcgccgcgctgcgcagttacctcgccttacggggtagcgccgggggcacggtgatactgaaagggttgaactgcagtcagggcgcacggtatctcgaactggcggaagcgcgggaagccaatgaagaatttctcttcgggtgggtgaaggagagagtaaacctatga

SEQ ID NO: 92596 - DNA, 312 bp, Enterobacter aerogenes
atggctaaacgtatgcaagataaagaaagcattgccggagtttcatggctgattgtccttgctctgtcatgctggggcggccttgtccgatacctgattgacgttaagcaaaacaaagccacctggagctggattaacgctctcgctcaaattgcggtatccgggtttacagggcttatcggcgggttggttagcgtggaaagcggacttagcctttacatgatcttggtaacttcaggcattagcggtgcgatgggctctgtggcgcttacgtacttttgggaacgcattaccggagtgaaagcacaatga

SEQ ID NO: 92597 - DNA, 603 bp, Enterobacter aerogenes
atgacagcacgtcaacgccggctgcagcgcgcaggattagaaacagtggccgccgcgcctcgcaaaagctggttaggccggtttacgcccctgaatggcattcagtctgcctggattaaatcgctacttacaatatggggagagagcatgcgcgggggaacagctccccgaaagcccacaggccactcctgctggcgaggtttgaaaggggaccgctggtcagataaagcgctggaacgatttactgccgcgatagaacaggcgagggaggagggatatcgaggccagcaagccttaaaccgagcacatgcgattttatggcctcagcctgtcatcggcctgatagattccgctattcatgatgatgatgccgaattcgtagagcgctgtgttctcggcgcatttgaaacggcggatccggtttatctggtaggagttagttattacaccacacgtaaaaaaatctctgacataacccgggaattacagctggtggctccgtggctaacagatggtgaagcccgcaagcgcgtgcgatggtgcctggaaatattcagagcaaaaacatttctgtcggtacgaaagggaattcaggctgattaa

SEQ ID NO: 92598 - DNA, 393 bp, Enterobacter aerogenes
atgaaacttcaattacatgggaacaaggtcaatcaactcattttggttgatgccgaagatagaaagttggaaagccagttcggtctcagttttgagcccgtatttgatgctgaaaacgttcgggaattcaaaataatctttgattttgaatacattacggaagagggcaagtatctcagggttgactatcatagtactttcactacggatagcgacattggagatgagttcatatcctcaaagttccctatcatcaacgctcctgcgatcgccttcccatttttgagggcatttgttgcaaacgtacttatcagtagtggttatcagcctgttcttttacctagcgtgaacttcgttaactttattgctgaagatatatcacaaccaacgtaa

SEQ ID NO: 92599 - DNA, 234 bp, Enterobacter aerogenes
atgctttcctttgaagaaagaatgaaactgttggatgcggctttagaagcccatacaccggaaacgctattagctgaactaagttctttccctgcttatggggattccttagctgcttcatatgtagcatgcgtttcagaaaaagtgacagtgatcgaaccttgcaatcttttcgcttcgaatccgtgtgaaagcacttattcctttgacgatgagtacaacgaagccgcgtaa

SEQ ID NO: 92600 - DNA, 573 bp, Enterobacter aerogenes
atgggacgccaaagtcatgtcggttatcacaattgtcgtgatgacggcgggtatgagcatcttaagtctagtgttcctttcttgagtggtaatggcgataatcaatggcttactcaaggttactatttttggactgactccctttattgggcgcaaaagtggaaccccggtaagaaggtcgcaataagtgagttttcaatctcatttagccacgatgaggagctgctagacttagtaggtaacacagagcaaatctttgagttccagcgtatgcgcgacaaagttgctggccaattgcatcttaaggatgtcagtaaagttaccgtaagccagcttatagcgtttctgagagaactagaacgacaaccgaagactaagggtatcttcccttatcttgctataaaagctcaggataacgcaaaagttggattctttaggcgcatgtcattcatcgccggtcgtcgtgaggatttatgccttgcaacgagacaacagatgtgtgtttttgctcatgctcgagatgctattgcctttaaggggtttgtgtctcctgatgagtacaaaaaccgataa

SEQ ID NO: 92601 - DNA, 258 bp, Enterobacter aerogenes
gtgaatcacgaaaatattgcagcaaagagtcaggaagaacgcgacaaaattagcgttgatctcgcagcctccggcgtagcttacaaagaacgcctgaacatgcctgttatcgctgaagcggtgatgcgcgaacagccagcggagtaccagcagtacttcatggagcgtctaaggcactaccgggaactgagcttgcagttgccaaacgcatctgatccgcgttacatcgaaatgtcatcgcagatcgagaagaagtga

SEQ ID NO: 92602 - DNA, 153 bp, Enterobacter aerogenes
atgaccgatatcaccgaacttgcgcagagagagaaattcgaagtgtgggcgcatagccagaaacttagctttgcttatggagattgtagttacgctttttcctcaacagaaatggcctgcgggcatggatggcatcatccgctgagctggtaa

SEQ ID NO: 92603 - DNA, 669 bp, Enterobacter aerogenes
atgactgagcgcggcatgatttttaacgctgagatggttcgagcgcttttgagcggaaggaaaacccagacgcggagaccagtgaaattcccggtgcgtgataaaaattttgggtgcgagttggctggtaatgaactggccggggaattgtctgcaggaaactatttgaacagcgcatacggcaagcccggcgatcacatctgggtgcgtgaaacgttctcatgcattggtaatgaagatggtcatcctgtggatgcaaaaggcaacttgtgcacccgagaagaagcgcagcgtatctaccgtgccagtgcgatccagaaacccaataattatgggctttggtcgtctcctgatggtttcgattttgaaggcgcctggacgccatcaattcatatgccgcgctgggccagtcgcattctgctggagatcatagacgtgcgtgttgagcgcctcagagagataagccaagcagatgctgaagctgagggggttggaaaactgaagaaaggtttctggaaaaactatcagccaggctggacggagtttcaacttacagcgcgtggttcgttcgcaaccctttggaaatcgatctatggcgatgaaagctggtatgccgatccatgggtctgggttattgagttcaaacgaattgaggagcaggcagcatga

SEQ ID NO: 92604 - DNA, 1530 bp, Enterobacter aerogenes
gtgccagtaggggctatatttcgaatcgcagcgccctttgaattcaactttccagcggcgtatgcatcgtgcgttaccaaattgtggtttgaaacggcacacattgaccgtggggtcctaaccaaagaatgggctgctggtaattacatatcatcaataagtcgtacaccttcaggcgccaatgctggcggcggcaataagaccgaccgtaacccagagcttagacatgattttgatagcttggacctagaaattgccttagcaactctgccgatggattttaacatctatgatattccgggcgacgtttaccgtcgtgcgaaagaaatcgttcagaaaaaagaaagtccattcaaagaatggtcctcatcacttcgtgccacacctgggatcctcgattactcgcgcgcagcaattttcgctctgatccgcgaagcgtcttctggattaactccattcccagataggcttcgtggttatatcagcgcgagccttacagaaagcgagcattcaaacccctcagaagaaacactaaaagcagcacgtcataccccaaacaaaagctgggaaagcgaaattagccgccagcttgccgcagaccgcggggagtttgttgaagggataagtgacccaacagatccaaagtgggtaacagaacatctgacagaaactaagcaaccaggagttgccaacctcggcggcggcgtgttctccattgatggcctcatgtcatcagaaaccacagcccaggaaaaagagaccaccagcgatgtgcagatggaagagaatttcgggaatgaaaccgaaactgataatgaaatttctgagagcgaaacagcaactgagacaggtgcaggtaatgctgacattggtagcgaaacaactaccgtaaatattgaatccggacatcataatgatgttgaagatttaccagcagataatattcacgtcatggttgaccttgaaaccatggggaataaacaagacgctcctatcgtcgctatcggcgcagttgtgtttgatccggcaacaggctcaatcggagaaagtttctacaaagtcgtaagcctggaatcctcagtgaattggggcgccaaaatggatccatcaaccgtcatctggtggcttaagcagtcctctgaagcacgctcggcaatcgttaatgatgatgctatcccgctacatgatgccctgctccagttcggtgaattcatttttgaaaatatcccgggcggtcgcaaaaaagcacaggtctggggaaatggtgcatctttcgataattgtattctgcgttcttcatttgatttcatcgctgaagaatacccatgggaatactggaatgatcgcgatgttcgaacaattgtagagctcggtaaagcaattggaatcgacccgaagaaaaccatcccatttgagggagaacggcacaacgcccttgccgatgctatacaccaggcccggtatgtttctgcaatctggcagcgtctcattgagggtaatagagtgctgcaaaaactgactcaaaactga

SEQ ID NO: 92605 - DNA, 843 bp, Enterobacter aerogenes
atgacatttgccaagctatggggaatgttcctcgacagcccgacattcactgagctggcgactcgtacccagagtgattatcgccaacaccagaagaagctactggcggtattcggcaagatgaaagcagacgacattaaaattgagcaggttcgtatttatatggataagcgcggcgtttccagtaagaaccaggcaaatcaggaagtatccagcatgtcgcgggtttttggttggggctttgaacgtggctatgtgaagggaaatccctgtcgcgggatccgtaagttcactctcgcagatcgtgacatttatattccagatgaagattatctggctgtttacgaatgcgcacgaatagaagtaaaagttgcgatggaaatatcttatctctgtgcagcccgcgaaggcgacgtttttgatttgatagtttccgagctaatggaagatgggatttttattgagcaaaacaagacgggtaaaaaacagatcaagaaatggacaccccgtctacgtgcagcgattgatttggctaaaaaacatcttatcggaaaatcagcagccggttatgtaatcccttcaccatcaggtggacggatgaataaaaaaacattcaatacatggtggaataacgcgaaaaagcaagccgcggtgaaactgggtcgacctgttccgggtacattccacgatattaaagccaaggcgatttcagactatgaaggtagtagcaaagagaagcagatgtttagtggacacaaaacagaaagccaggttgtgacgtatgatcgtaaggtcaaaatttcgccgacattggatgttccgatgatgagtaaggagaagtga

SEQ ID NO: 92606 - DNA, 426 bp, Enterobacter aerogenes
atggcgggtaattacaactataattcgtcccccaataatgaaagccctcgcagggacggacctcccagccgtacgaacgagaatgcgcagattcagtggttgattgagtctgttactcagctcaaaaccagtcatgaatcactgaatggaaaaattgaacagcggtttgagtgtctggaaacgaagatcgacgccagaaatcagacaacagacgccagagtcgatgcacgacatcagacgacagaacaaaaaatcagtggtaatcacgatctcctgatgaataaaatcgagacgatggagttgagaattcaaaaatcgatttcggattcaaaggttgacgggattaagtgggcaatcggtctggctatcggcctaccatccgttgcatggatggtgattcagatagtgaaagctgtcatacgatga

SEQ ID NO: 92607 - DNA, 270 bp, Enterobacter aerogenes
atggcagtttttgcaataatagcctccaatgatgggccaggtttaggcctgaaaattaaaagcaccattcagcctcaggatttttgcgaggtagatgggaatacatggcttgttagtgccccacagcatattgtgacagctaaagagctttctgattttctgggaatatcgacgggtgctatcgggcaggtcgtcgttcttcatgtcacgacctactacggtttccataaacgcgaaatgtgggactggctggcgatgaaaggggtttaa

SEQ ID NO: 92608 - DNA, 1203 bp, Enterobacter aerogenes; identical to SEQ ID NO: 88121

SEQ ID NO: 92609 - DNA, 636 bp, Enterobacter aerogenes
atgaataagtccgacgcgattctcccactggcgcaggatgccgatccggtttctgacatggtcgataatgaacgggatgaggctgaactggtcaaatcgcgccgcttaattctcctgctggcgctgctaatggtagtgaccggcgtatgggcgtggtttgcgaccctggacgaggtttcgaccgggacaggtaaggtgatcccaagctctcgtgagcaggtgctacaaacccttgatggcgggatcttaaccgagctcaacgtccgcgaggggagcagggtggcggccgggcaggtcgtcgcgcggcttgaccctacccgtagcgaatcgaacgtcggcgagagccaggcgaaatatcgcgcttcactggcagcaagcattcgccttaccgccgaagttaataaccaaccgctgatttttcctccttctcttaaggcctggccggggttactggcggaagaaacccgcctctatcatagccgacgggaccagctaaccaaatcgatgcgccagcttgagcagtcgctgtcgttggtgaaaagcgagttggctatcaacgaaaggctggctaaaaccggcgctgccagtaatgggaagtgctgcgtttgcgccaacaggctgccgatattgagttaa

SEQ ID NO: 92610 - DNA, 2148 bp, Enterobacter aerogenes; identical to SEQ ID NO: 88116

SEQ ID NO: 92611 - DNA, 129 bp, Enterobacter aerogenes
atgtcgttaacgttgaggccagaaaacccggctgaaagcgtagtgatcagtgattgtttggggcttgatgaaagctattttcccgcgctcattgctggtctggaagagatcatcaatttacaaagatga

SEQ ID NO: 92612 - DNA, 375 bp, Enterobacter aerogenes
atgcgaaccatcgccggacgcgcgctaagtgccgccgtatttctcagcgctatgttaaccaccgccagcgcttttgctcatgctcatctgcaacaacaaatcccggcggccgattcgacggtctccgtttcgccgcaggcgcttacgttaacgtttagtgaaggcgtcgagctctccttcagcggcgtgaccctcaacggcccgcagaataaacctgtcgctaccggcaaactggcccgcagcgacggtaataaagcgcaattaacgctgccgctgaatgaaccgctggcggcgggcgagtacaccgtagagtggcatgtggtctccgttgacggccataagaccaaagggcaataccacttcagcgtgaagtaa

SEQ ID NO: 92613 - DNA, 648 bp, Enterobacter aerogenes
atgacagatatcaaccgactgattgccagtcttaagcgccgttcagcccacgtaaaagaatttggcgacgatgttacgtttgtaaagcttaaagatattgatgcgctggttgaggcgctggagaaggcgaagcagttggccactcagcagggaaatatcgcctgcgcgcttttcgatgaagttaccgctctgcgccagcgcatcgccgagctggaagaagcagagcaacaactctgtgccgctaacgtgacgctcgatgctcgcgcggagcaggcagaaagagagcgggaaaactggcgcaccagcttcgataacgagcggttccgcgccgataagctcaaagcgcatatcgacgatattgaacctgttcgtgcagcagccgagaagttggtccgctgcaaaggtcgttatcacagcgagcagaactatcgcgcactggcggcgctgtttggcgtgacaactccagaccttccgccgttggatagcgagtcccgcaccgtcaccgtgaagctgccagcagacagagcggcagaatctgaagtctcaggctatgacggcacggagttctatcgtgctggctggaatgctcgcgggaaggcagataaagaggcgttaaccgccgctggcatcaaagtggaagctgagtga

SEQ ID NO: 92614 - DNA, 297 bp, Enterobacter aerogenes
atggctaccaaagcgcaattgcaagaacgatgcacgcgactggaaaacgaaaaccaggaactcagccgccttttggcaagggcagagcgtgagcttaacaacaggctgcttgatgaagagttgcctcctgaggaaatcccgtatcgcgttacctgcttgatgaagtatcacggcatgccatgggaagtgttctggtgttctgagcacaagcgatggatggatgaaatggatagcagtttcccctattcaatgacagataactcttgcccggtatgtcgaggcgaggagagccaatga

SEQ ID NO: 92615 - DNA, 318 bp, Enterobacter aerogenes
atgaccaataaccagttaacagacaagcgcctggcgcaactagcgaaacgtaatttctgccaaaccaaaggagaggagtatacgccgtttggcgacgaggttgtctcgatggcggcagagctacaggaacgccgcaaggccgccgaacccgaactaaatcccgccaacctcgccaataaattctatgaacgctatccgctggcgacgtttaaaagcgacagcgaaagagctgaggcatttgggtatttcatggctggcgcagagctccagtgctttggtgagtttattaaatacgaggacttatgcggtgatgaataa

SEQ ID NO: 92616 - DNA, 915 bp, Enterobacter aerogenes
atgaataaatcaaccataaccagagagccaattactcactacctgaaaatttacccggagttcttctctgctgtgtgtactggcgttaaacgtgcggaactgcgtaagaatgaccgtgattatcgtgttggcgacactctacacctgatggaaactccgcgcggtagttgtcatcaaacgggagagtttatcaatgtgaaaatcacccatatcaccgacgttgacgaatggatgccgggttatgtcctgctgagcatcgagagagaggctttggatagcgagtcggtgatattgtaccgggagcgcaatccttacaacggcttaaccacgggctggcaagagctcactgaaaatgagctctcattcctcaaagagaatgccggggaaaatgccgagttcctcaagctctatcgccacgcgcagccaactgtaagcaagccatggggctataccagcggcatattaaatccagcagttggaatggcatgcgttacaccaacgagggggaaaaaccaattccctgtgtacatcgatccgcagccagcgccggtagtgatggatgatgaaaaattaagagcgctatttgatgcctggtttgcttctgattgttcttttgaccagtcccctgaggcctcagaggcagataacatcgcatggcgagaatcctactggtacgtatggcaacgttgccgcgcagccatgttccaggctggcaactctccggcaattccgggggcatggattccggtaagcgagcgactgccagagttcggggattatcttgttactgatggatgcgacttcgatgtgcagttgtttaatggtgaggagtttattcccggctttatctgggaggacaaaataacccactggatgccgctgccatccgccccacaggaggtgaaaggtgagtaa

SEQ ID NO: 92617 - DNA, 273 bp, Enterobacter aerogenes
gtgagtaaacagacaatccgaacccacacagaacgtctcgaaagggttatcgagcaaggcgttgagctgcgtgatgagatgcgcaggaaaatagcgagccttgagaagacggtcagcgcccagaaagctcaaatcatcagcgctgaacgagctaaggagttatacctgcggcggcttgctaactacaagcgcagactgataactgagagggagaagcggcaaaagcttgaggggaaaataatcaaactaaagcggaaggttgagggtgtttga

SEQ ID NO: 92618 - DNA, 270 bp, Enterobacter aerogenes
atgcgaatgataaccagaaagaaacccgcctttacggagctttatcagacaggcgttctgacccgcatcgcggctgttaaaagccctgatggcggcggctggcggttatttggcttatggatgggaaaggatattgctgttttcgtagaggccgctcgtggaggcgtccgggaatggtccagcctggactatctcgctaacttctgcgcgagctgtggtattagcctttgggagatacacaacaaagttgatccaaagcaattgaagtga

SEQ ID NO: 92619 - DNA, 534 bp, Enterobacter aerogenes
atgatgcccacgttgctgaaagaatactggaagccactggcgatcattttgctggtggcttttttattatggcgttcctttaatttcggcgtcgggacctctgacagtcactggcgtcagaaatggctacagcgtgatatttcagattcgacagcaattcttcatcgagaggttggagaacgggccaaagaacagcgccgccagcaggccgccgacgaggaacagaaacgtgcaaatgaagaactggcgaaggttcgggccgatgctactgatgctgaacgtgctcgcagtgggttgcagcaacagctacgacaattacagcggcagctcggcgacagtgaaaccggccgcatttccgcagttgccgccacaggcgcggcaaaagccgagaccgccagagtgcttgccgagttgcttagcgaatctgaccgcagagcgggaatctatgcaaaagaggctgacagcgcttatgtctccggcagcagctgcgaacgtacctacgataaagtaacgagagaaaatattgatgaataa

SEQ ID NO: 92620 - DNA, 249 bp, Enterobacter aerogenes
atgaataaagcaaacgaccaggggcgcgtgggctacggctgctctatttctgatgacgttaacgccaacataggtcagctttctgttccattaaaagcaaaaatgccaacgacaaacgaagttttttcaatcgtaaagcaggttgagaaagaaatggctggtaagtcactcaatgccgaaacagccttttctttcgtagaggaagtaaaaaagcgagtggctgacctgattatcattgaagtggcttag

SEQ ID NO: 92621 - DNA, 588 bp, Enterobacter aerogenes
atgttaaccaagcagagtcctgagaatgcttcgtgtcatgggaatgctgttttagctctcatagccgaagcgtcaaaaggaaatatttttgcagatatagtcatcgtgaaagaagtaaaagatggggcccttactgtcttccctttagtaagcggaactaacgcaactggaggggaaattaagaatcagagtgtctatgatattcctttcatacagtaccaggcaggaaacagcgctgtaaaaatgactccaagggttggtgatattggcttggtgatagcctgtgacaaggatataacaaatgtcagaaagtcgaggagaggaggaccagcgccgactcagcgccaacactcatattcagacgcggtttacataacagcgatcgccagtctaaatggggagcctaccgaattcgcggaattttctggtgatggcataaacatcaaaagccccggtgtggtgaatatcaatggtgtgaaaatccatcctaacggaaaacttcagttggttgacggttccatcgttgatggtcatgaccatggcggggtagaatcaggaggaagccgtactgaccccttggagccttaa

SEQ ID NO: 92622 - DNA, 657 bp, Enterobacter aerogenes
atgataaaaaaatatttccttctggcgatttcattttctttagctggctgcgtaatgtctccagccgattacattgattatcaaaaagcaaataactttgataagacaaaattttcaacaaacgctggcgggatgcaatccgtttctgacttgcgagaaatttacagaaatgtgactggtaaaaatcttccggaacaagacactagtgattgtcgaaaggataaaaagtgttacttcaacagatacaatgatcttcttcacgatttaatgtaccagcgacagatagaagagcagaaaagggagggcgcgaagcttgcccaggaaaaagaagctgaatgtcaggccagtaaagaatgtatgacgaaaagaaaaattgattctgcctcctatgatttaaatagcatttattacagcatcatggcccagaacccttatcttcaagcagattacgacggctttatcaggcgcacatgtcgtggcgctggagtaggtcaacgtaacggtatgtcgttggaggcattgcaacagaaaattgatttagttgaaggcattgcaccacagaccagatatgagattaaacagatagctgaggcttgctggactctaagtaaatatggagtccctgacggaaccactcagattaagccaatgtactga

SEQ ID NO: 92623 - DNA, 1287 bp, Enterobacter aerogenes
ttgaacaattcagccataccatctcgtctgtcggtggttttttcggtaaatggtgacaagaatacgatcccgacaaattcaacatccgaaacactggctcaagggctggctgcgatggactcgggtttccctccactgactagaactgcgttatcagcaggcggtaagcccccacaaggacaggatttcaacggtatttttaatgatatttatactcgtctgcaatggtctgctgccgggatgggatacccttttaatgcaggtttcaatacggcaattgcagggtatccgaaaggcgcagtaatcccatcaagtaattacgcagtatcgtggattaataccgttgattctaataatacagctccggaaaaaacggacgctacctcatccggatggatcccatcatggggttgtggctcggccaccatctctatttctaccgcaaacgtaaaagtgacggatctgcaggcagctaaccctcgactaattctcactggtgctttgactggaaacaggatcctctatcttcccccttgggtaaaagactggactattgaaaacaattgcacgggttcttcctactacgtcttgctaagcaccgtagcaggtggcgatacggttaaatcatcgccgggaactatcacgcctgtgcattgtgatggcgttgggatcagttcgttgcttgctgcaaatggcaaaagtgtattcatggcatctggcagcttcaccgttcccgataacgtcaccagaatcaaagtaaccattgtaggtggtggtggttccggcggtggatgccagggctcgtctgtgaatgaaacaataggtggtgctggtgggggtgcaggaggaaccgctatcgcgtggctgacagtatcacccggaatggtatatgcggttaccgtaggcgctggtggtgctgctgtaacgggtgcatctggaggcaatgacgggagagattcatctttcgggacgtcaataattgccaaaggtggccgtggtggtggttataacaatacggctaatgggggtggcgctggcggttcagctacaggtggtgatatcaacatttccggaggggagggggctgatgggcaagccggagagtatttataccctgggaatggcggcgcatcatcaatgggtggcggtgggcgcgcaggtgataaagggggtaatgctggcaatgcttatggctctggaggcggtggtgcatacgatactgccaaaagtggtacgaggtattccggtggtgcaggtaaacaaggcatcgtcatcgtagagtggtaa

SEQ ID NO: 92624 - DNA, 2268 bp, Enterobacter aerogenes
atgtcaataacagatacccaacaggcagcgcagttttctgcgaatgccgcggttagtgctgccgaagcgaagcaatatttactgcaagtagagcaaggctatcaggacattagtaaggcttctcaggaagcgataaacgcagccactgatgccgaggcttcaaaaaatgcctcggctacctctgaggttaatgctcaacagtcagcaacagaagccagtgaggcaagagatgaggcagttgctgccgcatcaacggctgctgaatttggcgacaataaatttactttttataaaacctccagcgatcctgatggtacgctcgccgggttagcggccacgaccaatgggcagtcattccgcgttgcacagggtgtggacggatcagatgcgttcattacctaccagaacgacaatggtgtagcggtagcgcaggctgcacagcctggaaccgcagcagtaacggggactattcgcgaatttcctacactggaagcagcacaggcagacgcagaggctggcaatatcccgattgggtcaactgcttattaccggagccctgatgatgatgcacttgctattgaggttatcaatgacagtggaacgctgtcagcgacaggcagagtaacgccctctcaggggtatgtagacagggtgataaacacctcaacagccaacggaaatattgtaatcactcttgacgctgacgccagtcccgtagaggttcgtgatgattttggcggcgtgaatattccgggggttcctgcttccgtacaggatattttgcatcaggtgcagaagagcgccgccccggcaatcctccgcctgactgacgctgagaacgccgcatacgcctctgttgatgagtatggcggtattcatcttccgggtatgccggagagtatccaggccatgctcactggcatgaagcaaaatgtagaccgcttgagaaagcgcggcatggtgctggatgccagagattgtggcttgaatgtgaaaaccggagaagatgcccagcgggcaatacagcggggttataactggctttcaggcaatggcggcggcactctttatataccccagggatattttaagctgtcaaaacctgtcaccccgcgctcaggtgtttccctcgtgggggccggtcagaatgccactgtccttcttcctttcggatacctggcggcaatcacctaccagggggcggaaacctacattgaaaacctgcaattctctgatttcaccattgatggtgaaaatcagcagttacaccctgtaaatggatatatccctgacataaaggggatttacctccagtattaccggaataccaattttgatcgcattaccatccgtaacaccggggctaccgggctgggagtggatatgccagaccgggtatccattacccgttgtctggttgagaactgcggcaggctggcggaacggggcgcgctgggtgcctccgggtttggccttggtaccagctttctgagcagtgaaccgctttttgccagccagcttgtaggccgtaataacaccaactttggcattttctttgaaccacagcgcggaaccggaacggcgcaggatgcgatcgtcactgacagcacgttttacggtaattatgccgggctggcagattgcggaattgaagggctcattgccgctaaccttaaccttcgcaataaccagtatggttttgttgcagagccagggaccaataacggtggtaatcctggattcaggggtaaattagacaacttaatcatcaaggggaatacgtcacacggtatgtattttaataccgggaaaggcgacaccatcatcggggagtatgctatcaccggtacgcatatctcagaaaatggtgaggacggaattaatattcgttatgccacggaggtgatgaattcaagccttcgcatttctgactgtgatatcaacgacaatggcagacatggggttaacttagaagctggtccggttgttaatgctgacatcataaataatcgcttctggaataacgggaaagttacagccggtaacggtattaacagcagccgggcaatgacgaaatgccggattgcttttaacagtatccgtgataaccaggcggagccaactcagcaatatccggtttccatttctggagacatgacagatgtggatatctcgtttaaccactgtgcgggtaatgcgctgaacaccctcaacctgacgggcgcacaaactcgtgtaaccaccatcagtaacccagggattgcataa

SEQ ID NO: 92625 - DNA, 1434 bp, Enterobacter aerogenes
atgacaactattgtccagagtaatatgaagttaaaagggagtgtaaaacttccttccgtaaatgcccctcttccggagggcgctaacctgttcgccgatttcgccactggccgctatgtagttaaacataccagtgggaacgtcatccgttcggcttccctgacagatatcctttcttttacgcgaaactccacagctaccagagtgggtgaaagcggattgatcgaatacctgcaggcaaacgagccagcagttgattatcatcctgttaccggggagtgcctggggatctgtgcggagttttccagtacaaaccgaatcgcctggagtgaggatttcagcaaaacggaaagctggacgccatcaggcgtttcaatgacagccaatgatgcgatagctcctgacgggaataaaactgctactaaaattattgaggccgcgggtgcttcggctacaacccgacaactggtggccgttactaccagtgatgcggtagcgggatcaccttatacgttttgcatttttgcgaaagcgaacactgccggtgtagtgcagcttgcagcgcaaggagcagtagcagcaacggcatttgcaaactttgatctgaagaatggcaggattggaaaggtatccccgggatctgcgactgtcggtatgcttcaggtaagtatggagccttaccggaatggatggtaccggattgcaataaccatcacacctaatgcggcagcttcgccgcaatttactgtcgctctggtaaatgatgacagtagcgcgggcgccgtaccatcctatcttccggccacgcctaaatcggtatggatctggggggcacagccagaacgtcgtgacggctactcatcatacatccctgctgccggaggggaagccacacgagccagcgcgatgtgtaccacaccttctaccgcgtcgttcatttcgactgaggcgggcacaattcttgtttcagtggttcacccgcatagcctgcagatgctgagcggccgatataattctctggcctgcgctgctgttctggataacaccgcatcaggaccgcatatccgctttgcataccgccagccagcttccggaacagccataggtacgcctgaaggggcagcgctgggggttgtgccagataattcagggaccgctcagaaccttgaagttcccagtctgtcggctgtcgctgacagtgagcaatcctgtatctattcgttcgatacggcgacactcaccacgaaagtatttgacgggttcaactggtacgagcggaatgtaacggcaatgccaccggcattaaaccggctgactgtggggcgttcaaatatggatgcgaacaactatttcaacggtcatatcagaaaggtgatttactggcctactgctttgagtaatgaggaaatggaagaagcattatcctggctctga

SEQ ID NO: 92626 - DNA, 1344 bp, Enterobacter aerogenes
atgaagacattacgaccactgtggggcaggggccaaatgatctccccacaacattttcaacaacaggtgaatcaggcggcctggcaaagcgaatgtatcgcccgtctgggcgtgatgaatccctgggggattatccgcgtcgaatttgacgccgcattgctaaaacaggggaagctgaaggccagccacctctatatacgctttcctgatggaacgcttatcgacagcgataatgctgatgcgctgcctgaggtcatggtgttgccgcaagcggaaagccgcgaattaacggtggtgctggcgctgcctcatgagcatgaaaacggcggcaactgcctgcagatggaacaacgcgcagagcggccggtacgttggcgtttggcctggcgagaagtacgcaacagatacggcgaagacagtcgacaaattgcggtgatgcttgcgcaactgacgctgcgcacagcggatgacaataacggcgattatcaaaccgtcgccgtcgccagattacgtcgcgacagtcaggattgctggtcgttggatgaggactttatcccgccgctgctgaaagtgttggccagccgctggctgcacgaacaaacggaacagctgacgaatcaactgggtgtgcgcctgcaacgcctgatggccatgcgtagggaaagcaacgccaggatggcggattttgcggtagcggatgtatcgctgttttggctgctgaacgcgcttaacagcgcggagccggtgttgaaccatttcctgcgccatccgcaggtacatccggaacggctgtatgaagcgctggccagcctggcgggcagcctgttgaccttctcccttgaccataccacggcggatattccgccctatcgccatcaggcgttgacggaagtctttccaccgctgttcaaattactcggcgtactgctcgaagccagcctgccatcccgggttgtggcgattgaaatgacgcacgatgaccggcgtaagcgctggcatgcccgtctgcacgatccaaggttgcgcgaagaggccgatttttatctctcggtgcgttccgcgctacctgcggcgcaactgctggagcagttaccgcaacagtgtaaagccggtagccccgatgaggttgaccgggtggtcaacggttcgcagcccggcattccgctgaaagccatgagtcatgttcccgccgccatcccgctgcgcctggagaatcagtatttcacccttgatatgactcatccggctgcgcaggcgatgctggcggaagggagttgcgtcttttacgtgcccggcctgctgggcgaccctgaactcgaactctatgcggtgctgcgctcatga

SEQ ID NO: 92627 - DNA, 252 bp, Enterobacter aerogenes; identical to SEQ ID NO: 92002

SEQ ID NO: 92628 - DNA, 420 bp, Enterobacter aerogenes; identical to SEQ ID NO: 92004

SEQ ID NO: 92629 - DNA, 573 bp, Enterobacter aerogenes
atgataaagcatatccgtattttacccggcggactggcggtgctggccgccgttttgctctgcctgctgacggcctgccgcgaccacagtcgcgacggcatgagcggcgccgatttaaacctctacaatcacggtccggatgccatcgtttcggtgcaggtgaatggctacggcgggccaggcgctaactcctacggcggcggcggcggcttctgctgtgtgatggtgcctgatgtctggcgcccggggctgacggcaaaaattacctggacctccgatcccaattactggatgaaatccagtgagatgccggatgattatgaaactcactatcagcgccatgggccgattattgtacctattgaacgttgggaaaagggacaggcctgtggctttgatgtgcatattttcccctgcgataaggtgcggatagtgcgttcctgcatcccgccgggacagccgggctacccggtaccccagtcgccgccagactggaaggaaagagcaaaaaatatactttataagcatgttaaggagaacatcgtatgtccgacaccgcagagtccacgctga

SEQ ID NO: 92630 - DNA, 678 bp, Enterobacter aerogenes
atgtgcggacgctttgctcaatcacaaacccgtgaagagtacctggcttatttggctgaagaggctgagcgggatatcgcttatgaacccgaaccaatcggccggtacaacgtggcgccagggacaaaggttttgctcctgagcgaacgcgacgagcagttgcatctcgatccagtacactggggttacgccccgggatggtgggataaaccaccgctgattaatgctcgagtagaaaccgcggccaccagcaggatgtttaagccgctatggcaacatggccgggcgatttgctttgctgatggatggttcgaatggaagaaggaaggcgataagaagcagccctacttcatccatcgtgccgatggccaaccgatattcatggcagcaatcggaagcacaccatttgaacgcggagatgaagcagaaggctttctgatcgtcactgcagcagctgataatggtctggtagatattcacgaccgccggccgctggtactttcaccagaagcagccagggaatggatgagacaggatgtaggaggaaaggaagccgaagaaatagctgcggacggtacggtgcccgcagacaagttaatctggcacgcagtgacgcgcgccgtaggaaatgtgaagaatcagggcgccgaactaatcgaggctattgagcacctataa

SEQ ID NO: 92631 - DNA, 1158 bp, Enterobacter aerogenes
atggatgagtttatgactcaaaaagatgaagttatgagagctagtttactctcttataaaaactgtaagctatttcaaactaagagtgatgtgttcggaatatctgaattcataatttattccgatagtagattcacaaatgaagctaaaggggattttgtttattccttcctaaatatgctccctttagaagatgttggtgtaaaaccgaccttaacggtgagagtcttgtctgctttagacccggcaaggttgtcttttatggatgaaaagccacatacggatgactttcatggcggttggcttagtgatgaaattgcagctttggttagcttgaaattaggcgtaagagcacacgcaggctcaactgttagagaatatagtagttatacacctgaatatggccacccgagagcagagcaaaaccctccaccacctttaatgttaaaaggatcatttgtagttccttcagcaaaaaaacatattgaaatttcacagttgaaattattaaacgatatttacaagctctcagaaaaggattttaaatcactaattaagtcagctcgaaatttccaagatagcctttggatttgtgaatcgtcaccaaatctagcttggttattaatggtttcagcattagaagtggctgctggaaactgggactctaacaagggcgataaggttgaaagattcaaagcctccaaaccagagttgtttgatagattattgggccataatgttgacgggctaattgaagatatcgctaaacaatttgaaggaacatttggagcaacgaagaaattttgtgacttttgcgtcaatttccttcctgatgccccaccaataagaccggagagtggaaaaatagaatgggaggagaaaaatttactcaaaatatttaaatccatatatggattgcgctcattagcgcttcatgctggaaaacctttcccccaacctatgtgttctccaccggacaactattcgggattagctgaacaagcagtatgcccacctacctccaattttactccattgaaatcaaccctgggagcctcatggtctcataaggaagcccctataaatctcaatgtatttttccatatgactcattcgattctaaataaatggtgggagagtctttacttaaagaaataa

SEQ ID NO: 92632 - DNA, 420 bp, Enterobacter aerogenes
atgacaattttagtgacgctacaggctcagctcattgtgggagaagcacaggtgataaaaagcttggcacctgaggggatgctcgcagccgtatttgaagacgacggccggaccgggtatttctatgcgctcgatgagtccgtagaagtaaacccgattcttgatgcagtgcatatctacaatgtcgaggatatttcagacggccacataccttctgacgttaaaatcggctggtctgaagacagtcagaagtgtgtgctccttatcaacggatatccgcatgcagtgttcgatttcgtgggaaaaaatgggtactgcagaagcggatacccacccccgattaacaaggtttggtctgtgtccggacataagtggagcgattcggtggatgacttttccggtgagttacggtgggcttaa

SEQ ID NO: 92633 - DNA, 396 bp, Enterobacter aerogenes
gtgaagacatctccctttgcgctgaacgaaaaatactacggcaacagcggatccattaagttactgacgcccacgcaggatagccgtgatatcatcaatgccgcggtaaagtgtcttgatgcgatatggggcgacgggcaccggtaccagaaagcggggagcatactcggtgatttctatagccagggtgtcgcgcagctgaacctttttgatgacaatgcgccacggcagaatagcgagaaactgatggaagttctcgaccatctcaacgcaaaggacggaaggggaactctctattttgcagggcaggggatccagaccgcctggcagatgaagagagaaatgctttcgcctcgatacaccacaagatacagtgatttgctcgaagtcaggtga

SEQ ID NO: 92634 - DNA, 1254 bp, Enterobacter aerogenes
atgaaaagttacagtaggagagatgccatagatatggcattcagactaggcataggcgcagctcttatggcgtccctaccaaaaattgcatttgcatcaggagcgtcaagattcagcgttaccgactttggagccaaaggggacggagtgactgacgactcttttgcgtttcaaaaagcattccttaaagcaaatgaggccggtggcggaacggtatacttccctccgcccaaaaaagaatatttgctgaggttcccggtatttatctttaacaatactgaagcatatggcgacggtaaggatacgcggattgttttcgagaatccggtgttcagtaaaggacgtggtggtttcgtcatcggctcaagcctggaggcaaacagagacctagcgttaactcggtttagtaacaaatcgctgtcgactacaatcaataacaacttcaagaatcctgttcaacggcactatatacgcgacacaccagagttggctcaggcgaaaggaagtagcctacacgatatctatctagaggcgagattcaccgcaggctcagaaagcagctggggagggtacggaattaatttcgtaaacgccattgactgccatgctagcaacatctgggggaaaggatggacgcaacttattggaatgggttctgacactccaccagaaacaccttcaaaccataattgcagcgcgaaaaacttgtatgttctagagccagacatggtcaggacatattactcgatagggtttatggctaactctagcaattgcacgattcaaaatgcaaaacaactaaaaccaatgtcagagggaagtaaaaacggcagtggcgtagcgttgaacttttgcgaggattgcatcatttcagacatagatattcctgaccttggaagaactcaaacctctgagggtgttcttataaacaattcttctggttgtttgattcagaacataaatatcggcaatgcgaaaaaagccgtgtcaacattctttaaattcaaagatactcaaaaagaatttaaaccgaatatgataaagaacattaaaggttcaaattgcgacattgtattgtctgtatactctaaatttaacatcataagaaatatcaagggtgagaattctggaagggttatagccttgatgaatactaatgcagcgcgaaatgttataagtgctcctgaggcggacatctccaccccaggaaaagcaccgattactacactaatgaaactgaataaaatagaatag

SEQ ID NO: 92635 - DNA, 897 bp, Enterobacter aerogenes
atgtacttcccagcgcttttggttttcgcgtttattaacaaactaaccgaagaacaaaagaaaacagtctatcgcttttttatttttctcttctttgttgtaacaatagaggcggcatggggttggttcatgcaaatggacattcttgtcgcgaagcaaagatttagctatccaggaatggggtacatttacagggctggtggggttgctaatgattccagcgcgtatggtagcttggcgttaattcttggtgtcgcatcccttatagggcttcgccataccagcaaaagtaaaatactttacctcttgatactccttggcctgatatttaacatttatatatcactaacgcgaacgcttgtttttgcgctggcggtatatgtattctttgatttaattagaacaagaagccttagcgtattcaagatgttattcttcgcggctatcggtgctggggttatcatttacggtatcagtaacgattatatcatagccttgttggacaggatcaccggttctggacagattgatatcacgtctggacgacttgctacctgggttgccgttcctgatattcttggggaaaacccaatatttggtgttggttaccgtatggctacggacaagtacggcattgtgcctgataatgtgttcatttcatcaatactggaaacaggtgttgttggtttgtttttatacatggggatgcttatagcgctgtgctactgcgtgtacaaaaataattcagaaagcttacctcttatcctggcgtttatagcctcagggatgtttgttgatatctcgacgttctggattagtatccctgctttaatcttctttgtagctgtaaacagtcagcgcgatgatgatgaggatcgccatcgcgccatagaatag

SEQ ID NO: 92636 - DNA, 375 bp, Enterobacter aerogenes
atgagcggcaccagtgtgatgacccaccttgtgcgcaatgcgcagggggcatcagtgacaactgaaattccggtgccggccggactcactgcaggaaagtatattttcttggcgttcagtcgaaacggaaacaacctgatttcaatggtaggcggtgcatccacgcaagtgaatctgacggattccgttaaaaccccggcaacagcggcgaaggttgggcctggcaacacggcatataacaccaatggtttttcaaaacagttagaggtgattgagtgcctgtatcggtatggcccaacaacgctcgcagatcttcagacagcctatgctaatgccaaaacccgctgcgcactccgcggcatttctcttctctaa

SEQ ID NO: 92637 - DNA, 888 bp, Enterobacter aerogenes
atgtttgaacctgataaatacctttcggtcacatggctgaagggcggcagagtgtatccgcaactcgactgctttggcatcgtaaatgagatacgacgcgaccttggattacccgaatggccagactttgcaggtgtgaccaaagatggcggcggccttgataaagaagccagaaagctgatgttgaagcttgagcgttgtgaaccatgcgtcggcgctggcgtggcgtgttattcgggaacaatggtcacccatgtggggattgttgttgagctaaacgggttggtgactatcatcgcgccgaccaactacctgatctcatcttcatcgggttacagcgtcctgttcagtgacacgctgactaagattaacccctatgccggcatgcccgttacgctggaaattaacggggcagaatatgatctcttcatcgctacgttcacgccaaagcaggatgctgttccgggcgtggggggatcggcagcttcattgcgcggcagtgcagccccaacaacctatgatttttcgaccagcagccagacgtttaccctgacctggcaggcgactacttacaccgtttcgctgatcgctaactacggcaatatgtctggcctgctggcggcaatcaatgaagcgatctccgggtcgaacttggtcgctcaggatgatggcggggtagttcgcatcgttgagaagtccagtccgtggctgggcggaagtattaccgcctcatcacttccggtttccgttttcggggatagtccagtttttaccgatggtaccgcatccagcggcggcagcccggcgatcaccgccaatgtcactcttgcttatgggagtggaagcggcgcggcattttccggcattcctgaagaggcaatttcatga

SEQ ID NO: 92638 - DNA, 330 bp, Enterobacter aerogenes
atggaagcgttatttacatttaaagactttattgcttttacgtcccctctttttgtaggatggcttatcttcaatagaagacgcaaacgtaaggaagtcagagtcaatttttcatttctttggcttgttttaatagtgggatcctttttggagatatacgatgagatttatacgacatattcctacaggcataatcatctatataacaatgatacactaacaacagtggttaattatgattttgctagggttgttttttttgtggttttaattgttgtgtctatggtgctttttattcaggaagtaattataaaaaagaagtcgcgttaa

SEQ ID NO: 92639 - DNA, 312 bp, Enterobacter aerogenes
atggcaaaaccggactggggcgagcttcagaacggcgatgatctggtgttcagtgaatcgggctttacgcatggtgatctcctcagggtacataatcagtatgtcggaagatctataaaagtgaatgggccgttttgccgggatacttacatttggggtttgggactggcgttcagaacgttagcagcgacaacagccggcgaaccactgttcatgcgccgattacccaagagtttaaccttcaagggggcacgcctgagcaacttaattctacgctcaaccagaataacagacagctttccaggcagttga

SEQ ID NO: 92640 - DNA, 258 bp, Enterobacter aerogenes
atgagcctactgaagaaaattaaagacgccgtttctcctcccgttccggaagagtgtcgagaagagagttacgattcggtcctgaaaaaccttgataccctgtccaaagaatcatctgaactgaaagccctgatggctgagttcggtgaaggaaaaataactcaggagcagtgcattgccactggcgtagcgattgtcaccaaagaattactcgaattccgctacgtccaaaacaagattgattctcaggcctggtaa

SEQ ID NO: 92641 - DNA, 213 bp, Enterobacter aerogenes
atgcgaccacaatctgaattcctcaattcctcacaggtgcagaaatgccccgcgagcggagcgaccagcaccggcggcgtgggcgatgcttccggcccccgacttgctgactccgctgagcggaattatttcacattcagagagcgaattgtcacagtgacgaagcaggttggctatttgcaggactatatcaatactcagtgctttaattaa

SEQ ID NO: 92642 - DNA, 636 bp, Enterobacter aerogenes
gtgaaattctctcgaatcgaacaaagcccagcaatggacaagggaaactatgtgaaaattgaccatgactttggctactttttagatccgaataagatggcttcgatagctaactatgaagatgagtcagcagcactattaaaattaatgctaattcatgaagactttcttagagttgttattgaaaacttaaggcctgagggttcagaaaagtacaatgccatacaaagctataagtattttgcaccgaagctgtcagctgccgttctcctggggcttcctgtatcgcttgcagatgctatggctgaactcaacagtattcgtaataagtacgctcataaaatagactatgaaattacaaatgaggaggttgataagcttgcggaagtgataaaaaaaataaaaatcgaagaaatcaatctcggcgtctacatacatcaagaggtagatatcattcttaaggatggtatctacgctatagctctgatgagagagctgccaccagatttagaagaaaatcgccttcgtatctgcaagctagttacaagcgcacactgcatgtgtttactgggagcattttggttaattaatactctccacgtcaagggcaaactaaaactctccatgcctgagtag

SEQ ID NO: 92643 - DNA, 234 bp, Enterobacter aerogenes
atgtctgattggaatattgctgcaaagcctcaggaagagcgagacaaggttaacgttgacctcactgcttcgggattggcggataaggtgcgcctgaacataccggtcatcgccgaagctgtgatgcgcgagcagcctgagcatttgcggaataactttctcgagtggtttcgtcattatcgtgagcaaagcatctctttgccaaaagtatctaacgctcattatctcaagtag

SEQ ID NO: 92644 - DNA, 327 bp, Enterobacter aerogenes
atgaagcctaggaagctaaatgctgagcagcaatacaaattagaccttgagttggtcaaaaagaagcccgctaatcgcaccgaggcaaaagcccatttggcagcgcacttacggattagcaagtataaggtgcaggcctcttccaaaattcgcgttggcaacttcaagggaaggaaaaaggtgcatttcaataaggccgaagaagaagccagagcagcactaaataaagcaaatgccattagattttccgaaggggaggtcgagtccgtcgatacggaccgaatctccgagagtaacaaacgctggcgtgggagaactgctgactaa

SEQ ID NO: 92645 - DNA, 180 bp, Enterobacter aerogenes
atgccaaagactctcactgatgaagagctaaatgttctcatcgaaaaagcacaggcacattcagaagtgatgtctgaattaggttcagaactggaagctgaagagtctggacaaatactaagcgcactatgggaattgaagcggtgctgggaaggagccgccccgtgggaagtggagtga

SEQ ID NO: 92646 - DNA, 261 bp, Enterobacter aerogenes
atgggtaacgtaatgattaataaaattatttctgattatgccgaagctgaattccttgagtttgtaaaaaaaatatgccgagctgaaggtgcaacggaagaggaagatgacaaattagttgacgagttcgagcggttgactgagcacccagatggctctgacttaatttactatccgcgcgatgatagtccggaaggtatcatgaaggaagtaaaagaatggcgtgcaaaaaatggcaagccaggattcaaggatagctaa

SEQ ID NO: 92647 - DNA, 273 bp, Enterobacter aerogenes
atgattgattttaaaagtattatttcagagcaaaatcttgttgatattatcctcttcttggtaaggaaagagaacggcttgggttaccctcaaatggatcgttttttcagtcgtcatatgttttcagtcatagagaacggtgagttcatgaggacatttgaacagatgcgactaaaaggagaagttgaattgggagagaaaatgcttgttgtaaaagggccaaactggaaagagccgagattcgttaccgaaaaaaaatacggtattgaataa

SEQ ID NO: 92648 - DNA, 273 bp, Enterobacter aerogenes
atgagtatgagtttaattgaacttgcaaggaagttagtatcctcacaaatatctgcagatgaatttgaaactcaatttttccaaatgtggagaaaagaaggtatttcggggcagttaacaaaagatagtaaagatgttggagagtgtgcagtcgagctttttattctcgctgattgttatacgtcagaccctgtaagaagagaaagtgagttggattcgtacgggttgtataaagaggttaaagccacccttgagaagtataaacttctatag

SEQ ID NO: 92649 - DNA, 939 bp, Enterobacter aerogenes
atggccatcattatgcaggctatgcagtggggcatgaatccctatacggtcgcgcaaaaaacgcatcaggtaaacggcgtactcggatatgaagcccagctcgtcaacgcggtaatcgccagttccagtgctatcaacggtcgatttcattaccgctacggcggagactgggaccgttgcacaaggactcaggaaattaccagggaaaaacacggtaaaaatgggaaatacaacgttaccgaacgggtgcgaggctggactgatgaagacgaaatcgggctgtttgttcaggtcggcgcgatcctacgcggtgagtcagaaatcacctggggtgagccgctttatctctcgggtgttgtaacttgtaattccccattgtgggtttctaacccgaagcagcagatcgcttatctgggcgtgaaatactgggctcgcctgtactgccctgaagtgattctgggtgtttatagcccggatgaagttgagcaacgaacagaacgagaaatcaatccggctgcggtgcaaagaatgtcagtagccgagattaccagcggctcaaacaccaccaccagcgaacagggcacaggtatcagcattgattcacttgctgatgatttccgtgatcgcatagaacgcgccgaatctgttgatgcggcaaaagccatcagagctgatctggataaagagaaagctgtgctgggtactgttctcttcaccgaattgaaaggtaaagcggtgcagcgctacttcatggttgatgcaagaaacaaagttgaggctgccataaattcacttcctaacccgggagatccggaagccaaagcattattcgcgaaggcagaaaataccctgacctcatcgcgccgacacctcggtgatgaactgtatgaccagttccgtatcacgctggacgacatgaaaccggaatacgttggctaa

SEQ ID NO: 92650 - DNA, 2481 bp, Enterobacter aerogenes
atgccaaagctgaccccaaatacctatcccatcaccctggtaaaaagcgtgctggtggtttcactgctggcgctaatactgattattatcagtttgactggcttgtttaactatcagtcgcgtcaggtcagtagtgccattgataaaaaaatcattggttctcagtatgcgtttattcagcataaacttgaggatgccgtcgatcgcccacgacaaataacgaatctatttttacaatatattcagggcgaaaataacaacatcgataaggatactttagttcctgaaatggtgtatttgactgcgagcgcgtttaaaaccatgcccgccttccagagcctgtcgtggtttgcggaaaatggctccagtattgctgttattcgtgacaatcatagtaatcaaatttatttacaacgaacccagcgtgataatcatcactccctggttaaatacagcgggttaagcccgcagaccaatattgtcaacgtcaataacgcgtttaatgttgctgatttaccgcagtttcgccgcgctcgccagcaaacgcacggtttctggcaacgctctctctctaccggcagtttgatcatgagctggaaccagccagtgtacgataaacaaggccgcttcgtcggggcgattgccagcggcgccacacctgcagatatgaccgcttatttacagagtctcctgccggataaaagctatgctctcctgcttatcgatgacaacaatcgcattgtcgcgcgttccggcaaccaacataaatggcagcaagatcgccaactgatagcaaagcttacctcggcgcagccgtcgccgacgtcattttccttgcgtactgaggacgagtctttgttggcgaccgcctttagcgtgcaggaccgccaacatctgctgaactggaaggcggtacttatcgcgccacagcatgcggaaatggcggaaatgaataaacagcgtttacttgtgaccttcaccacgacactgtttatttttattctgatgttggttcttctgatgattatttctcatttcaccggcgccttaaaggacgttgcagataaagtgcgtctggggttaatgccgtggaagaaaccaactaaacgcgtatttccggaaatagcctcgttggatgcagcattgagcaacctttatgcaattattccagacactttcgaatctaaacgccgcaaactggaagaagatagcgaaaccggttttttaacccgtagcggtttactgcattgtgagtcgctgtaccgtcatcgcaatatgctggcgatggtacacgttaacaactacaactcggttaagaatgtgctcggtacgactcaggcccgacagtttattcaccagtttactttacgccttcgcaaaatattgcctgaaggggcactatgttgtcgtgatcgagaagacttgttcattatcgcttttgatggcatgtatgccgaaaaggatgtcgactggtacagcgcgctacttgcttctgtttttcgtatgtctgcttctgatatgcccggcgaatcgcatatatttactggccatattggcatgttgattgaatcattaaccccagagaacatcggcgaatgtctgatgaatgttagtctggctttacagcatgcccagatggagcgtagcggcacgagtaaacttttcatggccgccatgcgtgaagaggaagtgaataatctgcgtctgcatcaggcgttatgcgacgatctccattcggaaggtttccatctggttttgcagccgatcgtttcatttgaatcgcagcggccttgtaaagaaggtgaatgcctgatccgctggcaatcaaatgtgttgggtttcgtgccgcccgacaaatttatcgcccttgccgagcacaccggcatgattgtgccgttagggaaatggataattgaaaccgcctgtcgtgaacttgccgcgtttatcacgcgcggcgcggcgcgtgattttaaactgcacgtcaatatctcggcaattcagcttcagcaacctgattttgctcagcatctgctggaatcaattcacgctaatgatttgatgaacagcaatatttgtcttgaaatcaccgaaagcgtcttgctgcatgacacgtggcgaattgtcgaaatactggcttatctacgtcgtcttggcgtatgtatcgcgattgatgattttggttccggttattccagcctctcgtatctgcattcgctgccatttgattgtctgaagattgaccgcgggtttgtcagcaatgtgcttgatgataaaaaaaacgaagcggttatcgcctcggtgttaatgttggcgcgaagtttttccgtgccgctggtggccgaaggcgttgaaacgcgcgaaatggcagaaaaactgcaggagatgggctgtgatttggcccagggatattattattcccggccgaaaacgtttgatagttttgacgtcgccaatgggtttttcgttgttgaaccggaatga

SEQ ID NO: 92651 - DNA, 489 bp, Enterobacter aerogenes
ttgagcgacactaattacgcggtcatttatgacctgcacagccataccgtcgcctccgatgggcgattgactccagaagagctggtacatcgcgcgcatgagatgcgggtggggacgctggcaatcaccgatcacgatagcgtggcggccattccggcagcgcgtgccgaaattgcgcgggctgaactgccgctcacgcttatcaccggggtagaaatttccaccctgtgggaaaaccacgaaattcatatcgtcggactgaatattgatatcgaccatccggcgatgacgcaactgctctgtgaacagaaagcgcggcgcaaccagcgcgggcagatgattgccgaacggttggagaaagcgcgtatccccggtgcctgggaaggggcgttaaagctcgccgatggcggcgcggtcacccgcggccattttgcccgctttttagttgaagccggctttgcgagcaatattgccgatgtattcaaataa

SEQ ID NO: 92652 - DNA, 1554 bp, Enterobacter aerogenes; identical to SEQ ID NO: 88520

SEQ ID NO: 92653 - DNA, 2424 bp, Enterobacter aerogenes; identical to SEQ ID NO: 92008

SEQ ID NO: 92654 - DNA, 927 bp, Enterobacter aerogenes
atgacctttgaacagatcctggaagagtatttttttgcccgcttattgcgacctgacacccagagctgctattgcacagcggtaaatcagtttacccactggcgcaacgtattacccgctgaagtgacgccgcatatggtgcttgagtggcgtcattacctgctaaatgtgcgctgcatcaagccggtgagctggaaccactatatgcgccatatgcgagccttgtataacttcgcgattgaacagggactgctggaacagtttatcaatccattccagaaaacatcgctgcgggaatctcgtaagaaaaagaaaaccctgacccgcgagcaaatccttgcatcccgcaaagtgctgaaccaatttatcgaacgggagaaaatgcagcgcggctatcgctcgcctttatatccggcatggttttggctgaccgtggttgaaaccttcaactacaccgctatccggctgaatcagcttattcacctgcgggtcagggatatcgatttggtccatgacacgctgtttattcagagcgaaggcagcaaaagccatgatgaacacgttgttcctatcgcctcccggttacggccctatctggagcagatgcttggagaagcgaaaacaaagggaatgcgggctgacgatcagttgttcaacatcaatcgtttcagtcggaggacgctgcgccagggtaaaccgatgacagaaaatcaggtgagttatttctttgccaaactcagcgatgcctgccacagccgtttttcgtcacaccgctaccgtcataccgttgccacagaattgatgcagaaaccggagcaaaatttgtatgtcacgcagaaactactcggccaccgcgatattaaggtgacgctcagctatattgaacacaatgtcgagatgctcagaagttgcgtggagagagattga

SEQ ID NO: 92655 - DNA, 1545 bp, Enterobacter aerogenes
atgcatcctgaatccgcgcaaacactactggctgaaactcctcgtcaacagctggtccagtttattcgccagagcaccgcccttcccgcctcactgtttgaacgcttctggctgataccaatccacagcttcgcagaactggcgcagttgttcccagcctcggaaaaccaccaccattcccacgcaggtggcctgctcgatcacagtctcgaagccgcctgttatgccgcacggctgcggcagagttatcttttcccgcctgatgccgcaccggaagatcaggcggcgcagtccgaacgctggaccaccgttatcatctacgccgcgttgctgcacgatttgggcaaacttatcaccgatattgaggtggaagaaatcagcgggaaacgctggtttccgtggcatggcccactgacccagtcttatcggtttcgctatctgccgcaacgtgattatctgcgccatccggctgcggcagcccttctgcttacccaacttctccccccggaaagcctcgactggctcgccgccgatgccgctgcattatccaccctgctgcactgcctgaacggacagtatcagtatgccgggctggcgggtgaactggtgcagaaagccgaccgggcgtcggtagcgtttaatctcggcggcgatccggtcaaggctatccaccgcccacaaacctcgctgccgcagcaaatcatcgccgccctgcgcgacctgctggcgcatgagttccgactcaataacccgaatggtggttctgacggctggctgacggaagaggcgctgtggctggtcagcaagaacgctgccgatgctgtccgtggctggttgctgcgccagggtattgacgccgtaccgcagcataacgtgcgactgttcgacgagatgcaggcacaccagttgctcattccctgtgaggacaaagccatctggcgatgtcgaattgaggccagcggcggctggagcagcgaacttacgttgctgcgcttttccccttcactgatttgggaagatccgcaacagcggcccgcaacctttggtggaaccgttacgccgatagcggaagtccagaatgcgacagaaacagtgattgcaacggatatcactgtggaacaaccatccccccaacccgaacagaacgatactccactttcaggcgaagccttctggcagtggctggttcgtaatgttcaggctcaacatctggaagtcaatgaacctaacgcccggatccataccgtcgccgggtcggtgtttctggtgacgcccggtattttcaaactctggcttagcacctgcggtcagaatgtccctgaagaatactggcgggaggtacagaagaagttccagaacctgaatcttcaccgaaaacaaaaaaacggcctcaacatctggcactgcgccgttgtcggcccacgccgttgctcacgtctgaagggatatctgcttgacgatcccacgccgctttttggagatgacgttccctttaataaccctcatctcttgctcaatgaaggaagtcactcaaatgacctttga

SEQ ID NO: 92656 - DNA, 222 bp, Enterobacter aerogenes
atgctgttacccagcggcgaaacagttctggctcaggaacgcttttttattgtgcatattaacgatgaagagatcagcaccgaagcctggagcgatcatgaacggctcgttatcaatgactatcactggtggacgcctgacgagctggaaaaaacaactgacgttatttttcctgaaaatatatccgcgatcctctccgagtctgaaaagacccgccgctaa

SEQ ID NO: 92657 - DNA, 912 bp, Enterobacter aerogenes
atgaacagaagcaacgatctttaccagaaagtcaccgatgaaattatcgccgcgctggagaaaggcgtgatcccctgggttcgcccatggcgggaaggggaaccggtggtgccgatgaatgccctgtccgggcggttttatcacggcatcaatattcctctgctctggaacagcgcagaacgacagggatatgaaagcgatcgctggctgaccttcactcaaattcgcaatgcgggcggtaacatccgcaaaggcgaaaaatctacactggccgtgttttatctgccccagcagcgcgaggtagtagacagcaacgggaacacggttcttgatgctgacggcaaccctaaattgacgtcctacgcagtggtacgcgagttccggctgttcaacattcagcaatgcgaagatctgccggaggcgttttcacaacctgtcgtgatggtcgatgaccctatcgccgctgccgagcagattgcccgacaaagctcggtagtgatcactcaccgacgccagaatcgggcgtattactcaccaggacgcgactgcatcatcatgccgcatcctgagcagttcacttcgcgtgaggattattacggcacgctgctgcatgaactgacgcacgctaccggacacgcttcacggctgaaccgggacggcatcactgccggaaagcataccttcggagatccggcgtacagttttgaagaactcgtagctgaaatgggagctgctttcctgtgtgctcatgttggtatccagtcaaagctacagcatgacagttacatcgcatcgtggctgaaggtgttgcagcaggacaaaaaagcgattttccgcgccagcgggttagcgcgtaatgcctgcgagtacctgcttgaacgagcgcagcagccgttagcgctgagcgcataa

SEQ ID NO: 92658 - DNA, 294 bp, Enterobacter aerogenes
atgccaacttcatccatcactgaagcaacatccttatcattgtctatctcatctgaggcctgggaaaaggtagtcagttttccacccgatccctctcaggaagatgaccgcctcgaaaacctgattgtcgcgaccatactgacattcaaaagcgcaggaccggaccgtaagagcattaatttcggtctgtactgttttcccgccgacggcagcagcaatgtaccgctgatgacgccgctgcgcttaacccttgaagatgaccacctgttggttactgcccttcacaccagctga

SEQ ID NO: 92659 - DNA, 873 bp, Enterobacter aerogenes
atgacatcactcgaaacactgcaatcggctatctctaacgtctctgtatggcgtcagggtgatgtatgcgctccgcataagccgttgttgctgttgtatgtgctgtcgcagtataaagcaggccacccgcgcctgttcaactacgctctggagatccacgaaccacttactcgtctactaaaagagtttggccccaagcgtcgcactgactatcccaatatgcctttctggcggctcagaactgacggcttttgggaaattgccaatgcagaaggttgtaaaccccgtaaaggcaacacccaaccgaccaagaaagagctgattgataaccaggtagcgggcggttttgatgaagccgcttaccaacagttacttgcacaccctgaagtaatcgaccaactggcccaccaggtcctgatcgatcgtttccccgagagtattcagcggatcctagccaaccaactgggtctggattttatcgaccgttcaaagaaccgcgatcctcgcttcagggatatcgtgctccgggcttatcactcccgatgcgctttctgcggttacgatctacgcctggatggtgcgctagttggtattgaagcagcccatatccactggaaaacctatggtgggccgtgtgtggttaacaacggtctggcgctgtgttctctgcaccatgatgcttttgatatgggcgcgttcgggctggatgaaaacctgacgatccgtatctccggcggcgtcagccgtagccctgtggtggacaacctgttctggcaacgaaacggccagtcgttgcatcttccttatgacaaatcgctatggcctaccgaacaatacgtcggctggcatcgtaagcagatcttcaaagcctga

SEQ ID NO: 92660 - DNA, 591 bp, Enterobacter aerogenes
atgtcatcgaaaaaagctttaaaaccagcgataaagcgtgaactcgtccgctatctgacggtgcaatttgccatgggtttaagccaggcctgcaggacgttatcgctgagcaggacggtgtatttttatcagcctgatacccggcgttatgaacaggtgatccatgcgctgactgagctggcagaacgctatccgcgctacggttttaagaagctgttccagctgctgcgcaggcagggcaatacttggaaccataaacgtgttcaccggatttactgcctgctgaaactgaattttcgccgtaaaggcaaacaacggttgccggtgcgtaatctctcgccactggccacaccggaagcgctgaaccagagctggtctgtcgattttatgcatgatgctctggtctgtggccgtcgttttcgcacgttcaatgtcgttgatgactttaaccgtgaggcattgtcgattgaaatcgatctgaatctgccagcttttcgcgtggtccgtgtactcgacaggatcgcggcaaatcgcggctatccgtcatgctacgcatggataatggtccggaatttatctcacttgcactag

SEQ ID NO: 92661 - DNA, 321 bp, Enterobacter aerogenes
atgctacgcatggataatggtccggaatttatctcacttgcactagctgaatgggcagagcaacatgcagtaaaactggaatttattcagccgggtaagccgacgcagaacgcttttattgagcgctttaaccgaacataccgtacagaaatactcgatttttatctgttcagaacgctgaatgaagtgcgggaaatcacggaaagatgggtgtcagaatataactgtgaatgccctcatgaatcactgaacaatatgacgccggaggaatatcggcaacacaatcgtttggccgggatctcaaaaaatatctggaactaa

SEQ ID NO: 92662 - DNA, 1305 bp, Enterobacter aerogenes
gtgactaatatcaaaacccggctatctctcgttgagtatggttcacctgttgacttaggtcgttttattgctaataccactggcatagatcgccccaaggcaaacagtatcttaattgaggcgggaaaccgtgtggcttcaaacttaaagcttaactacaatcctattgtagttgatactaaaggtataagagctattgattttgcaggcctcatccgcattaccccatcattagaattagaagtcgcacccaaattccttgggctcaatgatgcttactctgcttggcgtgaagattttttcttcttgtccactctttcacggcatggacgtcttttagtttcggagcaattatcagcttccggaagctcgtcacgagatctaccaacattgatagctcgcgcaatcataaatatgtatgaggcgcataagcgtagacctttgcgcagttaccgccgggtgcgtgaaaaagagttttttattgacggagaccctgaccctatggagttactctttccatcagccgatggttttgaacaggagtttattcgctttgatcagcgaaacagttggaacgctaaccttgtagctgcggccaaagcattgctaccagaagttaataatccctctgttgtgaatgcacttatgcgcctaattggtaatttgtcaccgcaaaatttacctagtcgtagtaaaccaatccccgccagacacagggcatggaggccattacatgaactgtctatggatgtgctaggagggcttggactaagttataagcaggggcaggcacgcgcaccaggttacatagtaggaacttggcgagtttgggaggacttgttaaccatagcagccaggcttggttttggaagcgcggcagtagttccacaaagtggctacacccttggtaacaaaactaaaataacaacaggaacaatcagttcactatctgtatatcctgatctttcaattgaatccgatggtattaggccaaagatactcctagatgctaaatataaagggcatatagagaaaggtgcgcttcatattagtcatgccgatatttatgaggctctagctttttccaaagcagcaggtagtaaccatgtaatactggcatatccttcgatgccaaatggtaatattcagcctgttggactatgtaacatttttgaaaaaatagtcatcgataaagtgaacatcgtaggtattcaggttgaaattcgtggtatttcaagacccggagcgattcaaacattatcccgtaatctagtaaaaataacaacctctattataaaattataa

SEQ ID NO: 92663 - DNA, 1149 bp, Enterobacter aerogenes
atggccgctagtttttctactgattgcttacgtgttttaaaccttcttgctcgttcaaagaatgttttgctcacaggagctccggggacaggtaagtcaaaactgttagctgaggttgctgcagcatttgagtcagcatttggtattacacctatgggtggaacgccaatgcttaaccctattaaaggtataccaattccaccttcggttgggatggtaaaaaaaatccccgcacctaacaagcagaaacgtaaggtttttaggacggtctttcatcagaactctaaatatcgtgatttcatctcgggcatcactcctgctgttaataaggcagcaggcgctccagattttgccattgtgaaaggcacactatatcgtgccagtgaacacgccaagcaagtcaatggggcagccctactgattattgatgaaattaacaggggtccagctgtacaggtgttcggtggcgctattgtagcccttgaatcagacaaacgtttatcagttgacggggtgcctcgtgcggaaacacaattctttgaaatactcgatcccatctctggcaatgtcatcgaatatgctttaccacatgatctctacattttagcggcaatgaaccaagctgatgcttctgtagagcctttggacgtggcattcttacgtcgctgggaacctttacgacttgagccagacgaaagtattttaagagcttattatggtcttggaactaagaatatcgatgccttacctgatttaccaggaagtaagactgatgtcttggaggcatctgtcagagcatgggtagctataaatgaacaaatatcccttggacgtggccctgaatttcaaattggacatggagttttaatgtctgatatagaacttcaggggttagctctacccgagattcttggcacgctgtgtgttggatgggccaaagtgcgtgctcacgtagaggaggtgttctttggggatccccgaggtattgctgcagtccttaatgctctagatgggcctagttttaatcctcttaaactcacagaaacgacatttgccgatgatttacggttcagacttgagggccctgcgaattttacagagagtaatatctacgcagccctacgaagttttgctaatcctagaggctaa

SEQ ID NO: 92664 - DNA, 597 bp, Enterobacter aerogenes
atggctaatggcgcagggcaagttgcccggatattatataaagaaattgtaccaggtgaccttaggaaaattcatgcagaatctaacgacgctaacacgggtggtggagctcgtgactttcgctttggttcttaccccaatatagcatcgattgttaaaaaaatgttcccaaaccaagtgattgaaacccgacgccgtaaaggggcaatggttcccactactatttactcaggctatttctattggaacgacgccgctgggaatatttatagagaagtttcctattttgaacccccaacagatgctcggccagcagaaggaagaatagccagagttcatgagcagccatgtctttcgactactctgatgccgactccggcccccggaaacaaagtttttctgctcctaattcaactattggactccaccgtctggccatattatgcagaagaacgaactttacgtactgcaggattatgggacccccaagtagcgcaaagaatgctgaattgtattgatgcaccacgccgggtagatcaagcggttattggtttttttgattttatgaatggtggaatatattgcaatggccgctag

SEQ ID NO: 92665 - DNA, 2232 bp, Enterobacter aerogenes
atgagcgcacccaagacagttgagacacagtatctagcttcagcagaagctgccctgagcaaggccattagccgtagtcatttctcaaattgttttgagttacggctccaggttttggaagctgcttcttcaatatttggcggatttgatttggctgcttttcacttggctttcggtataaaaagtgtaataccttcggaggagctcttagagctttcagctcccgtcgtaaaagccatagaaaaagcgcctatctatccagcattagcattaagtattttatctcgtgaaactttagatgagcaggatcgaaaaagcacaggggcttaccacacagattttagattagccatgcgactggcagagcttgcttcacctaacttgacctataaaagcaaggcgattgatcctgcctgtggcgctggaattttgctatcagcattaacccaggccgtatgcgggggcgataaagccaaagctgcctattggttggaaaacggtgtgtgcgcagcagacctctccgctaattcgttgcgtgcaactctattgagtcttgcttcatttacagacagtatatcggtccttaaaactatgcgctcccgctggtactgcggcgacagcttaatggctgatcatcaagtttggtcagatatgtcttctaacggatttgacgcagtcattggcaatccaccatgggaaaaaatcaaactatcccgacatgaatttctgaaatcttctggcacaaaacgtcactatgggtctctcataaaagagctcgatgaagaacgttttgctaaacaacgccatgagattgctaattactctcaacttcttcttaatcgctacccaaacttaggttgtggtgaaccagatctctatattgcatttacagacctcttctttgagctttgcaaaacacaaggggttgtggcagctcttttacctgggggacttattcgttctcaaggtacacaggcaattcgacagaagattattaatgcaagtaaccgagttaccttatcgattatcgataaccgcgcccgctttttctctattgattcacgctttaaattcttggctgtctgtctggttaaagcaggattaaataaaagtaagcgtcaagacatcactctcttgcacgaacaaggaacaccaactggcctagaaattactggaactgccactattaaccataattcattagcctctgtacgtcccgatttgagtctgccagaagtccgcagcgagagcgaatggggattatttttaaaaatcgctgaaagaggaatatcatgggaagagcctggctacggctggacacccaaattctgccgagaggttgacatgaccaaagaacgttccaagttcctaggccacgcagcaatgggaacaattcctttggttgaaggacgtatggtgcaggcacaccgtttcggtgtaaagggacatgtatccggtactggtcgcagcgctctgtggaaaacttatgccgttggttgctcgcatctttcaccgcagttttggattcgcccaacagacattccccgtgccaatcagcaccgagtaaatatgttacgtgctggtttttgcgacattgcgggtcaaacgaatgaacgttctcttatggctgcattgattccagccggagtggtttgcggcaataaggttcccacgatcctttttccggaggatccatcagaagagcgcttactagtgtggttatccattgtaaatagcttcgcgtttgattggatgcttcgccgtgtgctcaccacaacagtgaattacttccttctgcaaagcgtgcctatacctagactcaccaaggatgatttatcgtggaaaaagctagcgaatgccgctcgtgaattgaatatattagataactcaggggctactcgtgcaactcacgagcgtatggcgcagcttcgtgcacaaattgataccgaagtggctttagcctatgggctcggcttgaaagacatggaattgatacttcaagattttccgcttttagatcgaggtcaaataagacttcacggtgaaagtagatctacgatcacacgagacacagttttatctgtaatggcaagccgtacaggaaacaatcctaaagtttggtcatccagagtcgcggaggctcataccttaggagctgtagcgtatataccctcagaagttgctcttggtggggaattaataaaacaagaaggagtccgatatcatggctaa

SEQ ID NO: 92666 - DNA, 1098 bp, Enterobacter aerogenes
atgacccttagatacattggctcaaaatctagactaataaatcaaatcactaatcacatagggtcacctaaagatgacgctttctttgttgatgccttctgtggaactggtgtcgtagcagaagctgctgcgagcttgggctggaatgtaagaatcaatgataatcttctatcagcagtgatatccgcaagcgctcgtcttaccacccaaaaacaagcatctttcaaaaagcttggtggttatgagaatgccatagctaagcttaatgcggctccccccaaacaaggcttcatctggcgtgagtacagccccgcatcctatgatctctgcggtattgaaagacggtattttacgcaagaaaatgccgcaaaaatcgatgccatgagatggcttattactgactggagcaaatcaaactcaatcaatgaaatggaagaacgcctattgattgcagatttatttagtgctcttaatcgggttgccaatattgcaggcaccttcggttgcttcctatcaaagtggacaaatcaatcacaagatacgttgcaccttcgttgccgtgagcttaagaatcatagtgttctggtcgagactactataggtgacgtcttcaaggtgccgaatacggaatcagatttggtataccttgatccgccatataccaaacgtcagtatgctagttattatcatattcttgaaacggtggcatggggagatgaacctgatgtggtcggcgtttcaggcttaagaccgtggaaagatagagcatcggatttttgttacaagaatagggcacttaaaacactttcgctcttagtgcaaagtttaagatctaaaaaagtgctcctttcatatagcagtgaagggcacatttccatgcaggatatgaagctcgagctttctaaattaggtaaattcacgatgcatcctcttggagcaatcggacgctatcgacctaacaaaactgccagtaaaatgggggctgaagtaaacgaatttttggtcgaagttgaacataccgccacgagccgattgtgtgacgtacaaagtaacaatgctcaatttactccaattcatcttgtagataactataaatga

SEQ ID NO: 92667 - DNA, 1470 bp, Enterobacter aerogenes
gtgacgaccaacagctacctggaatactttctgacgctgctcggctgggtggtcaataacgggctgtggaatacgattagcgccaccgggttattcgccctgccgctgctgattaagttgctggcgttgtggttacaggccagaagtcagggggcggatgaaggcaacaaagccgcgctgtctctgatctggaccgagcacctgatgtacacctcgctgctggtgattatgttcacctgcgtaccgatgttgaacatcgacctcgataccatcaaatatgacaccacgcgctcaaagcagtgcggaatgtcggtaccacaacccgccgataccggctatcagccgattattaactcactgggcggcaaaaccgccgccgtcccggtctggtggtactttattcatgtgatcagcaaaggcatcaccagcgcaaccattgccaccctgccctgccaacccgatctacgtcagatccgttttgaggtgcagcacacccgaatcaaggatccagcactggctcaggaactacgggattttgtcgaggagtgttatgccccttcccgcgcccgtctgaaatttcgtgccggagagctggacgatgacaccagtgacaatactgcctggctgggatcatcgtactttctcaacacggctggttactacgataccgaccatgcgctttcaccgcacagtgcgtggccatacagcacatcacgcgatgccgggctggccgatacaggtgcaggcggttatcccacctgtaaacagtggtgggccgacgatacggttgggctgaaggcccggcttcttcaactcccggctccggatatctggacagcgtttaaaaagatcggccaaccgcaagcggtgtatgaagaggccgtactgcgctcactggtcagcgaacgcaatatgcaggtatcgcaggatggacgcgtttaccccggctacggcggcaatgtcgatggtacgctcaccaacgccgccacgaggttagcctccactgctgggaacatcataggtagtgcagtggccttcccggcgtttgacagcgtgcgtcaggctctgccaatggtacaggcgttgctgcaaatggcactggtgatttgtattccgctgataacgttgtgttcggcgtgggacgtgaaggcggtgatgacgctgacgtttgtgcagttcgcgatgttttttctaacattctggtgggagctggcgcggtggctagatagctggctgctgggcgtgctttacagcagtgatactcacagtagctggaatctggccgggatccagaactcgcaggatgatgtgattatcaatctggtgatggggtcgatgtttctggtgctgccaacgttctggctgggggcgatgacgtgggctggagtgagggttggcgtggcggtgaatggggcgctgacgggtggggttaaagtggcgcaggatagtggggggaaggctgggggatga

SEQ ID NO: 92668 - DNA, 258 bp, Enterobacter aerogenes
atgaagcggctgatgctctccagcaccctgctgctaacctgcatggcaatgatgttttatctatcatcaggtaacgcgctgcagattaaccgcagcgatctgctgctctggcgtataacgctgtacgctgcaatgtccggtgtgggctggcgtctgtacgatcgcttccctccgtatcgcccgaccatcctccgcatcgcgctgtggtttatcgtactgattgtgctcaacgaaatcgtgccggaggtgttccggtga

SEQ ID NO: 92669 - DNA, 1266 bp, Enterobacter aerogenes
atgaagtccttcatttccttcattcccccttccgcaacccggcgtaacaccttcccgctgacggcaggcataagctggaacagcgatatgatgtgcggcaatttcgatatcgataccacagtgcgcaaccagctcaacggggtgacggacggcttccagcaactaatgggtgaggttatcgaaagcgctaccagtgcggtcgccagcctgcccgcgatggtgatccagcgtgccaatccccagctctacgatctgctgaccaacggcgtgcttcagggacggctcgacttcgataaatcactgttaagctgccagaagatggcaggcaaaatgaccgattatgcgctcggtccggcatggacgcagagcgcccaggcggagaactatcagggaattgcggccagtgaaaaagacgcggttcgcgccgaccagagagctgccgaagaagcagcagagaaaggcaaacgctgggtgggcggcgaacatcgcggcggtaaaggtcaatcgcccatcaaactggttcgcgatacgacggtcgcaggctacaacatcctcaataatcgcaacgcgaccagcaccagttcggtatccagcaacgactgtcagggggagctgtgtcaggtatggagcaaacccgacgacgcagcgcaatggctgactcgggtggttggcgagcagaccattaacgtcgccccggataacgatcaatccggcgacactgaccagcaaagcggtgcacaatctggcgtcgggctgacgccgctgattcaggaagagcaggataagatccagccgctaattatcgatatggtgaaccgcagccagcccattaacgatgacacgctggcgcaggccagcggtggagagctgcatctgacacgcggcgtgattgaagcgttgcgcgacgatcccgatgcagcggtgcttatccagcgcctctccggcgaactggcgctctcccgcgtgatggagcaggcgctgatggcccggcgcacgctactggccggaatgcgcgagcccaatgtctccggagaaaaagaggcacaaaccgcgctgacccagaccaccgcccagctcgaccaggaactgtctcagctcaagctggagctggatatgcgtcaggcgctggcggataacgcggcgctcaccatccttgaacgccagaccatgcgggcgaagaccaaaggccaggcggtcggcgtagaggacgacaccgataaacgggtggacgatctcagcaagcccactggcggggatacgcaatga

SEQ ID NO: 92670 - DNA, 690 bp, Enterobacter aerogenes
ttgcgctatgacagcttatggcgcccttgttcagccagtattatctgcgttggggatatgctgttcgcctttaacctagctgaaatgacggaatatgttccagcagaagaggttgatggtcgatacatccgcgatgaaacgatgatccgctggatgaggggaaaatataacaagccatttcgctatgtcattaaacatgccttacctaccggacgattctttctacagctctactcgccatactcgtcaactaactggcaggttgagtttcgccagacaaaacagtgcgggcttataagccagatcccgaaaatcatttccgcgatgcgtgatgctgttccgttgattaagaaacagcaggaagaggcgagagtcaaagctgaagtccggcgtatccagtgggaactggatgagaagagatatcgggaacaggagcgaatcagaagggaaaaagaggcatataacgccagtttggccgaactgaaatctattatggtgcagtgggcagaagataagcgtatagagcagttttttcgtgaagcagaagcggatgtatctatgcttgaagaaaagcagaagggtcaggcaacagaacgtttgagtttggctcgtcagttcttgtcggtggatacggctattgagcgattactgaagtggcaaacgccacaggagatacttagcaagggataa

SEQ ID NO: 92671 - DNA, 2628 bp, Enterobacter aerogenes
gtgtctaagtatagttgggtccctgtattcaaaaacgtttgtagatggattgctgactacgagaataaacagcaagaattggtccaaattctacgtgaaataggcgttgataaaggtctggaggacgaactttctgatggaagtagagagtcgctgaaagtgatagacccgttcactttttttgctacttttatgaagtatggcgtggtcaaacgtactgagttctttgctgctctgcttaaaagagcaaatttaccaatttccgcacccagtgatttcaacggcgttccaaatgcacagccactcaaagtctggctctttccttatgaaaaagaacgttctgatgatatggtgcccagcctttgggcactgtttcatcagatgcgtgcagggaaaattgatggtgaattgttcgataaaattctaaaaattcctcataccggtttcgcaaaacttactgagtgtttgttttatttatcaccggaagaatatttccctgtagatgcccaaacgaagcactggctcaagaaaaaagggcgtgaattacctaaagagaactggcaatcctaccaagagttgttgtcatggctcgatagtacacagtcaaaatcatattatgaaatatcgtatgaagcttggtatgaaaatcagagtggttcgttcacctcggtaattgcagacgaatacttaagtaatcgcttccctgagagtcggtcgtcaaccatacatctgattgcgtataaaacgaatgcaatgagggagttggcatttgatccaggtaaggctccggagaaaaagaagaagattaaaatctttgttgatgagcagcctaccgatccagttctttcccaagttattgcctatgagagcggcaagagccgcaaccaccacctcgcaacacacgctccaacccttgctcaggggaatgcagcatgggctgttgagattagtacgcttgagcaattaattacactgtgtgattggtatgcaccccacccagcgaaggacctacctgccatggaaaataaagagaaatcagtaaaaactcacacatcactgaatcagattctttttggcccccctggtactggtaaaacctattcaacgctggaacgtgcagttttgttggcagaaccttcatggtatagcgatctggaaagtcagaatcttagtactgaggaatatcggcaagcggtcaaaaataaatacgatatgttatgtgcagataaacgcatcgtgtttaccactttccatcagagtttttcgtatgaggatttcattgaggggatccgtgctgaggtagctgaggaaaatcagggcataaaatacaagatagagaacggtattttcaaagatattgctgaccgtgctgctaaggcagttgcagctaaagagataggactctctcaagctcctgatatctggaaaatctctattggtcgtgcccatgaaaaagaaatgcgtgatcgctatatcaatgcaggtgaagctcgtattggttggaatgacacgggggatttgtctcagacctttgaacagaagacacaggaacaacaggattactggaactccttgagtcatcctaaccacaatgctcttaacgccttttcaaatgatgtaaaggttggggatgttctactgtgcttgaaaaatgcggaaactgttcaggcagttggaattgttacttcagactattcatttgatgaagacgccgctacttcgggtgagtacgcgcatatgcgcaaggttaattgggtattaaaggatattgaactgaatatccttgcgcttaatggtagtacaaaaatggttcagcagacattgtatccactttatcgaatcagttggcatgctttgattgctgaattagataaacaacatattcccctgccagcctcatttcataaggccagcaacatcagagaacgccagaattatattttgattattgatgaagttaatcgcgggaatatttcccgtatttttggggagttgattacattgctggaaccggataagcgattgggcggctatgatgagcgctcagttattctgccttattctaaagaattgttctctgttcctgacaacctgtatgtcattggtactatgaacacggcagataaatcattggctcaacttgatctggcattacgtcgtcgctttgagtttgtagaaatcatgccgcagccagctttactgtccgacctctcagtatttggcgttaatatcggtgatctgctgacagtaatgaatcaacgcatcgaagtcttactcgatcgtgatcataccctggggcacgcatacttctggccgctgaagactgccacaactgaggatgaaaagtgcaaactgatagctgatatttttgcgaaacgtatcattccgctactgcaagagtatttttttgcagactgggaacgtatcggttgggtactcaatgatagcgaaaaagcacctgaaaacagatttatccagacagatattatagaacatggaattaaaagcttattccccgagtctattgcgagccaattaaatgatcgcagataccggattaatcaaagtgctttctcaaatgcagccgcttaccaagggattttgcccaatgagggggctgtcaactga

SEQ ID NO: 92672 - DNA, 1317 bp, Enterobacter aerogenes
atgattcaagtgcgtgagtacgcccggctgaccacagatgaacgcgcaacaccatctttggattgtgcagtagtaaaacgtgagacgttagaatgggtgctgaaactggcctcagaatggaaaggtgaggaaccattgctattgtctgatggctatcacgtatttaaattaggtagctatatcggatacttgcaaagtccggatggagaagggattgaaattttacccaagacaaactttgggcaggataaccctcagcaaacaaggaagatcttacagcgcatgctcctggctgctttaaatattcggccacgggtcgctgggcctgcggaactaatgcggatgaatgttcctttacatgaatggatttttcgacagttcctatctgagttgcaggtcttagtcaccagagggttgtgttttgattatcgccgtgtagatgaagaaagccgcttcatacgtggacaactaaaaatccagcgtcagcaaaggcaatctccggcacgtcaacatcttttccatatcagtcatgacatttattcaccaaaccgtctggaaaatcgcctgttgaaaaccgcactcaattatgtgttggcaacttgccagaacagtgaaaattggcgattggcgaatgagctctcacatcgtatggctgaaatccctttacaggcaaagccgcaacgcgaactgcgtttttggaacaatagcaagctgatgcagatctacaatgatgtacgcccttggtgtgagttaattcttgagaaaatgaacccgaattttcagcaaggcagtcataaaggtatatcgctccttttcccgatggaacagttatttgaaaaatatgttgaggtctcacttaggtcacgcatacgcagaggatgccaacttctatcacaagccagctctcaatatttgcttgagcatacggtaggcaatagtgataagccacaagctatgttcctgcttaaaccagatcttttactgagaggttcgaatggcgctcagactctggatacgaaatggaaactcattgagcagacttcttggcaaacagataaaaaatataacattgcccaatctgatctttatcagatgtttgcatatgggcataagtatcaggatgggaaggggcatatgatgttgatttatcccaaacatttatcttttaaccaatcattacccgcctttcactactcgaatactttgacggtctgggccgtccccttttgtttggatagccagcaattggttccgggcagttggcaagaatattttcccaatctctacaggcaagagttattgacgggagctacgtag

SEQ ID NO: 92673 - DNA, 1083 bp, Enterobacter aerogenes
atgaatagtaattatagtttcataaaaccaaaattcaaaaatgatattgctatattaaatgcagatattgcctctttaaaatttgctttagatctaaataatagagatgatattgtatcagattttttgaaatttcatcattccgcaacaaaaaacataagaaattcaaaaattaatttattagattcaattcctcatgaaaaattcaaaatgatcatatacaaatggggaatgttatatgaaaaatattataagtttctacaaaaaaaacatccacctaatgagctacagcattttcaccccgagttaaaacttagtatctctggtattgcagcaatatctattgcttcacgttactctgaattctgggctgaatcatccgtgagaaatataaatatttataatcaatgggaggaaagattagattttattggaagtgattatttttataacctccatagacttcgtgaaaatggagattttttagcatatgaccgcagaaaactatccctccctgtttttgatttacataaagaattaacatttcataaagaacacagcatatgggatatttttaaatctaacaattggcatcttgttagattaagcaataacgctatagattttataaacaacaattataataaacggataactaattttggagaaataaaagccatcgctcattgcttgcagcgttctaaaaatatttttggtataaacttcactacaaaatcatatggaagcattgggcttggttatgcaatcaagaggttctcttccatgacatattttctggactccatggaatatataaatagtttcaatataatgcaacatctaaggcatgcttcagaattttgctcaatcgtatttcataaagacaatagagatgaggcattttccatattcccaaatcaatcaccagtagatgtcacaaatgatatttcattagaagtaattatagagatatccaaaatagatggtatcatcagaaataaaaatgattacctctgcttagatgaatggtatttcaatggcaacgattattcatacagaaaatcgagaccaaaccaaccttaa

SEQ ID NO: 92674 - DNA, 408 bp, Enterobacter aerogenes
atggtaactaaagccaagaatcttgatgattttatgaatgagcaaagcattagtgcatcgtattatgttgtatctccaagtaacgtattatctgaggtttttgtatacccatatagtactaacataggacttatgagtgagctcaaaattagtatccctaaagacgctatttcagcagttactccattgggaataactacagaaattgacttaaaacattatcaagttgttacaataaaattcacgggtgataatgggattatctatgaaaacatttttgaagatttgattaacaatgccacacaaaaaaaacagattgatctcaaaaccaagaatgtatctctagggctacaagacgaatataaaccaatgcgcgattggtgcgggtggcattggccgactagataa

SEQ ID NO: 92675 - DNA, 231 bp, Enterobacter aerogenes
atgaaaaaatggctattcagactgctgctgtggttcccggccctgcctgtgtatgcagatctaccagagatggaagatccctctcgcggtcagggcgacggcatcatggaaacgttgcagaactacggctatgacattgtgatcctgatgacgctgggcatctgcgcagtgggctttgggtgtagtgagctggaggcggcgatgagggtggcaagtgccaatagaacataa

SEQ ID NO: 92676 - DNA, 234 bp, Enterobacter aerogenes
atgacccccgaacaaatcagcgccttccaggctgccagtctggtgaaacccgatgccgtcaacctggtgatgctcggcctgttcagcgcctttctgctgctgtgggtggtctgggtactgaatgacgcctaccggggcgtggcgaccgcgcgggtaagctggcgggcgctgggcagcatcggcgggcgcaccatcttactgctgctggtcagcttctggctggtactgagctag

SEQ ID NO: 92677 - DNA, 312 bp, Enterobacter aerogenes
atgcaagccatcacgacatttatcgccagcctgtttataaccagttccgctctcgccgcccccctctccgagcgcgaagagctaatcctgtccctcaaccaacttactcaaatcgaagcctcgctcagccgcgcccagcaaagcgccagaactggcctcaacgaacgctactacttcgattatccgcgtatccacagcgatatagccgccctgcgtagcgggattgaacattacctcacccccgctcgcgctcagccgcgagatacggcgacactagtcggacaataccgtgaggagaaaaccacgccatga

SEQ ID NO: 92678 - DNA, 597 bp, Enterobacter aerogenes
atgaagcaggttcttctctttatttttattgcggggccgatggctcttgttatctggaaaatacgagggattatcgcatttgttaatgaggtcaggaactctaaattaaatgagttgcagcgtcttctggatagccacgagctatcggatgaggttagtatctgcatcaaagaggatatcaagagaataactagctatcgcatgaccggaatttctgatgtcgctagtcaaaaaattattctgcgtctatttgtagaaaatagagattcaatatctgtcggtttcttcaagaaatttagaacgtttttgctgattaaagatggagttcttgtgttcaagaaaggattttctttctggttcgagaacggtatgtatgcttttttctcgcttcattttctgttgatcgctgccttatcactaatattatctatttacaggcatgaacaaatccctgtttggggacatttgattttatattcagttgctgtagttatgttcctgttctttattgcttttgggaaaatgatacctcggcctgaagaatgtaatttactgaataagatactacagacccaatataatgattcatctgaatga

SEQ ID NO: 92679 - DNA, 1488 bp, Enterobacter aerogenes
atgagcttacctgaggaaaaaatagctaaacgagcactgaaagccattgaatttatttgtcgacagctctcacgatttgcaaaaatgccccccgttgagcttatggcttacttacgaaagaatccaaaagatgccttttgtgatattccccatccaaaaggaaatggacatatccattgtggttttcttgcctggaacaagctgaatgagcttgcagatctcactatcgaattggatcacggtcttgggcgacgagtaggccgcagactcgcaaaggaagccgtaataaatgcttttgttaaaagagtattacaggaggcacgtggagttgatcaggaaaccgcaatgctgcttcttaaagacgctttaacgattttgagagaaaagcttgtagttatcgaacactacctaccgtgtgtgcttttccctggggatacacctactgaattcagcgttggccctgtcacattcatccgtcgctccaagttcttcgatgataaaaaatcagtactaaaacatagtattcatgttaacacgaaggcgcatattgagtgcgtagaggcagcgattgctcaaggtttcccacaagaacgcacgcacactaaagatgaatcaagacaactagtacgagaattacaatcccgagcagtcaaaacctacaaagactatccatggattgcttgtgtgaaagtgagtgattgtgatgaagcaatctctaaagaacgagcgatccaagctacagagatggcgcttcacatcatccgtatcctcttgggagctaaaccgacacggaaaattaggctagcatggtcacgaagcggagctctgcgctcggcacatttgcacgctgatgtacatggtgtgattcacgcaagtctctgcgctgattctttagaaccggttggtgtaataaactggcatgaagcattgataagggcagatttagaattagagatcctcggttctgctttgatacccatagtcaatccagtagaaactactcaccttcaccagcgccttattgacgctatcaattggtttggggacgcggttacagatccaaatgcacattcgagtatagtgaaatacgtttctgcaattgagcggttgttcttcggtaaattcgaagcagggcgtacaaaattgtttgctggtcgggttagggatgtgttgaaagcattcagttgtgatgaagggcatcgtgtttattctcaagctctagaactatacaaaactcgttcgactttggtacatggagaacaatttcgcactgaagatgaatcctttaacattattaatcttgcatcagagttaagtaggatgtgccttctatgctctgcacagctttactccatgatgctacaagcattcgaaaatcctgatagtgcaaaattagaagaaatcatgaagcgcatcaatgatgaagggttgaattggctggcagaggctgcagcattaggcagtgcaaaaaactccccactcagctaa

SEQ ID NO: 92680 - DNA, 129 bp, Enterobacter aerogenes
atgaatatccactccactgaaaataatttgagtaacttattagataaaaacgaacaggtattatatctttttaggagtaaaattgtgttgattttactacaaaaacatatgcttttgaccagtgtgtaa

SEQ ID NO: 92681 - DNA, 684 bp, Enterobacter aerogenes
atgcccgaccatgcgccaccaggcaccgtgcgtcgccccggactgctcggctggatagcattacttcccggcgtgctggctggcttttgcctcggcgcatggatgctggcgatagcgctggagtggttgggtgaggcgtttttctggcagaacacctgcgccagccacagtgaacaggtattgcaggcgacatggcactggtggcagggttccgctggcgcaccagtgtggttagtagaagacctcgtgagtgtcagcgatacgttgcagaaagggagcgcggcgttaattacctcgctcaacggtaaaagcggattgttctggacagaggctgtcgccaaggtgatccgctgcacattactgtctgcgggtaatgttaccctcacctttcttctgcggctggcgattctgttgcaggtgctgccgctgtttgcgctgattatcgtcgtcgggctgattgacggtctggtaagacgtgacttacggcgatttggcgcaggccatgagtccgggtttgtttatcatcacgccaggcgtatgatcggctctagcctggcgggaacgggattggtgtggttgacggtgccagtttttctggaaccaagatatattgtaatacctggggtgatgctgattggtttagcgggttcagtagcgacgggagcattcaaaaagcatttgtaa

SEQ ID NO: 92682 - DNA, 267 bp, Enterobacter aerogenes
atgataccccggacacgccgccagctcgtgagcgttgaagtgatgtggcctgcgcaaacgctgcctcttcccctgcaacaggcggtggaagcactgacacagggagaaacgcccgaccagattattgcctggatgaatttacagggctttcaggcatggcgcgaacctgcatcaccgcagggcgaacacgacatttttcagatacgactggatgaggcgcacgaggctcgattcctctgccgctacgtcacgctgccgctgcactga

SEQ ID NO: 92683 - DNA, 2034 bp, Enterobacter aerogenes
gtgaggctcgatttcatcctgcgcccggcggtggagctttacagcgccagcgcggccctgctggcggcagtatggtgcgtgatggctccgcaaacgctgctgctgacgccttattccggctggctgctggcgctggccttgctggcgctgtctgccctgcggctaaagcagggattacgcatcctgcgctttcgccgtcgcgtgcgtcatctgccgctctggacactctccgccagccgcatcccactactacccaacgccctgtttctcgggcgcggctttcgctggctgcccacgcatacccagcggctgtatctgtgtcgcctgccacagtgtgagcactggctgcggacggatcgcccttccgccagcggcggcgatccgttgttgcatggcgtggagctgcgcgaaggccgcgtcaccttaccactacgcgaccgaccggggcatacactggtgctcggcaccacccgcgtcggtaaaacccggctggcggagctgctgattgcccaggatattcgccgtggcgacatagtgattgtttttgatcccaagggtgacgccgacctgctgcggcgtgtctgggcggaggcgcaccgcgccgggcgggaaagcgtcttctggctgttccatctcggctggccggaaatatccgcccgctacaacgccgtcggacgctttggccgtatctcggaagtcgccagccgtattgccgggcagctttccaccgagggcaattctgccgccttccgcgagttcgcgtggcgcttcgtcaacatcatcacccgcgccctggtggcgctgggccagcgccctgactatgcccgtatcgcccgtcacgttatcaacatcgacgagctgtttatcgactacgcccgcgtctttctgcccggccacgaccgacaggcatgggacaacgtggtacggattgcaggtggcatcactgagaaaaacacaccgcgtaatctccagggacgggacagctacgttgtcgcgctggagcagtacctttccaccacccgactgcatgaccctatcctcgacggcctgcgttccgctgtacgctacgacaaaacctatttcgacaagatcgtcgcctcgctgctgccgctactggaaaaactgactaccgggaaaatcgcgcaactgctggccccggactacggcgacctcaacgacccgcgtccggtgttcgactggcagcaggccattcgccagcgggcgattgtctatgtcgggctggatgcgctatctgacgccgagattgccgccgccgtcggcaactcgatgtttgccgatctggtcagcgtcgccgggcatatctacaagcacggcgtgatggatggcctgccgcagacggaagaaaaagcggccatcaacctgcactgcgatgagttcagcgaactgatgggtgatgaatttattccgcttattaacaaaggcggtggcgcgggcgtgcaggtcacggcttacacccagacgctctccgatatcgaagcccgcatcggcgatcgcgccaaagcgggccaggtggtcggcaacttcaacagcctgatcatgatgcgggtacgggaaaccgccactgccgaactgctgaccagacaactgccgcaggtggatgtgctcagcaacagcgtcagttccggcgtcaccgacagccccgacgctcagggcaatatcgggttttccagcaacacccaggatcgggtgagcagcgtacaggtgccgctactggagcccgcctcgctggtccagctccccaaaggtcaggcgttcgctctgctggaaggcggccagctctggaaattacgtattccgttaccggacgcagcacacgatccgctgatgccagaaaacatcgcgcaaatctcccgttatatggaaaaacagtacgacagtgcgcccgtatggtggaaccgcccggagacagttgtgacggcgaaaaatgaccctattttatggctgaacgacagcgaaaccacggagaaacagaccgatgataccccggacacgccgccagctcgtgagcgttga

SEQ ID NO: 92684 - DNA, 408 bp, Enterobacter aerogenes
atgaaacaccttattccagccatgctactggtcgctactgccgctattgccagacctgccgttcccatgcaggcgctggatgaggcccggttactgccagtcatcacccacaatctgcatcccggtcagcaaccccgtctggcgctgagcctaccgggaatgacgccgctgtttttaatcggcgacgatccgctgtctacagaatggctgcgccagcaccgggacgcattaaaaaccctgcactccaccgggctggtcgtgaacatcgccacgctggcgcggttgaatgtcctgcgggccatcgctccagcgctaacgctactgcccgtcagcgccgacgatatggcaaaacatctgcccatcaccgcgtatccggtgctgatcaccgacaaggggctggaacagtga

SEQ ID NO: 92685 - DNA, 534 bp, Enterobacter aerogenes
atggcgtcccgtctctgcgccctgacagtcggcctgcttatcagcgcccacgcctgtgcagtaccaccgctgtatgcgcaaatcgcccgtcagcagcaggttccggcagagctactctacgcggtggcccgcgctgaaagcggcacccgactggcgcaggggctacacccgtggccgtggacgctgaatattgccggaaccggctaccgctaccccagccgttcttcagcctgccgggcactgctcgccttcgctcgtactcgcagcctgaaacgcatcgatgccggactgggacagattaatctcggctggaacgggcaatggttcccctcgctgtgcgccagttttgatccggcggacaatctcaccgtcaccgccctgctgctgcgtcagcactacaatacctcccccggaagctggctggacgccgccgcccgctaccaccaccccgccggaggcaaacctgccgccgtctaccgccagaaaatcgaccagcaaatccggctgctctccgcatcagggaaatcgccatga

SEQ ID NO: 92686 - DNA, 651 bp, Enterobacter aerogenes
atgcgcagatatctaccactgtgccttttgctactgccgctgtttgccagcccgcagcaaacccgtattgaagaacaggccatcactcacacgcaggcacagcagtgggggctgaccgacagtgaatggcagcgctaccagcaactgcatcagggcgagcgcggcatctggtcgccgggactcgatcccctcaccacccttggtgttgaagccaacaacgacgccgaacgccagcgcttcgccgagctgctggctcgtaaagagcatcagcgggtggagaaagagctggcgttccagcgtgcctacgaccaggcgtggaagcggctttacccgacgctgacgcccatccgcagtgtcgtccagccacgtctggcgctgttcgtcagtgaaaaatgcccggcctgcgagacgctggcgcagaaacttatcaacgacgaccgtccgctggatatctggctggtcaacagccgtaacgacgatgccagcctgcaacgctgggcgcagcgccagcatattgatatgcgcaaggtcgaacgcggacagataacgcttaatcacgataacgggcgctggcaacgcctcggcggcggaaagctgccgctattgctggaacaacagggggagcaatggcgtcccgtctctgcgccctga

SEQ ID NO: 92687 - DNA, 609 bp, Enterobacter aerogenes
atgcttaaacgtctggcctacctgactaccggcgctgctctcctgctgctggcggcggcggtgttctggtgtttcaactgcctgaacaccctgacgctgacgcagcaacagacacaacgccagataacacagtggcgcgaccagccgcagccggacagcgattatcacgagctgaaggttgccgtaaaaaacatcgccgatcgcacggaagcccttgccagacagcttaacgatgccgccagcgtgcaggccgaacgacttcaccccataaccgaacagctcagagtactggagggacaaatccagaccctgagcgccagttatcaacacctgcaacaacagaccgccacgtgcagccgcgcaaaggcaaaacgccccgtcccctctccgctttgggccgcaaaggcccctttttctcttatcagcagcgagtttcgcgccgggcggcagttcgccgtcatcgcgccatccggctatcgctcgctctcacagcttcagcttgttgcccccggcgacagcgtgcagggctggcaactgctgcaactggacggcagtcacgcctctttccgtaaaggcggtcagcggctgacgctgaacaccggaggataa

SEQ ID NO: 92688 - DNA, 465 bp, Enterobacter aerogenes
atggcgcgaacaacgggatgggttatcacactgctgatgctgggcggctgcaccgcgccgcaacagcccgttgcgcctgcaccaaaacccgcaacaccacccgcacctgaagtcgtacgctatgaccgttacctgctgatcaacacccaccccgacgaggctcagcgcaacccgctgcaccaaatcgtcaacatcaatctgccgctgaacctgaagctcaccgttggcgacgccttcacctggctgctgaaacagagcggctacagcctgtgcgtcgatgaccatcccacgcagtttctggcaggcaaaccgctgccgctttcgcaataccggctcggcccgatgcggctggaagatgcgctaaaaacgctggccgggccgggttggctgatgcagaccgatgtactgaaccgcgaagtctgttttcacctgaacacgccgggaacgggagaccatcatgcttaa

SEQ ID NO: 92689 - DNA, 417 bp, Enterobacter aerogenes
atgagcgagaaaacttacttcaatctgtacaccagcggtctgggttacgttaaccgtgtccgcaccgtcaccccaaaacgcggcgagccctttttatgctgtgatattgccgcattaagcggggctgccgatgacgtggactatgtccgctttgactgcaaagtcaccggcagcgaagcgcgtaagctgattgcccgctgcgagcaggcggtcaatgaaaagcgcaaggtgctgatccacttccgcctgggcgacttatacgtcgatatgttcacctacagcaaaggtgagcgtaaaggcgaaacgggcgtcagcctgaaagcccggctgctctatattggccttgtcaaaattgacggtgaagtcgtctggcaggccggaaatcaggaaacagaggcagaagatgatgccgcctga

SEQ ID NO: 92690 - DNA, 495 bp, Enterobacter aerogenes
atgatgaataactccataaccagctatcagtcgctggctgatgaagactataaaatgctggcttacgtctcctcgctaaaaggccttttaaagccttttaagagtaagggggagttggagctgctggagagcaatgcacgaagcgtgcgcgagatgatggagccattgatgcaacgtctaatccagagcgccagacgctaccccgtgcgccagcttccgctgatattcaccatcggcccagccccttccggcgcgaacttcctgcgctggcgcaatcagcagaacaacaaatccggcactccggcattctgcaacctgattggcaatcccaaaatcccgcaacgtgccagagatgccctgctggaaatcgagcgggatcgcattgtgttcaatatgcagatgtcggtactgaccttcattatccgccaggcacgggagtgtcaggaaaaaatggaacaggcagaaatgctgtatcaggggcaacaaaatagctga

SEQ ID NO: 92691 - DNA, 699 bp, Enterobacter aerogenes
atgtcggactacaccttcaacatgggtcccctgcgtagtgcgatccatattcagcttcacactcacaacgccacccggctgtggaccgggcgacgggcaactgagagtggccctgcgccaatcatcggaatgccgcgctttatcgaaatccttaatcagatgcgcattgccgcagaacataacgatccttacgccgatctgtggatgctgcgcatggaagagaaactggtacagtcgcgtaaattgatgcaagtgatgctggatcaggcaaaagccatgttcagcgaattgccggaaggcatcgatatcgaaaactgcttcaacgtgcagcccgcccgctttccgctgtttatcaacgctccactggcctatcagggcgtttatctgctgaccgacttcgaccagctcgcacgccagcttctgctggcctcgcatatcgccgtcatctcccgcagggaaatgcacaaccggttaaataatggcgcaacggttattcgcagcgccttcggtctggcgcagaaatatcacggctccgggctgacccgtcaggattttatcgacgatacaccgcaggccagagccgccgtggaacgtttaggcccgttgccggaagcgatactgagcggcaagctgcgctcatcgttttcatcaccgctgcctggcaagaccgacaatcccggagctgccgatgatgaataa

SEQ ID NO: 92692 - DNA, 1038 bp, Enterobacter aerogenes
atgcgaaaaaatcccactaatgctttcagagaaagttatctggaggcacagaaatacaagaaagaaaagaaccggaagttaggggtgaaggtttttcatgctttattaaaatcatttgtattttttgctatggtgatatatttaactcaatcattagtgaaaataggcacacctattgtcttgacagaatttcttagcgaaaataaaacgccatttattattttaccgataattttagtattctttgccggagtgattggtgtcatttcatcgagaaaaattaaggcgatagactatgagcctgatagccatagttcattaaaaattcgtatttccgcgttgcaaaaggcaattgatgcatgcagggagcaacagggcagattacatgaagatgtgacaaattatcttgatggcgatagtagaaatgaattatatgagactatatatagttcattgaagaatgaagcgtctggaagtttgctttgtgagttagaggagaaagttaaatctaatactactttaattgatgttaaggattattttcttgatatgcaaaccagactcaatcaaagagctagttcattaaatacggtgtcatttataaacttatttattggtataagtatagctacaatagggatatctatattattatattttgtatttaatactgattatgtaaatactgacaaaacagtactcttaattgaaatgatgtcaaagcttggtgtgagttttgggatcgagttgctgtcttttttctttctgaatctatatagaaagaatcttcaagaaatcaaatatatacaaaatgaattaacaaacattgaagcaaagaaaatatctttgacaatggcacatgatttgcctactgatttgaagtttaaaataataaaatctatttctatgaccgaaagaaactttattctagaaaaaggtcaaacaacttctgatttagaaacattgaagtacgaaaaaatggatattgcagctttacttaaagcatcgccagagttgattaaggctttgaaacactag

SEQ ID NO: 92693 - DNA, 594 bp, Enterobacter aerogenes
atgtcattgctagagtcatttgggaaagcattaattatattgcttgaagcatttttagggaaacgcaaaggtcaggaggaagcacataataaattcttaaatgaatatacaaaagaaaactgcaaccatcgtttggttgaatattggttttgtcagttcacaggatggcgttacgcaaagtaccgggatatttgttttataatgacctcatccgacccatcaaaaatattgtatatggctaaaggtattaattacattgcccgtacagtagagtttattgatagcggagaatgtaaactatctgatagatataaagagaagaaaaagcatacattcctctttttattcatatcattcctgatcattttcttcatattaattgtctggatgatatcctctgtaatgtctctgataacgcattatcatgatgtcacattaatggctataaatatttcatcgataatagcaggtgcgatttttatcatgtgctttgcattctttattcatgcaataacaatggagttttttgcctttgaaaaggcggagcattttgtaaaatcttacaatgcagaaagaacaccatcaggtcattaa

SEQ ID NO: 92694 - DNA, 2313 bp, Enterobacter aerogenes
atgaaaatcgcgccttacctgataacactgacgctaccgtttatctcgttatctgccaaagctgattaccacactcaaattaacgccggaaataccgtttctggcgatattgttgatggctcaaagggtaatcagcatgtctatggcacgctgactaactccaccatcactggtccctatgcctatagctacgttggcgatggtgggcaaaccaatcacatcacggttaccgatcacggtgaactgtttctggaatcgggcggcagcgcttatgacacacagataaccgacgatggtgatctacaggtgaacgggtatgctgaaaacacctatgtggatagtggcggacaggtttacgttaacgccggaaataatggcattgaagatccagaacaaggcggacagattgtgaataccacggttggtgcaggtggccaggtcgttaatcgctacggcattgacacaaatacggtcgttgaagctggcggcgaactggataccggctggaattacccttatgaaattcgcaacaccgctatttcccggaatgccgttatacaaaacggcggcattcagcaggtcagcaacggcgggacaagcgaaggcagcaaggtcaatgatggcggcacattaatcgtcaccggcacatggcactacaatgttgtcaccgacagccagccttcggcctggtatagcggcaccgcagatgacagcgctgtttatggcacgatgcaaaatcagggcggactcgatgaaaacactacggtgcagtccggtgggcaatacacgctaagcggctatggtctctcccaccagctcaccgtagcacagggcggcagcgcccaaatcaataatggtgttctggatagcttctggctttatgggatgatgaacgtcagcagccaggctacgctaacaggtactggcactgtgggtagtagtggcgaactggtactcaacgaaggcgcaaaaacatccggcctgaccttagcgctggatggcgtactatccctgcaaaacagcagtgatgctggtccgcataattatcagattgcaggtctggagatggatggcggtacagtgctgtttgacccagcctctttcgccacactgaatatgaaaacgctctctggcaacggcaatttctggatgaataccgatatagccacgcaacagggcgatatgattaacgtctctggggaagccaacggcgattttgggatctggataaatgatactggcgacccccccgcagatccgcagtcgctacaggttgtacaaaccggtggtggcgacgcgcagtttacgctgttgaacccaaaccagcaggtagacatcggcacctgggaatatggcctgacacccgacggtcagggcaactggtcactgacgccgcaggcaactcccacgccatcaactgaagccgttctggcgatggcaaacgtcactcccactatttttcaggccgaagccagtgcgttgcaaacccgcctggacgttactcgttcccgtccgcatcagggagagctatggatgcaggcgctgagtaatcgctttgatgttaaccgcacaggcaatgcagcttatcgccagcggctcggtgggctgatgatgggctatgacagaagtcttcctcgccagactggcctgcttacactaggtattgcaggcggttacagccgttccgatcttgatctcatcaacgacagcgatggttcagtagacagctacagtgccgcgttatacgccagctattatgatcaaagtcgtttctggctggacgggatgctgaaaggcaacctgtttaaccagcaccttaatgtccgcatgagttccggcggctatgccgacggcagttacaccatccccggcttgggtagcagcctggttgccgggtatgacgccagattcgccaataccaaactttctccctttgtcggtttcacaggcttcatttcacaaagtgataattactggctatcgaacggtatgcaggcacatcccggcacggctaaatctgcgctggggcaagttgggttccgtctgcgtcagaatataacgactcatcatggaatgcagttcattccgtggctgaaagtcgcgctggagcaggagtttgtgcataacaacctggtcagggttaatgacgataacttcaataacgatatcgccggaacacgaggaagctaccaagctggcatcagcgccgctcttacgcagcacacgcatatttacgccagcataaattatgagaaaggtgacgggatggaatcgccgtggactggaaacattggctttaattatagtttctaa

SEQ ID NO: 92695 - DNA, 1515 bp, Enterobacter aerogenes
atgcccgactggaagcgaatccagccagtgccagtatggagcgactattcagggtatttaccgtgctgggtgttgaaatggtactctcttctggaccacagatactttcctcgatgtcatcttcaacaatggatgaatcagaacaacaaaaagattcacctgccagaagggaaaaatggtgacgatatgcgtcgaacacagcagcgtttagcaatatggatgaatggaatccgggtcggattctgggagaaggccagaggcgaggattcattacaatatcttccagaatgggtagttgatgaacagggaagacctttatcgctttctttgcctttcactcccggtaatcagctttggcgcggtaacgttgttcgtgactattttgataatttattgcctgacagcgaaggtatacgcaggcgtttagccgtacgttaccagtctgaaagccttgagccttttgatctattggctgagctgggaagagactgcgttggcgcaatacagttactggatgttgatgaagagcccacggatttattttccgtaaattatcgcccactttctgaagctgatatagccactacattgcgtaatactacggcggcatcgttgcctggtcggcaggacgaaactgacgatttgcgtttatcaattgccggtgcgcaggaaaaaacggctttattgtggcatgaagaacaatggtgtttaccagaaggtaataccccaacaacgcatatcttcaagctaccgcttgggttggttgggaacatgcaagcggatatgagtacatcggttgaaaatgaatggctgtgttctttgcttcttgagcactacgggatccctgtagcaaaaacgcagattgcgcagtttgaagatcaaaaggcattagtggttgagcgtttcgacagaagatggtcaggcgatcggcaatggatcattcgtttgccccaagaggatatgtgtcaggctttaggtgtttctccgttacgaaaataccagtctgatggtgggccgggtatttccgatattatggacatattgagtcattcagatcaggctgagcaggacaaagagcagttcttcagggcgcaaattattttctggttgttggctgctactgacggccatgccaaaaatttcagtatcgctattgagccacaaagtcattaccaccttacgcctctttacgatgttttatcagcatggccggtaattggtcatggtaataatcagatttcctggcagagatgcaaactggcaatggctgttcgcggtagcagtaattattaccacatttatagaattcaacggcggcattggatcaatcatggtgaattaaccggattgggaaggcgacaagttgagtccatgatggatgacattatatccagcacgccagaagtcattgagcgtgtatctatgttgcttccagagtcgtttccacctgagcttgctgagtgtatttttgaaggtatgcggcagcagtgtaggcgtttggctggaagggaataa

SEQ ID NO: 92696 - DNA, 672 bp, Enterobacter aerogenes
atggctttcgaatggaaagaaattatcacacctgttgcgacgctgactgccgtttggctaggggctagatttacactgcgtaatgaattgcgaaaaaaaacgctggaaattcagtctgaaaaactagaactgctcttcactgaatgctccaacgttttgaaggatattaaccgtgtgtcgttggctgtgttacatacccttgatgattttatacctactactgaatcggaagggagtgttcctgaacaggaaattcaggatgctctaagagcatatagggagaaaggcgttgttattgattttgatgccattactgcttgccagcataagcttgaatttcatcggcctaaagagtaccaggcatggattgtagcgctcataccattgcttgggactctgacgaaaatgacaccttataacaatatgaatcctatcgccgaagctgataaccgaaaatggagtcaccaggagttaacattgtaccgtcaggagttagacgagaaacggaacgcactgccaatactaagaaagcgtttaactagtgctatggcttctgactatcgtcaactcgggctcagcagtgagccagcaaatttttgggtatacgtggagcgctggaaaagagtcgtgaatgccttctttcacaagccgcctacgtcacctttaacataa

SEQ ID NO: 92697 - DNA, 1134 bp, Enterobacter aerogenes
atgacaccgtatatccaggcgctgatcgctatgaccggcgacaaactccagcagcggatgcagaaggatccgacatctgcttccgatagcctgctgtttatgggcaatcagcatgacacggttccgcgtcgcctgttgcaggatccgttgctatcgcccaaagataaattcgcctggcaggtgatccgaatgcaggcgcaggacaacggcggcgcagtattcccctcctacagtgaattacaggtgcagctctcgaaccgcccgcaggatgaaaaagcctcgcgcagcaccgtcagccgggcattgctgatgctacgcctgacgcgctggctcagcctgtgccataaagcgcgggatcgggtatccgggcgcatcctcgggaatatctatgccctgcacgatgaaccgctcaccgtgctagatgctgtgcgttttgatgccagctatcttcatttgctggagcagtgctcacggcatgaaaacaaagccattcgcgccactgcacaaggcatcctgtacgacattcgccaggacaccagtctgcgctatttatcatcgcgtatagaactgctggaagaacgcgcccgctggcagcagcgccagtcccctgaggagactaagccagaaacgtccggtctcaatacggtaccaggcaaaatttcacctggtaccgaaacgagactaagcctgaaaccggggcctgacggcgtagtctcaaatcaggaccaggctcctgtacgtactgtacctacagatctttgtaatagtactaccgcgcgcgcgaacgactcgccgccgtactggccgccggaaattccgttaacacaccctgaaaaacagctggtcttgcaggctatgcagaacctgtcctccccgctgcgccagaacgtgcttgacgacgcagcccaacgcgttgcccgtggcggcatacaaaacccgctcgcctatctgctggcgacactacgcaaggctcagggcggtgagtttaatcagtatcgacgcggcaaagcgacggtgccggagtttgtgcggcctgtggtttcagagccggaaataccggttgagccgcgtaaaaaacgggatatcagtaagttggttgcggagattcgggcgcagtgtttggggagtggctaa

SEQ ID NO: 92698 - DNA, 540 bp, Enterobacter aerogenes
atgctgccgacgattaatcaggccgttttgtcacaggtgatacaagccctgaaggacggcaatgtgcgctattgcgaagcgctgggctttgaccgcgaggagctgaacgaactgaacgccctgacctttgaagagctaatgcacatgggcaacacctcggcgcagttcctgaaaatcaccatcaaccatgacgtgctgcgcaaaatgctggttcaggtgcgtcaggagcagaaattccagcaactggtcggccaggcggtgcagcttggcggctcaatcgcgttaatcagccactactttggtatctcgaccgctgaaatcagcgcccgccgtcggctgatggggatccacgttcgtcaggggcgcaaccaggttcccggcgaagaagaggaagccgcgctctggaatcgctggcaggagatcaaagtggataacatcgactctataccggcactggaagccatgatgctgctggcgcaggaacgttcgctctcgctgacagtggtctggaatctgatccgacagtgggaaaaaagctga

SEQ ID NO: 92699 - DNA, 1485 bp, Enterobacter aerogenes
atgaacaacaagctgacttcgacggaacttcagtcccgcctgctacagggcaattttgatcggggaagatcgctcgatgaacggttcgccgatccgctgacggaaacctcgatgatcgtcacgctggagcagcttcgcccttacgatctcaatccgcgactgatgcgtaaccccagctatgacgacatcaaggaatcgatccgtcgtcgcgggctggacacgccaccgccgatcacccgtcgtcccgatcaggagtggttcatcatcgccaacggcggcaatacccgcctgtcgatcctcaatgaactgtggcgcgaaacgcatgacgagcggttctggcgcattcagtgtctgtacaagccgtgggccggtacatccgatcaacccatgctgggcgaactacgctgcctgatcggccatctggcggaaaacgatatgcacggcaaactcagcttcatcgagcgggcgctggggatcaacaaggcgcgggagctgtaccagcaggtggaagagtgtcagctttcacaacgggagctggcggagcatctgaagagcgacggctatccgatcaaccagtcacacatcagccgaatggaacaggcgctggagtacctgctaccctgcatccccgaggtgctgtacgcggggatgggccgttcgcaggtggaaaaactgctgtcattgcgggcggcatcattacacctctggcagcgtcatgccgccgaagacgtcggttcatttgacgatctcttttcctccgcactgtcgctgttcaacgaccagcctgaagactttgccatcgagcgggtacaggatgagctgctggggctgatgagtcaggagctgaacgtcgattacaacctgctgttgctggacgtcgatccctctgagcaaaaacgtcaggccgtgctcggccctacacctgaaccaccgccctatattccaccggaaaaacccgagccacgcccgatagcgcgcagacgtaaacctgaaacagaggaagacaaagttggcgcgcccgctcctctgcctgaaccagaagaagcgccatcgctattgtgtgaagggaccgaacccgttacggatatctggcgcatcccacaactgtgggataccacggaatccttgcgatcggtcagcgatcgcctggcgtgggatctggctgaacattacgccatcgacgaccggataatttcagataccgatgtaaatggcattggcttccaggtgatgccatttgcatcaggtcaccccatgtttacccggccacagtcacgcgcctgctgggcgctgctggcggcactcaacgagatcccgctaacggaagatctggcctctgcactgacgcctacgctcttttttcaacacgatgcagacggcttcttcttcagcgatgaatttcttattaaagcattccgactgatccgtattgtccgccggatcaaagagtttcagcaggaggcacaacatgctgccgacgattaa

SEQ ID NO: 92700 - DNA, 1356 bp, Enterobacter aerogenes
atgagtaagcgcaagcggccacaaccgccccactccgtcgaagcggaacaatcggtgctcggcgggctgatgctggataacgatcgctgggatgacgttgccacacagatttccgcgcaggatttctttatctccgcgcaccggacgatttattcccatatgcaaaccctggtcgaacagggaaatcccatcgacctgatcacgctgagcgaatcgctggaacagcaggagcagctcgaacaggtgggcggcttcgcctacctggcagagctttccaaaaacacgcccagtgccgccaatatcattccctacgcgcaatacattgccagctacggcgagctgcgccagcttctgttactgggcaatgaactgagcgatatggcaggccagccgcgcagcaatgtggccgatgtactgaactttgccgaacaaaagctgtttgccattgcgcagtcgtatcaggagggcggcctgaccgacatcaacgcctgctttgacaacgtgctggcaggcatcgctcagcgctacgaggctgaacgtggcagcctcagcggcacaccttccgggctggaacagctcgataccctgacctgtggtttccagcctgccgacctgattatcgccgctgctcgtccctcagttggcaaaaccgctttcgccctgacgctatgcgtgaacgcgctaatgctgcgccctgctcagccagtgcaaatctacagcatggaaatgtcggcggaacagctactgctccggctggtttctctgattggccgcgtctcacaaacccggctacgcagtggcgatctcagtgataacgactggcagcagattggcatcagcgccaacgttctgatgacagaatggaaagatcgcctgctgctcgacgattccgggatcctcaccccatccctgttacgcagccgggccaggcgatcgcttcgccagcatggaattccctcgctgatcgtagttgattacctgcaactgatgcgttgcggtggtgcggaaaatcgcaatcaggagatctcgacgatctcccgctcactaaaagcgctggcgaaggagcttaactgcccggtgctggcgctgtcacagcttaatcgggcgctggagtcgcgccttaacaagcgcccctgcaatgccgatctgcgcgattccggctctatcgagcaggatgccgacgtgatcttattcctctaccgcgacgagctgtacgatcccaacacgctggatcgaggcatcgccgaagtgattgtcagtaaacagcgcaacggcccgataggcacagtgcgaacccgatttattagcgatcaaacccgcttcgaatcgctcagccagcagggagtggagtcatga

SEQ ID NO: 92701 - DNA, 375 bp, Enterobacter aerogenes; identical to SEQ ID NO: 77150

SEQ ID NO: 92702 - DNA, 885 bp, Enterobacter aerogenes
atgaaaaacgcagatgcaattgatttaccaacactaattgccgccattctttccaccaaaggtggcgtggcgaaaactaccgatacggctaacctcggcggctacctggccgatcaggggttgaaagtcctgatgattgatgccgatatccgccagccgacgctcagcagctattaccctcttgataacgaagctccaggcggtatctacgagcttatcgcgcagaacgaactggatccagccatcatcatctcacacacttccattcctggactggatatcatcatttccaacgatccgcgcggcgaactgatgagcctgcttcaggctgcgcccgacggcgtaatccgcctgcgccatctggtacgccagataaccggctatgacgtcattctgatcgacaccattggcgcacgcaccatcgcactggaaatggtgctgttagccagcgatctcattatctccccggtattaccggaaatgctctccgcacgcgagttcctgcgcggcacgctacaaatgtaccgggatctccagccctttacccgctacggcatccctctgccgccgctaaaggcggtgatcaacaagctcgaccacaccaacgacgcccgcgaaattcatcacaacctgcttcaggttctccagcacaaacaaaaggagcaggagctgctggtgcccaccgagatcctgatgacgccagtttacgccagcgtggcctatcgccgggcggcatcgctgggtatgccggtgcatcggctggatgctgccagaccgaaaggccgcacaacaccttgcgccgccgaaaccatgcagatgctggcaaaagaactgttcccgcagtttctcgccctgccccatcaacagatggagggcatcgcatga

SEQ ID NO: 92703 - DNA, 831 bp, Enterobacter aerogenes
atgttcctgtttagtgcccggaaatatttagaagaacttgggaaattccgtcctgatatcttaaatgcttgcattgatgcgttttcagtagttgaaaaagatgttatgcaagattttatcagaatcgatgctgagagatttacagtttgtccagatgaatccattgattatgcagttatggagaaaacagacgaggctgtggtaattcctctggacgctggttggaatgatgtcggttcatggtcagcactctgggatgttaatattaaaaacattgataacaatgccttgattggcgatgtttttacgcataacactagtaattgttatattaatactgatgaaaaacttgttgctgcaattggcgttgataatctggtcattgtcaatacaaaagacgccaccttggttattaacaaagataaggtgcaggatgtaaaaaaagtagtcgaatttttaaaaaaggatgaccgtcgcgagtatagaatacatcgtgaatcataccgaccatggggtgtgcaggataaagtcgttgatactcctcgttaccatgttaataaagtgactgttaaaccgggcggaaaattttcattacaaaagcatattcatcgtgctgaacactgggtggtattgtcaggtactgctgaagttactcttgatgaacaaacatatttattaactgaaaaccaatcaacttttattccggttggtaaaactcatatgcttcataatccaggtaagattccgcttgtcatacttgaaatagtctcaggggcatacttaggcgatgacgatattatccgcttgaaagatcattatggccatttttga

SEQ ID NO: 92704 - DNA, 1377 bp, Enterobacter aerogenes
gtgacgaacaaattatcttgttttaaagcctatgatattcgtgggaaacttggctcagaattaaatgaagacattgcttaccgtatcgggcgagcatttggcgagtatttaaagcccaaggaagtggtcctggggggggatgtccgacttaccagtgaaagtttaaaacttgcactggcacaggggttgcaggatgctagtgttgatgtcatcgacattggtcttgctgggactgaggagatatatttcgctaccagttatttagaagttgacggtggtattgaagttactgcgagccataatcctcttgattataatgggatgaaactggtcagggagtcttcgaaaccaattagcggtgatacaggccttcgacatatccaaatacttgcggaagaaaattcttttaaacctgtattatctgattgccgtgggagttataagaagatatcgattcaagaggcgtatatagataaaatactatcttatatagatttttcgaatttttcaagaccgctcaaattggtattcaattctgggaatggcgcagctggtcatgtaattgacgcgatcgaagaaagattcaaaaataataatttgcctattgatgttatcaaaatacatcaccatcccgatggtaatttccctaatggcattccgaatcctctattacctgaatgtaggcaggatacaattgatgcagtaattgcacatcaagccgatatgggtatagcttttgacggggatttcgataggtgtttcttgtttgacgaaaaaggcaactttatcgaaggatactatattgttggcttattagctcaagcgtttttggaaaaaaaaccaggttcaaaaataattcatgatcctcgtcttagttggaatactattgatttagtttcacaatctggtggtgttcccgttatgtcgaaaactggccatgcgtttatcaaagaacgcatgcgtctcgaagatgctatttatggtggtgaaatgagtgctcaccattattttcgtgatttcttctactgtgacagtggaatgattccttggttattagttgcagaattgctgtgtaacaaaaacaaaagtttaagccaactagtcagtgatagaatgatagcgtatccagcatcaggagaaattaatagttcaattgaaaatcctgcaatggctattgagagagtgctagaacattataagcttgatgctatgaatatagataatactgatggcattagcatcgagtatcctgattggcgtttcaatctccgtagttcaaatactgaaccagtcgtacgtttgaatgtcgaatcaagaggggacagggatttgatggttcaaaagaccaatgaaattctgactatattaagagcttaa

SEQ ID NO: 92705 - DNA, 1257 bp, Enterobacter aerogenes
atgtcccttaccgacgcgaaaatccgcactctcaagccttctgataaaccctttaaagtctccgattcccacggtctgtatctgctggtcaagccgggtggctcacgtcactggtatctcaagtaccgtattaacggtaaagaatcgcgcattgcgctgggtgcctatcctgccgtctccctctctgatgcgcgacagcagcgtgaaggtgtccgtaaaatgctggcgctgaatatcaacccggtacagcagcgggctgctgaacgtggctcacgaacaccggagaaagtttttaaaaacgtggcgctggcgtggcataaaagtaaccgaaaatggtcgcagaacaccgctgaccgtctgcttgccagcatgaacaatcacatctttccggtcattggcaacctgcctgtatcagaacttaaaccccgtcatttcattgacctgctgaaaaggatcgaggaaaaaggtctgctggaagttgcgtcccgcacgcggcagcacctgagtaacataatgcgccatgcggttcatcaggggttaatcgatacgaacccggcagcaaatcttggcggcgtgaccacacctcctgtcagacggcactatcctgccctgccactggagcggctgcctgaactgcttgaacgtattgaggcatatcatcagggccgtgaactgacgcggttggccgtcctgctgatgctgcatgtgttcattcgctccagtgaactgcgtttcgcccgctggtcagagattgatttcacaaaccgagtctggacgatacccgcgacgcgagaacccattattggcgtgcgttattccggccgcggggcaaaaatgcgaatgccgcatatcgtccccctctcagaacagtccatcgccattctgaaacagattaaggatatcaccggtaataatgaactgatcttccccggcgaccataacccgtataagccaatgtgtgaaaacacggtcaataaggcactgcgggtgatgggctacgacacgaaaaaggatatctgtggccacggctttcgggcgatggcatgcagtgcgctgatggaatcgggtttatgggcaaaggatgcagtagaacgccagatgagtcatcaggagcgcaataccgtgcgcatggcttatattcacaaggcagaacacttggaagcccgcaaggcgatgatgcagtggtggtcggactatctggatatatgcagaaaagcatatgtgtcgccttatatgatggttcaggagaaccgctga

SEQ ID NO: 92706 - DNA, 726 bp, Enterobacter aerogenes
atgtcttcaaaatcaaatcgaacatacaaatatggcgaccaaccgatcagaataactactgtgcaagtagttgctgaacagttcgggggagctgcaacggcgaagcaagtagatgcttatctgaaagagcgatttccgcattataaagacgacacccacttgaatctcattgtcaactcagtcaactgcaatcgtagctactggagtttcaacaaaacagccaggcgaactgatgatgtaacccatcggcatcatgagtatgaccgattgttcaagcgagggaagacctttgaaatctatcaaccctctattcatggtatctgggagttgtatcaggatcagcaaggtaaatggtgttaccgtaaggtgaaatctgagtttgaaaaggctgttgatggtgcgtcagaactgcccccgtcagaacgcaaaaagattttagacgctgagaataacactcctgagctaatcgaggttacaacgcgagtttataagcgaagcccctatgtagtagccgaagttctttcaagggctaatggcaagtgccaaagttgtatgagtgacgctccttttctcaaagtagacggcacaccatttcttgaggttcatcacattgagtggctttcgaatggtggggaggactccgttgaaaatgcgattgcattgtgcccgaactgtcacaggcaggcgcatttcggcgtcttggagttagcaccagttaacaaataa

SEQ ID NO: 92707 - DNA, 429 bp, Enterobacter aerogenes
atggctgatccggcttctattgctgctatctcaggcactcttgaacttgttaacaaatccgttgacttagtgcgtaatcttcgtaagaaaggggatgacgaacttaatgccgcagaaatgcgtaatacgttgatcgatttgcttgatgatttggtagaagtaaaaagtgagttcgtcagcctcaaagctgttttgctaagcaaagaagaagagatccaatctcttaaagcccaacttgatgggaaaaataaacttcagtttgacggcaaactatattggctggaaggggataaaaccccatattgcactaaatgctacgagaaagactcattggtattccatttaagctttattcatgctaatcgtaactggaatagtagtgagcactggcattgcagaaactgtcaggcaaactattatctacgatag

SEQ ID NO: 92708 - DNA, 447 bp, Enterobacter aerogenes
atggaagttaaaaaggtttcagtagaagactatagagcagatatggggttgatgcggggctatagttttgattctcaagagatccaagatgtaaaaagcttttattatcaggaggctgtaaaacagttaagtaatctcaactgtggcattgaaataataagagaagacgaaaataaaaatgtccttgtgttcaaagtaaatgaggatcttaagtttcaactgactcttttgaataacattaaatacttaagcgttgatcttcatgcttatgagaaaaataatcgatatgaagatgtactaagcgagcagtatcactatcattgcaagggcgatagtgattatgagttctcagatgttgaagagcatttagaatatgatagggtaggccagcatttccgccatatgctggtttgtttggtcaaagagattgccaaaatcgaagattaa

SEQ ID NO: 92709 - DNA, 618 bp, Enterobacter aerogenes
atggcaatcagtaaaggtgcaaagcgtacagacggacttgaaagcgccgatcaggtgaagctggtagtggaagaaatcgcgaagaagagccagacagtggcggatctcttccttttaggagtagagacacagcttcgcggcgtagatatgcgttcctggcgctgggttgaactggacattggtagcaaggtgctacgcatcacccaagacaagaccaaggaagcggtagaggtggaattgacggagacagcgcgggaggtgctcaaagctcgctataacgagcgcggggaaaatgtgtatgtattccagaatgacagcaaccggagcaagggtaagccgatcagccgttctaaaatccatgcagagattcagtatgcagtggacaagctcaagatgcgcggcctacttccacaggacgcagtgatcagtatgcacagttcacgcaaaacgatcgcctcaatcgctcatgcgcagggcgaggatttggaggtgattagtaagatgttgggccatcgctccaccgaacacacacgcgcctacctgggcataactcaagccaaagtggacgcactacgaacgaagtattcaacaggtattaaaagagtaacgctgagatga

SEQ ID NO: 92710 - DNA, 321 bp, Enterobacter aerogenes
atgtttcggcatgatatacgggaaaaacctgtactatataaagagattctaaaagcgatctctaaaagagagcttttagaagatctatgtttttgcgcttgtcgcaaagatcattttgctggcggctcttcgccgtcactcaaggggaaatgtcctggtacgccgtttggtggcttcccggacacccacgttccgctcacgacgctacgcaagttacaccccctatatggtgcaatggcgttagccaccgtgaaaacggttgcacatgatcacttcgccgtgggcgaataccattgcgctgtgcgctttgttaccatctga

SEQ ID NO: 92711 - DNA, 177 bp, Enterobacter aerogenes; identical to SEQ ID NO: 34619

SEQ ID NO: 92712 - DNA, 831 bp, Enterobacter aerogenes
atgactgacattataaacagtaaggtttttagttttaccaatacagaagacgctttcaacgaatgcacccggatcaccaatctgaaaacgggcgttacagtttcattatcaccaacaaacaaacagctatttgtaagaatacgccatcgttttcacaattttgtgaaaaagagaggtgggaagtattacgacaacattgatcagcttggtgagagtgtcggggtaaaatacgatgcagcaagcgacggaataaagaaacttaaagctgtggggctaatttcgggaactattaaaggcagatcctaccagtgggaaagcgttgcagatctaacgccagaagatttcctcttcgagcgtgatattaacgcgatgaaacgcaaaaccgcgcctgaatgggtggattgtctaaaacatccagtgtttggcaacgctaaagaagacgtagcgccagaggtgcaggaagaaaagcaacagtctgttccagaagccgatccgatgtgcgagtttgacgatacgccggaagaggaagagccagcgccggaaaaagtggagccagcaccgaagccaaagcccacgaagaaaccagcggcaaggaaagcaccagacaaacagcaaaccgtttccccgttcgagtttaaaacgccacgagatgaaacaaaggattggtggtatctggaacggtgtaacgatgccgatcagtttactggcctcaccgattttgatttgccttatctggcgatgtttgaaaggcaggggaagttaactaatcaacattcaatccaacatttgaagatgaagcgtgaattatatgcacgacaacaacaaacctaa

SEQ ID NO: 92713 - DNA, 282 bp, Enterobacter aerogenes
atgaccaacttatatttattgaacgaagatacaaagtttcaacttggctgtaatgaagtttgtaaaagaatctacctacatttatcaagcctacatcgagagaatggaaccttccgttccagcgtcaaaactctggcatctgtcctgggctacagtgaatccggcatacgctactggttgtccctaatgaaggatgccaaagtgattaccatcactcgcaggggtggatattacgactttgacgttaatcacaacgtttctttcatcacctcgaacaattaa

SEQ ID NO: 92714 - DNA, 222 bp, Enterobacter aerogenes
atgcacgtacagacaacacaaactaaaagattcgcgcagcatgttaaatgctgccaatggtattacgaagagatcgacctcatcaccaatgatgcttatctgacagatgaagagaaattagcagccctcgacgaactggaagacaagattctcacattagccgcgccattcctggcagtggcgaccacgattaaagcctataaggaacgaatgacccaatga

SEQ ID NO: 92715 - DNA, 318 bp, Enterobacter aerogenes
atgaccaaaaccaatatcgacacactattgcaagacttccacgaccagctacatattccgctacttgatgcctgcattaaagccagccgggagggaacgcctgagaacctcacagcagcgttgaaactgctgcatctggcatcggtggcaatgcaggggattatcgctgtagtggagagcacagagagcctgagcgacgatcaggacgtgctgggcgaagtgtccagaatggcacagtctcttgtaacctgtatgcaggatttagacgcgcttgcgcatgacatagccgaagaatacgcagtactcgaaactgaataa

SEQ ID NO: 92716 - DNA, 222 bp, Enterobacter aerogenes
atgtttcttattaataacaaatcgcgtgtactcaaatacaaaaatgatgttctcaccatcaatcctcaaataattgagcaggtggcgcagtatgcaggttgtgaagtgtccgacgtgatcaaggcaatggaaacgtatttccctgatgaatcaccagaacaaaagccaaccattgatgatttgattgcacgtaaagtaaaaggactcaaccaaacaaaatga

SEQ ID NO: 92717 - DNA, 369 bp, Enterobacter aerogenes
atgattattgatcttgatacgctgtttccacagcgcctttcactaacagatctggttagttattcaactgaccattttgcctctatcgagagcaagatttttgcctctcttcctgctgatgttgaatgcggcgatgttatcggggctgatggctctctgtacacctccggcgctgatgcctttgtggtggtgagtgaatttgtcactgctggctctaataaagccgtcaacgtcctacgctctccggcgcgtggctctcttgtctgcatcaaatctgacaacctcaccgctgctgatggcgcacacgatgccgctgtagctgccctggctgctcaaggcttccagatgcgcgaattcttcaccagttaa

SEQ ID NO: 92718 - DNA, 1035 bp, Enterobacter aerogenes
atggctattttaggtcaaaactacgtggatctttctccactcttcaatctgaacccaacacgtaactatctgctggcctcattggggctgttcgatggtgtgggcgtttcttctcataaagtggcggtgagccgtcttgttgaagataaccgttctctgttcaacgaacctaccgcgcgtttctcaagtgagcataacgttacagcacggcagaacgggaaagaatggctgatcgagcttccgtatttcctgcgtgaagaccagatcactccggcagatatccagggcaagcgtaaacctggcacggacacccaggaaaccctcaccgatttattcacggattacactcacaagcacagcgtggcgtttatgcgtactcgtgagagctatcttgcacgttctctgttctccggtacggtgaacaccccgaaaactgatgatgtgctgatcgactttggcgatctgttcggcgtagcgccgatgaacaccacgcttgatctgtctgctacagacagcagcaccctacgtgcaattgacgatatggtgagccagatcaccgaaacggctcaaggtatggcggcacaagtagaacgaataatcgtatttgctaaaggtggcttctatagcgatctgcgtttcagccctgcaatggaagcggctttccgctacgtgtctcctctggatgaaagtaacgttgtctatcagcgtcgtgacctcctgccaggcgtgagcactttcagcattccaggctcaaacgtcgatgtgatcaaagtgacagatccactgttacttgcacagatgggtgatgctgatgctatcgctatcccgcaatttgcggctggcttgaacgtttaccagaacatctacggcgctccgtcgagcaactttgaacttctggacgctaccccagcagaaacctatagctggagctatgaaagcgaacgtggcgacgtagtgaactgcatcaatgaacattcgtcgttgcctgtgaataacgggttgggcttctccgtccatatcaaagcctcagaataa

SEQ ID NO: 92719 - DNA, 195 bp, Enterobacter aerogenes
atgatattgaagtcgagccgtggcttgcacgtccgagtgagtgcagatgatgcagaggggcttctcaaggtgagccagctttgcgagctattagagatttcctatacgggcgtaagagcacgtattttccgtggtgaaaccgttgagcaagcaattcatcacttccttgatcagaaaggcggtggtgatgcttga

SEQ ID NO: 92720 - DNA, 1866 bp, Enterobacter aerogenes
atgcttgagattaataccagtaagattgtcaacaccgtaactttcaccgtagataaaagcagtattgcggaggcgaaaaaagccgccgatgacctgcaacgccattttaagaagctggagaatccgaaaattcggtttcaggctcagaaacaacgccgacaatcagcaagggaaaaagtggcagatgctaaagcggcttctcctaaaacgtccaatgacttgaagcagcaacgccaggcagaaaaggcagggaaagcgcaagccagggaagcagcgaaaattgcgaaacgtaatgaaacggctgacatcaaatttaaatcggctggcttacagcttcgtgggattaaaggcaagtacggtttagatcccgcgaaacaatacgaggctcttaaattcattcaacaagaaacagaagcctttaaaaaggggctaattacaagccaacggatgaactttactattcgtgagcgaatcaccgatctacgccgtgaggctgcattacaagcccgtattactgccagtacacagcaacaggcggcagcacttaaacacgtcaaacgtacagactacaaaggcgcggcggctggtatcaaagagaaggggctgaacgtgatcggcggtggtgctcctcttcttggcgcaactgctgcccttgctgggggcgctggcgtcctgtctcgtatccgtgacaaagggaatgaaaatctggagcttgtgcgtatgtccgagcgtaccaaactgaatcctaacgctgttaaggcgattgtagcttggggccaacagcacggcgttgattctgcctctgtggacaagatcaccgatggtttcgggaaagatacccgcgagaaaatcagtgaaaccctgatgaacagccaattcgatcagaaatcaggaaaatggaaggggggcaactcaaacatcgaagaaatccttaacaagtttggttggggcaaaggtgctattgccaaatatgaagataaccctctggacttcctccaatcgactgttaacgaggggcaaagacgcggatattcagatggggagattgctcaccttcttgagaacatcttcgacgatggggcgcactatgtagacctgttcaagaataacggcgagcagttcatttctaccctgaaaaagttggttgatagtggtcagacgctgaacgacgagcaaatcaagcaaacttacgctttcggcgatctgtctgtggctatgtcgtccttaatgaacggcgttgataacagcatgttcactggctttatgaagggattcgctgacgggggcgacgagcttgttaaaaacacgcaagttatcaccgaagcggcgggaagcctgggagagggcttaggcaatctctcgaaagaaatcaccggatttgtgggtgagatttccggcgtagtgtccgatctgaatgctgggcttcgttctcgtttccctgattggtttagcgatgctaacaagccagcggcccaggctctctatgatggtgctgtgggagattcagcaaatgccacggctgattggattaaatctaagacgggagtagatactcgcgaatttggccctgcgatcatggattggttgggcgttggtggtggcaatgtagggacggcagcgagccaatacagcctgtctggtgattatctgcgtgatagtgctatgtcttttggtggtggtgcgccagcgtacacactgaatcctacattcaacctcacggtagcgccggaagtgccgttgaccattcaaactgacacttccaaccttgcggattatgtcgatttcacggctaaagcctcacaagccagcttcgcacagtcgctaaccttgtcagccttgagcggtcaatcgtcaacaggtggatga

SEQ ID NO: 92721 - DNA, 129 bp, Enterobacter aerogenes
atggctaagcaaaaagtagttcgttctgcgataactggtcagttcgtaaagcctatagaggccaaactgcatcccaatactaccgtaactgaaactgtgaaaatcccttcgaaaaaagggaagaagtaa

SEQ ID NO: 92722 - DNA, 279 bp, Enterobacter aerogenes
atggctaataatttgttcattacctacgatctgattaaaaccaaagattatcctgctgtgcatgaagctatcaaagcattaggcaattgggccaaagttacagagtccaactggtatgtaaattcgaattattccgtagatgatgcggcagaaaaagttatggccgcaatggataatgacgataagttgattgtggttgatgccacgaataattctgccagttggtataatcttaccgatgaggttgaaaaccacattaaagatcaatggtataaataa

SEQ ID NO: 92723 - DNA, 1203 bp, Enterobacter aerogenes
gtgtcaatcaagggccaagcgtacttatataagcgaaaagacgggatctggatgtttcagatcttcgtaccaaagtacctaagatttttatatccatgccggatgtggcgtaaaaccacctcaacccgcgatctcaacgaggctcgacggtttagaaaccacctgttgttagaatgggaagagcttaagcggaagtacaatccgagcaacccggatcagtggttgcagcagtcaatagccgccttgcataccgaaggtaagaagaataagagccgccctcaacccgtagcgcgatcctgttcgattcccactctgtgcctattacgggacgaatacgctgaaagctataaagaccgccgctcttattcaacgttaagcaaatcagcgcgagccgttgagctattccttgaaagtgccaaacaaccggacattgccttagaaaggataggtcgtcgcctggtgactgagttcctcgaagctcaaaaggagaagggagccgccgatcaatctcgtcaaaactggctaacgtgtttagggagcctctacgagtttgcaaagcgccgctacgatggcataccagaccgcaacccttttcacggtcataacctcgaagcaaggcgaacaatcgagagctatcagccttttgagcctgaccagatgcaaaagctacttaatgcagcagagccggagatcaggaacatcatcattatgggcctgtattcaggatgccgccttgatgaactggcaagcctaaagaaatcagagatccagactgtggaaggggtacggtgtttctacatctcgaagtcaaagacgaaagcggggatcaggtatgtgccgattcactcccggctatctgcgatagtcgatgaatacatgaaccacagttacggtgagtacctattcccacaggctaacaaaattaaccgcgctgacggtaagaaaggcccgttctactctcaagcgttcaccaggctacgccgtcgtgtattgcctaccgctacagatcggcaatgcttccacagcttgcgcgggatgttcatcacctgccttgaccgtgccggagttagcgaaacaaggatcggcagtattacgggccactctgagcaaaaagccaaaacggaagcattccgcacctattcccagggcgcgaatatggaggaattagcgggatatattgaattagttacttatgacatgtag

SEQ ID NO: 92724 - DNA, 195 bp, Enterobacter aerogenes
atggatttttgttcgattcccttcgcccgctccaaactcaagtctcataatctcaatttcccttttgttaataacaagttacagctttatttttttgtattgttaagcctgacgttcgactcactgaatatcaaattatcgctgctaccaggtctgcctggccctgctggaaaacagcaggaagtcgcctcataa

SEQ ID NO: 92725 - DNA, 717 bp, Enterobacter aerogenes; identical to SEQ ID NO: 92284

SEQ ID NO: 92726 - DNA, 165 bp, Enterobacter aerogenes
atgattccctccaattcgctatccgttttaatgcagattcagccaacgattcaacgttttgcccgcatgctctccagcgtgttacaactcgaagtcgagattgtcgacaatacgctgtgccgggtcgccggtaccggcgcctacggtaaatttctggggcgataa

SEQ ID NO: 92727 - DNA, 1650 bp, Enterobacter aerogenes
atggtgcagataaatgagaatctcgcgactccgcccgtttcatcgttgagtcgtttttttgctaagccccgcattattgctaaacctggatttaaccgctggttggtccctcccgcggcgctggcggtgcatttgtgcattggcatggcctacggcttttccgtctactggctgccaatgtcgcagcttatcggcggcagcgcgccgctgcagtgtccggtcgatatgtcattctggcagcaactggtgacccgccagtgcgactggaaaatttccctgctcggctggacctatacgctgttcttcgtttttctcggctgctccgcggcgctttgggggagctggctggagaaggttggcccgcgtctggtgagttttgtcgccaccctctgctggtgtggcggcctggtgctggcgagcgcggcaatctattttcatcagctgtggctactgtggttgggcgccggtgtgattggcggcattggcctggggcttggctatatctcgccggtctcaacgctgttgcgctggttccccgataagcgagggatggccgcgggaatggcgatcatgggcttcggcggcggggcgctggtgggagcgccgctggctaattggctgattaattttttcgccgatggtcagggaagtggggtatggcagagcattctggcgctggcggttatatatgcgctgtttatgctctgcggtacttttggttaccgtctgccgcctatgggctggcatccggtcggcgcgaaggcgcagcaagccatcagcaaacagccaaccgttcaggttcacgtcagcgtcgcgtggcgcacgccgcaattctggctgctgtggctggtgctgtggctcaacgttaccgccgggattggcattctcggcatggcctcgccgatgctgcaggagatttttgccggtaagctactatccctggatctgggctggcaggaacttaatacagaacagctgaagcgcatcgcgacgatggcggcgggatttaccgggctgctcagcctgtttaatattctggggcgctttttctgggcttctgtttccgatatgtgcggcaggaaagccaccttcgcgctgatcttctttctgggaaccctactttacggcacgttgccgttgattaaccacggcggctacgtggcgttttttgtttgtgcgctctgtgtgattatttctatgtacggcggcggtttcgcgaccatcccggcgtatcttgccgacgtatttggctcacaaatggttggcgcgattcatggccgtctgctgactgcctggtcggcggccgggatcagcggcccggtgctggtcaactatttgcgcgagtaccagctggcgcagggggtggaacccgcgagaatttatgacatcacgctgctggcgttgaccgggttgcttatcatcggctttatttgtaatcagctggttcggccgattccgcagaaatatgccatgaccgcggagcaacagcagcaggcgaggggtctgtatactatcaataaagatgcgcagctgagctgggaaccgacgcccgcgccgctgctgctgacgctaagctggctggccgtcggtatacccttgctgtggggaatgggcaccaccttgcaacaagcggtgaagttctttatgtag

SEQ ID NO: 92728 - DNA, 582 bp, Enterobacter aerogenes
atgactaagcccgtgtatttgcatactgataatgatgttgagattttaaaaaccttcgatatggtccttagccatatgcaggcgatcgccgacccttatcagtggaagtgggtgattaccggctggcacagcatcctgcagaacgcgatggtgttggcgttgtgtcagggcgatgactttcaggtctacctggccgacggtaaagcgtcgactcgagatatttaccagcaaatttgcaacgacgatttcaccaacatcaataaactgcagctgccgtccttcatgacgctataccgtgcgacgaggaagagcagcggattcacacccagcgaagactgtacggtggcgatggacaagcttcaccagttgcgcaatgatttcattcactatcatccagggggctggagcctacaggtcgatggtttaccgcaatggattctggcaagcggtgaattactggatcatttccttgccagccgtgaggtcgtacgctggtatgacgaaaacgatgaaaaggcattcagagagaaatacgctgaatttcaagaccgactacacggcgtgatgtcggtctattcctga

SEQ ID NO: 92729 - DNA, 363 bp, Enterobacter aerogenes
gtgcagatttgtctggtgctgatttggcttaccggatccgactacggtaccctgctaaccatcgcctcagaaatgattctggtgccctatttcctcgttggcgctttcctgcttaagattgccgtacgtccgttacataaagccgtgggtgtcggcgcgtgcgtttatggcttatggttattgtatgcgtccggtcctgtgcatttgttattgtcggtggtactttacgctccgggtcttctggttttcctgtacgcccgccgtacgcaccagcacgatcgcatgctcaaacgccgtgaaatggcattaattggttttttgctggttgccgccgttccggcaacgtggatgctggtggggtaa

SEQ ID NO: 92730 - DNA, 330 bp, Enterobacter aerogenes
atgcaaaccttatcattacacccgacaagggcgactcagccctatctgtcacccgttgaaacctggcaacggctgctgactcatcttttatcggagcactatggcctgacgctgaatgacacaccgttcagttatgaaaccaccatacgggaacatattgatgcaggagtatcgctcagcgatgcggtgaactttctggtagaaaaatacgggcttgtccgtatcgaccggaaaggattttcatggcaagaacagaccccgtatatttccgtagtagatattctgatggcaaggcgctcgaccggcctgctaaaaactaccgtgaaataa

SEQ ID NO: 92731 - DNA, 345 bp, Enterobacter aerogenes
ttgtcgaatgaaataccggcagtaaaccacgatattgccgaaccctggtggggactcaaaaccaccgtcacgccgtactttggcgcacgactggtgcaggaaggcaaccggctgcattacctggctgatcgtgccagtatcaccgggacattcagcgacgcggatttacgccatctcgaccaggcgtttccggtattgcttaaacagctggagttgatgctcgtttccggtgagctcacctcccgccatcagcaccgcatcacgctatatcacaatggactgacttgcgaagccgatacactcggctcttgtggttacgtctacatcgctatttatcccgactag

SEQ ID NO: 92732 - DNA, 222 bp, Enterobacter aerogenes
atgaaaattatcagcaagcgccaggcaatggcgatataccgccagcatccacagtcccggctgtttcgcttctgcaccggcaaataccagtggtccggcagcgtctgccactatgccgggcgggaggtgcaggatatcagcggtgtgctcgcagtcttcgcggagcgccgtcaggaccgcaacggtccgtatgtcgtcctgcgcagcgtcacgctcaattaa

SEQ ID NO: 92733 - DNA, 480 bp, Enterobacter aerogenes
atggaacaacagttaccgttatttgcttgtgaattaacccccgccgaccagcagacggtcaggaaagcgttaatcctgctggaatgccagctacgcgaacccggtgcgtcatttacctcaagccatgccgttcgcgactggctgcgcctgcatctcgcgcctctggagagggaagctctctcagtcctgtggcttgacaatcagcatcgcctgatagcccacgacacgctgtttatgggcaccatcaacactatcaccgttcatccgcgcgaggtcgtaaaggccggtctgaagcacaacgctgcagctgccgttctggcacataaccacccgtcaggggaggcagagcccagttatgctgacagacagattacgtcccgtcttaaacaggcgctggaactggtcgatatccgcctgctggaccacttggtggtgggcgggatggaaatcgtttcgtttgcagagcgaggctggctgtag

SEQ ID NO: 92734 - DNA, 480 bp, Enterobacter aerogenes
atgaccgacattattaaccttaacgataccctcccgttaccgccacaacctgccagttcttcgccagcgctgaccgccaccctcgtacaggacgagcagcgcatcagcttctggccgcagcacttcggcagcataccgcagtggataaccctggagccgcacatcttcgcctggatggaccgcttctgcgcagactacagcgggggtatctggaatttttacacactgagtaacggcggtgcgtttatggctccggaaacaaatggagataccgatgagaagtggtcgctatttaacaccatgaacggcaacggcggcgaagtcagtgcagaagctgccggaattgccgtctgtctgatgacttacagccatcacgctatgcgcagcgaatgcgacgccatgacggagcactactatcgcctgcgggactacgcgcttaaccacgcggaatgcagcgccatcatgcacatcatcgactga

SEQ ID NO: 92735 - DNA, 255 bp, Enterobacter aerogenes
atgccaccactacctgataacacccatcaggcccccctttatctgaccgccctggaaaacaatcccagcagcagctccatctctgacgacgacctctgcgcctggtgctcgcaccttctttatcgtcccggtgaacgcagcctgtgcagcttaagtctccctcagggccactggccgtcacgctgtgatgaggatggctatgcgcagtcctgcccgtcactccggcttaaccagcatccccaatccgataaataa

SEQ ID NO: 92736 - DNA, 819 bp, Enterobacter aerogenes
atgcgcttagcaagccgcttcgggcggataaaccagatacgccgcgatcgtcccttaacacctgaagagctcatgcagcatgttcccagcgtcttcggagagaacaaacatgcttccaggagtgaaaagtacacgtttattcccaccatcaccctgctggagaatctgcagcgcgaagggttccagccattctttgcctgtcagtcacgcgttcgggatccggaccgtcgggagcacacaaagcatatgctccgcctgcgtcgcgccggtcagattaacggccagcaggtgcctgaaatcatcatcctcaattcgcacggtggcgaatccagttttcagctgttaccaggaatattccgaagcgtctgcacgaattcgctcgtctgcggacagtcgtttggcgaaatcagagttccgcaccggggtaacgtggtggagaaagtcattgaaggcgcttatgaagtactggggatatttgacaaggtggaagaaaaacgtggtgccatggagtcgcttttactcccgcccccggcacagcaggcgtttgcaagagccgccctgacgtaccgctttggtgaagagcaccagccggtaacagcatcccagatactgacgccccgacgctatgaagaccgtcaggacgacctgtggtcagttttcaatcgttgccaggagaacctgctgaaaggggggctgccaggacgtactgccagaggcaaacgcagccatacccgtgcagttaaaggtatcgacggcgacgttaagctcaaccgagccctctgggtaatggcggaagaactgcagcaggcgctgagctga

SEQ ID NO: 92737 - DNA, 234 bp, Enterobacter aerogenes
atgcaaaacattgacgactcaccgttacctcccggttcgttcacccgtgaacaggcggaggctgtggtggcggtttacctcagtgttgctatcgaagacgaccagggtacgcattttcggctggtgattcgggatagcgaggggaagttgatctggcgggcgtggagttttgaagccagcgccggggaatggcttaaccgccacatcgccagccacggaatttcccactcctga

SEQ ID NO: 92738 - DNA, 837 bp, Enterobacter aerogenes
atgattaacagacaaaaaatcatccgcgtcaccggactgatgatagcgtccctgtacctgatgtttacccaaccggctaccgccgctccggctgacaatcttccccgtctgacaaccgacagcgaagggcatatggtctgccatctttgcgggccggagaaaaaggacagttattttctggcggattacccccagggatataaaataaagaccgccagctacagcaaaatccaggatacaagccgctatgccattctgatgtctgacagttccccgggagcggcggcgaatcagacgcctgattttttctacattgataaacttgcggcaacgcctgccatcagcagcattcagttcgataatgaccgctcaaacctgagcagcgccagaagtgtatcggtaacagagaaaaatggcgtcacgctgctcagcgttatctggaagaacggagaacgtaataccttctcgctggataatgaagcaccggcttatacagcccagattctgcgttcacaggacgacaggctcttttgccgtaactgcggcggtaaagagaaagatacgctgattaaaggtgctgacgaggccggattatatactcagcttattgattcatcgttcctcaccctgctgaagcaggacggaggcactgcctgccctgccggtaactggtatgtcgtcagcaaaacccgtgaaaacccagaaatccgggaaatcaccgggatgggatgcgatgaaattgcagacctgaaaccctccataaaggctggcgtcacaacgctgaatatccgctatgtcagtggtaaagcgaaaaccctcgctctcgaaaatcactga

SEQ ID NO: 92739 - DNA, 246 bp, Enterobacter aerogenes
atgatgaaacacaaagggctttttcttgcctccctcctgctgttaaccgcctgtgatgagcccgggggaaaacgtgcctttatgcgcgaatgcaccgcacagggtgataccgccctgtgtgactgtgcctgggagaaactcgttcagcgttacggtcaagactgggggaatcccgcccggacttttacctcgcctgattttattgcttacaccggtcaggctgctgctgaatgcatggcggaatga

SEQ ID NO: 92740 - DNA, 228 bp, Enterobacter aerogenes
atgaaacgttttattatcagtatctattgtgtgctggctctcatcacggccatttatcaggctgtatgggggcctcaggtatggcgtggcctggcttatgcaatcggacaggggctggtatggcccgcagtctggttcccttcactcggcagcattatcggcgggctcatctggataatcatcatcgtgttcctgctcatcctcggtttgtttatgcgtaaatcgtga

SEQ ID NO: 92741 - DNA, 408 bp, Enterobacter aerogenes
atgaaaactgttcttatcgcgttcgccacccttgctgtactggccgcgatgcccgctcaggcggctgatgaggacgctataaaagtcaatatcgagaaaagtggctacgaatgccatgactgcgtttatgtcaccgtgaccgccagaacagacaacattcagatagacaaaattgatgttaaccgggggcgttgcccgcaactgaagaagggaaagacaacgtataacggcaagaccaccccggaaggatggtggcccaataaaggtacgtttaccccccgcaaaatgcagtttgccgagagtctgacctggcgtttcggaaatccactctggcagaccggtatctcgtgtaatttcctggaggcccggatattcacagaccaaggcaccttcaccgtcagtgactaa

SEQ ID NO: 92742 - DNA, 888 bp, Enterobacter aerogenes
atgaaacatccctcgggctatgcccttatccgtcgtcatctccggcgttatccgtacgcactgcgccagcaccttatccaggagcttaaccgtctcgtcacgtatgaacccgtgattggcattatgggcaaaaccggtgtcgggaagagcagtttgtgtaatgcactgttccgtagcgaagtctgcgccgtgaacgcggtggaagcctgcacccgtcagccacagcgtgtccggctgcgcttcggtagcaattatctgacgctggtcgacttgcccggcgtgggcgagtctgttacccgcgacggtgaataccgtgagctgtatcgtgacctcatgcctcagctcgatatggtgctgtgggtgctcaaggctgatgaccgagcatttgcggtggaagagcagttttatcaggacgtattcgcgcagttcagtggaccgctgccgccggtgctgtggatactcaaccaggtggacaaaaccgaacccgccgagcagtggcgatggttgtcggctcagccctcggcgttacaggcggagcgtattgcgcagaaacagcaggctgtggcacgtcagttgcagatagcagaaatagatattctgccagtctctgtccgggggcattaccggctgtcgcgcctggtggaggccatgattacccgcctcccaaagcaagcccgcagtccacttgtgcctcatcttcagaaccggtatcgcactgataccgttatcaataccgccagcagcagctttggcgatgccgtggtagaggtgattgataacatcattgacctcgcaccgctgccgcagatagcccgcacagcactgcatgcggtgacccacaccgtcgcccgtgcagcaggctccctctggggatttttcttctgttaa

SEQ ID NO: 92743 - DNA, 1458 bp, Enterobacter aerogenes
atgcaggagtttccatttaacgctttccccacgtcattacttgaaactatttttgatattgaggaatgcacacaggccccggcggaaatgattgcattaacattgctgagtggattatcactggcatgtcagagcctgattaaggtgaaaataacagacaccatgaagtctccggtatcattgtattcattcgtgatagcagattctggcgagagaaaaacagcggtggaaaaactgcttttcaaaccttttcatgagcatgatctgcgtgtattactccagtatgaagagcagaagaaagaacatgaggtccagtctaaaatatggagcaagaaagaaaatgctcttctgaaatgcattgataaatacacgatgaaaggaatatgtacagatgaactttcacggcaattagagaagttatccgctgaaaagccagtaccaccgaaagccagaaggtacatgtattacaatgtcacccctgaagctctgcagtttgaaatgtatacccactcgccacaaacaggactcataactgatgagggggctaatatacttagcagacggaccatgagtgatttggggtttatgaactccatgtgggatgatgaaaattttcatgtcaatcggaaaacaggaccgagttttacgattgagaatggacgtattacgttgttagtcatggtacagaaagcaatattcgatgattatttaaaacgccatggagaaaatgcacgcgggagtggtttgtttgcacgctgttttatcttgtatattgatacgaaattatcgacacagggccagcgttttattagtcgtcaatcttcccctcagtcaggtgagctggagaatcttaatcacttctaccagcgtatgaatgaactggtagaaaaaagtgcttctcaacacgggaccgggcatcagacatatttatcattcgagccctccgccctggaggcatggaaagaaattcatgatgaaatagaaagtggtattggccccgacagggaatatgcaaacatgaatgattttgcatccaaacttccgaataatgttgcacgtctggccgcgcttctgagttactataccgaaggtgaatgcgcgataaaaaaagaatatgttgaaaatgcctggttgctgtgtgaatggtacatgcaacaggcgataaaggtttttggggctcaggagggctaccacgaggcgctgctattatcatggctgcgtcgtgagttcaatgaaacagatatgaatcatgtcagatttaatacaatacgaaatgccgggcctaatgtattacgtaaaggtaagttactggaaagagtcattgagagacttgaaaaggaaggcgcgatagacatcgtccgctcaagacgcaaggcacgaatggtttatgcaggccgtcattttcgtaacaatccatttacaaaaaatgccgcgtataagcactactggccgcgatag

SEQ ID NO: 92744 - DNA, 585 bp, Enterobacter aerogenes
atgccaaataattccttgaatgctgattaccagcaggcattttacgatgttattcgtaatgcagtagacgagtttccgcgtacgttagcactacgagttgatttacgttttccccgcaactatcagtatggagattcgaataaagaggttacgcgttttattgaatcactgaaagctaagttgctggtcgattgccaacgtaagaaccgacgctggaaacgtaaccgatctaatagattacggtatgcatgggtacgtgaagtcggtgaacttaaccgccgtaagcattaccatgtattgctgttactgaataaagatttctatcacggtgtcgggagttataatgccgatgacagtttatacgcattaatccagcaggcatggtgcagtgcgttaggtctggattcggggcaatactctggtttagcgaatatgactgagaacggttgtttttatttaaacagaaaatccgctaattatatgcaagaagttaccaaattactgaagcgcatggagtatatggctaaagaccacaccaagagctatgacgatggatatcgatcaattggaatgagccggaggtaa

SEQ ID NO: 92745 - DNA, 747 bp, Enterobacter aerogenes
atggacaattttagttttgatgattttatcgttgaattgaaaactacgttcaacaacaagagttcagcattatctcgggcgctcaaggatattggctgggaacaggaagaagaggcttcaggtgcaaatgaatataatgagtttgtacaatctctggttgacagcatgcttaataactcggcagtccgccgtaagtttgatgaacaagtttacaggttgggatttgatgatccgggcacgattcgcgaaactgtagatgagttttgttttctcgctgacgttaactggtatctgggacttgggctccttaactcgaatcagaatgaagcgatacagtgcatactcataggtattgaaaaccttgattactgccgtggcattgtagaacacgaattgtggcaacagcagcaagctaaaaaaacggatgttccggtgaagggtggaaaagagaaagctgcacgctttgaaccggtgaaaaatgaaattattaggcttttgcatgtaaaatcttcacctgaagggtggttacacaagcaggatgctctccgagatattgaagatgagattaatgactatatagcgatacacggctggccctcagccacagataaaaataataagtccaagaatgaagctgagctttttgcgttaagagagcgaactattatggactggtcacgtaacgatcctgacgtcaaatcagcattcgagagagtgctcaagcccaaaaaacgccagaccagatga

SEQ ID NO: 92746 - DNA, 228 bp, Enterobacter aerogenes
atggaaccaaagtctgtaaaaatcctgcgtgtacctgcacttgtcaagaagttaggcattgggcgttcaacggtatacgactggcttgaccctaattcagatcgtcatgatccgacatttccccaaagggtgaaactgggagcaaagacggtaggttggctagaatccgagattgatgcttggatcttgaacaaagcaaaacaaccgctaacgccagtttcgccatag

SEQ ID NO: 92747 - DNA, 471 bp, Enterobacter aerogenes
atgcaggcggaaaataacattaccgtcacggaaaatcagattaattcggcctatatcacatcgggttttggtgcgaagcgggataccggtcagtcttctgccggtgcgcagggcagcatcatcacggcaggaggaaatcttgtccagatggtgggaaacaatctgaccgtgacgacctcttctgtctctgcaggagaaaacgccctgctctctgccggaaatgatctcagtctgaatgcggctgcaacacatcagacacagagtgaccggacccgtgaaacacacaccaccggcgctgtcgtttccacggtggccgatggggataatctcacactgtcctccggacgggatatttccagtcaggcggcgaagatcgtggctgaaaacaatatcaccctgcaggcggggcgtgatgtgaacctgctggcagaggccagcaccgaagacaacagcaatatctcaggagattaa

SEQ ID NO: 92748 - DNA, 1752 bp, Enterobacter aerogenes
atgtatttaggtagcctaaaaatttcgcggtttcgatcttgtgatgatgtgaccgttagtctccgcccagatttaactgtattggttggtgaaaataatggtggaaagtccaatgtcgtagacgcaatcagattgcttactttgccgttgagtggacgccgcgaacgatatccagaagatgaggatgtacgacgctattcgacagtcccaagttttcaaatcgaaggggctttccaaggcctaagcgatactctaaaaggtctattgatatcagcagttcccgatcctaccaagagcgaggctaccttcggctatcgatatgaatcgcgttctgaacatgctccccgtggtaagactaccgtgtgggctggacgcttcgacactaatggaccagagcttggttcttctgagttgatcagacacgtttatctccctcctttaagggacgcacatcaggtgctgggtactagcagcggcactagagtgatggcattgctgcgtaatttcttgccaaaagagcgggagcaggatttcctcgctggtgtcaggcgtgcggataatcggcctgagatcttaactacaatcaatacggatatcagtgctgctctcggactactcactaatggagtacgtccgcagatagcggcattggattttggtagcgaaaccttactcgatgtagctcgtgatttgagatttcgtatggccgatacaggtttgataccagaagatattcggtcttctggtctggggtactcaaatttactctatatggccactgttgttgtagagttgactaaggccaaagaggcagacctcacgattttccttgttgaagaacctgaagcgcatttgcatccgcaattacaggtacttgtgcttgagttcctcttggatcaagcgcgccaatcagcatcacgtatcattgaaccaggaaagcctgaaggccgcatccaaattgttgtgacaacccattcccccaacctgacagcatgggtttctccacgccacctagtggtcatgcgttcgcggcatcgtgaacaagatggaatatccatctcagaatcagtgagtgtgcccattgccgaaataggtctaaagccaaagacattagataaaattagccgatatcttgacgtgactcgttccgctttgctgtttggtaacagagctatcttggtggaagggatcgcggaagcactattgttgcccgtgctagcacaaaagcttgtgctagccgatgatttagatgggtggcttaggttcaagggggctgtaattgtgcctatcgaaggtgtggacttccgtccatatgttgaggtactgctacggccatatggtgatgcacgtattgctgatcggctgatagtgatcactgatgcggacccaaccgtgttgggaaataggaaagttgatctggaaaatctggctgcaacgcatggagctccagatgctctgatcgtgctaaccaatcagcatacattggagcacgaaatttttggcgctggaaatgaaagtttcctgaaaagcgtgtttcttcgtttgcatcgtaattcacgtagagactgggaagcgcagatagaggccattccagaacaagatcgccccaatgcatttcttaaattaattgaggcgaaaaagactcgtaaaggcgatttggcgcaagctatggcttcgcgcattgaggcgggtgaaccatttgttgtacctccttatctcattgatgcaattcgtggagcttcacgtatatga

SEQ ID NO: 92749 - DNA, 1776 bp, Enterobacter aerogenes
atgactggcatccacaatctaaccccagagcaagaaacatttgctgcccacattggcggagctttcgttaatgcttgtcctggagccggaaaaacacgcactatcattgctcggctagcgaggatcgccgctacgttgcctcctcgtcagggcatagcgatactttcattcacaaactccgctgtagacgagtttcgcgaacgatgcctggctgctgggctcgatacgcttttgcaatatcctagtttcatgggaacacttgatgctttcgtcagacatttcgttgtactaccaagctgtgcggtatcaaaccagatacgaccaatcatccttgatagttgggatactcttggcatagaaattcgtttatcaggtcaatttgcctttcgaggtgaaccggtaagcctcgatttgtttgatccagaaaccaatattattgttcctgataggatcggacatgtaggtttgcaaaatcatgtccgtcaacatcagcttcgataccaacaagcagcagcacatcggcgaagatctttgttacaagctggctatatgagtgcaggagatgcacgtgctcaaacattgcggttgattagagataatgtaattggtggggcacttgctcgcgcattagcggcacgttttcaagaagttatggttgatgaagggcaagattgcaatccacttgatctacaaatactgacatggctcagagcacatggggtaaatgttacgttcgtctgtgatcctgaccaagcaatctacgaatttcgtaatggtaatcctcaaggaatacaggtatttaaggatacatatcctattgcgtcacataaggagttgacgggtaattttcgtagtagtcccgcaatttgccagttagcggcctctttaaggcgagaaggtcaggttgatcggtcgcttggtgaaagtgcgaatgttgactatccaattttacttcttacctacggtggccggggtccaacggcaatgattggtcagatattccttgaacggattacggaactgggactggactcaaccaaggcgattattttggctcactcaggcaaagttgcgttacgcgcagctggtgtcacttccagcaattcaatcggaaactcgcgaattgagacgctggctcgtcaagtgtcaacgttctggtcacctgccgcaaccccaaaaacgaaggagaatgtagtccagtcagtcgaaatattattgctggatttaatgggtgtgcgtcaaccaaatgagcatctgattaaagccatagagcgtcttggtatggaccggcgtgcccatcggagatgcgccctaagtttcctcattaaccttccaaaaacgtgtagagattcggatgaagagcggcttgcctggatagcctgtgttcacgcggaaatggagaggttgcatctgccactccaggctggtgtaagcgtacgtcgtttcttccgacagccacctaatgcgcattggtcaaagcatcttcaagtgcccgcagctctcggttttgcatgtggcaatatacatgaagtgaaaggtcgtgagtacgatgccgtatgcgtcgtagtcccgccaaatcgagctcctgaaaacagagttgaagcactcttcgagtcatggcaagcgcgagtagatgctgaggcaaagcgtgtactttacgttggcttaacccgtgctcgtaattttgttgctcttgcgataccaaacgcctttgcagggcgctgtgtggatttgctggctacacgccaagtgccctatacaagagtggatttgtga

SEQ ID NO: 92750 - DNA, 1878 bp, Enterobacter aerogenes
atgtggcatgacaacgagacaactgtcgattatttaaattttggtgttgttgctgatgcatgtgcaagcctgctgaagcaggctaatggggaacctatttctataggcgtctcaggtggctggggagcaggtaaatcttctctggtgaaaatgattgcatcacgcttggaaggcccttcatcagaagagtcgtgtagggaggaaaacaatctagaaaagcattcatttgtcgtgctcacttttaatccatggctttaccaagattttgagtccgccaggagtgcattgttacaaattgtgggagacgagattgttcggcttactgatgaaaataaaactatcgccgacaaagtatctgaactgtggcgaaggataaatcttctccgagtcgctcaattaagtggtgaagctgcattgactttaactactggcattcctatcggttctcttggaaaaaccgttagtaaattggctggttggtttacgtcggatgacaaatcgagcaatgaatcatcagatacagatagtctcgagctaagtgccagcggtcttctaaaaccgagtgagccattttcgatgccagcccatattcaggcattcagggatactttagagagtattctcgaagagttgaaaatcacgttagtaatatttgtggatgatttagacagatgtttgccacaaacagcaatttcaacacttgaatcaattcgtttgttgctatttattcgccgtagcgctttcgttattgctgcagataatgatttcataaaagctgcagtgaaggttcactttgatggcgctggaattacgggtgatgttgcaactaactatttcgataaattaatacaagttccactccatgttcctcgccttggtttgaatgaggcaaaagcgtatctggtgcttttgttgcttgagcgagaaaccaacgcaggccatttcagtaaggaaaggttcaatcatgctcttagcgttatccctgagaaactgcgtaatagttggaaaggtgaaacgataaatcaagagtttttatatgaattagtagagcatgttaatgcactcaaaagtttaatggatttagcccaaggtcttgcggctcttcttcatagctctttagcagtaaacgctaatccccggctaatgaaaagatttttaaatactgtttatttgcgtgatgctctttctgcgccacagggaataacgttagatatagccgcactggcaaaatggcatctccttgaaaggtgcgacgaaagccttgctgaggaacttgctagtcgtgttcattcggataatgacggtagggtacaagttttggcggatgctgaagctgctgcagcgggtcagagtagtttacctgagcctttcaagaatacgccatttactcagcaatggctccaactcctgccagccttgggaaccgaggatctacgcccgcttctccacctcagccgcgactctggaactcgtgacttcggtgatgacaatatgactcctgattctagaaaattgagagacgcactgaaagttgcaactaatggtcatgagtccttagttgaacttatgaggaaaataggaccttcgcagacagagttggcgatgacgaaggcctggcagagcaatagtgcctcacgtacctggaagagtagcaaagaaattgtaatgctgattgagtgctgcaaggtttacccggaaattgggaataaagcggtcagcttgttggatcaggctcctctgaaacttattggcccaggtttaatcccaactcttggtgctcagccatgggcacagcaacttttagaacgatggaaagatcttaacgaattaccaaaaacaactaggaatgcaattgggaaccttgggaggaggcgctaa

SEQ ID NO: 92751 - DNA, 810 bp, Enterobacter aerogenes
atgggaacatcaacttctagtgggggaggccgcgcaggctcaccgtttgatcctgaatggttaaaacctgaaagtggctctaccacaggtggaggagattcgcctgattcaccatcggaggagaacggtggaaatgtagttcctgatggtgcaatagcaccagaacgacggtttggacctgctcgttcgctacttgggggatatctgcaaaatggcagccacgataatttacgtggtgcgacaaaaagcatggtctccaaaggaatggggggcgcgcgacgagcagccgctactatgcgaggtgttgccagtggtgtcggtagtcttggtgagttcctgacgtctgttagggatagaaacgaccaacgagtgattgattggcttactcacgttcgtcaagagaacctttcggcaacagatcttactcttgaaattttgaaagaggttattcctgggacaggaagcgttgatgacgaatcgctccgtaatgctggcgcggaggctatggcgcaactctatgagctttatccggacgtggacatatttaatctcacagatgtgcaaatagctgaagtcatggggttgaccattgcgaatgagatttgtaatcgaatagatctccagcttggacagacttacgaaaaattaaaatatgatcctttattaattcaggaacggcgttctgatattcgcgaatgggtcggtgctgaggttagagtggtattggaaaaacaaactacaaaaaatacagaaccgaaaagcttggctcagtctattctcttgtctgccttagaggtattttcagaatga

SEQ ID NO: 92752 - DNA, 1266 bp, Enterobacter aerogenes
atgattaaagttatgtgtgctaaagcagaactgattccagcacaggttcctgctgatgggcgagtattctcctattttaaaggcgctaagcgtgcaggtgttggtacaattgcgaatcgatggcatggtgcattaaaacggagtgggtttcgaccttcaacagagatttgggattttgtacaattttgcctcgcggtatgtagcgcggatctatcaagccctagaagaacaagtgcagatggctggactcggaatattcaacttacggttggattgtgcgatccagataaatggctaccgctgaaatctgatcttgaagatatgctaaaagttctgactggcgattattggttattaaatttcaataatgcaggcatggaacctcctcaaggagacggcgcttttctcagcaatgactgcgtgtctttattatcgggtggactagatagtctaataggtgggattgatttggtagctaaaggccaaaaacctctatttgtttctcagctcgcacataaagattcagagcgacagagggcatacgcggctatgctgatgggaaatggctcacattatcaatggagtcatggtatcagcttcaaaggatcgcgcgaaccttctacacgtggtcgttcattagctttttatgcatttgcactgcttgcttcaacgaaaatcaacctaccgaaaccaacaatatttatccccgaaaatggggtgatctccattaatcctcctttggttccagggcgtgtatctagtttgagtactcgaacaacgcatcctatgtttatcgatatgttgcaaagagttctggatactttgggtattaatgtgcagtttcaattgccttaccgttttaaaactaaaggcgaaatgatgcgggaatgtcttgaccaagacctcttgcaaaaatgggctgctgattctacaagttgtggccgttttagaacttataatcgtcagcactgtggacgctgtgttccatgcttgatccgtcgggctgcattccttgcatggaaacctgagggggatacaacgtcttaccgctttgggtctgttgttggcagtgacaaatcaagtgcacccgatgatcctatggctgttgcacttgccatccttgatgtaaggaagagagggcttgacagatttcttggtggctcgttggcttttgcaccgattaacgagcgccctatgtaccgtagagttttgcaagaaggtataaaagagctagaaactgtactcattcaggataaattgctttga

SEQ ID NO: 92753 - DNA, 759 bp, Enterobacter aerogenes
ttgattgattttcactgtcacgttgatttgtatcccaaggctagagatgtttatgctggtgcgattgagcgtaatgttttcacttggttagttactacgagcccaaaggcttttcaggctacaagtcatgttttagaaaaacatgaatcggtaatgatcagtcctggacttcatcctgaaattgtcgctgatcgtttccaggaattggaaatgcttctcgagttgattcaaaacgtagctgctgtaggtgagattggattggatggttcaaaacgatattccaccagttacgcgatgcaacgtcgagtgttttccgaggcggtcaggaagtgccacgaggttgggggacgagcaatgagcattcattcaagacaggccgttccggatgtgctagctaccttaaaagcgttcccctctcacggaattcctattttacattggttcactggaagtgttacggaattgagggatgcttcagcacagggatgctggttcagtattggtccggctgctttcaactctgccgcagggaaagctctagctactaagctccctaaagacaaggttgtgccagagagcgacgggccatttgctcaatttgacaatcgaactgtgatgccatgggatttcaatattacagttagattgctgggtaaggcgtggtcaatgcctgaaaatgatgtaaagctacaattgttaagcaatacgaaaatgttgcttggacagatcggaggcaatcgaattgctctcaacttctaa

SEQ ID NO: 92754 - DNA, 915 bp, Enterobacter aerogenes
atggaatctgctcgcgataaacgcactggagagattgttgaggctgaggatctctggttgctggatagcgttgatactgaaggctacgtgtgctggggatgtggtataaccatgtatcctgctgcatgggaaaaagataaaaaagtcagagcctattttaaaaagaaacgccatatccaccatcgtcatgaatgtgatgctgatgctgaaagcacagtaattcgccaaggccagaaggcgagtgtccgcaacatactggacagtgctccgggtttaatgccctcgggattaaagttgatcgaaaaacgcccggttgttgaacccggtttctctggtgatgaaagtaaatccagttcgacacgttcagcatcctcacgatctggtgaaggtaattcacctgaacgacaatcccggcgtcaagtgaatgctattcgcaatatttgccgtgccttcatccgtttcccacatgaccgtggaatgtcgcttaacgttcctggtatcagtggtcaaatctacatgacagcgtttaaaaagctccggaatgaggttcaaccttacccggagccgaagatcttttatgcaccactgctctggaataaatttactgaaaatgatgaaaacctcatcattccactatctggtgaatggggtgaggataagtcaggtaaacctaaacccacccgaagctaccagatatacatcgattgggctggctggtcaaaagccaagcgtaccgtggttcgcaaagatctggaggccgcccggacagaggcgatagaagccaaaggaaaagggctgaaagataaagcttgggtcttctttatcggcgagcaaagtgcggataatccggagatcttctacgttagcgattatcgactcatctgcgcgattgtagggcatatcacttatccatga

SEQ ID NO: 92755 - DNA, 1191 bp, Enterobacter aerogenes
atggcgaattataataactattggaattactacagtaatgacttcgattggccaaacaatttttaccccccaaatttagaaaagactcgacagatttattctgaccttgggatccaaactgcagaagccgaagcactaatctcgtcaggatatgtgaatatagatggtgatataattatagatcgttactatggcggacctctagccagctcggatcttgccacacgaattcacaaaaatcattttcctgaatggtaccagatggcaaagtccggtaagacatcctgcagagatatttttttaaaaacagtaaagtcatacgacgaattaacgaggcaggttaacaaaatccaagagtccctaggggaaaacctattgtttcgtgggcagattatgcattacgagattactcgcccaatcagaaatccatactttcttatcgaagggcttggtgagacctcttttattccttctatttggcgaaatctcctgcagaatcatcagcgatcatttcatcattttaatggtcttaacttgtatgagtggtcgaagattatctattcacaattcgacattgaggaagtggatcggcgaataaatgaactgagaaaacggggtgagtggatatattcagcacaagatatggaggattcagatgatcctttggtgagtctctttggccgcgttcgattggatttgaatatgggcatggataacaatctggctgacctacttaatactctactgcagcactatggactgttttcgccgtatttggatttaagcagtgatttgcgagtggcaatgttttttgcgagtcatcgttttgctcccaattctggcaatgatcattaccaattcgtcggaagtaacggttcgaagtccatcctgtacttgtttaagcataaacaaaatgaaatggcggtgtatacacacgatcgagttcttcatggtctacagccacttcgaccgaagaggcaatcatgtgtaatctgccgatcaggtccgtacgcacttaatcttgcaggcttatatcttgttggcgcgattcgaatcgatttcgaactgccggagtctgaacgtttatcgtcgcacgagctctttcctgatgaacatgaggataattatctcgcggccctaatcgaaaattgcaagcatccagaaagagtgaccacttttcgacatcgatag

SEQ ID NO: 92756 - DNA, 1371 bp, Enterobacter aerogenes
atggaacattgtcattgcgagacgctcgaagaactcaaaatagttattaaacaatatgggccaggagttctccacagaggacaaactcaacattacctatcttcagatggctcgccctcaatgcccacgtcatttcagcgtcaagggtgcgtacccgatttgatgattatgtggacctattatgcaaagagagccttgcaacacttagtacgcggttggaatgataccggcgataatgcaaccaaccaagcaatccttcagcattatgggtttcgttcctttttccttgatgttagtggcgatccacgtgttgcagcttggtttgcatgtaataaatttgattctaagtatgtggtcaatttggtagaggattgctttgaagatccagtttggttgcgtactctaaatgcttgtttcgctccatccgaagatattggccacatttatttaataagccagaagttactacgacaatacaatcttcaggctgttcatctatccgaaattgcgacagatcatggcgctccaagatatgtgcgacaggatgcgtacatggtggggcctttaattcgtgaagggttagatggagactgtattatttgtcatatcagcgctccagcagaggttctgcgtaaatatgtggagggatatagtgttggctggctatttccagaaccatgtgaggatcctgtttatcgcgaacttttggcaatgccatgggtgaagatgcgacacctttcggatgaaggtcttgaggcgttcaagaggtcattggagttacctgagtattcctgtcaccttcaaaagcgcatgccttctagaagtgcaatgtatagacccttttggactagggaccttccgcctccggacggtttggccattatctcttcacaaatagttcagattctatgtggaagcgccctgtatcatggtgtaagtgacccttgttttgttcttcctgaaatcaataagctattagaaaagtataatgagatatcaattgaacttgatggacttatttaccatggtatggacacaagatatgggaagggcgttggaatagtaaaaatgcctgaaaatattgtatgtgtatttgaatatggtatcgatcatccagggttgcgtatcatgagtattggtcgcttctatgggatgcactatcgaatcgatagtaacggctgttgggaacgtgttattcatgaggaagactgcaagtgtggctcagaacatattgacaatatatccttacttggccgggttgatgtttccttgaggaacaagttactagaaaatatcggttcagatttatatgttcagaaaggtattgacccgacctctgacaaattggctacatggggggaaccatactag

SEQ ID NO: 92757 - DNA, 825 bp, Enterobacter aerogenes
atgggcgatgtatcaattattactaatgctcttgggcgttttgccaacaatatgcgactctatggggaagcatttttaagataccgagaattggtagcaatcgaccgtgaagaggctatccacaacctagatcgagcatttgagcaaaatcttgagggttttcatacgttatatgatgtatcacaagcgatatttgacttccatgagcatcctgagactagcctcttaatttcaattcgaaatgctcttcatcaccgtgatcatcctctattccatagccttctccagactatttggttggatgggaaacctgagcgtctacttggggctgaatatttaattgctaggcatcgaacgacaggtggcaatcctccgttgatgatgcatttgataaagttagaagatgtttatagtcgcttagatccacgcagcgaatcggactacttaaacccaatgggtaaagcaaatgctttatccagattcgtctctctggaaaatggcttggcctttgaaaaagtgtgggaaaaaacgaaagtagatcgataccccaaaaagcaagtgtatttggacttgttgccgatattcaattctgctgtttctagagtttttactgcattggataatgctggagtgttattccaagggtttgatgcaaatgcttataaatccgtatttattgaagaattaaaaactgatcttcagcattttgatttttttggtcttagaataaatgcgctacagattgagttgggtccaaaacttacaatccaagaagcttctatccgacgaggttgtacctatcaagggataatggtagacgaatag

SEQ ID NO: 92758 - DNA, 234 bp, Enterobacter aerogenes
atgacgttgttcgacgccagcctgcaggcgcacacgctcgccacgccgaaaggcgatcagcgccagtactatattcaggttcgcgatgccctgctgggcaaaatcgccaacccggtgcctccgctacaggcgctggcagtgatggcggtgctggaagctgccgttgcctcgtcagaaagcggcagcgtgcagaagctggcgttaaccgccaacgaactggccgggcttcagtaa

SEQ ID NO: 92759 - DNA, 1281 bp, Enterobacter aerogenes
atgaaactaccaactggtgttgaaatacacggaaagacaataaggattagttttatctttcgtggcaaacgctgccgtgaagttctgcggggttgggagattacaaactctaatttgaaaaaagcacataatctacggtctgttattttgggagaaattcaggcaggtaaatttgattatgccgaacgatttcctaactctaggaacgctgataaatttggctctaccaaaatacttaaaacatttaaagacctgacaaccctttatctttcatcaaaggagatagaagtttcagcagccacgctagaaaatataaaatctaaaattaccactttaacaagtgttgtaggcgaaaatacctacatcgctgaaattcaacaagtggatctactcagatatagaaaggaattattgaatggggatatatcaaaccctatagcaccctggctgaacaagaaaggcagagcagcgtcaactgtaaattccttgatgagcttgctggcgacaatgttaaaattggcataccagagtagtatgatttcacacaagccctatgaatttgtccgttcgcttaagcgtggaaggaaggagcccgatccattaatgccgggtgagtaccaggctttcatctctgccttatctcaccatcacgccctgttctggactttagcgatccatactggcatgcgacacggcgaactttgttcgctcgcctgggaggatattgatcttgataaaggagaaattagggtaagcaggaacatgactaacaaagggttatttgttccacccaaaacgattgccggggagcgtgtgatcacattgctaaagcctgcaattgatgcacttagagcccagtacaagataaccggtaatcaggagcgtcatacaattactctacattccagagaatatggtaagacggaagaacatcgcctgcgttttgtcttctgccctcaaccaaaaacaggtgcgccatactttgcaaagacctcggtggattatagctggaagaaaggactaaaggatgcgggtgttagggtacgcaatgcttaccagtcgaggcacacattcgcgtgttggttactttcctctggtgccaatcctgcattcatagcaagccagatgggacatgaaaattcgaaaatggtctacgaggtttattctaagtggataggagaacttgatggatcacaagtagatatgctgaacgagaaactaaaagacagtttgtcccaaacgcgccccatttgtttctttgtgcagtccaaagcctcataa

SEQ ID NO: 92760 - DNA, 216 bp, Enterobacter aerogenes
atggcagatattactcgtgaagatgaatgggtaatggaaaaagggcttgtagcgaagatgtatatgacccctcgtcagataaagtcatatagagaaggaagatgggtggagggtattcattttaaaaagcacccacctaaaccggatacaaccgaaggcagggcaactctttggtataactatacgaaaataaatagacttattcaggattcatga

SEQ ID NO: 92761 - DNA, 282 bp, Enterobacter aerogenes
atggttaacactcagttattagctgcacagaacaaattggttatagctcaggctattggtgaccgttctatgtgggatcaggccatgctttctatgaaaggcatctttgaagctgcgagacaaacagaggacggaatgttaaacggtcacgttaacccgctttcaatgctgaacgttgacgatgttatttgtaattacgatatgtacggcgatttaatcgtagtagatggcgatttgctattaggtatgtcgaaaataaacactgacattatcaaccactaa

SEQ ID NO: 92762 - DNA, 414 bp, Enterobacter aerogenes
atggaaatcaaacacgagcacgttgaaatggttctgctggcctgggctgcagaagttggtcaggcgttcgcggcaaatgctatcgctgaggaatatgcacgtattggcggtaatcagctgcgcctggtaccggggaaaacctggagtaaccagcagaacattttccaccgctggctgaaaggtgagaccgagatgcagcgcgaaaaaatccgtttactgcttccggcaatcctgcgcgttctcccgcgtgaaatccgtcaccgcttgagcatctacgacaccattgagcgccgggcgctgctcgcggctcagcacgctattggaacggcgattgatgcgcacgatgacgcgatcgaggccgtatacagcaaagcgtatcaacctggcgctgttgaagtaccgaaataccactga

SEQ ID NO: 92763 - DNA, 255 bp, Enterobacter aerogenes
atgtgtaaccagtctgctgctgaattgattgctcgcctaaaacgagcctatccggcgtatacgccgtctgaaggtgatagcgcttgtaatggtatccctaaagccggatcgcgcttccagcacaggcacaagggacacatggtgacggtaatcactgcgacagagaaagatgtttcctaccggaaagcctgcggtgctgttggttgggtgggattacgcgagtttttacggctacacaatgaggttttggtatga

SEQ ID NO: 92764 - DNA, 1035 bp, Enterobacter aerogenes
atgagcaatcaggtctttgaaattgttcaggccatgtcagggcaggggaactgcatcacgatccctggcccatatctggacttctttgcaggggacaggcagcaacatttgctggcggcaattctcaatcagctggtgttctggtcgggcaaatcaagcctgccaaacggctggttttacaaagagcatgcagcacttgcaaaagaagttcgggttatcgaaggggatgtggtcagacgggccatttacaaaatcactgagcaatatttgcccggtgtaattcaggaagaacttcgacaggtgaacggtaccccgaagaagcattaccgcatcgaccaggaagaactgatgctcaagatattcccgacaattctggattcggcacaagtgccgaatggaagcaaagtgttgaaagtaatggattcggcaaaagcgccgaatggaaacggcacaaacgccgaatgcattcggcataaacgccaaatccaggaatcggcacaaacgccgaatggaaacggcataagtgccgaatcctatctctatacagatcttaaaaatacagatcttaaaacagatcttaaaaaccaaggggggaaggcttcccctgtggataactcgactaagtcgaatcaggaaattgagattcaggacgctaccgaagacagcaatcttgctaccgatgaagacttcgatctcgcgatgtggttctggtcaaccatcatcgaaatgtacgaacgagcggctgaattcgacggcaccctggcgagaccaagagaaccaaattttgttggctgggcgaatgaagtacgcctgatacgccaggagcacggctgcacctacgaacaaatccgcacgatggttgagcgcattcagcgtgatcggttctggtgcccaaaaatccaatccttgccaatgctgcgcagcaaatggcctgaactggtgctgaagctgtgttctggaaacctggcaacaggtaatgcgttcggcatgggtggtggtctggatacacatatcccgaaagggttccggggttaa

SEQ ID NO: 92765 - DNA, 273 bp, Enterobacter aerogenes
atgaaaaccaaatatcgcaatgaaattacagctttcgaattcctcaagactaaccctgatttgacgtctgctgaactggcaaaagctatggggcgcggagtgtgttcaatcagtagccacatgcatcagttgcatgccataggcagagttatccagaccggtattcgcgacggcgtacccacctggcgagtgaacgatatgccgtttggttgtagcaacccgattcgaatgatgttcgacaacctgctgaaagaatgccgcgcgacggcctga

SEQ ID NO: 92766 - DNA, 423 bp, Enterobacter aerogenes
atgaacctgacaaagagaataaatctgatggaaaaaatcactgacgttttaaacgagctggggaaagtgacctgtcgtgacctggcgaagtatttcgacctttcagcccctgaaatgctggcgcgtctgctggtgctggagaaagagggcaaagctcaaaacctgaatggttactggatgactgggggtactaaagaacctgctcagctgagccataacctcaccgaactggatatgaagctgctgcactcggtcccggtaggcgtctggtttgagtggcagtcattggtcggcaccgttgatcgccctcactaccgctgcggtcgccttgttgaagctgggtttctgaatttaaaggttactaacccagattgcccgtatcacagcacgcagttcctgaagctccgggaggtttcacgatga

SEQ ID NO: 92767 - DNA, 789 bp, Enterobacter aerogenes
atggctaaaaactcaatagacgcatacggcgccagcgggaaaaccaacgtacttaactttgagcccgaaaacctttacctggtaaccgataaatcgcacccgctttacgacgagcggatccatctgccaatcaatgagccgatggtactgaacatcatggaccagggcgttcttgagccgatcatcgtctggaaagacccggagacaggtcgctcctgtgttgtcgatggtcgccagcgtgtgcgccacaccattgaggcgaacaagcgtttagcgaaagagggtaaaccgctgctgatggttccagcagtcactaagcgtggttctgccgttcgtatggcacaggcgatggtaagcgctaacgaaatccgccaggcagatacgccgctgggccgcgctaaaaaaatggctgatgcgctggaacgtggacacgacgagcaagacctctctctgatgtttggctgtagcgttcagaccgttcgcgcaacgctgtcactgctggacgccacccaggctgtaaaggatgccgttgaatccggaacagtcaccgtcacccaggctcgtcagctcgcatcactggaaccagaagcccagcgcgagaaggtgaaagagattgaaacggcaaccgcgggtacctctggtcatgaaaaagcccgtcggcagcgtcaggttctgggcgacgctaagccacgtctgaaaacccgtaaagaaattaccaaagccctggaatctgccgagggcgagtatgccagcgctctccgctgggtacttggggaggatgtagcatga

SEQ ID NO: 92768 - DNA, 561 bp, Enterobacter aerogenes
atgacagatatcaaccgactgattgccagtctcaagcgccgttcagcccacgtaaaagaatttggcgacgatgttacgtttgtaaagttagaagacctcgacgcgctggtagcaactatcgagaagagtcgtgaagcatcgggatgcccggctggcgtagacctgcaggactgggtgaagcagctggcggcggagagtttaacgatgattcgcttgctgactgatataagcgagaaccacgttgaatacctctccgagggcgaaggctacatgttcgcgggtgtcccgctggattatgtatccgaaattaacatgtacgtttcccgcgacgttaacgctgaaaaccctttccccgcaaccgacgcttatcttgccggggttaaggctgatgcgattactgcgtctttggatgcctgctctgactatctcgatacagactgcgttatggataggctggatatcagctacgaagacaccgagaagcgaacctcaggggcaatcgagtttcatgatgcgatgttcaattttgcaaaccagctgcgcgagggggccgacaaatga

SEQ ID NO: 92769 - DNA, 285 bp, Enterobacter aerogenes
atgagccatgctatcgatgcacatctcactgacgaagtgataaacgccgcattcgaaaacactaatttcgggcgagatgactttcgcaccattctggcggaaaccgttatgaagctagccgccggttatcactctggctggacggcgacgaccatttgcactcgcctcaaactgctgggtaaacaggagcggccaacaaagctcggtctgacgttcgcctttcaccactactaccggcagagcgtccgcgatgcgctgatgccaaaacaggagccttcagcatga

SEQ ID NO: 92770 - DNA, 432 bp, Enterobacter aerogenes
atgactgatatcaccgaactggcaacagtgttgcgccttgctgctgagtctgaaattgcataccgggcagaaagcgacacgtcagatttatggcaggacgaagcgagcccggagaacatcctcgcgctggtagaggcgctggagaaggcgcagcagcgtaacaccgagctggagaattacgcagaggctgaggcggtcggagcagacaaagctgcggaagatagcgtgtattggatgaatcgctgtaaagagatggagtcccgcaccgtcaccgtgaagctgccgccaaaaattgagcgtaacgatgtcgacggctggtttatgtacaacggcggtcgtgtcggtggcggcgctgctgagtggtacaacaaggcgctggatgatgtcggctcagaacttaccggcgctggcatcaagtgggaggctgagtga

SEQ ID NO: 92771 - DNA, 426 bp, Enterobacter aerogenes
atggcactgaccaaaaaacagcgcgcagagctgcgcatgaagtttggcggccgctgcgcttactgcggatgcgaactgccggagaaaggctggcacgccgaccacgtacagcctgtggcgagaatctctgagcaggacatgaaggccgccgaaaaaggaattttcaagcttaaagccacgggagaggtgcggaatatctacgccgacaccctggaaaatcagtttccggcatgcgctccctgcaacctgttcaaaacctcttactcgctggagatgttcagaaaacaaatctccctacaggttgagcgggggagaaagagcagcgtcaatttccgcactgcagagcgcttcggcctagttgaagtcgtcgaaaggccggttgtgttctggttcgaaaaatatcaggcagaaggagccaaccaatga

SEQ ID NO: 92772 - DNA, 1122 bp, Enterobacter aerogenes
atgaccaaatcaaccataaccagagagcgagttgtcgctctcatcgcagagcactcttacgatagcgcgttagttgatgctcttgaacatctgctggccgcaatggacagcgagccggtggcgtggacagatgaacaggagttgcgagacgttgatcgtggtggttgcgggtaccttttcactgttaaccctgttactccgcatgcagacgagcgccgaattattctgctctatcgccacgcgcagccagcgtcggaacgtgagcaggtgcgtcaggagcacgccgagtggtcacagaccaccttcggtaatgttgggccgattggcccactgaagcacctcagcaaagaagcactggaagccgctgaacagcctgacgacctctcggagtgggcagatatgcaattcctgttgtgggatgcacagcgtcgtgcaggcatcactgatgagcagattacgcaggcaatgattgaaaagttggctgtgaacaaacaacgcgaatggccggagccgaaaaacggggagccgcggttgcatatcaaagcgcagccagcgccggtaacagagcgtgagcctatagcgtggctaaatgatgcgtatttagctcgcggtgtagttgatggtgaggctggtagcgaagatgcaggccccggatatattcctgtatatcgtgaagcgcagtcagtgccggtagtgcaatgcccattcccttgtggctgggataacctgaataaactagccattcaggatgctgcgcttgttgctcgtggtttagttgaagatgagctaactaccgaggcgcaacgccaggccgccatattgaacaatgaccgcctgctgaaagttatttccgcctgccgcgccgccatgctccaggctggcaactgtcgggaaaacgagaattcgtcaaccaacaattttcgggaaatcgcggaaacgtcaaccaactcttcggtaattccggatggttacgtgatggtgccgaaggagcctaccgcagaaatgcagtcagcgggagccagtgctatcagaatcgaaactaccgcgctgaataagctatggactggaaatgccgtgttccgagccatgctcgcagccgccccgcaggaggtgaaaccataa

SEQ ID NO: 92773 - DNA, 1428 bp, Enterobacter aerogenes
atgagacttattgttaaaaatatcttggtaagtacaacccttgccttgtcagattttcttgggtttattatttcgccatatctggcgatgtttttcttatctatggttctgagtgattatcagcatatcgttcctcctaaggatatagagggatggttaggattacattggttgctcgggttcggttgtgttgcttggtattcagtacgtctgcgtcattatttttatagaaaaacattttggtttgaacttaaagaaattctgaggacgctggcgatttttgcagttattgaaattgcagtcatggcatttacaacgtggtcgttctcaagatatctatgggtgatgtcttggttattgatatttattcttgtacctttatttaggatggtgactaagaaaatattaaatatgactggcctatggatgcgagatacgtggattatcggcaacggaaataatgcttacgaagcttataaagcgataactagtgagcgtaatttgggattgaaaatcgtagggtttgttgaagtgtcaaaacctatggtcacagaaaaatataactttgatgttccaatcattcgggcagatgctgactggctaaatgatattgataaaaaaagtcagtttatcgttgcggtagagaccacagagagcgaagaaaggaatatgtggttacgaaatttcatgattaaaggttatcgatatgtctcggttattcctaccttgcgagggatgccgttagatagcaccgatatgtcatttatttttagccatgaagttatgattttccgcgtacaacagaatttagcaaaatggtcctccaggctcagtaagaggttatttgatatatttggagcactgtcgataattattgttctttcaccgctattaatatacatcagtagaaaagtgaaaaaggacggtggtccatcaatttatggacatgagagaatagggaaaggagggaaaccattcaaatgtttgaaattcagatcgatggtaattaattccaaggaggttcttgaacatttattaaataacgatgctgctgcaaaagaagaatgggataaaacttttaaattaaaaaatgatcctagaataactaaaattggacattttttaagaaaaacaagtcttgacgagttaccacaactgttcaatgttctcaagggagagatgagtcttgttgggccgaggccaataatcactgctgaacttgagcgttataatgatgaggtcgattattatttactcagcaaacctggcatgacaggtctgtggcaggtgagtggtcgtagcgatgtagattatgagactcgtgtatacctcgacgcctggtatgtaaaaaattggtcaatgtggaatgatatagcgatcttatttaaaactgtaggcgtcgttttgaaaaaagatggtgcatattaa

SEQ ID NO: 92774 - DNA, 939 bp, Enterobacter aerogenes
atggtgcggcgtatgaagttgctttgctctctggtgatgatgttggccagccacagcgcattggcggtaagttatccgttgccgccggaagggagtcgtctggttggcagcccgatgaaaattaacgtgcccgagcgtaatacccagccgctggaaacctttgccgcgcagtacgggcaggggctgagcaatatgctggaggctaaccccggcgtcgatgtctatctgcccaaatcgggaagctcgttgattatcccacagcaattgatcctgcctgctaccgtacgtagcggtatcgtgataaacgtcgccgagatgcggctttattattatccgcctgagggcactaccgtcgaggtcttaccgatcggtatcggtcaggcggggcgcgagacgccgcgtaattgggtgacggcggtggaacgtaagcaggaagggcctacctgggtgccgacggcgaatacccgtcgcgagtatgccaaagaaggtaaaaccctgccggcgatggtgcccgccgggccagataatccgatggggctgtatgctatctatattggcaggttgtatgccattcatggaacgaatgccaattttggcattggcctgcgggtgagccagggctgtattcgcctgcgcaacgatgacatcaaatacctgttcgataatgtgcccgttggcacgcgagtacagattatcgatcagccggtaaaatacacgactgaaccggacggtagccgctggctggaagtgcatgaaccgttatcgcgtaatcgcgctgaatttcagtcagaccgtaaagtaccgctgccgtataccccggcaatccgtgagtttgtacagggcgcgggcgtgaatgtcgggcgcgcggattcagcgttacagaggcgctccgggatgccggtgaatattagtcgttcagcggtggaaagcagtttttaa

SEQ ID NO: 92775 - DNA, 975 bp, Enterobacter aerogenes
atgtctgaagacctgggggaaaaggtgaatttccagcaactaaaaattattcgcgaggcggcccgtcgggattacaacctgacggaagtcgctaatatgctgtacacctcgcaatctggcgtcagccgccatattcgtgagctggaagaagagctggggatagaaatctttatccgccgcggtaagcgtcttctggggatgaccgaacccggtaaagcgctgctttccattgccgaaaggatcctcaacgaggccagcaatgttcgccggctggccgatctttttaccaatgacgcttcaggcgtattaactattgccaccacgcatactcaggcgcgttatagcctaccgccggtaattaaagcttttcgcgaacttttccccgaggtgcgtttggaactggtgcaagggacgccgcaggaaatcgaggcgttgttgcacaacggcggggcggatattggtatcgccagcgagcgcttaagtaacgacccgacgctggtggcattcccctggtttcgctggcaccacagtctgttagtgccaaaagatcatccactgattgaggttgcgccgctcacgctcgaggctattgcgcgctggccgttaattacctaccgtcaggggatcaccgggcgctcgcgtattgatgaagctttcacccgtaaagggctgatgccggatatcgtcctcagcgctcaggattccgatgtgatcaaaacctacgtggagctgggcttgggcgtggggttggtggcggaacaatccggcgatgctcgcgaagcggatacctttacccggctggaaacacgccatctctttgatgccaataccgtttggttggggctcaaacgcggtcagttacaacgtaactacgtctggcgtttcattgaactgtgcaatgctggactatcgctggatgagattaagcggcaggcgatggagccggaggaagtggcgatcgattatcaaatctga

SEQ ID NO: 92776 - DNA, 918 bp, Enterobacter aerogenes
atgaacttaagacgactgaagtattttgtgaaaatcgtcgatatcggcagtctgacccaggccgctgaagtcttgcatatcgcacaaccggcgctgagtcagcaggtagcgaccctggaaggtgaactggagcagaaactgctgatccgcaccaaacgaggcgttacgccaaccgaagcggggaaaattctctatacccacgcgcgaaccattttgcgtcagtgtgaacaggcgcatctggcggtacataatgtgggccagacgctgagcgggcaggtggcgattggccttgcgccgggaacggcggcttcggcgatcaccatgccgttgctgcagaccgtgcgtaatgagcttcccgaggtcaacgtctatctgcaggaatgtagcggcagcgttttaaatgacaagctgcttggcggccaactggatatggcggtgttgtacgaacgttcgccggtagcgggagtggtcagccagccgttgctaaaagaggatttgtatctggtcggcacgcaaaactgcccgggacaaagcgttgatctctctgcggtggcggagatgagtctgtttttaccgcgtgactatagcgctgtctgtgccagggtgacggaagcctttaccttacgccgcctgtcggcaaaagtgatcggcgagatcgaatccatcactacattaactgccgctatcgccagtggaatgggcgttaccgtactgccggaatcggcggcgcgttcgctgtgtgctacggcaaatggctggatggcgcgcatcagcacgccgtcgatgagcctgtcgctctcactgaatacctcggcgcgcggcggtttatctcctcaggctcaggcggtcaaagatatcctgctgtcgctggtcagccgtccttcgttggagaatcgtgaattacagctggtcagttag

SEQ ID NO: 92777 - DNA, 273 bp, Enterobacter aerogenes; identical to SEQ ID NO: 92299

SEQ ID NO: 92778 - DNA, 1587 bp, Enterobacter aerogenes
atgctccacgttccccgcctcccggctggcacggcggcgctccacgtccaccctgatttccccggtctgccccgccgcccactgcgcggactccaggctggccgcccggtaaaaccagcggatcggcgtgttatccagtaccgtggttttcacaaattcagcgggcagatcctgcccgcactgcccgaaatcgcccagcgactggtgcgcgagcaacagattgcagtcccggctgcgcagcgtccccagtgcgttcagtacatacttcgacagcagatatttaatttcatcgagcatcacgctgacgtgtggccactcccggaactcgtcccgcgcaatgatgatttgcgcgcagcgggcaaacagcattttttgcacacggatcaccgcctcgtcgtccatcgagccgataacgtacaggcagccgccgccgttgataatccccgccacatcgatgccactgtccgtctgcaggacgctcaggtcagcgacgttttccagcctagtgatcaaccccttcacgtcctttttcagggcctccggcagcgcgtacgccgccgccagcacctgctgaatgtttgccccctgcggaaactgctccgcaatcagcttcgccgctttctgctcgctgatgcggtagtggtccgccacgtcgccggtctcgcccaggttaagcccggcaatcagcaggtttttcagcgcgtactggtcgagatcgcggaacagattcagctgcgccggtttccccggccgcagatccagcagggtgaagtccggacagtgcgcccggaagacgtgcggcgcccatgcgtcccctttggggtcgaagtacaccaccgcgtccccgaaatcgcgtacgcagcgaatgagcgcgttggtggccatcacgctcttgccgctcccgggcaggccgaggatctgaatgttggtcttgcgccaggtatcacgcggaaccagcaccggcttgccctgctcatccttacccagaaacaccgcctgctcctgccgggcctgctccgaggaaaaatcggccagcgcattaaccggtaccggctccccgaaatgcaggtggcgcacgtcggtcatctctcctgtccgctggctgctgcgccggctctcctgattcagtttcgcgttcaccgcctcgtcagcagccgcaaaatgaccgtcaagcagcaggaacgccagcagccgcgccaacacaatcccgacagccagcccgcccgcgcaccaggcaatcccgaacaggttagccggctgcagcaggtaataatctgcgtttgcgtagaggtccggacgcaggacggtttctccccagctctcgataaacacggcgacaaccagcccccccagaagggccagaccggccgcgccggtcagccagtacgcgtagttccagacatgtcgacgtgccctgaccatccgcccgggcgaatccagcgaggccagcaccgaaaatggcgctggccgtttattatcgcgcttatagcgatcggcatactcccgtcgctccttatgactcagccccacaaaacgcatccgtccggcccaaagttcagccagaccgaaaaacaggccgataactag

SEQ ID NO: 92779 - DNA, 678 bp, Enterobacter aerogenes
atgtctactccagctaactttaacggttctcgtccggtgattgatgttaacgataccgcgatgctgttgattgaccaccaaagcggcctgttccagaccgttggcgatatgccgatgccagaactgcgcgctcgcgccgccgcgctggcgaaaatggcatcccttgccgggatcccggtgatcaccaccgcttccgtgccgcagggtccgaacggcccgttgattccggaaattcatgagaatgcgccgcatgcgaagtatattgcgcgtaaaggcgagatcaacgcctgggacaacccggagtttgtcgccgcggtgaaagcgaccggacgtaaaaccttaatcatcgccggtaccattaccagcgtgtgcatggctttcccggcaattgccgccgtcgccgacggttataaagtgtttgccgttatcgatgcctccggtacctacagcaaaatggcgcaggagatcaccctggcgcgagtagtccaggccggcgtagtaccaatggataccgccgcggtagcctctgaactgcagcgcacctggaaccgtccggatgccgccgagtgggctgaggtgtataccaaagtcttcccggcgtatcagttgctgattgaaagctacagcaaggcgcaggacgtcgtgaagaacaacgaaaagctggattcccagcgttaa

SEQ ID NO: 92780 - DNA, 861 bp, Enterobacter aerogenes
atgaaacagattactggcgtttacaccgccccttcgcagcactgggtgggcgacggtttcccggttcgctcaatgttttcttaccagacccacggcgaacaattgagcccgttcttactgcttgactacgccggcccgcacacgtttccggcgggaagcggtaaacgcggcgtcggcgagcatccgcatcgcggattcgaaaccgtcaccattgtctactctggtgaagtcgagcatcgcgactcaaccggtagaggcggcgttatcggccctggcgacgtgcagtggatgacggctggcgccgggatcctgcatgaagagttccactccgaagcgttcacccgctccggcggtgaactgaaaatgatgcagctgtgggtcaacctgccggcgaaagacaaaatgacgaccccgggctatcagagcattaccgcagacgtcattccgcaagcaacgctggaagacgacgccgggaccgtcagagtgattgccgggcgttacggcgatgtcgccggcccagcgcacacattctcaccgttaaacgtgtgggatatgcagctcaaacaaagtcacgatgtgacattgcatcagccggaaggctggagcaccgcgttggtcgtactggaaggtgaagtcaccgttaacggtacggaaaacgcccgggaaggacagctggtggtgctgagccagaaaggcgaagccttccatctggaagcgggctccgacgcgaaagttctgctgatggccggcgagccgctgcaggagccgatcgtgggctacggcccgtttgtgatgaataccaaaacgcaaattgccgaggcaattcgcgattttaacagcggccgttttggccaaatctaa

SEQ ID NO: 92781 - DNA, 906 bp, Enterobacter aerogenes
atgcaggatctcaacgacctggcctggtttgttcaggtggtcgaccatggcggttttgccgctgccggtcgggcgctcgaccagcccaaatccaaactcagccgccgcattgcgcaactggaagagcgcctgggcgtacgtctgattcaacgaaccacccgacagttcgccgtcacggaagtcggccaaactttctatcaacactgcaaggcgatgttgatagaagccgaagcggcgcatcaggcggtagaaacgctgcagtctgaaccgcgcggcagcgtcaagctcacctgtccggtaaccctgttgcatgcccatgttggcccgatgctggcgcgctttatggtgcgatatcctggggtgacgctacatctggaagccaccaatcggcgggtggatgtggtgggcgagggggttgatgtggccattcgcgtgcgaccaaggccatttgaagatagcgacctggtcatgcgggtgttggccgatcgcggccatcgcctggtggcgagtccggcgctgatagccaggcttgggcgcccgcaggcgccggcggaattgagcacctggccgggactaagtattggcgccggaaaacatcagcataaatggcaacttaccgggccagagggggcgcgggccgaggtttatttcacgccgcggatggtgaccagcgatatgctggcgctgcgcgaggcggccatggcgggcgttggcgtggttcaacttcctttattaatggtgcgcgatcagttggcatcaggggagttggaaatcgtgcttgatgagtggcagccgcggcgggaagtcattcatgcggtgtttgcttcgcggcgcggtttattaccttctgtcagagcgctggtggattatctcagcgaagagtatcaacggatggaagaggattag

SEQ ID NO: 92782 - DNA, 1332 bp, Enterobacter aerogenes
atggtgaaggagcgtcgcactgaactggtcgagggattccgccattctgttccctatataaacgcgcaccggggaaaaacgtttgtcatcatgctgggcggagaagccatcgagcacgataacttttccagcatagtcaatgacattggcttattgcacagcctcggtattcgcctggtggtggtctatggcgcgcgtccgcaaattgacgctaatctcgcggaacaccaccacgagccggtttaccacaagcagacccgcgtcaccgacgccaaaacccttgagctggttaagcaggccgccggtatgctgcagttagaaattaccgcccgcctgtcgatgagcctcggcaatacgcccctgcagggggcgcatatcaacgtggtgagcggcaattttattattgctcaacctcttggcgtcgatgatggcgtcgattactgccacagcggccgtattcgccgcatcgatgaagaagccattcatcgccaactggacagcggcgcaatcgtgctcatgggcccggtcgcggtatccgtcaccggcgagagcttcaacctcacttctgaagagatagccacccaactggcggtaaagctgaaagctgaaaagatgatcggcttctgctcgtcgcagggggtctacgaccagcatggcgagatcgtttccgagctgttccctaacgaggcgcaggcgcgggtagaggagctggaagcggaagaagattataattccggtaccgtacgcttcctgcgcggggcggtgaaagcctgccgcagcggcgtgcgtcgctgccatttaattagctatcaggaagatggcgcgctgctgcaggagctattctcacgtgacggtatcggtacgcagatcgtcatggaaagcgccgagcagatccgccgggcaaccattaacgatatcggcggcatcctcgatcttatcagcccgctggagcagcaaggcattctggtgcgccgctcgcgcgaacagctggaaatggagattgataaattcaccatcatccagcgcgataacaccaccatcgcctgcgccgcgctctatccgttcccggaagagaaaatcggcgaaatggcctgcgtagcggtgcacccggattaccgtagttcgtcacgcggcgaggtactgctgagccgtatcgccgcccaggcgaagcagatggggctcagcaagctattcgtgttgaccacccgcagtatccactggttccaggaacgcggcttcaccccggtggatattgatttgctgccggagagtaaaaaacagatgtacaactatcagcgtcgttcgaaggtattgatggcagacctgggctga

SEQ ID NO: 92783 - DNA, 1254 bp, Enterobacter aerogenes
atgtcgggatacaagtcgggattaagccgccgtcgttttttacaaggggcgggcgccatgtggttaatgagtgtgagtccggtcggtttggccgccgccgcgcaggtagtcgcggtgcgtatctggccgtcgtcgacttacacccgcgtcacggtggaatccaatcatgtactgaaatatcggcagtttgcgttaagcaatcctgagcgagtggtggttgatattgaaggcgttaacctgaattcggttctgaaagggatgggcgggcaaatccgcgacgacgacccgtatatcaaatccgcgcgcgtgggccagttcgacccacagaccgtgcgaatggtgtttgaactgaaacaaaacgtcaaaccgcagctgtttgcgctggcgccggtcgccggttttaaagagcgtctggtgatggatctttatccctctacggccaccgatgtgcaggatccgctactggcgctgctggaagattacaacaaaggcgatctggaacgtcaggtaccgccggcagaaagcgggccgcagccggggaaagccgggcgcgatcgtcctatcgttatcatgctcgatcccggccacggtggtgaagactccggcgcgattggtaaataccgaactcgtgagaaagacgtggtgctgcagattgcccgtcgattgcgcgcgctcattgagcgtgaaggtaatatgaaggtctatatgacccgtaacgaagacgtgtttattccgttgaaggtgcgtgtcgccaaggcgcagaagcagcgtgccgacctgttcgtttcgattcacgccgacgcctttaccagccgtcagccgagcggctcttcggtgtttgcgctctcgaccaagggcgctaccagtaccgccgcaaaatacctcgcgcaaacgcagaatgcctcggacttaatcggcggcgtcagcaagagcggcgatcgttacgtcgaccacaccatgttcgatatggtgcagtcattgaccatcgccgacagcctgaaatttggtaaagcggtgttgcaaaaaatgggcaatatcaacaagctgcataaaaatcaggtggagcaggcgggctttgcggtactgaaggcgccggatattccttcgattctggtcgaaacggcctttatcagtaacgtcgaagaagagcgtaaactcaagaccgcgaaattccagcaggaagtggcggagtcgattctggcggggatcaaagcctactttgccgatggggcgacgttggccagacgtggataa

SEQ ID NO: 92784 - DNA, 1113 bp, Enterobacter aerogenes
atggtaatagcttattgcatatttcgccatcgacttaagttgcctcctccgcagaagtatctcttaatttttatattttatttactggtatcgttcctcacaatgatgttgtttggcgggatagaatatcaagaatcaagtccctatttaataagaatggtttctttatatgctcctgtttttcttgtgccatatttaagtgatgatgaaactcagtttgttaagtttggtaaagtatttgtagttatatcgttaatagctacagttgttatcattgcattatatatttcaggttggactggcgtcagtgcgcatcagacgacggaaagtgacgatggtttgacggttaatcgattaggaggtttgcctggtgaatcgggggcctttgcatataatattttatttgtattttatatgtcgcttatcgtatatcttgttgcggaaagaaaatggataaagaaaatagtcatgtttggtggcactctcattgtgctatttttatcatttaaatacagtcttgcacgagtaattgtaatttgtgctggagccgtgattctatgcggctatttttttacatcgatatctattgtaaaaaaatactttctctttctttttacatttctagtatgcagtacttctttgttctttgtttcacctgattcacttgatttatcgaaatatagattgtcgaacgttgcaagtactgatatgaattctgtttcatcaggccgggtttcacattggatagatgctgtagccttatatgcagaaagtcctttcaatgttgtttttggggtaggacatcgtatgtccgtacgattccttggtcatgcggtagaaaacttttttatccagaacctccttgattatggcattgtaggcactattctatttgttattttcttatggtttctactcaaacctattatcaaaaacgcaaaaacaaaaaatggaatttcagttgcaattttattagtttttacaggtatctttttacaatggcaatttaatgatatcaatacatattatcaaacatacccagctactttattcttcttaagttggtggagccaaatttgtcgaaaacggaacgctaccgttgacaatatttaa

SEQ ID NO: 92785 - DNA, 1026 bp, Enterobacter aerogenes
atgtctgagagaataaatttctcagtacttattgatgagactaataaaaaatatgagcaagaacttctcaaggctggcattagcaatgaaagaatcattaaagtaaaaacatgtacagttggtgggcgggcgttaggaggagttaaattgttcacaacggtgttgcaagaggcaagtagattccatattgtccattgtaatactttctatgatggtctttttgcaatgcctgctgcaagattacgtgggaaaagaacaatattccgagccagatgcgggattgaactatcaaatcacggcataatcgataatgtcatttatcagttttcaacaaagattttagccaactcagactatgttaaaagtacttttagtagggtttctaaagatctaagcaaggttatttcgttatataatcctttggatatgaagtttaaacgagatattgctatctgcaatgctagccccaaaggtgatcttgacaggaattatgttattgctgtaatcggcgctattactgaagtcaaaaatcaaatggaagtgcttagagccttttctaaacttaaagatgcatcactaaaattgaaattcataggtgagccaagaagcactgaaaaagataagcaatactataacgaactattaaaatatgcggaagacaataatcttgcttctcaagtcatatttactggttttgtttcagatgtgagagagaagcttaatgatgtagatttagtctgcgttccgtcagatcgggaaccacttggtcgagttatttttgaaagccagttatatggtattcctgtattagcttctgactctggtggaaactcagaattaattgagaatggagttaccggatatttgtactctttaggtgatatagacgagctcgctatgaagctcttagtggcaaaagaaaataactacaaactcgctattaatgcccaagaatttgtattgcagcgattttcaccagaacgaacgtatcttgaagagcttaatctttatagctcaattaaataa

SEQ ID NO: 92786 - DNA, 243 bp, Enterobacter aerogenes
atgccgatgcagccgaaccagcgcaccactttcatccagcccagtttctccgccacgataccccagaagacgttggagaagatggtggtgaagaagaacgccgcccacacctgcagccattcggaagtggtgaagccaagctcatcaacgaacatcatcggcatgaccaccgcgaagccgaacagcgacagggtgttgataatgcgcacgatgctggagagcataatgctgcggttggtgtag

SEQ ID NO: 92787 - DNA, 996 bp, Enterobacter aerogenes
atgccgtctgacttcgacgcgaaagctaacgagttcatcgctaagctgcaggcgaatccggcgaagatcgccagccgtaaagcatcgcagaacgccatcgaagcgtttggcccgctgctgccggaattcctcggcggttctgccgacctggcgccgtccaacctgaccctgtggtccggctctaagccgatcaacgaagacaccgccggtaactacatccattacggcgtacgtgaattcggtatgaccgcgattgccaacggtatttcgctgcacggcggtttcctgccgtacacctctaccttcctgatgttcgtggaatatgcgcgtaacgcggtacgtatggcggcgctgatgaaacagcgtcaggtgatggtctacacccacgactccatcggtctgggcgaagatggcccgactcaccagccggtagagcaggtggcttccctgcgcgtcacgccgaacatgtccacctggcgtccgtgtgaccaggttgaatccgcgattgcgtggaaatatggcgtagagcgtcaggacggcccgaccgcgctgatcctctcccgtcagaacctggcgcagcaggagcgtaccgcagagcaactggcaaacgtggcccgcggcggttatgtgctgaaagattgcgccggccagccggaactgatcttcatcgccaccggttcagaagtggaactggcggttgccgcgtgggacaaactgaccgctgaaggcgtgaaggcgcgcgtggtctccatgccgtccaccgacgcgttcgacaagcaggatgcggcctatcgtgaatccgtactgccgaaagccgtttctgcccgcgtagcggtagaagccggtatcgcggactactggtttaaatacgttggcctgaacggcgccatcgttggcatgaccaccttcggtgagtctgcgccggcagagcagctgtttgaagagttcggcttcaccgttgacaacgttgtcgccaaagcgaaagcactgctgtaa

SEQ ID NO: 92788 - DNA, 750 bp, Enterobacter aerogenes
ttgatacaatcagggggaacattccccatagcaatgtatatctggaccttattctgtaaaaagaaaaaaattccaatttatattgcaggcgtcgggtgtgctgaaaaattttccaagcttgatatttggctatataaaacatcatttgaacgggcttcgaaaatttatgttagggatatatcgtcggttgaaaagctcaaaagaatattttcaacacattcagagctgattcctgacttagcttatgcgctatatgacaaagaaaaatattcttcaaacaaaaaagcacaaacattaattggctgtacttcttattatgtttatgaaaaaaacatcaaagaattatcactgaaaaatggcctaagttattcggaatatattagtaagtggcaggatattgcattgtctgagataaaaagcggtaaagctatagtgctagcatctacgacggttcaagatgccgtacttaataaattagtttacaacaaactagttgagttgggctattcatcaagcgtatcgcacatagatgatatacctacaacatttgaatatttagctatacttcagaatgttgataaagttatatcgggaaggatgcatagtttaatacttggccatatatctggttgtaaaatagagactatcgatattaataaaaagattgatcattttatgctggagtattcagataagtctccttgtgaactaaatgttaatcttaataataaatttaaaaatataatctaa

SEQ ID NO: 92789 - DNA, 570 bp, Enterobacter aerogenes; identical to SEQ ID NO: 92007

SEQ ID NO: 92790 - DNA, 699 bp, Enterobacter aerogenes
atgcaaaaaacgctatcagcgcttaaagacaaaattaacaacgcgttaattgtcgaccgtgaaaatcatatttaccgttgccaccgctctatatttaccgaccagcagttatttgattttgaaatgaaacatatcttcgaaggaaattgggtttttcttgcccatgaaagccagattgccgagccgggagattattataccctgacgctgggacggcagccggtcattattacccgtgataaaaagaatgaattgcatgcattaattaatagctgcgcccaccgcggcgccatgttatgccgacgcaaaaccgggaataaaaattcgtttacctgtccattccacggctggaccttcagcaataacggcaaattattaaaagccaaagatgagagcaccggcgcctatcctgacaccttcaaacatgaagggtctcacgatctgcaaaaactgccgcgttttcagtcttaccgcggtttcttattcggtagcctcaatgccgacgtgcagccgctggaggcgtatctcggcgaaaccagcaaaatcatcgatctgatcgtcgatcaggcgccggaagggctcgtcgagctacgtttacgaaggcaactggaagctgggcgcggagaacggcgccgatggttatcacgtcagcgtggtgcactggaactatgcctcaaccatgtcacgccgcaactatga

SEQ ID NO: 92791 - DNA, 798 bp, Enterobacter aerogenes
atgagcgacaatacccccactacgctgagcgccaggcaggccgagcacgaccccaattttatgctgtctctcgcccgcgggctggaagtgctcaatgcttttactccgcagcgccagcggctgaccatttcgcagttaagtcaaaaaacgcaaatttcccgcgcggcggtgcgccgctgcctgtataccctggcggcgctggggatggtgcacagcccggacggccgcagctatgaactactaccgcgcgtgctggccgtgggccacgcctatctggcgggaaccccgctggcgaaagtggcgcaaacggcgctggataatcttggtaagacgttaggagaaagctgctccgccgccacgcttgatggcgacaacgtgctgtacattgcccgcgcggcggtcaataacttactgagcgtcgatctgggacgcggcagtcgcctcccggcatggacgacttctatgggacgggtattgctgagcgcgctgccagaagaacaacttgaagtgacactgtcacgcgcgcatcttatgcgctacaccccgcataccctgtgcgaccccacggcattacgcgcggaaatagctaaagttcgcatgcagggctatgcgctggcggacaggcaaattgaagttggattatgctcgcttgcggtaccgctgctgtcgcgcagcggccaggtggtggcagcgctcaacgttggcgtccccgcctcttcgatgagcgccgcggcgctgaaggagaaagccctcgcgccgctgcgtcgcgcggcgatggagctttctcttcagctatga

SEQ ID NO: 92792 - DNA, 240 bp, Enterobacter aerogenes
atgtacgtggaattagtttatgacaagcggaatgtgcaggggttggcgggagctcagcagatcatactgactgagctgacaaagcgagtacaccggattttcccggatgcagaggtgaaggttaagccgatgcagacaaacgcgttaaacagcgactgcacgaaaacagagaaagaacggcttaaccgtatgcttgaagagatgtttgaagaatctgacatgtggctggttgaggaataa

SEQ ID NO: 92793 - DNA, 396 bp, Enterobacter aerogenes
atgccggtaactagtaatcaaattcttgatacggcgtgtttatgtcttactgagaatattgaaagtgggttcaggagcgccatttcaagggcttattacagcatgctgcatgaatctattggttcgctaactgcgctaccgcattttacccatgatcatcacaaaaataccgtgggttatatgtctacgccttcagagtgtaaatctgagccatttccgccccaaaaacttaaatcgctagcttttgtacttcgacagtggcgagatgcacgtaatgaagccgactatgacctggtaggtgtgactgtttcaaaagatatggggcaggatgcaatagaggctgcaaaaatatattttgagcgttggcaagagttgaaatctgcgaaagcatcctaa

SEQ ID NO: 92794 - DNA, 774 bp, Enterobacter aerogenes
atggcggcaggaattccattagaaaaagcgcaaaagtatgctgagcaattcaatgcgcttctactggctcatgaaggtatagaccccttcacagaaaagagaattagagaggagctctctggttctcctacgcctgccaccaatatcgcgctatgttatctggatgcaataaccggaaagcttgagaacgctctacgctatcttaggctgtgtctggaagtggatgacgtaactctggcgatgcattaccatcatattctcctgcaaacgtttagctatactgaactcagtgatgtatgtttcctccttgctgataagtaccgcaccaagattttcagctataacgcatatagttgggcatatcgtttcggtgagagagagcagctagaattttatatggaagagcatatccggcttctttcagaatcagagggcaggagtaaagctatgaagcataaagaagaactccttgcggaaatggatagtttctacagcgctacgcattgcacaaagcatgaattccatacccttgcttcaataatctgggagctgttgagcgagtataaagctatgacaggttttattcagcttagtggcagtgggtgctacgttgtcgatatcaataatttagatcctaaagctatagctaagatgaactttgaccttgctgatagagtttgcgctgaatcagcccttgatgattgctcattgttagctagatttagctctccacgccaactacatacaggggtgagctaccatgccggtaactag

SEQ ID NO: 92795 - DNA, 333 bp, Enterobacter aerogenes
atgaaacgattctgtttggcgttagcaatgatggttactgccccggcgatgtctgccattcagtgcggtaattacacaatgaccggtgacgggatgacggtcattaacggcgaaactgtcacatctcagaaagtaaaatttctgggaaaagatggtgactactcaaacatgaaaatggaaatgggcctgatgccagcacgagacgggaacaattatggctttgagtttgttaaacgtagcggaaaagctttcctgaacgttcagttactgcaaaacagcatggatgcgccaaagctgattggttcatatccgtgtaagaaagtactgcgctga

SEQ ID NO: 92796 - DNA, 453 bp, Enterobacter aerogenes
atggaatgcacgattaaaggcgtgaattaccgcgccaataagctgggcgtatttgaacagttgaaggtatcccgcaaattattaccgatcctcgctggcctgatggctgacttctccagtatcaaagcgatgctacccgcaaccaccaagcttgacagcggcaatctggataagctggagccagtttttaacacgctgcttccgcgtatcgctggcgaactgtcaaaactcaccgaagaagacacgaacgccattatccatccgtgtctcgctatggtggtgcgtgaaaacggcaagcaatgggcgccagtcttccgcagtggtgagttgatgtttgatgacatcgatctctttgacatgttgcaactggtggtgcgggtggtcgccgatagcctgggaaattttttgccagaactccccgacaacgcgacgcccaccccgaaagtgggctga

SEQ ID NO: 92797 - DNA, 441 bp, Enterobacter aerogenes
atggctgcttattcgtttcttgatatctccggtacgctttctggccctaccggttcgatagaacttggttctggctcggcgaactccgaagaggggattgtcgttgctatgactgaagccaaaaataccatgaccattggtgccgatggtgaggttatgcatagcctgcatggcggcaaaagcggaaccattacgcttacgtatctaaaaacctcaccgataaataaaaagctttccctgatgtacaacgcacagagccagtcctcagccacgtggggtaacaacgtgattgtgctgcgtaacaaggctagtggcgacatcgtgacggcacgcagtgtggctttccagaaacaagctgactggaacaacccgaaagtcggcggaacggtctcatgggtatttgactgtggcaaaattgatgaactgcttggggagttttaa

SEQ ID NO: 92798 - DNA, 603 bp, Enterobacter aerogenes
atggcccgtaaaaatagctttaagaaggcctacgtcggtatcgttattgatatggctctggcccgtaacaagatctcaaaccgtatggttgcccagagactggaaattgacgaggcgaccatccgcaactggcgcaaggaacatgccgactttaatcgtgcctttaccgaggctcgcgaagttctgatggaaaagattaacaacgttgcaggtaaaagcctggacgttcgcaagcgaaagattgttagccggggaccaaaggggcagacaacaaccattgaagatgttctgcccacgcataacgatattgctgttttctcgaagtcactcggtcttggtaccagcgtctatagcgacgaagagcgccagcgtgatgtactgcgcgaggtgatgaaacacaaagtggctggtaaatataccgcgcttgaagccgcccagttacttgaggctgaagggataaaggttccggctactctgctattggaactggaaaaccccaaaaaaatcgaaatctctggtccgggtggcagcgctatcaaaaccgagacgacgaacctcaccccgcaggaagcagcagagctctacaaaaaaatcatgggctga

SEQ ID NO: 92799 - DNA, 1005 bp, Enterobacter aerogenes
atggcatcgataaaacactcttctgatgccgacggacaatcaaaatattatgtccactggaaggatgagagaaccgggaatgggcgtcgccgtatttttaaaggtattgatgatgcggctcatctcttttgggaaaaacagagtattgagctggattgcagaaccgcaaactggaaaggtatagaccgctcctggacccttcggaaattaatccttttttatctggggtatcaggttagtaagctggaaaaaaacattatccggctttcgtcttatacaaagtgccgtcacgatcttctcgcgatagagggaccgattctcgataaaaatgttctccatatcagccatctggatataacagaatttgttcgtccaggctgtcatcgctggatccgctcggcgttctttctcctggaagaaaagcgactcatcaggtttaaccctgttgaacgtcctgtgcggcgacaccgcaggcccataacgatcccctcaaaggaaacggtacgcgagttacttaatacggcaccgaacagggaacgcattgcatgctggctggggatttgtggtctgcgtcttggcgaggctctcgctgtaacctacgaggatgtttctccggagataattcagatccggcggcatatcgtaaacggtgtaatccgtgaagggttaaaacgtggggtagagcgacaggtgagaatgcccagagagctcctttctctgctggatagagaattgttcgggacggctcagccgttggtatccaatagctttacgggggcgccactgtccattaactacggtacacagggaatactccagaaaacgctttcagcacatggcattaaacggttccatcatctgaggcattttgcggtatcgcgactggctgccaggggcgttgatatcacgcatgtatcccgtcttatcgggcatgtgaatatcaagaccactattgatgtttacgggcacctgttctgtgcgccggtagatatggatctggactga

SEQ ID NO: 92800 - DNA, 405 bp, Enterobacter aerogenes
atgcattcatcattagaaggtcgcagcggtcatggctgttctattcaagaaggctcattagtagggatggatggcaaaatggggaagcctaccgaaaatatccaaactgttacggttaaattagaaatagatgccacagatgctcagaaaaccattgatgaaattaacaaaaagataggggcgtttatggaatgtgtggaagtagctaagccagtattccgcgtgggttatttcagaaaaacgggcggtcatgtcctgggatttcaggctgaagaagagaacaagccgagtggtggattttttcactcgaaagcaacgcccgatctaaaaggacaggtattggttcgtgtagaagaagtttctcatattatctgcgagccatacgatccaaaagataaggactga

SEQ ID NO: 92801 - DNA, 426 bp, Enterobacter aerogenes
atgaagaaatttctaactggcacattcagtcaggtgatttattacggcctgctggtggcgctggtatttgcaacgtttactggtcaaaacaatatcctgagcgtagcagctgcggccttctgggttgttattgcgctgggtgttgttatcggtccactgaccctcgctctcgcttatggcgttgaacatgtacctaataattcccgcgctgaagcactggagaaagttaagaaaatcacccggcgcaaaaatgtcgttgctcgctggtggggatggatttgcatggtgctaaccaacgtcctgctggcttatagcggttgggtattcaccgcagtgtgctacgcgctgtcatcgctgttcgttcgattctgtgtgtcgctggctcgcgataaggttgaaaaattgcaaacttcggaggctgtgtaa

SEQ ID NO: 92802 - DNA, 276 bp, Enterobacter aerogenes
atgctaaagtttaataagaaagtgtttaaggatgatcttatatttctggatggaaaggaattccttgattgcgagttttataattgtcaactggttttctccggctttgagatgcccatcataaaagggtgtgtcattgatggttgtgactggcgactatccggtccagctcaaaacacgttaatatttttcagggaaatacaccaggccacaactggagacagtcccgcgcagaaatttatagatgaaatattaagaaaaaacactacacactga

SEQ ID NO: 92803 - DNA, 351 bp, Enterobacter aerogenes
atgagccgcctaactgccattaccagcgctgtgcttatcctgctgctttcctgcattttctcatggcgttctggctggaattctcacgctgaccatatcaacgctctggccgcgaagaaaaaagagaaggccgtgaagatcattcagcccgtagagcaaaaggcagctaccgctacggatgagggcaaggtcatctaccgaactataacccgtgatgtggtgaaatatgtccagtctccgaatcgtactgtgtgcaagtttgacgatgatgctgtgcagttgcgccagcgtgccatcgacgctgccaacgccatccccggatttgatgaatccgccatgcaaggcaagtga

SEQ ID NO: 92804 - DNA, 681 bp, Enterobacter aerogenes
atggcggctattggagctaccagctcccgcgcccgatttggtcttgcggcattctttggtaaggcaggtattagtaagagtgacgaaaaactggcggtgcaagcgctggcccgacacgcaatggataccgcgccaaagaacgtgcgaaaagctgcgggtaaggagttggggaacagctgcctgattctggcgcagtttgcctttgcagattactcccgatcagcagaaaccagtgtgacatgtcacagctgcagcggaaccggattaacttcccagtacgaggatgtgattaaacatgcagggattttcaatactgatggcatggaaattgtccctccgaaaattaagcatgaattagtccagcgaatatgcacagcatgtaacggtaaaggtgaactgctggcccggtgccgctgtggaggtaaaggtgaggtactcgatcgtaaagctacaagcgaatgcggtgcgccggtatttaaaacctgtgaacgttgcggcggcaacggatattcagccgtatcatctgcaaccgtccaccgggccattttgaatagactcccggatctccatcagtcctcatggtcccgcaactggaaacccttctacgaagggctggtggatattcttcataagggggagcgtcaggctgcagtagaatttgagaaagcgacaagttattaa

SEQ ID NO: 92805 - DNA, 309 bp, Enterobacter aerogenes
gtggaaagactcattcgcgaaatgtcgtatctctttactaagcagcgctttatggagcttcaggaacaagcacatgctattgccacgagtgccagtgaacattctgaatgctttgggttaattatcgatgccattgacgagtttcttgaaggtctgccgggaaaccttcaataccatgagaagccacttatgcactacatggtaatgcgtagcctgaccttatgggatgcaggtgagaaactgaccgatgttcaatggacacatccaggctggtgcggaacagcggaaaagggggataccatccaatga

SEQ ID NO: 92806 - DNA, 1872 bp, Enterobacter aerogenes
gtgacaccagcgcagttatcagaaaaattatgggatcaggctgagcgtgtcgcaaagttcctgttaccaaaaggccaccaggaagggcgggagtggtgcgccggcagcgttgacggtgaggcaggcaagagcctgaaaatcaatctcagcgggaaaaaagcctggtcagattttgccagtggcgatagcggtgacttgctggatctgtgggtgctggttcgtaactgtcagctgcacgacgccatgcgagaggctaaagaatttctgggactgaaagacgacgaccatcattttgaggcgaagaagaaaactttctcccgaccgacaaagaagggcgtgaagaaagcgaaccactgttacgactacctggccacacgcggaatcacccgggagactgccgatcagttccgtgtatccgatgccgttgtctggttccacgatgaaagccgtgaagtcccggcagtggcgtacccataccttcgtaatggcgaactgctgcaggtgaagcgtattggcactgagcgcccgaacggcaaaaagctgatcatggcggaagccgactgtgaaccgagcctgttcggctggcaggcgatggacccaaaatctcgtgcggtggttttatgtgagggggaaattgactgcatgacctatgcgcagtacggcatctctgcgttgtcggtgccgttcggtggtggaaagggggccaaacagcagtggatcgagtacgaataccactaccttgaccgatttgaggaaatctggctcagcctcgataacgacgatgttggtcgggaggccgcgaaagaaattgcccgccgactgggtgagcaccgttgccgtctggtcgaactaccgcacaaagatatcaacgattgcctgatggctggtgtgagtgaggacgatatctggcattgcctggaaactgcgaaattctttgatcctgacgaactatgttccgctggtgatttgctacaggaaactatcgacgcctttgaacaccgcgacaaagggttgtttgtcagcccgtggccatcgctgaatcataatttcaagttccgcgcgggagaacttaccctggttaacggcgttaacggccacggaaaaactgagctggtgggccatatcgccatcgaagcgatgagtcaggagatccgaacgtgtatcgcctcgcttgaacttaagcctggaaagatgcttgcccgtctgacgcgccagacaatctgtacatcgtcgccgaagcgcgaagaaattgtgatgacgaacgagtggttctccgatcgcctctgggtgttcaaattaaccggaacagcgaaggccggacgactgctggagatatttgcgtacgcccgccgtcgctatggcatcgatttgttcgtcatcgacaacctggctaaatgcggcctggacgaagaagactacgctggccagaaggattttatcgatgccctgtgcgacttcaagaacgagcacaactgccatgttcttctggtcacccatagccgcaaaaccaatgaagcagccccgaccgggaaaatggacgtcaagggtaccggcgcactgaccgatatgcccgataacgtcatggccgtctggcgaaacattcccagagaactggcgcagcgtaaagctgagcagaaaggctatgagagcctggacaaagacgaacagattgctatccagttgccagcctcaatgattcgcctgcttaagcagcgtgaaggggagggatggatcggtgatatcggcgccacttttgatgcccgttcgcatcaattccttgaggggaaggtaggcccaaaaaattacctggttaacaaaccccagagcgaagtcgatctggagtgggaagctagcaacgtaacgagggtataa

SEQ ID NO: 92807 - DNA, 1005 bp, Enterobacter aerogenes
gtgagcacaacaacacctacagataccgttgtggccattggtcaaatcaatctgactggcaacgtgacacctgccagttggtggcgccatatcacgcttcctagtgggcgtcctgaccagactgcaataacactcctggctgaaattgtttactggtatcgcccgtctgaggttcgtgacgaggttacgggcgctctggttggttaccgtaaacggttccatggtgacaagttacagcgcagttatcaggcatttgctgaccagttcggtttctctaagcgtgaggcaacagatgctctgaagcgcctgagagatgcgggactaatcactctggagttgcgtacagtccagacatctgaggggatgacgttaagcaatgtgctcttcgttgaaccggtgcctgaagctgtacttgatatcaatagcatgattcgcaagtcagatatcaaaaatgtaacccctgttccgtttcaacgtaacaccccctccgtaccaacggaacccctcccacgttctgacgtaggcgaccctacgttgaaaagggagacgtatacagagattactacagagactactacagagattaaaaacataggcgcagatgctggcgcaccttcgcccaagcgtcagaaaaaagtgttgttcgatcctgcagggctaaaacctgaaaacgtcagcgaggaagtctggcaggactgggttaagttccgtcgagaaacacggaagccgctcacagaaacaacctgcgcataccaggccaagcagcttgctggccaccagaacgccgatgaggtgatccgtcgctcgattgctggcgggtggcagggccttttcccggaacgtgtgccaaaccagcccccgattacccaggcggtgcagggcggaacgacagctcctgttcaccagggtaattcctggtgtacgccgtctgatgacggttcggcagaagtatttatcaaccaggctgctatcgaccgcctgaagcgcggagaccgccgcccatga

SEQ ID NO: 92808 - DNA, 315 bp, Enterobacter aerogenes
atgaacagcgcaaaatatctttatccgtctgattttgttttcaagcactcgtttgataacccattacagcgtttgattatgatgcgcattctttctaacggaagtagtgatggtgaaggtgagcgcgtatttgatcacgaaaacctgcggcagttctgctgctgctcgaaacaggcgatgttcaaagagattaaggctcttgagcgagctggctacctgaaagtaagaaaaatcggtgctctcgatactgatctcaaagttcgccttgaacccgcacgaggttacacgatcacccctcctggaggtaaccagtga

SEQ ID NO: 92809 - DNA, 699 bp, Enterobacter aerogenes
atgaacacactctcagaacgtctacagaaagcgatggatgatgccggactatctcaagctgagctggcgttaagggttggggtttctcaacccgccatttggcgtcttgtcgcaggaaaaacaaacaccacgaggaaactagtggagatagctcatgcccttggtgtgtctcctgagtggctttctactgggaaagacacatctgaccaacctggcgggcatcgtgttgaaaacttacacggaaagaaacaggcaggaaacaatgatgtcttcagggtggaagtcctcgatctctctgtgagtgcggggccaggtacgtttatggtctcagattatgtcgaagttcttcatgccatagagtacacgacagaacatgcccgctctcttttcggcaatagaagcgaggatgcagtcaaagttatgaccgtgaatggcgacagcatggccaacacgttcaactctggagatcgggtgtttgttgatatatcggttcgccacttcatgatggatggcgtttatgtttttgttttcggcaaaactcttcatttgaagcgattgcagatgcagggcaaaaagctggctgttctttctgataatcctgcatatgagaaatggtacatcgaagaagcggatcaagaccaattttatgttatgggtaaagcacttatacatgaatctataaactatcaacgtctataa

SEQ ID NO: 92810 - DNA, 309 bp, Enterobacter aerogenes
atgagcattaataactttattcaattagtagacattcctgactaccgctttgataaacgagcgactgatattgagtatggtgatattggatgtgattgcagttcaaaaaccacttccttgcttgatgcaattaagcatatcagttcaagtgtttttgaattatctgaaaacaaagaaattgataaaagtaaaatacaaaacctgacagcatgtatatcagacttagctgagctagctattgccaccaataaaattgctgaatctgccaattatttggcgggaattaaggagggaaatcatgtctcatga

SEQ ID NO: 92811 - DNA, 195 bp, Enterobacter aerogenes
atgtctcatgaacaatccctggaatcagtgatggaaaaggcacatcaggctgaaataatttccaaaatgctggaggtttatcctaacaaaattactgacagtgaaataaccgctttagcatcccttcttacaaatctgacaggtgatgttgctgcatggttaatagaagagctgtctttaagggagggtaaataa

SEQ ID NO: 92812 - DNA, 183 bp, Enterobacter aerogenes
atggctatggacctgtttgaagcatcttgcaggttggggcaagtagatgccgtgctgtcaacttggttagaaaattgtggtgatgagcatgaagcaaacttaatctctgcaattctgacacttctcgaaggagtaaaagcctccgtagatacagaagagaaaaacaaaaacacaaataaataa

SEQ ID NO: 92813 - DNA, 351 bp, Enterobacter aerogenes
gtgaaacaaaacttgatagatgtgtaccgtcgacgcattgcaatagcaacccttggcagaatgatgcgcaaaaccggaggatactgcttaattgtcaatatgcctgatggtgaaattaaatccgtagaacttaacgaagaggcaatgacaaaactgctgatgaagtttgaggctcaggccaaaaatgaatttggtcgtgacgctgataaatttcttcgccagacgtatgtgagctgtctggatataaacggacacactgaatacctgaccgaacaaggcaagatggttatggatgaattactttcagacgtagtcacgtatttaaaaaagaatgccaccagcgaggaataa

SEQ ID NO: 92814 - DNA, 210 bp, Enterobacter aerogenes
atggaacaaaacaccgcagcggtaacgcataacaaaatacagatagtgctgacgattgaaaatggtcaggtaattgatacccgaaacgtccgcgacaacgaattaatcgcgagcatggatacgtttttatggatggcgaagaaagctgtctatcaggttattgctccagattcgggggtgggtcgtgctgacagccatacgcattcctga

SEQ ID NO: 92815 - DNA, 402 bp, Enterobacter aerogenes
atgaaaccagcagaaatcaacgctatcgatgagtcattccgtattgtgcaatccccggtgttcgtggtgagccgtcacggttactcaaagcgctgcctcagccgcagcgcggcaatcaacaatctcgcgcactacatggtgaccaaaacgttccacctcgcaggtatcgagactaacgaaccggtatttgacgagtcaggtcgccctgtcgcccacagcactggacaccacacacagcagtatctcttcgcgcacgaccgatgcgcccgccgggttcgccgtatcctcgcccgcaagcgtgagatccagaactggcatgcgaaatgggagcgtatgcatgaccgctttattaaagaagtggatgcacttcaggcgaataagcccgccggagtcactcgatga

SEQ ID NO: 92816 - DNA, 192 bp, Enterobacter aerogenes
atgaccatttacctgcgcattgttctgactctggttatagccggaggtgtatatgggctggccgtgccggcgctgatttcaatgaaggacacggtatccgtcattaccgggcttgcattagcaattctgaccccgctgtgcatctacgccattacaaagggtctttttacagaaactaaggataagaaatga

SEQ ID NO: 92817 - DNA, 828 bp, Enterobacter aerogenes
atgaagaaaatcattatggcctctctgctcgcagcatctgctatcggcctggttggttgcgatcgtgttgaacccggcaatgtgggtatcaaggttaacaagctgggcgacgataaaggcgtcggtgaggtcgttggtgtcggccgctactggactggctggaatacggaagtctatatcttcccaaccttcaagcaaatgaaaacctatgaagacgcctttaacttccagatgagtgacggtaccacaatcggttatcacattggcgtcgcctataaggtggatccgactaaagtcacaaccgttttccagacctaccgcaaaggtgtggatgatattaccgacaccgatctgcgccagaaaatcgccgattctcttaaccgactggcgagtcgtatgagtacggacaagtttattgatggcggtaaggctgacctgctcaccaatgctcttaaagaaatccaggacgaaatgggccctatcggtattcaggttgtcagtctctcgtatgtaggcaagccggaatatccaccgacggtgatcgacagcatcaacgccaaagtaacggccaatcagaagaccctgcaacgtgagcaggaagtaaaacagcgtgaggctgaggccaacatgttacgagctgaagctgatggacaggccgacgccaaactgaagttggcagaggccgaggctaaatccatcaagatccgcggtgatgcacttcgccagaacccggaggtaatgcagctggaagccatcaacaaatggaacggcacgcttccacagtacatgaccagcggcacgaataccccgtttatccaggttaagtga

SEQ ID NO: 92818 - DNA, 225 bp, Enterobacter aerogenes
atgaaaattgactttaacgatcagggcactgtttcaaccgtcactgtaaccagctcggtatttgagttccgccgacataaccgggtaatagacatcgccctttttctgacgccggagatggtcagcaatagcagcggtttcttcatcctgcgcacagttctgagcggtaaaacgaaacatgcgctccgggcctacaagcatctgatccgcgaggtagcgcgatga

SEQ ID NO: 92819 - DNA, 552 bp, Enterobacter aerogenes
atgcagttcgatactcggatcgctgcttttaacgaataccagatcactgtatgccctgataatgtcctcgcgctggtagaggcgctggagaaggggctgcgctatatcgaagagttgcgggagtggaatgcaggactggcccaagaggcttttgagcgccagcagcacatcgccatgcttcaaaactgcgccagcgataaagccagtcaccattcgggttgctcccatggaaatggtgaaaactgcgccagcggaaacggagtgcaggacagccaggggagcgcaggagaaccgaataactgcaggagcaacgcaagtgcgcaggtggcgcctatgcaaatcggcacaccccacgctcccgagtcggttcagagcgtcgatcatgtcgatggagagccgttgaccatcaccctgcccgatatcacttcaaaggcgttctggagcggcagcggtaaaaccgaaatgttccatccggaaacgtataagcgctgggttaaagaggcgattgagcagcactgtgccattgcccgaatcgacgtggaggtgaagtga

SEQ ID NO: 92820 - DNA, 315 bp, Enterobacter aerogenes
atggccacacatacaacgttagcaaaatggctagaactcccggagccagaagcagatccgaaaacagtttgtagcttctgcaagcagattaccgttgcggaaaaactgatcggcggcccgagcgtaaacatctgtaccgaatgcgtcgacctctgtaacgacattattgccgatcggcagtatgtacaccgcaaaaagacaattgaggagatggcaaaaacgctctgtcagtgcgacacggctctggtggccgaaagggccattgcgcttgccagtagcattttcgatgccggataccgcaaggaggatgcctaa

SEQ ID NO: 92821 - DNA, 192 bp, Enterobacter aerogenes
atggctgatattgaaatgattgacgagaaagaagcgatgcggatgatccatgtgtcctcacgtatgaccatccgtaaatatactgtacgctatggcttcccgaaaccgatccgtacttacccaaaacaatatctgcgttctgctgtagaagcatggatcttaaatggggggattaaccagaaatcttcttga

SEQ ID NO: 92822 - DNA, 1026 bp, Enterobacter aerogenes
atgggacttgggcgctatcctgcgatatcccttagggaggctcgaaacatagttgctgacctgagagagtccttggacaaaggagtggatccgcgtcttgcaaaagaaagcgcgaagccaaaatcaaggcccacagtgaaagagtgtctagattactggaaaaaaaactacgttgatgtgaccttgagggagaaaacaatagccctctatgaatcgaccgttattaagcaaatgataaacgctttcccggggatgccgattgaagatattccggttcggttgtgggttgaaaggttcactgaagaagagagcattaaccctcgtcgtgctcgtcatttgcttattcaactacgttcagcgatcggttggtgtacacggcgtcaatttatcagcactcctgagttgatgctgttacaacctaaggatgttggaataaagccatcaataggtgaaacaactcttagctacaatcaactcgctaaagtctggatgtctatagaacgaagcaggggatcaacttctaaccgtcttcttcatcagttgctgattttatacggtgcgagaaatagcgagttacgcctgaccgttaaagaagaggtagaccgagaggaggggctatggattgttcctgccgagaaaagcaaaactaagaaaatcatcagacgcccacttttcgacgctgcagatacattacttaggaaggcggagatgacatatggtgacgtgcttttccctggtgatgacctgaagacgcccataaccatttcaggtgccaataaattcctccggagaataagaggaacattgggtattggagagttttcttctcatgacttccgacgaactatggctactcgcttgtcagaagaaggggtagccccgcatgtcattgaaaaaatgctggggcatgagttaggaggcgtgctttctgtctacaacaaacatgattggatagctgaacaaaaagacgcctacgatttgtatgcagaaaaaatattctggcatatcaagaagatttctggttaa

SEQ ID NO: 92823 - DNA, 1587 bp, Enterobacter aerogenes
atggcgtccattgaaaccctgatttctgcctgccagctgcaggttaatgagctggagaggctggcacagacacatattatcctgtgggaacgctggctgcagccgattgcagatggtgagcccgtcggagaggagccgggttacgatgatgatttccagcaaatacgcgaggaagtgaataaactttctggcgcggataccgaacgcattctgctgctggcggaaaaactgctgaccgccaccgcgaaggatattcgtgtcgccacctactacgtttgggcgagactacatcgcgatggcgaagcagggcttgcggaggggctggcgttactggctggattactacagagtttcggcatgaaacttcatccccagcgggagcgcagtagaatcgcggcgctggagtggctgtgcagcggtcgtatgcttgacagcctgtcactctatccggaagtgacaaaagaggggactggccgtattgccgcggcgttatgggagatagaaaagcgcctggcagacagtgaaagtaaagaacgaccccagcttaatagtctctatgctgcactggagtcgcgggttttgaaatctggcggtatggatgccctggtgccacagagcatcggtgaatcctcaggccaaacgtcggtatcgggggatgtacccacactgaaaggtattgcctcgggccaggagcttctcgctcaggtacgcaccctggcgcagtacctgagaaaccaatcagatggttggctcgccgctcaccgactgataaaaaatcttcgtcacgacaccctgcaccagctaccgttgttgacggtcgagggtaagacccgcattgaaccacctaaaccagaacagcgggcacagctcaagcgcctctatctgcagcagagctggcgggagctgctggaggaggcggacagcctgttggcgcgcgggtcaaatcatctgtggctggacgtgcaatggtatctgcatcaggcgttgatgaaatccgggcaggaagccgaggcggccattattcaggacgatctgaaagggctgctttcacggctaagagggttggaaacactggcctttaacgatggtacgccattcgctgatgaagtgacgcttaactggatacaactgcaggtcatggatgaacctggcaactggcaggacgagcctgccaccacggcgtccggtgagaacgatatcctgcaactggagccggaggcgctcgccctggccgaccgtgaggggaccgaagcagcgcttacgtggctgcaaaatcgtcctgatgctaacactccccgccattgttggctgctgcgcttgctgatggcgcgtattgcagaacaaaacggtaaaaatgagcttgcgctgcacctgctgggggagctggacaggaacgccgccagcgttacgctctcgcaatgggagccggatttgctgttcgaggttaaagcgcggcgattaaaactattacgcatgaaggccggacgtagcgaagcagaaaaaaaacgcctgcaagcggaaatggaacaactgctcgcggggcttattgccattgagcctgagcgggcggtggtgctgtgcgattag

SEQ ID NO: 92824 - DNA, 849 bp, Enterobacter aerogenes
atgaccgttgtaattaaaaatagccagattgatgtgaacagctggtaccaaaaagtcactttaaccttcacaaacgaaagtcaccgcgcggttgacctgaaccaggcggcaattagctttaccgcctccggtcatccggatccgtggggcaatacgggaggcacgctaaaaggggatcgttcattaactttgcgtgacaccgcccagggaaccctggagttcaatgaaatcatcatcaacaacagtagtgaattattactgcaggcaggggaaagcggtaccctgttttttagcctggctgccacccaggtaccggtaaaaatgtccacctttacgttaactctgacggacgataccgctgatgaagttgagccagaacctgaagtacctgcggacgataccgctgatgaagttgagccagaacctgaagtacctgcggatgataccgctgatgaagttgagccagaacctgaagtacctgcggatgacaccgctgatgaagttgaacctgaatcgcctgtcgatgatacgatgaccggcgcagcactgaccctggtatccggtgaggtgaaagcgtccagttggtatcagcgcattgccttgacgctgacgaaccagtattcgcagtccgtcgatattaaccagttgaaattaggcttcaccgcgaccgcgcatcccgatccgtacagtccatttagcggcactatgctgggtaatcaggcagtgacgctgaccagcgacggcggttggccgacagaaaaaaataccatcacaatcaataacgacggcgagtacctgttggcttccggtaaatcggcggtgctggaattttatctttcggccacgtaa

SEQ ID NO: 92825 - DNA, 720 bp, Enterobacter aerogenes
atgcatttcatctcctccgtggttatcaaaaaaatgagtacgcgaattaccccgattttattttcgttattgctgctggcggcgctgggagtaactcagttggcctatgcaggcggtattgcgctgggttcgacccgggttatttatccgcagggtgataagcaggtctctctgccgataataaactcctccagcaataatgtatttttaatccaatcgtgggtggcgaatgccgatggcggcagaagcgccgattttgtcgttaccccgccgctgttcgtcattcagccggggaaagaaaatctgctgcgtattatgtacgttggcccctccctgccgacagatcgcgaaagcgttttttatctcaacagtaaagccattccctcggttaataaaagcaagctggcggcgaattcgctgcaaatcgccacgcaaagcgtcattaaactatttatccgccccaaacacttaccggttgcctcggtagatgctccggcgatgttgcgctgccagcgtgcaggcgaccgcctgacgatcgccaatccatcaccctattatgtctcgctggttgatattcatgttggcgggcagaaattagccaattcaatggtgccgccgaaaagcgagataacgttgcacggcggagcagggcaggcgaccttccagtcaattaacgatttcggcgccaccacgccgctgcaaacctgtctgagtcattga

SEQ ID NO: 92826 - DNA, 2607 bp, Enterobacter aerogenes
gtgttgaaactcgatgtctccgcgtgccagttgacgctgggtagattgccggcgcttatcagcctggctctgatctcggcaagcgtatgcacgctgccgagctgctgggccgaaaactattttaacccggcctttttatctgacgatccgtcgaagatcgccgacctttcccactttgaaggcaacggtcaggcgccgggggtttatcgggtcgatgtctaccttaatggcgcattgttgacgactcgcgatatcgcttttcgcgtcaataaccaggccactgatggctctggacttcgtgcttgcctgacgcctgagatgctcaacggcatgaacgtgaatattagcgctttcccacaattggcgaaggccgctacgggcgactgcgtcgatcttgcggctacgatccctgccgcctccaccgcttttgattttagtcagcagcggctgaatatcagcattccgcaggcggcgctgaacagccgggcgcggggctatattccgccgcaaaactgggatgaaggtattaatgcgttgttgctcaactatacgtttaccggtgcgaatagccgggaccgcagcgttggcggcgccaatagcgatagttatttcctcggcctcaatagcggattaaatcttggcgcctggcgtttacgtgattactcgacatggaactacaacagcgataatcagcaacataaaagcgactggcagcacatcagcacctacgttgaacgtgatgtggcggcgctgaaaggcgagttgacggcgggcgatagctacacccccgcgggcgttttcgacagcctgccgtttcgtgggctacagctggcgtctgacgacaatatgctgccggacagcatgaaaggcttcgcgccgactatccacggcatcgccaaaagcaacgctcaggtgacgatacgtcagaacggctacaccatcgaccagcgctatgtaccgcctggcgcattcaccatcgacgatctctatccgacctcctccagcggcgatctcaacgttgagatcaaggagtccgacggtagcatctccagttatagcgtaccctatgccgccgtaccggttctgcaacgcgaggggcgggtgaaatatgccgccaccgcggcgacctatcgcggtgatagcagccaaaaacgagaggtgagtttcggccaggcgaccctgatgtgggggttgccgcatggctttacgctgtacggcggaacgcagttttcctccgattaccgcgcgctggcgctgggcactggagctaacttcggcgactggggggcgatttccgtcgatcttacgcaagcctacagtacgctggcggatgagagcgaacatcaggggcaatcgctgcgctttttatatgccaaatccttaaacgacctgggcacccattttcaattgttggggtatcgctactcaacctctggtttttatacccttgatgataccgcgtggaagcggatgtcaggctataacgacccgcaggaggatgacggcgatcgcgatactggcgatgactacaacctgtattacaccaaacgcggcaaggtacagatcaacctctctcaacagttcggtcattttggctcactgtatgtcaccggtagccaacagagctattggcacaccgatgaaaccaataaattgctacaaattggctacagcgacacgctggccgggatctcgtggagcctgtcatatagcagcagccgcacgcccggcgaggaggaacgcgaccaggcgctggcgctcaatatctcattaccgctcagccagtggctttctcacggcgacgatattacccagcggcgtcataacgtttatgcgacgttctccaccagtagcgatggccacggcggcgtaacgcagaataacggtatcagcggcacgttgttggatcaaaacaacctgagctacagcgttcagcagggataccagaatcggggcgttggcgagagcggttccgccagcctggaatacgatggcgcgaagggcaatctgaatgtcggctacaacaacagcaatcatggcgattatcggcaactgaattatggcctcagcggcggaatagtcgcgcatgcccatggcttgacgctcagccagccgctgggcgataccaatgtccttattgccgtgccgggggcaggaaacgtcaatattgaagatcagccggggatccacaccgatagccgcggctacgcggtggtgccgtatgccactacctatcgccagaaccgtatggcgctggacgtcaactcgctaaaagacgatgtcgatattgatgatgcggtgatcaatgtcgttcccacccaaggcgcgctggtgctggccaactttacggcacgggttggcgagcgagcgctgttgacgttaagccgttacgggaaaccgctgccgtttggcgccacggtttccattgctggctcgcctgaagaaggcatcgtcggcgacgacggggaagtgtatctctcaggccttagcccgcagggtacgctgaaagcacaatggggacagcatcctgaccaacaatgtctcactcattatcatctccctgacgttagccagtctttggcgcgtcagcatctggaatgtcgctaa

SEQ ID NO: 92827 - DNA, 132 bp, Enterobacter aerogenes
atgcctaaatcccccgcagaacgcaaatccgtgcagaggtacacaatgtctccatttaaagctgtgattatcaccatcgctatgatggccatatgctatctgattgctggttatgatgttgggttatggtga

SEQ ID NO: 92828 - DNA, 270 bp, Enterobacter aerogenes
atgcgaatgataaccagaaagaagccagccttcactgaactgtatcagaccggcgttctgactcgcatagctgccgtaaaaagtcctgatggcggtggctggcgattgttcgggttgtggcggggcaaggacatagcggtatttgtagaggctgctcgcggagggattcgcgagtggtccggcctggactatcttgctaacttttgcgcgagctgtggtattagcctgtgggaagttcacaacaaggtcgctgaaaaagctcctgaatga

SEQ ID NO: 92829 - DNA, 468 bp, Enterobacter aerogenes
gtgaagcaacaattctgccttatcaacgacaacgttaagcgtaacgccgtcagtttcatccagtctctgcccgtagaccaccgatcgccgctgattatcgaggcgcgcgaagaaagccgcaccgacaaacagaatcgcctcatgtggccacttctgaaagacctgagcgatcaggttatctggtacggcgaaaagctggaacctgcggagtggaaagaccttatcaccgtgctggtcagccagacgcaaaatccggagcgtgagcagaaatccgccccgggcatcaacggcggccgcgtctacttcggcgttcgtacctccaaatccagcaagcgctacatggtcgaggttatcgaggcgatttactggttcggcaccgagcacaatgtgaagttcagcgagaagtccagcagtcggattgcatgggcccaggaatggagggcttcgcatgcacagtctgctcgctaa

SEQ ID NO: 92830 - DNA, 171 bp, Enterobacter aerogenes
atgcacagtctgctcgctaaggtcatggatcgcggcatcttccgcgtgccggcgcgccgcaagcgcaaggtcgaagttaagccttccgacatcccgaccctgaaagactacaccgcccgcctggtcgataagaagtggctacgcctgagagcaaggaggccacatgcgtaa

SEQ ID NO: 92831 - DNA, 639 bp, Enterobacter aerogenes
atgcgtaaaccagcacgtcgtaaatgcgcccactgccgcgaatggttccatcctgcccgggaagggcaggtggtatgcagttttgaatgcgccagcgcgatcggcaaaaaacagacagcaaaagcccgggaagcggcgaaggccagggcggtgaagcgccagcgtgaatccgagaaggaggggcgccagcgtcgccgcgccaagcgtgagtcattcaagacaaaggcccaatgggataaggaggctcagtcagcctttaaccggtacattcgcattcgtgatgaaggtaagccctgcgtcagctgcggaagcccgcttatcggcaagagcaactacctgaccggcagcgctattgacgccagtcattaccgttcccgtggcgcggcgtcacacctgaaattcaacgtgttcaatatccactccgcctgcacccgctgcaaccgccagttgagcggcaatgccgttgaataccgcattcgcctgattgaacgtattggcctggatcgcgtagagcgccttgaggctgataacgagcctcgccggttcgatatcccctacctgcagcgcatcaaatccatattcacccgcagagcccgcgcactggagaagcgccgcgctcgtcatcaggaggccgcatga

SEQ ID NO: 92832 - DNA, 141 bp, Enterobacter aerogenes
atgagccgtgacgttatcgaacgcatccgcgaccgctggcaaaagcttcgcctcttgcgtagccgtggcaccgtgttggtcgactacaaaatattacgcaatttcgtccgtatctataagcgcctgggagaagcagcatga

SEQ ID NO: 92833 - DNA, 684 bp, Enterobacter aerogenes
atgacagctcaatacttggaatttgttcgccagcagctgatagtggccaccgccgatctgagtggtgcgacgaaagggcaactggtagcttttgcagagaacgcgcaatttaccgctacggcgcgcagccgtggccggaagaaggtgtatagcgaggtgaagcaaaaaatggttaacccggatggaccgccgatgagcggcagccagtcgcgcgctaagggttcatcgatcgctctcgttctgcctgttgagtattcgacggccagctggcgccgggctctgctgtctctggacgaccaccagaaatcctggttgctgtggaactacagcgacaatatccgctgggagcaccaggagacgatcacccggtgggcatgggggcatttcagcgacaagctggccggcgtgcgcattgcaaagaaaacggttgatcgcctgcgtcaacttatctggctggccgctcaaaatacaaagcaggaaataactggtagagggcatcattactctcccgccgtgatggtggggataaagccagataactggtgccacaattattcagattactggcaggtcatgatggacatctaccaggaacttgatagtcaggcgttactctctgtttctcgatcacgttcacaacaaaaagctactttttcgcagcagggtcttgcaaaagtcaattaa

SEQ ID NO: 92834 - DNA, 324 bp, Enterobacter aerogenes
atgcgaatgccctacaaacaagatttcatcgccgctctgctggcagctaaggagcagggtatcggcgcaatactggctttcatcatggcgtatttgcggggccgctataacggtggcgccatggcgaagacgctcatcgatgcggtcatgtgcgcgatgatcgcctggttcgtccgtgaccttctcgacttcattggcctgagcagcaatctcgcttacatcgccagtgtcttcattggctacatcggtactgactcgatcggcaacctgattaagaagttcgccgccagaaaagcaggggttgatgatgctggaactcaataa

SEQ ID NO: 92835 - DNA, 480 bp, Enterobacter aerogenes
atgctggaactcaataagcagcgcagggcatttctggatatgctcgcctggtcagagggtactgacaagccagggcagaacaccaaaaacaggggttatgatgtcattgtcggcggatcgcttttctctgactacagcgaccacccacgaaaactggtcaacctccccaaacttggcatcaaatctaccgctgccgggcgttaccagttgctttcaaaatggtgggatgcgtaccggaaacagcttggactgaaagacttctccccggcctcacaggatcaggtggcattgcagcaaatcaaagaacgtggcgcgcttccgctcatcgataacgggcagattcggcaagctatcgatcgctgcagcaatatctgggcgtcattgcccggggcaggctatggccagtttgagcataaggccgataacctgatagcaaaattcaaagccgctggcggcgttgtagccgaagtacaagcatga

SEQ ID NO: 92836 - DNA, 378 bp, Enterobacter aerogenes
atgaaccggctaatagcagtcatcatcgccgtagtgatctgcctgatggtcagcctcggctggctggccagtcactaccaccacaacgccatcaccttcaaagagcagcgtgataaagcaacggccagggcagaaaccgccgagaccgtaagcaatagcgtagtcactgcaatgagcctcatcaatgacatttcccgggcaacccagaatgcaaagaccgaactttcccaggcaggtgagcagcgtgttatctacatcaggcaggcgcttgaaggcgatcagtgtgctaagcagcttgttcctgctgccgctgctgacagcttgcgggaatacgcggacggtttacgtaccagcgccggtggtcccgataagcgctga

SEQ ID NO: 92837 - DNA, 603 bp, Enterobacter aerogenes
atgagcaaacccgactgggaggccatcgagacggcgtaccgggccggggtgatgtccctccgtgaaattgcatcgcagcatggaatcagcgaaggcgctatccgtaagcgagcaaagcgtgacgactggtcgcgtgacctgaatgcgaaggtgaaagaacggtctgacgatctggtacgcaaagcagaggtacgcaaacaggtacgcagtgaagtcactttgaacgaacgcgtactgattgaagcgactgcagaggtaatcgccagtgtccgcatggagcatcgcggtgatatcaagcgcgcccggcagataacgaacgcgctgtttgatgagctaggcgccgagtgtgctgatgtggccgcgctggagaagctcggagagttgatgcttgatccagacgacaagggacaggacaagctcaatgagatttaccacaaggtcatcagcatgccggagcgcgttaaatcggtgaaggctctcagcgaagcgctgaagaacctgatcggacttgaacgccaggcctacgacatcgacgggccggaaggcgacaattctgttaagcaactctctgaactgatggattccttgtctcagggggcgtaa

SEQ ID NO: 92838 - DNA, 1470 bp, Enterobacter aerogenes
gtgagcgaacaagataacggccttcaactggctgtgaacaatctcgccactgaaatgcggcgagcgaattaccttaacgccatcggtatcggcgggggcaataccaagcgcccgacgctctatcaggagtttggttacccgcgcaccattaccttccatgacttctacaacatgtaccggcgcaacgccgtcggcttcgctgtggtgcatcgtcttctggatggttgctggcaggactatccggttgtcgttgacggtgatgtgtccaagaaagcgaagaaaactaacccatgggaaaagcaagtcaccaggtttatgaagaaatggtggccgaaggtgaaggatgccgatcgccgcaatatggtgggccgctactccgcgctgttgctgcagatcaaagataaccggtcatgggataaggaagtcgacacctctctggtgaagacgctcggtgaagcagcgctggttaagctgatccctgtatgggagccacaactgacggtcgccgaatgggataacgatcgtcagtctgagacgttcggccagccgaagatgttcaacttcaacgagcagccggttggagacgaggctttcgttggaccgacgcgcggtgagcctgtgcatccgagcagggtgatcctgttctgcgaaggttcagaggatgacaacgttctgtcgggtatcccgctgcttgaggccggatacaacaaagggctcgaccttgagaagatttctggcggtggtgctgagggcttcctgaagaatgccagccggcagatcgcggtcgagttcagcaaagaaacagacatggccacgctggctgatcaggcgaagaaagctggttatgctgacctcggcgaagcgatgggcgacaaggtcaataagctgaaccgcggcaccgatgcggctgcggttatgcaggccgggcagatgcacgttctgagcgtgacacccggagacccggggccgacttgggaggtcaccgcgaacgagctggctgcatcagtgcaaatcccgttcaccatcctgtttggacagcagaccgggcgcctggcgagcgatgaggataaaacagactgggccattcgccgcaatacccgccgcaacggcttcctgactgaccgaatcacagccttgctggagcgcttctggaccctgggaattatcgatccgccgacaaatggagaggtcaccatttcatggtccgacctgctggcaccgggcgagaaagagaaaatcgagaacgcttcgaaactggctgatatcgtccagaaaacctctggcttctacggtggagagccgccattcacagccaacgaacttcgcgagattgtcggcctcgaccctctgcctgagccaaagcaaccacctaacccgaatgacaaggtgacaaccgatgatccactggccgatgacaccggagcagacggcaaaggtggggctgccgatagttccgcgcagcaaggttga

SEQ ID NO: 92839 - DNA, 996 bp, Enterobacter aerogenes
atgacaccggagcagacggcaaaggtggggctgccgatagttccgcgcagcaaggttgacccgacccgatcggccaagcaggtaaccgcgatgtaccgagatatcgaggatcggtatctcggcatcaagcgcgctctgaaagcactgtttgaccagcgcctgaccgggcgtgagcgtgaggttaacagccacaactggcacttcctttgtcacgaccgcggcgaggatatgcggctctaccaggtcaacgccggcaagttcatctacgacatgtcagcgcaggaactggccggcctgctcgaagcggtacaggctattctcgacgattacctgctggaaggcggcgagaaaaacctgtgggcgatggattacgtcgccgcggaggcgcagcgcggaactctggaggccttcaacaacctctcgcagcagtcgcaggtatatgccagccagacgacgctacaacagcttttaagcagccccggttatctgaaccagatagcggcggccaggctgactacttttagcgactggaaggtcatcagcgacaccgcccgcggcgatctgaccaacatcattaccgatgctgtcgcgcgcggggttaatcctcgcgagacaactggcgtcatcagcaagcgtctcgatgtgtcgatgtcgaaggccaagaccatcgctcagactgagcaggttggcgcgctgcgccaggcgcaatggaacgagacggactgggctgctgaccggttaggtttgaatactggcttgctgtggctgtcagcgctcaaaccgacgacgcgcagctggcatgctagccgtcacggaaaggtctacaccaccgagcaggtgcgagacttctacgccgagaacggcaaccggtacaactgctactgcagccagattccggtgcttctcaacgacgacggcagtatcttcaatgatgggttggctgataaacttgccaaagagagaaaggactggaagccagttaaggaggcagcatga

SEQ ID NO: 92840 - DNA, 156 bp, Enterobacter aerogenes
atgaaggtatgggttgtaatctctggggttccatatgaatcgtctgaagctatcgagggcgtttattcttctgaagaaaaggcaaaggaaaagctcgccaccttagataatgattcgcttagctatgcttattatgaagagtgtgaagtcgaataa

SEQ ID NO: 92841 - DNA, 1386 bp, Enterobacter aerogenes
atgaaacgcaaccgcgttaacgtgctgaccgtcgtcaactccgcttcaaacatcaccactgaaaccatcgacggcaagccacatatcgtggttcgcggcatcacgcctgtcgtggacgatatcgtgatgaaccggaagttgtacccggcagcagaaatcgaaaaggcctacaacacgcttgagcgtaacccgatgccactgggccacccgaaagtggatggcaagcatgtgtctgctcgcgatgtccgggcggtgaatgaatatcacgtcggcgcatggctgcagaacgtcagccacgaagacgggaaggtgacgggcgatatgtacgttaaccgccagtacgccgagtcaagcgagaagggcaagcgcctgattaatcgccttgatgagatgatagccggtaccaactcagagcccatccacatctccacaggactgctgtattccggcattgccgctaatggcgagtcgaagggtaagaagtacaacgagatcgccaccaacatgatgtttgaccatgtggcggtgctgctcgatgagcctggcgccggaactccggaagaaggcgtgggcatcttcgtcaactcagaaggtcatgagcagcagatcgaagttgctcgccttgctgatggtatcgactgcacccgcgaaggtctgctcaacaagacaaaattcttcttcaccaacgcctccaacttctcttttgacgacatttcacgcgccatcagcgacaagctgcgtgagggtgacacagaagataagtggctatggccagaaacggtgtggccagacagcttcatctaccgcgatgacaccagatacctaaagcagaagtacctcatcgatgatgacggtaaagccgtgtttgtcggcgaacctgtagaagtcgtgcgcaaacccattgagtacgagattaaaaccaacggagagaacgatccgatgaaagaactgattatcaatgcgctccaagccgcgggtaagccgactgaaggcaagtccgatgccgaactgatggacgcttacaaccagttagcggcagagaaggcggcagccaagaaagatggcggcgacgaaatcgatcccgccaccggcaagcctaagaaaaaagagcaggccagcaacagcgaagaagcgccggcatggtttaagccatttgctgatgatttggcagccgttaagtcaggccttgccgtgaacgctgacaaagagaaaggcgaaaaacgcgctgccgtaaaagcgaaattcgggctggatgacctggcggtgaatgcgcttgacggcgccgcccttgatggcctgtttgctcagtgccagacctctaccggcctgaatggtgcattccgttcggtcaacaacaacgattctttcagcgaaatgccggagtaa

SEQ ID NO: 92842 - DNA, 432 bp, Enterobacter aerogenes
atggctaaagacgggaaacacgtaattcacgcgggcgggattttccccaacccgcaacttaatcgtgaaggttctgcggccgcagcgtttctgccgggtaccgttatctttttcagtgcagccaagcctacaccgtctgttgatggcgctgaagatgcaattctttacgttgctaactacgactatttgcgctgcaaaacggttgacgatgcctatgcgatcggtgactgggtggtaaacatccagccaacgccgggcgttttcctcaacgttcgcgctgcagctggtacctataccaagggccagccggtttctgtggccaatggccaaattaaagcactggcagaaggtgaaaccatctttgcctatgtcgaagaagacaagtccctgaccgccacagcaggcgatctggttcgcgtcgtgttcaagtaa

SEQ ID NO: 92843 - DNA, 1098 bp, Enterobacter aerogenes
atgtttgtattttccacccgacgcgcgactgagacgggcaacctcgaagcgaaccaggcgcagttcaatgagctgcaactggcgcgcaatatgagtgctcaggccgttgctgatttcgtatcccgcacccgctggcgtggtgatgcggcaaacacaccagcgctggacgcgacgaatgccgtcgacgacatccgtcgcctgtatcgcgcttacgaccagaccgtactggctgagtttgagcccgccactgagtttactctgcttaacgatctcatcccgctgtcccgctctgttcgtcttgaagagtcagtgtatgagtatgctcgcaccggcggccgcggctgggcgcatacctctatgtccggccagattggtgcggcgctggatgcgcgcgcgtacaccttcgacggtacgatggttcctatccacgattctggcttcaaattccagtggcgtgatccgattttcaacaaaggctcagctctggcttctctggccgacgctcagcgcggctctgttgatgatgttcgtcgtcagtacgtggattacgttttcaacggcttccgcgattccgatggcaactatatcgcctttgatggcaagacctggaagggcgttaaagccgatgagcgggtgcagattgtcgatctcagtgcttccggcctaaatatcgacttcaccagcgccagcgcaacggcggagcaaattcgcaacgcggcaatcgcgctgcgtgacgtgatgaagctgaccaacctgcagtatgcgcagcagacctggtatgtttccggtcagatcatcactaacctggaacgctacttcagcgataactaccagtccgacaccattctgctggagctgttgaagctctccggtattgctgccatcaaagaagatgcgcagctgaccggtaaccagatcctgattgtcccgcttaccgccggcgttatcgctccgattgtaggtcaggccgtgggtaccgttgcagaccctcgccagttctataacagcgattacgtctggcgtacctggggtgcgatgggccttatggttaagaccgatatcaacaatcgcaaatccgttatttacgcgcatagctaa

SEQ ID NO: 92844 - DNA, 276 bp, Enterobacter aerogenes
atggcactggtaaaagtggttcgcgataacctgatttccggtgccaatctccaaaagctggaggttggcgcgcaggcctcggtaagcggcgatgtcgctaagcgctgggtggccgccggtctggttgaaatcattactgatgacgaccaggtgctggaagtggctacaccgggcaatgatgctgcagagcaggcagagcaggcagagcaggcagagcaggcagagcaggcagagcagcaggaagaatctgccagcaaatcgaagaaggcgaaataa

SEQ ID NO: 92845 - DNA, 381 bp, Enterobacter aerogenes
atggctgacccaatcacagcggcagacgtgcaggcgttcctcggtgagttgggttacgccatcccttccgcgctgctcgatccgattctctgcgtggtgaacaagattatcccgtgccttgatggtgctggatatgacgactgcacggcaaaacttatcctgatgtatgccgctgcactcatggcgacgtcttccggcgcccggcgaattaaatcgcagggggcgccgtccggggcgtcacgttcgttcgattacggtgctgacagcatcacctggttgcgtgactcgctggcccggcttgatacaagcggctgcaccggtgaactaccgataagcgccggcaacagtgtgggcctgtttatggtggtcgggggttgctga

SEQ ID NO: 92846 - DNA, 234 bp, Enterobacter aerogenes
atggctgaacgatatgacgtacacgcgtttaaatgcgaagacaactgggtgctgttcatctggataaatgagaccggcattaagtttatcggccgccatgctcagagctacgatgaagccaagtctgactttttaaagcaggctgatgctcaacgactttccagtcagtcagggtttatgcagcctctcactgatttcaaaatcactgagaaggtagaggtcttcacgctatga

SEQ ID NO: 92847 - DNA, 351 bp, Enterobacter aerogenes
atgagcagcgttgcaaactggtcctacaccgccacggcgaccatctggcgaaagctggaaggcaatgacgaatacggtgatccgctgggctatgccgaacctgagcaaatcctctgtgattacgagggcgggctcagcaagaagttagctaacctgggcaccgaaatcgtcgtgaagaataccgtctggtctgagtatgcactggcagcggcaggtgattatctgctgattggccagtcaaccgaaccagacccggttgtcgctggtgccgacgaggtgcggcaggttatccgttacgccgatacgttcgagcgactggcggatgattacgccattctgactggggtctga

SEQ ID NO: 92848 - DNA, 465 bp, Enterobacter aerogenes
atgggtattaaagttagcggtattagtcaggccaaaaaacacctcaatgacaccatcaacgatgtcagagggcgcaaggtcattcgtgcgcttcagtctgcgatgattcttattggtgcgcgggcagcctattacaccccgatcgacacctctacgctgattaacagccagttcagagaaatcgacgctggtggattgctcattaccgggcgcattggttactcagccaattatgcagtatacgtgcatgaagcatcaggtaagttaaaaggtcagccgcgcgcgcacttcggcgtgaccagtaaccgctctgagttcggcccgcaaaaaccaaaagagtttggtggcggaaccggaacgggcaactactgggaccctcatggagaaccgcaattcctgaccaaaggcgcgaatgacgagcgcgataacgttgatgcgatgatgcgcaaggagctttcgctatga

SEQ ID NO: 92849 - DNA, 384 bp, Enterobacter aerogenes
atgacaccaatgatgcatgagcgtgtgcgtaacatgttcggcgacgccgggctaacgaccggcttcacggtgcagcagttgatgtacgacgaccccggcgacctgtcgaaagcgatcatggtgttcaggccaaacggcggttcgaacattcgaacagatctcggttccgaatatcacgtccttgtcgatgttgtcggcgcgaaagataagcgcaaagatgcgctcaatgccgtccagaaaattgtcgattacgtacaagccaaccccatggctgacgagtgcgtcggctacatccagaacatgggcgcaattcccgcgccagtgctcacagaagaagggcgaatagtcttccgactccaatttgcctgtacctatggcgaatag

SEQ ID NO: 92850 - DNA, 744 bp, Enterobacter aerogenes
atggctgattgcccgaactcgaacgaacgccttttcggcggcgcggtcgttctggaagttgccgacggttgcccagacaccaaacctgatgaatccgaatggaagtctctggcagctggtacttctaaagggtttgacttcaatccgaactcagtaacttcagatgcggatgacggcggtggttacgtcgagaccatcattaccaacagtgattttaccctgagtttcgagggggaagttcgtaaaaaagataagttggatcagtacggagtcggtaagttcatcaagtattttgctgatgagctaaaggccaaacgtcaacctggtatttgggttcgaatggactacggccctgttgagttcattggctacatgaacattacggcgctaagttctgacggcggaaccaacgacatcgttacgttctccactgaattcaaagttggtgatgccagcaccattgaagtgaatgaggtgacttctgtagcagtaacaggtgtgacggtaactccggccaccagcactggcgctgcagctggaaccagcaccttcacggtgaatatagcccccgccggagctaccaacaaaaactttaccgtagcgaccaccgatgcgaccaaagcaacggctaccgcctccggcaacaccgttaccgtgacgcgcgtcgccaccggcagcgcgcagatcatcatcaacaccgaagatggcaactttgtggccgtgcatacggtcaccgttacctaa

SEQ ID NO: 92851 - DNA, 672 bp, Enterobacter aerogenes
atgactgcattaatcgacattggtgaattctctgtcagtgatagtcgcgatggaggtcaagactacctgttaagaccatctttcgaggcgatgacccgcattgggacacctgcagagattgtgcgagcgtatgccactattcacggaagtgatgttgcaaaactacttgaagcctgtactgatacactgagaagaattcctgactggctttcaccttcatttaacagatcagcagagaaggtactatcaacatgcatgcatgtgcttcaggcttgctgcgaagatgatatgacaccgatgattggcgagtggaagggatggcggcattgtgtcgtctatcgccccggacagatgcctaagaacgatatcatcgtgctggctcaacacctcatgcagcacggcgttgtcggcaaggctaaggttcgacagctacagcgccatgaaacaggcgaacgcacgacagagtttaaagcattcgactacattagcgctgcacgtagccactttggcatgagccgctccgaagcatcgcagttgacgatgaccgaatttcagatgctactggcggctaaatacccagaccagaagggattcacacgcgaagagtatgatgcaattgctgatgactacttggcaaagcaagcggcaagaagggctagagcagcaaaataa

SEQ ID NO: 92852 - DNA, 480 bp, Enterobacter aerogenes
atgaataaattattagttgcctctacgattgctttcactttggctggctgtgccccatatcctactggaattaatcaaacatctgattatgccaagagaatggaggaggcaaagcgaaaagatgcagaatttgctgaaaaagtaaggaagatcgatcttaatactgctgatgttggagtgaagccaaagaactacaaactattggttgaatcagcaatacgtgattcgttgaaggatccagattcagcaaagttttacgatttcacgcccccaagaaaggaagttatggttgagaatagtaattttgtttatggttattcaacatgtgtttacgttaatgccaaaaattcctatggcgggtatgttggaaagcagctttactgggcatttattagaaataatcaagttttacgccttaaaaataccactgaggcctatggagatataatttttgtaggtaggccggtaaattgtagttaa

SEQ ID NO: 92853 - DNA, 2931 bp, Enterobacter aerogenes
atggctggtgaaaaagacgcaggtagcatcgtttatactgtcagtgcggatatagagccattgctgcaaggagggaaacaggctatcgatacactggacaagcttgatgccgcagcccagcagtccggaaagggaatggataacctcgaccagagcgcctctcaaaccggatccgcatttactgaactagccggttatgccaactcgatggataaccaactccggaaactgaatactaatgtgagcggaattgctcgtgcaatggaagaggcccgcagcggtaccggcggtgctaacagtgagtttaatcgcgctgaatcaatcatcgaggcgctgggaaaccaactcgcagtactagacgaggctcaggagaacggagcgcgtagtgccgcagtactggcggcccaacttcgcgccgggtcaaaagctaccgacgaagaaaaacagaagatcggcgaattgaccgggcgtctatatgacatgaagactggcgttgaaaatggcgcaaaaagtactggcaactggaagtccagcatgcagcaagctgggtatcaggttcaggactttattatccaggtgcagggcggtcaatccgctctggtagcgttcgcacagcagggttcacaacttgctggcgcattcggccctggcggtgcgattgttggctctatcattgcgctgagctcggttctcgctggcgttctaatcacttcgcttaatggcggtaagaacgcaatggatgcgctgaaagacgcagccgaggctatggataaggtcattaccatttctcaaaatggcgtggccgccctgtccgataagtatgcattgctcgcgaaaacgaatgctgaagtagcaacgctgatgcgtaatcaggcattgttggaatacaacgaagcaatcaacaaaatacctaaggcgatcagcgacgcttcgagctcgttactttccttcggtgataaggcgctttctgctttttccggtggttatgcatcagtcgatggctttaacgaccgtctgtccaccctagaaataaccacggataactattctgaggctatgaagcaggcctacggtgcagggcaggcattccaggcgacagcaaacagcattggaaatactgtcggtgccgtcgccgataaattcgggatatccgagcaaaaagccttcgagttcagcaagcaactatcagatatcgctaaaaatccaacaccggaagccttgcagcgccttgctaccgaactgcagaacactcagagctcaacagaaaaagggcagacagcactcacggcattcgtaggcaaactggttgagttatcgcgtgaagctgtcattgctaaaggtaatgttgccgccctgaagcaggaaacagataacctgaccgccgggcagaagaaccttatcaagcagtcagagcgtaacttagctctatcaaagctacagggtgaggctcgcgccagacttcaggcgcaatatgccgctgaagacgcgggatttgcgaaggatgatcctcacgcgaagcagatggaagatgatgcggctgctacgtacaaaaatacgcaggcgcagaaaacgctccaatcagaacagaagaaaggtgcatcacaggctgattcaattgctcaaaagctggcaaacctcaaacagcagtccgaactagctgctgattccaccagcaatctgagccgtgaacaggcgatcctcaatgctcagctttcgcttggcaaaggtgctacgcaggaacaattagcgctggctgggcagtatgctgctaaaaagtgggatacggccaacgctatcaaggcgcaagccgcggctgagaaacttctccctgaagcgcgcgagaatgcaagctacaagcaggatgtgcaggatttaactactgcactggacgcgaagaaaatcagccaggagcaatataacgagacttctgagaggctggaggcaactcaccagtctaatcttgcgaaaatccgagcgcaacaggctgttaccccgcagcagcaggcggccggtgatgtggatccggtgcagaacctggcaaaccagcatgcccagcagttagcgctaatccagcaatacgagcagcagggggttatcgcccataatcaggccttagcactgaaaaaagccgctgatactcagtatgagcaggagcgccttgccgcgcagtggactttgttctctcagcaaagcgcagccaaccaaatgcttgcggcatcacttgatgctcttggcaacaacgcatcgagcgcctttgcggggataatcactagcactcaaagtggtgaagaggctattcgttcactcgctaactccgttgttaaccaactaattaactcctttgtgcagatgggcatcgactgggcgaagtcagcgattatgggggctacgactcagcaggccgcaatcacggctacgacagcagcacaggttgccggtattaccacgcagactgcagccagtacagcggcggcggccacgaccacggcggcatggacacctgcggccctcatgtcgtctatcgcgtcgtggggcgcggcagtggcaattggtgtcggggctatggctggagtcatggcgctggccggcaagcgcaagaacggcggccctgtatctgcaggtggaatgtatcaggtcggtgaaggtgggatgccggagatttaccaggccagcactggtaagcagtatatgatccctggcgataatggcagggtgatcagtaacaaggaaatgaatgcgggaggtggtggcggagtggtgataaatatccagaactactcgtcttcatctgtcgatgcgcaggctggtactgacgctaatggtggagtgacagtggatgtaatcgtcgctgacctgaataacggtgggcctatcagtaacgccataacaagcaacatgaacgtgaaacgtacgccaagagggcagggctga

SEQ ID NO: 92854 - DNA, 498 bp, Enterobacter aerogenes
atgccaattatcgactatcccgactggctgccgctggcgcagaaggccagcaaaaacatgacgctcgataccgggttccagaccgatcagccagcggttggcccggccatctttgagaaccagaccgatgacctcaaggcgacatggtcgcttacgtggatcttcaccctggcagaggaacgcgcattccagcagtggctgcgaagtcctaactatctcaatcggggtctgaactggttccggatgaatatcaatctgggaggaagtggcctgcagttgcaggagcttcacttcacgaagatgccggtccagaccagcattgacggcggagtggtgacctggacgggaactgttgttgccaaccacctgtataacgctgacgacgagttcgacgacatcatcgttgagttgccgccgccatgggatacgtggctggatatcgtagtgacgggttatccggacgggagagatccggaatcattgccgagggtgccgtaa

SEQ ID NO: 92855 - DNA, 471 bp, Enterobacter aerogenes
atgccgagcttcagagagtacaagcagcagcgtccgacgcgcggcctgtacgacaccatcacattctatcatccatcatttggctatgtccgcatggtcaataagcagttctttccaaaggtgctcggcggccagacattcacgcctgcgcgatttgaaatcgaagagagccagcagagcggcacaccggtgattgatgctacggtgaagttggggagactgtcgtcggatatcaaaacgttgatgaagcaatggaaagggtctgacagactaacctcgattacagccatgcgacagatcttcgacagcggagacgtttctgcgccgattaaatcctggcagttatacgtcaagactgtggatattgacgccgacgccgcatcagtaaccctttctgtaaccaatccgctgaataacaacatagggagactctatgacccaacggaatacaccggcctgcagtacctctga

SEQ ID NO: 92856 - DNA, 417 bp, Enterobacter aerogenes
atgacccaacggaatacaccggcctgcagtacctctgagtttattggaaaggttatcggcgttccgtgggctaaccgtgcttgctcgttcgagagagtcgattgctgggggttggtcgtgctgtattaccggcatgtgctaggtatcgagctgcaccagacgccggactacgaagccggtgctgacttttttacctgctatcagggtgatgtagttttctggcgccgggtcgataaaccggccgagggcgggatatttgtcgggtaccgcggcgcgcaaccggcgcatgttggcctggtgcttaacaggcaggtgctgcactcgcgaggtgagaacggaagcgtgcgtatggactcgttgctggtcattcagcgggcattcaccaaagtggagttcttcgaatatggcactggttga

SEQ ID NO: 92857 - DNA, 2478 bp, Enterobacter aerogenes
atggcactggttgaaatatcgaattttccaggaacgcctaagctgcgttgcagggtgccaaacggcacccttttttatgactggctggcagccaatgacgctacctttcaccgtgatctgctgatcgtccgcaacggcgtcaagctggacgacgatgacgagctggcgtttgagctgagcgaactggataacatccagatattcgaccagccgaagggtattgttgaagatattctgagtcctatttttaaagtagtagggcaggtgttttcgtttctggcaccaaagccagccatcgcaaatactggtggtaatactgttgattctcctaacaatagcctgaccggtcagacaaacactgcgcgcgtgtataaggctaagcctgatatctacggtcaagtccgttcattcccggatctgatacaggaatcagtatttgaatatgtccgtcaaaacgataaagacggcggcctgaagtatgtcaccgagtggatgtgcattgggatcggaagatacgattacgagtctgtgcgctactcagagtctagcctcggctcgctggccggtgctgagtatgaatttcatcaacccggtgaagttattccgcaaatcgttgagggttatggcttcgatgacgtcgacggacaggaagttccaggccagaacgaggctgatgattttcctgtcgagacggccactgccaacacagtcgttagtggtacgtattcaggcggacagatagccatgcagatcgtgaaacaggctgaatttgattacttcatggagctggttctgccacatgcagtaacattcaccatcaatgtgacatacaacactgcatcaggtagcgttaccacagatgccacgttctcagggactttaatctcggcggtagagacgaatgacggcgcagagattaacccagtgagctggtacacgtttacgatgaaccagcttgatgggccacaggatattcccgcgacagcgaccatcaacaccacgacgttcattctgaacgacaacgaagcgctggttgttggtccattcttctcaccagttgagtcatcacagctctggctgcacacgcagtcgagcctcggggggaaaaagcagactaactggaaggtcgttatctggaaaatcgacgacaattacaaccagataccgggaaccaccgagacttttacctattaccagggaacaccgcacgaccataccagcgaagtgttttaccgcaccgataaactgactcctgcagccgggttcggcaagtacgcaatcagctttcagcgtacggataactcaagtgacgcgtcagtcctgaaggttgaagagatccatgccatcaacataaggacaaacgtcgttcatcccacagatactctggtgcgtgtgaaggtgagggcgacggaaaacgcgctgggaagccgcgaccgcaaatataatgccctggtcacccgtcgcactattacgtatgacctcagtacacaggcggtggattacacgctcaggccgtcgcgttcttttgctgatgcggtggcacatacctggctaatcatgggagggcagcctgtcggcagtattgacctttacggattgtattcgattgctgagagcttgccagataagcgcctgggttacttcgactatacgtttgacgacgagaacgattcacttggggatcgcgtgcaggctatctgcaatgcagcatcagtggtggcgtactgggatgatggcgtgctgacattcaccagagaccaaaaggttgattacccggccgccgtattcaaccgggcaaacatgaagacggacgagtacaaaatgacgtacgaagctacgctgccaggtggttatgacggcgtgcaggtgtcatacgttcatcccactacgaacaacaagacgtacatcaacttccgcgtgctgaatggcgccatcgttgaacaggaagcggaaaacccgaacaaactggagatagttggcttccgtaatgagtatcaggctcgtgagcgcgcgctgcgcgaaacaaagcgcctgatttactcgcgaacaaagatgaacgccaaagtttttgaagacgggattatgcaggtaggcagtgtcgtacaaatcgcggacatatacgacagcaaccagcagcagggctatatcaccggccgtaccgggaacgtctttgataccagtgaaccgatcagctttgccggagatatgtatgtgctggtgaccgacagcctgggtaacccgactctgcgctatccggctacggcccgcgttgacacgaagtacggattcaccgcagcaataccagacatttcactgaatatctggaatggagacacggtgcaactaccatcgcgctacatcattgcgacagtagaggagctggacagtcaactatggacagtcaacagcatcaagccgaacgccgataacacagtatcgctgacggtctcggaatacagcgacgctatctaccaataa

SEQ ID NO: 92858 - DNA, 2088 bp, Enterobacter aerogenes
atggccacgacacctacacaacttcctgtaccgagtgagactccgcgcgatctgaaatttaacgcaggtaaaattgatgagtttgtgacgggggatgtgcattattacaccgacagattcgggaaaaagcacattacaatggctggaatgcatgctgagtttgatgctcagctcgccagtcaggaagcgcgcttcgatgctttcattgagcgatctggctaccaggtcatcggtgattatgccgatggtccactgactatcaccgagtataatcaacttattcgctatggtaacgaactgtggaaacttacggccgctactgatttaccatacaccactgcgggaactactgatgaaacatggaatgcgactgactctttgcatttcgtttctgtcggggatgccgctcttcgccaaaatcttggttcaagcgaagatggattaggcggagatttggtaaatacaccttacggactaagtgtaaatgaaatgctttctttcggccggatagtatatccagaaatgttcggtgtcggaattttagcgcctacagatgaccagctttggtcattaatgttttcatatcttgagtcgttgccagatactcttctcggaacttcgttatcttacacaattgatcttaggggtaagcaatatactctatatgaaagccatgatttagatattaacgttaatattattaacgggatattattaatgaatggcggtcagatagttttatccagggaagccgcaggggaaagaacaaggagaataattttaaaggatttaaaagtaagatatgtcgggacgacatattacccagacgcacttataaaagtggcacgttgctataacagcatgtctatcagttgtgatttttgggcaggggatacaactgcaactgatggaagtgggaagccattgagagcgcggtatggcctgtggttagggtctaaaagagcgtggggatgcagtattattggaggcgagtactttggtggagagactccatgtcgcattggttacactaatgaccatactggaatctctatagttggcggaacttaccatcatggctgggttggcaatttaatgttatgcaaccctgctggcttctctgttactggtgccaatatcgaacactccgaaaatggagcctggggtataggtattgcttcaggtacaaatgccgatgctggctctactgtaataaacccagctcatggaggaaccatagaaggatgttatttctataataacggtaatggtagtactggcagtgcgaatacggaagctggtgtactgattggatatgatctccctggcactcttggatgggactatgcgggattccttattaccagtcaaaacactgctcacagtatttctgtcaaaaactgttatgtggtttctccaaaacaaaactatgccattaaaatgcgtggcctttttggacttcatgcagaaaataataaagtgacttgttcagttgcaggaagagcaattcatttctcaggaacatgtgcaagatcacacgcttatgataatagaaatcagtctactggttctgttgatgaagtaacatacgattcaacaaataagccgatgataggggcaagagccggcacttttaatccgtcattaacaggatcagccaccgctggggtcattacctattcaacaaggggtggtaactatgagatcagcaatgacagttgcaaattgtctctatggatgacgattggctccattactacacagcctgccggaaacctatctataagcctcccaatagcaattgctcctggccagcgcagtgggactggcgttcattgccaggttcttcttggtaaccagacgtacgaaatccatggcgtattggatgaggataactctaaaactgtaacctctacattaaacataccgaatagaaccttgcctgttacttgcagtgtcacgtcaggaacggcattgaatctgtttttaggtgggcaacctatggatggttctgttgtaagagacacgactgatatacgcatatccattgaatatcctgttgctggtgcaacttacataggagcttaa

SEQ ID NO: 92859 - DNA, 267 bp, Enterobacter aerogenes
atgtcgcttataaagaccactacatttaaggggttgactgttgagaatgcaattttcactgtcgagaagatcaccatacaaggcaaccagttggatttttttgtttcgatgaaagcagataaatcctcacttcctctggacggtgaaacgcacggatgtgcttatattaaaaacagtttgtcgccaatcgaacaggcttatgcctatctaaaatcactacctttttacgaaggggcaggggatgacagcgcaatgtcagaaaattga

SEQ ID NO: 92860 - DNA, 1206 bp, Enterobacter aerogenes
ttgagaagtaaatttaaatatgatgatattgccattaggctatatctatttgcacttgcaataataacgctagtgccttttggtcgtggtagtatatctgggctagagccagcgattccatttattatcatttcatttgctgtttttgcaatgacaagaaaaacaatagataaaaagaaattatctgttttatttatgttctttttgtgggcgtcatggatcgtagcaggtatagcgtatagctatctaacctacgataaactggcagatcatgagtcatcatttctacgatatgtcagacttcttgaaatgtactttccagcgcttttagttttcgcatttattaataagcttactgaagagcaaaggaaaactgtctatcgttttttcattttccttttctttgtcgttaccatagaggcggcctggggttggttcatgcaaatggacatccttgttgcgaagcaaagatttagttacccaggaatgggttacatttatagggctggtggtgttgctaatgactccagtgcgtatggtagcttggcgttaattcttggtgttgcatctcttattggtcttcgccataccagcaaaagcaaaatactttacattttgatactgcttggccttgtgtttaacatatatatttcacttacgcgaactctggtttttgcgctggcggtatatgtattctttgatttaataagaacaagaagccttagcgtattcaagatgctgtttttcgcagctatcggtgctggtgttatcatttacggcattagtaatgattacattgttgcgctaatggacaggattaccgggtcaggtcagattgatatcacatctggacgacttgcaacatgggctgccgttccagacatactaggcgaaagcccaatctttggtgttggttatcgtatggctactgataagtacggcatcgttcctgataacgtgttcatatcatccttgctggaaacaggcgttattggtttagctttgtacgtgggtatgcttgtgtctctgtgctactgcgtttacaagaacaactcagaaagtctcccgcttctccttgcgtttatagcatcagggatgtttgttgatatatctacgttctggattagtattcctgcactaatcttctttgttgcagttaacagtcagcgcgatgaggatgatggtcgccatcgcgctatagaatga

SEQ ID NO: 92861 - DNA, 1254 bp, Enterobacter aerogenes
atgaaaagttacagcaggagagatgccatagatatggcattcaaactaggtgtgggcgctgctcttatggcgtccataccaaaatttgcatttgcatcaggagcgtcaagattcagcgttaccgactttggggccaaaggggacggggtgactgacgactcttttgcgtttcaaaaagcatttctcaaagcaaatgaggccggcggaggaacggtttactttcccccgccaaaaaaagaatatttgctgaagttcccgatatttatatttaacaatactgaagcatatggcgacggtaaagatacgcggattgttttcgagaatccggtgttcagtaagggccgcggagggttcgttataggttcaagcctggaggcaaacagagatctggcgttaactaggttcagtaaccgttcattgtccacgacgatcaaccagaacttcaagaatcccgtccagcggcactacatacgtgatacgccggagttagcccaggcgaaagggagcagcttgcatgatatctatctggaagcgagattcactgcaggatcagaaagcaactggggagggtacgggattaatttcgtaaacgccattgattgccatgccagaaatatctggggtaaaggatggacgcaacttattggaatgggctctgacactccaccagaaacaccatcaaaccataattgcagcgcgaaaaacttgtatgttctagagccagacatggtcaggacatattactcgatagggtttatggctaactctagcaattgcacgattcaaaatgcaaaacaactaaaaccaatgtcagagggaagtaaaaacggcagtggcgtagcgttgaacttttgcgaggattgcattatttcagacatagatattcctgaccttggaagaactcaaacctctgagggtgttcttataaacaattcttctggttgtttgattcagaacataaacatcggcaatgctaaaaaagccgtgtcaacattctttaaattcaaagacactcaaaaggaatttaaacctaatatgattaagaatgtattgggttcaaattgcgacattgtattgtctgtatactccaaatttaacatcataagaaacatcaaaggtgagaattctggacgagttatagccttgatgaatactaatgcagcgagaaatgttataagtgcccctgaggcggatatctccaccccagggaaagcaccgattactacattgatgaagcttaataaaatagagtaa

SEQ ID NO: 92862 - DNA, 285 bp, Enterobacter aerogenes
atgaacatcgaagatagtaaacgtcacgacgccgatgacagtaacatcgtcaagggcctcaccttctatcgcttcaccatcttcggtaatgagcgcctttcctctcagtatggcaagctcaatcccgccgccatgctggataagcagttgacttccctgtcttggattaagggagatatccagcacaacgcaaccgccagatcgctcgaagatgagcgtatttgggcctacattgcagatagagttaacagacagtctttgctcgacatagtccgacgcgggtga

SEQ ID NO: 92863 - DNA, 1032 bp, Enterobacter aerogenes
atggcgcttaaactattagccaataataacgcaaagagtgtactcgctgcaggtattagcgcatctgctaccgttattactgttggtgcaggggctggtgctttattcccctctcctgtatccggggagagttattttaaattaacgataaccgatgcggccacgaaaacgatttctgaaattatgcacgtcacgtctgtatctggtgacgtaatgacggttattcgtggtcaggaaggaactacggcacgcgtatggtcaacgaatgatattgtcgcgaatttaatgaccgctggttcattattatcatttctgcagatcagcaataacttgtcagaaattaaagacgccggacaggactcggtaaaccaggcgcggtataacctcggaatttctgattcatcaggttttgttggtcgccttcttgggtctccgaaaacattttatgccaacgggacttacacaccacctgcgttagctaaatatgcgagagtaacccttaccggtgccggtggcggcggtggtggctgccaggcctccaacaatacagaaaccttctccggtgccggaggcggtgcgggcgcgaccattatcgtatgggttgacctgtctgctgccagttcttatgcgattactgtcggcaagggtggtaagggcggagttggcgcagtaagtggttcggatggtggggccacctcgtttgccagcctgttctcagctcctggcgggaaaggaggagtgaagtcaggcgtgtccaataccgccggcggcgccggaggtacggcggcgaccggagatatcaggatcaacggtggtaccggctcagatggacagacagggtcaagccttctgacgggcaacggtggggcgtcgtattttggcggcggtggccgggcgggttctcaggccggtattgctggcgcagctcccggctccggtggtggtggcgcgtatgacctcgggtttaccagcacggcttataccggcggcgatggcgcggatggcatcctgatcctggaagaattcgcgtga

SEQ ID NO: 92864 - DNA, 1017 bp, Enterobacter aerogenes; identical to SEQ ID NO: 88320

SEQ ID NO: 92865 - DNA, 723 bp, Enterobacter aerogenes
gtgactccgattcggactctgacagcgactccgactctgacagtgattcggactctgacagcgactcggattccgacagcgattccgactctgacagtgattcggatagtgacagcgactcggactctgacagcgactcggactctgacagcgactcggattccgacagtgactccgattcggacagcgactcggactctgacagtgattcagactctgacagcgattcggattcggacagcgattcggactccgacagtgattccgattccgacagcgactccgattctgacagcgattcggactccgacagcgactccgattctgacagcgattccgactctgacagcgattcggactccgacagcgattccgattccgacagcgattcggattccgacagcgattccgactccgacagtgactccgactccgacagtgactccgactctgacagcgattcggactccgacagcgattccgactccgacagcgactcggattccgacagcgactcggactccgacagtgattccgattccgacagcgactccgattcggactctgacagcgactcggattcggacagcgactccgactccgacagtgactccgattcggacagtgactcggattcggacagcgactcggactccgatagcgattcagattccgaaccgcaggcaaatgatgatacgcatacggcagctatcgataccgtag

SEQ ID NO: 92866 - DNA, 1785 bp, Enterobacter aerogenes
atggcgaccgtattgaaaaaaaccgatgtggcgatcgttggcttcggctgggttggcgcgatcatggccaaagagctgacggaagcggggctcaacgtcgtcgcgctggagcgcggcccgatgcgcgatacctggccggacggcgcttatccgcaggttatcgatgagctgacctataacatccgccgcaagctgttccaggatctctctaaaagcacggtgacgattcgtcacaacaccagccagcaggcggtaccctatcgccaactggccgccttcctgccgggcaccggcgttggcggcgcgggtctgcactggtccggcgtgcatttccgcgtcgatccgatcgaactgcgtatgcgcagccattatgaagagcgttacggcaaaaacttcattccccaggatatgatcatccaggatttcggcgtcacctacgacgaactggaaccgttcttcgataaagcggaaaaagtctttggcacctccggtaccgcctggtcggttaaagggaaggttgtcggtaaaggccgcggcggtaacgcctttgcgccggatcgctcggacgatttcccgctaccggcgcagaaaaatacctggtcggcgcagctgtttgaaaaagcggcgctggaagtgggctatcatccctataacctgccttccgcaaacacctccgactcctataccaacccgtatggcgcgcagatggggccgtgtaacttctgcggtttctgcagcggctacgcctgctacatgtattcgaaagcctcgccgaacgttaacatcctgccggcgctgcgccaggaaaaacgctttgaactgcgtaccaacgccaacgtactgaaggtcaatctgaccgacgataaatcccgcgccaccggtgtgacctatgtcgacggtcagggccgtgaaatggaacagccggcggatctggtgattatcggcgccttccagttccataacgtgcatctgatgctgctttccgggatcggtaaaccgtacaatcctgagacgggcgaaggggtggtcggacgtaacttcgcctatcagaacatgaccactatcaaggccattttcgataaagataccttcaccaacccgttcatcggtgcgggcggtaacggcgtcggcgtcgatgacttcaacgccgataacttcgatcacggcgcggcgggcttcgtcggcggttcgccgttctgggtcaaccaggcggggaccaagcctatctccggcgtgccggtgcctccgggtaccccggcgtggggcagtaaatggaaatcggcggtggccgacacctacacgcaccatctgtcgatggatgcccacggcgcgcatcagtcctatcgccagaactatctcgatctcgatccgaactacaaaaacgtctttggtcagccgctgctgcgcatgaccttcgactggcaggaaaacgacatcaagatggcgcagtttatgttcgataagatggcgccgatcgccaaagcgatgaagccgaaatatatgctcggcagcccgaaaaacgccaatagccactttgacaccaccagctaccagaccacccatatgaacggcggcgcggtgatgggcgaagatccgaaaaccagtgcagtgaaccgttatctgcagagctgggacgtgcataacgtcttcgtcatcggcgcttccgctttcccacaggggctgggctacaacccgacggggaccgttgccgcgctggcctactggtcggcgaaggctatccgcgaacagtacctgagaaatccgggtccattggtgcaggcataa

SEQ ID NO: 92867 - DNA, 207 bp, Enterobacter aerogenes
atgattgagttatcggtagacaatctgcatctgacctatggcgacaacccggtgctgaaaggggtgtcgatggagctcaaacgcggggaagtggtgtcgctgcttggcccttcaggtagcgggaaaaccacgctgttgcgtgcggtcgccgggctggagaaaccgaccgccgggcggatcaccatcggcaataacggtggtttatga

SEQ ID NO: 92868 - DNA, 417 bp, Enterobacter aerogenes
atgccagatattgcttctataaatgctggtctgtctgcagtaaagcttgcctttggtatggccaaagatcttaaagatgcgtctgctgctttcaatgatgctgaaatgcgtttaaaaattagtgatttatataatgcgcttagtgaagcgagaatcagtctcgcggaagcacaagtagaaatagtcgagcttcaagctgaggtccgcagattagaagggaagcttaaggaagatgatgaattagtgttccgtgatggtttttattatcgtgaagttcctgttgatggtaaatctaacgggcctttttgtcctaagtgctacgaggatcagaaaaaaatatcatccgtcagcgcggctacagggattcactcccactttgggaaaaaacactgtcatggctgtggaagctacttctga

SEQ ID NO: 92869 - DNA, 975 bp, Enterobacter aerogenes
atgtaccgatatattaaaaaacgtgtttacgcattactggggagtttgttgggtatcttgcttactttggttttgaccagagttctgcttgttagcaatgacatcactacaaaagcctggttcatggcaactttcgatgccagcatgatggttgtttttgctactcttttatcgttgtattgcattaacaaagtcagcaataaatttcccgatacaaatacacttctgcccttctttggtgtggttgtctggaccttactgcttttgagctactatgttcttagatataaaaatgagtaccaatctgctctctcaatcatcgttgctggttctatcgccggtatggggtggtggattcaattcatcacctctgctgcaagcgaccgccgtaagcacacactaaatattgtcttaagtacgagaacctgctctgagtatcagacacatttaagaaacttcacccgtctttggagagggaatcgccatgtacctaaagagctttgtgaatggcgtgatgaccccgacaatcctaagttcaaagatgcaaaagttcctgaagacgtagtaaatgctatcaatgggctagtatatatccttaatttctttgagtttcttgctcaaggaataaaagctaatgaccttgatgataaactactgagagaatgtttttgcggctttcttgaaggtcttgaaaggcgcgcatactacatcttatctgaagctcagaaacgagatgaaagatacttcgaaggcattatttacttgtccaaacgctggaatagtggaaaatctcttatcgaaaagcataggcactctacaccaccaattgacataggtaactgttttcctgagaaagaatccgttatgaagatgttagggataagaacgcaaagcgaaaataccaaacgccgtagaaatcgccctcgcagagctaggccagtacatgccgaagctgccaattcgaacgtagcgtaa

SEQ ID NO: 92870 - DNA, 147 bp, Enterobacter aerogenes
atgtgtggacgctttgttcaatcacaaacgcgagaagaatacctaacctatctttctgaagaggctgaacggaatatcacctttggtcctgaaccgatcggacgatacagcatcgcgccaggtacacgcgtgctgctgttgagctaa

SEQ ID NO: 92871 - DNA, 417 bp, Enterobacter aerogenes
atgtttcagcccctctggcaacatggacgtgcgatttgttttgctgatggctggtttgagtggaagcgtgaaggtgacaagaaacagccctacttcattcacaagaaagacggcaagcccatcttcatggcggcgatcggcagtgtacctttcgagcgcggagatgaagctgaaggatttttgatagtgacagctgctgccgaccaagggttgatctatattcatgaccgccggccgctcgtactggttccagaagccgctcgcgaatggatgagacaggatataggagggaaagaagccgaagaaatagctgcggacggtacggtgcccgcagacaagtttatctggcacgcggtgacgcgcgccgtaggaaatgttaagaatcagggctccgaactaatcgcccctatcacctga

SEQ ID NO: 92872 - DNA, 906 bp, Enterobacter aerogenes
atgtttgctctggttgatgtgaacagcttctatgcaagctgtgaaaccattttcaggcctgatctgcgaggtaagccggttgttgtattatccaacaacgatgggtgcgtgatagcgcgttccgccgaagccaagaagcttggcatcaagatgggggatccgtacttcaaatgcaaagaccagttccgccggcatggcgtggtttgcttcagttcgaattatgaactctacgcggatatgagcaaccgcgtcatgacgacgcttgaggaaatgtgtccccgggtagaaatctacagcatcgacgaggctttttgcgacctcacaggtgtgcgtaattgccgtgtgctggaagagtttgcgccagtgaaacaggaaatcgtctgcagccggtcgttcggggagcgcattaccacctatgaacaaatgcgccaggctatctgttcatatgcggcaagaggcgcagagaaacttcgtggtgagcatcagtattgtcgttatatctccacctttgtgaagacatctccctttgcgctgaacgaaaaatactacggtaacagcggatccattaagttactgacgcccacgcaggatagccgggatatcatcaatgccgcggtaaagtgcctggatgcgatatgggtcgacgggcaccggtatcagaaagcggggatcatgctcggcgatttctatagccagggtgtcgcgcagctgaacctgttcgatgacaatgcgccaaggcagaacagcgagaaactgatggaagttcttgaccacctcaatgcaaagggcgggaggggaactctctattttgccggacaggggatccaggctacctggcagatgaagagggaaatgctttcacctcgctatacaacccgtttttcagatttgccggtagtcaggtga

SEQ ID NO: 92873 - DNA, 291 bp, Enterobacter aerogenes
atgtatctacagcagcccatctacgaagctacgggtataagccagtttgcaacgttcgttgatacgcagcgcggagtcgctgtggttgagcgcgcttcagcgccgttagcggcatcggttttgcttatttcctattacggggtgcagcaatttgccaaatttattggcggatcactgattacagaggacggcgactctattgaaggggatgctctctctgatgtagagctgattggtgtggtcactcacatcattagtaaagccggctttgatgattgcccggtgatgtga

SEQ ID NO: 92874 - DNA, 3036 bp, Enterobacter aerogenes
atgacgatccgcatttatccctcccggctccccggcgaaccgctggaaacccatcagcacgcacggacgactctgcatgagtggatgcagaggaatgtcgaaaattatgatcccgggctgccacagccaatcagcgttgaaattgatggcgtgcccgtagcatcagaggaatggccgcggtgcgaactgttaccagatactgacgtgaagatttaccccgtcccttacgcgacaggctttgccattgccgccctggttgtggcggtagccgctgcagcttattccatctacatgatgaataacctcgatacgggggcctacgattcatctacgggtaagtctctggacttaaacccggcaaaagcgaacacggcaaaacttggcgatcctatccgggaattattcggacgtgcgcgggtttatccggattatgttgttcagccggtaagtcgttttaaccctgatgatccaaccagaatgacggttgaaatgatgatttgtgtgagccgcgggaatgttgcttttacaaacggtgatatcaggattggctcaacgcctgtttcggctcttggcggttcattttcttatacgctttatccgccaggggctaatgttactggcgatcgtcgcagcgaaaactggtttaactccaccgaggtgggcggaacgtccagcggcagtggccttgatatggcgcagacggcgccggactcatccgatattaccgccgacagcatgaccgtttcaggatcgtcggtttcattcaccgggctgagtgatggtgatgatgataattcactgcctgagtcctgggtggagggggcgctggtgactatcatcgcgccgaccaattacctgatctcttcttcatcgggttacagcgttctgttcagtgacacgctgactgagattaatccctatgccggcatgcccgttacgctggaaattaacggggcggaatatgatctctttatcgctacgttcacacccaaacaggatgctgttccaggtgtggggggatcggctgcttctttgcgtgcaagcgcagcaccaacaacctatgatttttcgactaacagccagacgtttaacctgacctggcaggcgacaacttataccgtttcgcttatcgccaactacggcaatatgtctggcctgctggcggcaatcaatgaagcgatcgccgggtctaacctggtcgcgcaggatgatggcggggttgttcgcatcgttgagaagtccagcccgtggctgggcggcagtattaccgcctcatcacttcccgtttccgtattcggggataacccggcgttcactgatggtaccgcatccagcggtggcagcccggcgatcaccgccaatgtcacccttgcgtatggcagcgctggcggtgcagcattttccggcgttcctgaagggacacagcggctgtcgctggcgcaccggggaaatgaataccgtatttcctcagcagatggaacgaccgcgacggtacagcgcatgattaacggaggtattgatcctacctggccggggttctcacccaggacgatgattgattaccaggcgaccgggattaacgacaacaatagctggatggggccgtttcttgcctgcccggataatgaggtggtaaatgcatttgaagtgaatttttcattcccttccggcatttgcggctttgacaacaaaggtaagaagcgcgtcaggcactgtgaatgggaaatccagtatcgggtgtatggttccggtaccgggtggataagccggcagggtgtttacgaaatgaagaacataaatgccctggggttcactgagcgctttgaactgtctacccctggtctggttgaggtgcggtgccgccggcgcaatgagcaggggagtaataacgcgcgtgattcgatgtactggcaggcgctgcgcggcaggttactgacccgccctgcatcatatgccggtgtatcgttaatggccgtgacggtggaatctggcggcaaactggcggcgcagtctgatcggcgcgtaaacgttgtggccacgcgtatttatgataccggcgctccgcggcgaatctccagcgcgctgtatcatgtcggtaattctcttggcctggcgatggacaccgaagccattaacaccctcgaggcaacctactggaccccgaaaaatgagtatttcgacttcgcgacaggcgacagtatctccgcgctggaaatgctgcagaagatcaccacggcggggaaatcatatttcctgctgagtgacgggctcgcatctgtaggcagggaagggattaagaactggtccggcattatcagcccgcatgaaatgaccgaagagttacagaccaccttctcggcgccgtccgccgatgattacgatggtgtggacgtgacctatatcaatggcacgacgtggtcagaagaaacggtgcaatgccggactccggataaccccacaccgaggaaaattgagagttataccctcgatggggttcttgacccgaaccgcgcctatcaaatcggcatgcgccgcctgatgaaatacctctatcagcggctgggccataacacgacaacagaactggatgcgctggtctatcagtatggcgatcgcattctgctgacggatgacattccgggaaataaaacggtaagtagcctggttatggatatggccacatctggcggtcaaacggtatttaccgtctccgagccgctggactggtcctttgaaaacccgcgcgcaattctgcgttaccaggatggttctgcctccgggctgctggtggccacctttgtcggggattatcagttgtccgttccgtggcaggctgcttttgatgaaattctgctggacgatccgagcattgagccaccacggctggtgttctgcagctcaacgcgcagtgtttatgacgccatttttgaggagatagccccgcaggcggacggaacctgccaggtgacgaccagacagtatagcgacattttctaccagtacgacgacgcgccatacccaggcagcgtttcttaa

SEQ ID NO: 92875 - DNA, 381 bp, Enterobacter aerogenes
atgtttgaacctgataaatacctttcggtcacctggctgaagggcggcagagtgtatccacagctcgactgctttggcatcgtgaatgagatacgccgtgaccttggcctaccagaatggccggatttcgccggagtgaccaaagacggcggcggccttgataaagaagccagaaaactgatgttaaagcttgagcgttgtgaaccctgcgtcggcgctggcgtggcgtgttattcgggaaccatggtcacccatgtggggattgtcgttgagctgaacgggttgctgcaggtagcggaatgtaaccccggctcgaacgtttcttttatgccggtctggaaatttaaacggcgttttatcaaggtggaattctggcgatga

SEQ ID NO: 92876 - DNA, 2544 bp, Enterobacter aerogenes
atggctggaaagtccctcggtacattaacaatcgacctgatcgccaaagtgggtggatttgttcagggtatggacaaagccgaaagagcttcccaaaaatggcgtaaccaggtaactaaggacgctaaagaggtaagttccgcaataatctcagtcggcgctgccgccgcaacagcggcagttggcattggcgcagctggtttagctatcgtcaaaaataccgcacaacaagtaactgagtctgaccgttgggctaaatcattaaagatgtcaacccaggacctgttgtcatggcaatacgctgctgaacaagcaggtttaactggcgataatattgcagatatttttaaagatattaatgataaagttggtgatgctgttttaaataaatcaggtgaagcggctcaagccctcgatactcttggcctttctgcgaaaaagctatctgagcaatcacccgataagcaactaatggcaattagtgaagcattgcagaaaataccaactcaggctggcaaaactaatattcttgaaagtcttggtaatgatttatcaaaaatgcttccattgttcgataacaataatgagaagttaaagcagtttattcaattatctaaagactttggcatagccccgccgcaagaagatattgataatctcgttaaagtaaaccaattctttcaggatattgagacaagtgctcgtggcctgaaaatggaaatagcttctggacttgcgaaaattgatttatcaccgcttcagtccgggcttgatgacattcgtgacgtctttaccgatcctgccgtactccaggggctttctgaccttgtaggtgaagctgttagcctcgccggcgttgttggtcgtatcgctggtggattaggaacaattgcatcctatacccgttcgcgcattggtgctgtctcaggtaattatgatgcagctgatgagcgtgatgtagaacagcggattgaatacctcaataaaagaggaaatcaaagtcaagaacaaaagcaagaactagattttttaaataagcgccttaattttctccgttcaattaaaggcacgttgacatcggagcagattgaaaagggtgcaaaaggccttacatctttgctttctgatcttgggattgataaccctaaggtaaatgatttctcgttaggtaaaggtgaatctaatcagaatcaaccgaaatcaagagctaacaataattctaatgataatgcctttaaaaataggctgttagatttacagaaacaagctgctctaattgatacaacaggaaaaaaaactgctgagattactgaacttgaaaaattaaattttgacatatcaagtgggaatcttaaaaaactatcagaaccacagaaagagcaacttcgtactgctgcaaaagttcttgatgcaagaaaagaagaactccgtataaacaaggagaatgctaagcttgcagaatatgtatcaggtttaaataaacagaataaacttgttaaacaggggtatgataacgatctatccggtctttctctcggagggaaagaacgtgaaagaatgcatgaaataaacagcattcagcaggattatgaatcgcgacaagaggagctcttaaatcaacttcaagctggcgatattgaagaaagtttatatgaaaaaaagaaagacgccttaaaaaaatctcttgaagaaagattgcaaatccaaaaggattattaccaagagtcagataaactgcgtaatgattgggaatcagggatttctaattcattagcagacttcgttgacagctccagtgattattatcaacaagcagccgacgcaatgacatcaatcttaggggctgctacagactcagtttcagagcatttatatgatgttgttagtggaactgaatcgatgggagaagcaattaaggggatatttgcagatcttggtgaagcggttattaaagctctggttgatatggctgctcaatggattgtgtatcagggtgttcaaatgttggtaaataagaccgcccaggcatcagccatacctgcaatgattgctaacgcgcaagcaaccgcattgcaggctcaacttgccgcttttgcatcaacggctgcaatcccaatagttggaccaggattagctccagctgcaatggctgcagcagcagcggtcaccgagcccatggttgcagcaatttctgctgcttcactttcgggtatggctcatgatggtgtcgattcagttcctgaaactggaacctggttgcttcaaaaaggagagcgtgtaaccaccgcgaaaactagcgcgaaacttgatgccactctggagcgggtcagcaaagacgctactggcggaaaattacctgatgttcgtatcagtaccgttgtgaatggggatcctgaccagagaactctggctttgttgaaggaaacgcagaagcaagcggtacaggaagctctgaatgtgagcgcaaatcagatagctacaggaaccgggaaaatcggcaaggccatgggctatggttggaatgccgggaggaagttaacctga

SEQ ID NO: 92877 - DNA, 378 bp, Enterobacter aerogenes
atgaaaaagataattttagctttgttgcttggtgcttcgtctatagctatcacagcttgcgcaccatcagaacagaaaattgactacaaccagaagtcaatgctgttgtcccttggtatgacaaaaaatgatgttatgcagatcatgggagcaccgcgccggacggatgtaaacgcagaacgtgaacgctggatctattggaataagacacgttatgcctacacaattgtagacaatgaacagttagcaaacgatcgtttggtcgttacttttgtgaacgggaaagtaaccaaatgggggcagcaaacactgactgatgatctcatggagtcatcacaaaaaactgcccaaacctatgcagaggcatttaaaaagtag

SEQ ID NO: 92878 - DNA, 264 bp, Enterobacter aerogenes
atgaatggcatcggtggccgcacgatcgcagaggctcaggagcggatgagccgtagagaatttctggtctggctcaaataccgcgaaaagtatggacaattcaacctgatgatgcgtactgaatggggcgcctcactggttgcctcggttctggcgaacgttaacaaggcgaaaggctctccaatattcaaggttagtgatttcgcacctcatataaacgaacctccaatctctttagaagatgcgatgaatagttggcattaa

SEQ ID NO: 92879 - DNA, 354 bp, Enterobacter aerogenes
atgcaactcacgctagataccttgaaagaaacgggagcttttactgggcggccagtagaaaaagaaattaagtggaaaagtcgtgatgaaaaagagcataaagcgaccgtttatgtacgccctatgggctaccacaccacaaaagcccaattactggcctataacggaaaatctgatccggttgccggccgtattgcagcccatatttgtgatgaggaaggaaaacctatcttcactgaggccgatattcttggaaccgcctctgaagaacgtggtgcgcttgatgggccgatagtgattgcattactagcagtcattcaggaagtgaatgaactgggaaagactacgagctaa

SEQ ID NO: 92880 - DNA, 483 bp, Enterobacter aerogenes
atgtctgtgttaacgcagggtacccaattatatgcgctcattcgtggtgtcattcatgagatcgaatgcatcaccagttttaacccgggcgcaaacccggcagatcaaattgaagatacctgcctcagtgaacggaacagccgaacctataaaaaagggctgcgtacccctggccaggcgtcggtcactatcaatgccgatccggataacgaatcgcattatttgatgtggcaaatggcagagcttgatgagtatcaggatgagctaatccagtgggcaatcggctggtctgatggcgagtcagttcctactgtttctgctggcgaaatggtacttccaaccgatcgaacctggtataccttccgcgcttacgtgagtgatttcccgttcgattttcaggctaacgctgttgttgctacaaatgcctcgatgcagcgcagtggtcctggcctgtgggttcggaaaatcgaagccggtagttaa

SEQ ID NO: 92881 - DNA, 366 bp, Enterobacter aerogenes
atgattgcaccaatttttgctgtttgctctgctagccagttagtgaaggatttgctcggagaacatcccgtccgtctttatccattcggaatgcaggatgacaatattgtctatccgtatgcggtctggcaaaacatcgccggcgcccccgaaaactacctaaaccagcggcctgatactgatcgatactcccttcagcttgatgtttatgctgataccgatgcagatgtgatagcggtcgctagagcgttacgtgatgccgttgagactaaagcctatatcaccaggtggggagaacaaacccgagatccagaaaccgggagataccgatattcgttcgatattgactggatagtccaacgttaa

SEQ ID NO: 92882 - DNA, 543 bp, Enterobacter aerogenes
atgatggctgatggcgtagagattcaattaagcgggctggatgccttaacagctaaattagatgctgtatcgcaggtaacgcgggacaaggcagggcgttctgcattacgtaaagcggctaatgtgatcagggatagagcgcgggcaaatgccgcgcgcgttgatgatcctcagacgaaagaagctatctataaaaatatagtggccagcttcagcagcaggacttttcgacgaactggcgatccaacattccgcattggtgtaatggggggagcaaggcaatatgccagcaccaaacaaaacatcagaaaagggcgggcaggtcaaagttataaaaccctcggcgataagggcaatccaggtggcgatacctggtattggcgtttccttgagctcgggaccgagcatgcggcagcgcagccgatacttcgccccgctgtaaatggagtcgatacggaagtgatcaacgtctttgcagttgaactggataaggctatcgaccgcgctgtccggcgcgcagaaaaaaaggggacgacagcatga

SEQ ID NO: 92883 - DNA, 333 bp, Enterobacter aerogenes
atgcatgctggaaaacttcgtcatcggatagtactccagggccctgtgaaaactcagaaccctgataccggggcggtgattaattcctggcaagatgtagcaacgctatgggctgaagtatctgcactttccgccagggaattcattgctgcgcaggcctcgcagggggaaattactacccgcatcacaatccggtaccgacctgacgttacgaggaagcaccgtattctctttcgtggatcggtctacaacattgaaggtgttcttccggatgccgtaagtgggcttgaataccttaccctaccttgttctcagggggttaatgatggctga

SEQ ID NO: 92884 - DNA, 198 bp, Enterobacter aerogenes
atgaacgagcaactggtaaacgatctgatagtcgcgctgaacgaacagacggcagcacaaagggaacagacgatcgcgataaaccgtctggctgaatcaaatatggcattgtgcgatgtcattatccaatctctggctgacagcctcgaagagccagtcctttcgcaaacctatctgagtggaaagcccagggggtag

SEQ ID NO: 92885 - DNA, 327 bp, Enterobacter aerogenes
gtgattgaactggtaacgctggaacaggcgaaagagcatcttcgaattgatgaagatgctgctgacgacgatatcaaactcaaaatccagtcaggtagcgcagcgctgctttcgtatattcagggaagccgtgaactggttgtaaatagctctggagtgctgattgagggagagccactgaaacgagtccagggagcattgctgattctcctcggctatctcgatcggaaccgcggcggtgaagaagaggaaaagcttaaacaaggggagcttcctttgtccgtgacaatgctgatttatgatcttcgtagaccaaccatcatttaa

SEQ ID NO: 92886 - DNA, 1044 bp, Enterobacter aerogenes
atgaatgaacgcgaactatccctgataaaggtgctgggcgaggagtttggactggttctcgcagaaatgcgtgatagcttcagtaaaaccctgcaggagcagcgagaggaatatgaggaaaggctaaccagactcgcgaagcaggttgaagaaatcagtaatgcgcccgctcccgatttcgaaagcatggtgaaagcggaaattgccaaattgccaatgccggcagcgccggaacttccggatattgccgccatggtcagcgaggcggtaactgctatcccggtaccgcgtgacggtaaaagcgtaacggtcgacgatgtcacacccgttttacaggagctggtcagtaaagccatcgcagagattcctgcgccgaaggatggcaaagactttgaccccgccacgcttaaacaggcagttgaagaagctgtcagcgaggcggtggccgccattccgacacccctggacggtaaaagtgtcacgcttgaagatgtccagccgatgattcaggagctggtttccgcatccataccggatctgccagatgtgaaatcgctggttaaagaggcgattgcatcgctgccagcagctgagccgggtaaagatggagaagatgggcgtgacgcgctggcgcttgaaattctccccttcattgatgaagagaaaagctacccgcgtggaagctatgcaacgcataacggcggcctgtggcgcgcttatgaaaaaacgcacggtatgcgcggctgggagtgtcttgttgatggtgtggcgggcattgatatacagcgttctgagcagcgtagtttcaccctagcggttaaccgcaccagtggcgccagcgaaactaaatcctttgacgtgcctgtgatgatttatcagggggtattcaaatccggtcaggaatatctgcctggcgacacggttacatggggcggctcgctctggcactgcgacgagcagacgcaggacaagccgggggaggctggttcgaaaggctggacactggctgccaagcgtggccgggatgggagggacaaaacgtga

SEQ ID NO: 92887 - DNA, 1356 bp, Enterobacter aerogenes
atgtggaatccctttcgaagaaaagagaggcaagctaaaagcctgcagcagcctgtcaaccgtggcggctggacacctgtgatgagttatgtccatgaaccatacgccggggcatggcagcaaaacatggaaatcaggcctaaaacagttctctcctattatgctgtgttttcctgcataactctaattgcaagtgatatcgccaaaatgcctccgcgcctgatgaagcaggattccagcggtgtgtggaaggagatcaaaaccgggaagatagctgcgctgtattccagaccgaatgcctttcagaaccgtatccagtttttcgagcaatggctgaattccaagctgtgcgagggtaataccgtcgcgctcaagatcaggaacaaccgcggtgagataactgagctgaggctgctggactggaataaggttacgccgcttgtggctgatgatggctctgtattctaccagatcaacccggataacatggcgggtattgaatcacctgtaacagtgccggcgcgagaggttattcacgatcggttcaactgcctgtttcatcctcttattggtctttccccgatttatgctgctggcctggctgcaatgcagggccaccatattcaggaaagctcggcttactttttccgcaatggcgggaaacccagcggtgttattgaggtgccgggctcgattacggaagagaacgccaggaagattaaagaaaactgggacactggttataccggggaaaatgcgggtaaaactgccattctgagcaatggcgcgaaatatgttccccggacggtctcagctgctgatgcgcagactgtcgaacagctccgcatgaccgcgcagattgtctgttccgtgtttcacgtgcctgcttataaggttggcatcggtgaattgccgacgcatgacaatatcgaggcgcaggatcagcagtattactcgcagtgtcttcagtcccttattgagtccattgagttgctgctggatgaagcgtttgaacttgagggggatacgggaaccgagtttgacgttaatgcactgctgcgtatggacagcgagcgtcgaatcaaatccctgggcgagggagtgaaaaataccatcctcacaccaaacgaagcgcggaaaagtgagaacctgcctcctctggccggcggtgactctctttaccttcaacagcagaacttcagccttgaggcactggcgcgccgtgatgcttccgatgatccgtttggtaaaagcaattcgtctcagtcgtcagtcccaacgaatgaaggaaaggctttaaccgatgctgagcagtcggcagccaaagccatgatcagaggattacttaccaaatga

SEQ ID NO: 92888 - DNA, 1935 bp, Enterobacter aerogenes
atgacgcttaaacgcgcctgtactctcatgacggttaaatcggtgaatgaggatgaacggattatcaccggcatcgcctcaacaccgtctcccgatcgtgacggtgacattatggagccggagggggcgaaatttcgcagtgatacgccgttcctctggcagcacgaccgctcgcagccaattggcacctgcaccccaaaaatggtgaaagaagggctgcaaatcacggcaaaactggtgaagccgacgtcggatatgccatcacaactaatcgcacggcttgatgaggcatggtcctcaataaaagctgggctggttcgtggcttgtctatcggtttccgtccgatcgaatactccttccttgacgaaggcggtatccgttttttgtcctgggacctgctcgaggtctcagcggtgacaattccggctaactcggaatgttccatccagaccgttaaatctttcgaccgccagtttctcgccgcgtcaggcaatgagaagcaggtagtgaaaacccctaaaaccgctggcgctacagcaaaaaacactcaaaaaggaaataattcgatgaatatcgcagaacaaattaagagctttgaagcgaagcgtgcagcgctggccgcatcacttgatgaagtgatgtcaaaggcagctgaagaagggcgtaccctggatgctgaagaagaagagcgctacgacaacacgtccgcagagattaaatctgttgatgcgcacctgaaacgtctgcgcgacatggaaagtaatatggctgatacagctaagccaatttccaagaccgctaacggtgaagttactaccgttaaaactggcgcccctgcaattatccgcgtcgagcagaacttggaaaaaggcatcgcctttgctcgatttgctaaagcgctggcggcagcgaatggcagccgttctgaagcgctggaaattgcgcgcaaacagtacccggatgatgccaagcttcatcatgtactgaaagccgcggtaggcgccggtacaactactgatcccacctgggcgggggcgctggttgaatatcaggattatgcgcaagacttcgttgatttcctgcgcccccagaccattattggccgatttggccagggcagtatcccgtcattgcgtcaggttccattcaacatccgtatcccggcgcagacctcaggcggttccgctaactgggttggtcagggcaaagcaaaaccgctgactaaattcgactttgagtcgatcaccttcagctttgctaaggtggcggcgattgccgttctgactgatgaactgatccgtttctctaatcctgcagctgatgctctggtgcgtaatgcacttgctgaagctgtcattgctcgtctggataccgactttatcaacccggcgaaagcggaagttgccaacgtatctccggcatctattacgaacggtatcgctgcgatcccatccaccggcaatccggatgatgatgctgcagctgcgtttggtgtgtttgtcgcggcaaacttacagccgaatggtgctgtctggttgatgtccagtaccacggcactggcgctgtctatgcgcaagaacgcgcttggccagaaggagtacccggaaatgacgctgcttggcggtactttccaggggcttccggtgattgtgtctcagtatgtgggcaaccagctggtgctggtaaacgcaccggatatctacctggctgatgatggcggcgtggcggtcgatatgtcccgagaagcgtccctggaaatggaaagcgatccgactggcgacagcattaccccaacgggtactgaactggtttctatgttccagaccaacagcgtagctatccgcgctgagcgttggattaactggaaacgccgtcgcaccgctgcggttgctgttatttctggcgtgaattacggcactggcgcaggcagctaa

SEQ ID NO: 92889 - DNA, 1659 bp, Enterobacter aerogenes
atggcgcactggtcaaccgcctgcctggactgggaatcgcgtctaatcgccggcgagtccataattccaccgcctatttttcctgaccaggcacaacaggcgttaagcatttttcgcgaattgcgcgtttcagaccttccagggaagccaacattcggtgagtgttcagaggagtgggttttcgattttgtgaaagtcattttcggcggatatgaggctgaaacgggaaatcagctgatacgcgaatatggactgctaatctccaaaaagaataccaaatcgaccattgcggccggcatcatgctcaccgctttgattctctgctggcgtgaagatgaggagcatctgattctggctcccaccaaagaagttgcagataacagtttcaaaccggcagcaggcatgatccgtgccgacgaagagttatcagatatgttccagatccaggaccatatccgcacgattacgcaccgcgtgacgcgaaatacgctaaaagtggtggcagctgatacggacacggtatccggtaagaagtcaggccgaattctggtggacgagctatggctatttggaaagcgcgcaaacgctgaagcaatgtttatggaggcgcttggcggtcaggtatcccgtaatgaaggctgggtaatatttctcacaactcaaagtgacgagccgcctgctggggtattcaaagaacgcctcgattactggcgaaatgttcgtgatggcaaaataagcgatccgaaaacgctgggaattctgtatgagtttccagaacggatggtggaaagtaaggcttacctcgacccaacaaacttttatatcaccaacccgaatattggtcggtctgtgagtgccgaatggattgcagaccagcttcgcaagaaccaggccaaaacagatggcaccctacaacagtttctggctaagcacctcaatatcgaaattggtctgaacttgcgtagcgaccgctgggctggggtggatttttgggaacagcaggcgcgccgcgtcagttttgaagatattctccgccgttccgaggtcgtaaccgttggtattgatggtggcggtcttgatgatttacttgggctcgcagttgtaggtcgtgatcgtgaaactcgcgaatggttatgctggtgccatgcctgggctcacactatcgcgctggaaaggcgtaagagtgaaatctcgaaattaaaagattttgagagtgccggtgagctcactatcgttcgtcgagtcggtgaggatgtagaacaggttgcagagtatgtaagccgtatttttctggcggaactactcgacaaaattgggattgacccctcagaggtcggacagattctggatgcgcttagtgaggcgggaatacctgaagaagctgtaacaggtgtcagccagggatggaaactcggcggcgccatcaaaacgactgaaaggaagttggccgaaggtgtactgcttcacggtggccagtcacttatggcttggtgtgttggtaacgccagagtagagccgagaggtaatgccatcctcattacaaaacaggccagtggtaaggggaagatagaccctttaatggccctatttaatgctgtgacattaatggcccttaatcctgaacctgccaagaaagactaccaggtatttttcatataa

SEQ ID NO: 92890 - DNA, 510 bp, Enterobacter aerogenes
atgttaacagcgcaaaagcgaaaattcgcggtcgcgctgatgtccggtatgtctcagaaagatgcggcaataaaggcggggtattcggagaaatccgcacggtccaaagggtcgcagcttgctaaagatccggaggtcatcgcgtttattaaacgtaaaaaaaaggaagttatcgagacagacgacacgccaacatttggaaaaaaagtttacaccccatcggtaaaccccaacaaaaacaaagaggcgtcggcagcacctgaagaacctccttctataactggccagtatgatgatcctctcaagttccttatggccgttatgaacgattcaaccgaagaaatagacgtccgaaaagatgcggcaaaagccatgcttccttatatccaccccaaaaagggagaaacggggaaaaaggatgcgcgcaacgccgcggcaaaagtggcggctgggaaaagcaagtttggtgcaatggctccacccaaacttgttgtgaacaataaggggtaa

SEQ ID NO: 92891 - DNA, 369 bp, Enterobacter aerogenes
atgtctaaattgaaaaccctgcagccgaggctgaaagctatcgatacacgccggataaagccagtctatggcgagcaacgccgcattagtggcagcgccagggtaggtcttaagcggcgcatttatgtgcgtgatggtggtcattgttgcatgtgtggtcgtgttgtagacctcaatgagagcgagctggatcaccgcattgctttacagttcggtggcgataatggagagcagaacctgtggacactctgtattggctgccatgccgggaagtcggcaagagaagcgtctaccgggcaacccgatagcgaagccctgaagcatgacattccacatggtgatcaaggctcagaagttgtggtgatttga

SEQ ID NO: 92892 - DNA, 594 bp, Enterobacter aerogenes
atggtggaagcacaagtgaagtttgctgtggttggtcatcactctcgtcataagcaagccctgtgcctggctgaatcgcttggtgcggtcctcttgattgacaatggtgataatggtgcaaactggaatcatcgccgcgcgcttgaatgggctgccgggcaagattgccgagttgtcattgttgaagatgacgcgttacctgttgttggttttcctgttctggccaccgaatggttaacgcgattccctgattcgctggtgagcttttacctcggtactggtcgtccgccgcaatatcaattgcagatagccgagcggctaattatcgctgatgcaatccgggaagatcacataaccctgtcgcgcctcatccatggtgtctgctacagcgtgccacctcagcatatatgccgtgtgttgtcccgctgggatagcagaaaaccagctgactatgcggtaggtgatgcttatgcagggactgttgtctatccatgctggtcactagtcgatcatgcagatggccctccagcggaagaacattccgatcggcaaccaagaagagaacgcaggcgcgcatggaggttatatgtctaa

SEQ ID NO: 92893 - DNA, 1458 bp, Enterobacter aerogenes
atgcgggtaattattgatggcgttgagtatatacccgcagagaatcgaaacttaaaggttggaattgccataagcacccaccagcgctcagaggtattgaagcgagctattgagcagcacatgaagtatctgcccgccggcgcgctggtggttgtcatcgatgatggctccaaacctgctgcagtagttcccgatggcgtgcagctgctccggcatgaaacttctctgggtattgttgcctcgaagaacgccagcttatctgcgctgatggatgccgggtgtgaacatcttttcctgtgggatgatgatgcctggcctatcgctgatggctggcatcttccctacatcgaatcaccagagccccatcttgcttaccagtttctggacctggccgggcgcaataagctgaacgacatggcggtgctgtaccgtgatgataagcatgttgcttacaccgggcagcgcggagtaatgctttactatcaccgcagcgctatcgagaaggttggcggattcgatccggtatacggtcgcggtatgtacgaacatcccgatctggcgctacgcattcataatgccgggttgtctacatgggcgttcgctgatgtggttggctctgaaaaactcattcactcaatggatgagtacgaagagggtacgcgctccattccccggcctgaccgtgaagcactggttaaacgaaacgtcgggatatataacgccaggcgcgatagtggttataccgggtttgcgccatacggtatccattcgaacttggtgattacgtcgctgctcaccagccacccagacccacagcgcaacggcaagatgaaacccgatccgcaggctctacaggcttgggcagactcaataaccggcgcgctgccgattgtcctggctgacgaattgaaagagccgccaactggcgccggactgtttgaagtcccgcaggtagcgatgagcccttactttgctcgctggcttcacatctatcagtttcttcgtgagcaccatgagtaccatcttgtttggtgtacggacggtaccgacgttgaaatgttgcgagagccctgggcgaaaatggaaccgggtaaaatttacgttggctctgaacataagacgtatgccgacgaatggatgaaggccaatcaccacggcaaagcatatagcggtttcatcgagcagcattttgatgagccactacttaatgctggtctgctcggtggtagccgtgatgatgtgatggagtttgcacaccggatcatccggcagcattacctgattgaaagccaccgtttctggaagacggaggcagcgccggccacgctggtggatatgggcgctttcggtatggctgcaaagtctttcggagatcgcatcgttacaggccctcaggtgcataccatctttaaaacggatggcttcggcaaggagactgcatggtggaagcacaagtga

SEQ ID NO: 92894 - DNA, 312 bp, Enterobacter aerogenes
atgatatttcagatcgcgaagctctatcgctgtggccgatttattggttacgggattgctgtagaaggccaccttcttgatggtcaggtatcaacaacaatttcgacggaagtaaacaacttagccaccgttaccgctgtttttaatatgagtaacgagcatgccgaaaatcaaattacaatttgtctggacggggaaggttccgcagggaaagtagatttgatcaagcaggcagtagccgaggccgctgatcgtaactaccgtgatgttgtggagcggttttccaagccacggagcgatacatgcgggtaa

SEQ ID NO: 92895 - DNA, 348 bp, Enterobacter aerogenes
atgcgcatagtagacaggaatacattcctttctttgcctgctaataccgtttacagcttatcaaactggtctgctgaattaccaagcacatcaatttgtgggctgtatatcaagggagataccgtcgttggtgttgactattatgaacagagcattccagattttgactgggacgattcagatcaacatgctgatgtagttctctcagcggctgagaatggcgagaatataccgttatttctccactctgaaacaaggaatggtatgtttgacgagaagcaaatgtacgtcgtttgggataagcaggatatccaagtattgattgaacgattgcaagaatgcctttga

SEQ ID NO: 92896 - DNA, 201 bp, Enterobacter aerogenes
atgaccccattagttcttaccgcagagcaaatcaaagcgttagcggatttcgccgaacaggaaggccaaccttcttacaccatcacccacacgacaattcctgagttagaggctgatgacggaaccgtagttcccgaatataccgggttaattgcattttcggagtcagaggagcacggcgtgcttcaactcgaagattaa

SEQ ID NO: 92897 - DNA, 630 bp, Enterobacter aerogenes
atggatcaatctcaatttcagctggcggctggtataagcgccgggttaactgcgcgctggtttccgcacattacagctgcgatgaaagaatttggcatctcaactgccgtcgatcaggcgatgttcattgctcaatgtgggcatgaaagcctgggtttttcccaactggtggaaagcttcaattatagcgtttctggtttagccgggttcgttcgagcagggcgtttaactgaagaccaggcaaaagcgctgggccgccggcagggtgaaccatctttgccattggcgcgacagcgcgctatcgcaaatcgggtttacagcaagcgtaacggtaacaaaggcccgggtgatggttggctatatcgtggacgcggcattattcagataaccgggttggcgaattatcgcgattgcggcaatggcctcaaggtcgaccttgttactcagccagaactgcttgcgaatgatgcctatgctgccagaagcgccgcctggttctttactaccaaaggttgcctgaaatacccgggcgacttatctcgcgcaacccaaataatcaacggtggccagaacggcattgatgatcgacgtgcgcgattcctgaaagcgaaatcggtattggtggggtaa

SEQ ID NO: 92898 - DNA, 282 bp, Enterobacter aerogenes
gtggtcctaaatgatccaacagcaacaattaatgcactgatttgcgctggtgtggtggttactctgatgttttatcgtcgtggtggatcacgtcatcgcgaatgggtgtcacgtctggcatggctgattaccgtcatttatagctcggtaccgttcgcttatttgtgtgggatttatccccacgcatcctggctaacgatcgccgccaatttccttattctcaccgcgcttgtctccgttcggggtaacgtagcgcgcctggtcgatactctgaggcactaa

SEQ ID NO: 92899 - DNA, 387 bp, Enterobacter aerogenes
atgtccgatccgatttccggtacagggttagccggcggcgccctgacaggggctagtgtttacgggttattgactggaacagattacggggttgtgtttggcgcatttgcaggcgctgttttctacatagcgtcatcatctgaccttagcgccacacgacgactggcatattttatcgtctcatatattgccgggatcctttgctctggtctggttggctcaaaactatcggccctgactggatatagcgataaacctctggacgccatcggtgccgtaatcgtttctgcgttagccgttaaaatcctgacgttcctgaataaccaggatgtcggctcgctggtggcgctgataacgcgccggggaggttcaggtggtcctaaatga

SEQ ID NO: 92900 - DNA, 423 bp, Enterobacter aerogenes
atgtttggtttcggtaaaaaagcacgtaaagcgatcgttgaagtgaaaaaaatggaaaaccgcgacgcagtggaggcgacagtctggggctgttactcagttgcgtatgcagatggcacctgcgatgcctctgaaattgccacgctggaaaaaaccattcaggccaaaccagcatttgcagcattcgccggtgagattgccagcatgagcagcaatatccgcgctcagtatgaagcgtcccctcgttctgctaatgctcaggcaatgcgtgaactggctgatgtcgccggtactgatgacgcggttgatgttctttgcttatgccttgatgttgctgataacggcggcattggcgaagacgaagagaagcagttgaagaaaatcgctcaggctctccagcttcctctggatcagtacctgtga

SEQ ID NO: 92901 - DNA, 195 bp, Enterobacter aerogenes
atgctaaatcaagaagatatgacagaagtagcgcgcgctgtttttaatgagttaagcaatgaaccagccacggcaggggagattgcccagaacacgcatctgacgcgcgaacgttgccagttaattttaacgcagctggtgatggcaggtttatctgattatcaattcggatgttataagcgcctccctgagtag

SEQ ID NO: 92902 - DNA, 831 bp, Enterobacter aerogenes
atgaatcttgaatcaattccaaaatttttcgcgccaaaagggatgcatatttcggacagcggtcgtgcaaccgccagcgagcaactcacagtgacagatgtaatggctgctctgggcatgacgcaagcagaagcaggaataggtttatcaatgtttttgggtaaggctggtattagcgagcatgacaaaaaggcatccgtctgttggttggctgaatatgcaaaattaaaagcgcctcgatcgataagaaaagcggcagggaagaagttaccgctttgcatgctgataatcgcccggttcgcttataacgactatgcctcgtctgctgcggacagcgtggattgtcggcagtgttctggtactggattcttaaaaaaaacctcaatggttgaaaaaagccactacacaatgagattaccgcaatgggcaaaagacctgaggcagtccccctcggattttgaagtaaaacgacaggtggaagagattgatcatattctttgcttcaaatgtggcggtaccgggaaaatcagcaagcgatgccagtgtggcggtacggggaaaacccttgaccgtaaagagtcagagctgcaaggagtgccagtctacaaagtatgcaaacgttgtgaaggccgtggttatagccgccctaagtcatcgaatgcatacaggggtattctctctgaattgcccggtctacccgagcgtacctggcgatatagctggaaaccattctatgaaagtctggttgcaaaatgctttgaggaagagagttatgccgactcacagcttaagcgggtaacaaaggcaactaatttgatggatatcgcataa

SEQ ID NO: 92903 - DNA, 1053 bp, Enterobacter aerogenes
atgagagccctgctaactccggaagtagtgccacgcttaggcgtggtgctgtttaagccaggtaaagaactgatgaggcttttccgcaacgggagggtgcttatcgagtctgagccaaaaagtatggcggggctggaggctggtgccgttccggacgcgcgccagccactggctgaagataaggtactggaagccttttttatcgatgagcgggttatcaatgccgccggtggtctgccggccctcgagtactggcttcagcacaacatccgggaatgccagtttccgcactctgattatcaccatcatgaatgtgtgaccatgcgtcatcctcctggcgccatgatgctctgctggcattgcgataaccgcctacgcgagcagaccactgagacgctaagtgggctggcgcgctgcaatgttatcaactgggtcattgataccgcgttgcgagacctgcaactgggccgtgagcgtgagctgtcactggcggagctgtgctggtgggcggtgtatgccggtgccgctgatgctattacagagacgatggcgcagcgcgctcttcgtcttcccgatgaaccgttcctgtcggtatataaagaaagtgatattcggcccacggtcccggccaacagcatcctgcaggagaagctgcctgctgcaggtgcaacacaaaagtgcaggagcagtgaagatcagcaggatcaacccatgatgttatcgctgtccgtcgatccagagtcgcctgaatccttcatgcttaaacccaaacgccgccgctgggttaatcagacttacaccgactgggtgaagcggcagccatgcgagtgctgtcgacgacccgcagatgatccgcatcatgttatcgggcatggcatgggcggtacagcaaccaaagcccacgatctcttcgtgttccctctgtgcagagagtgtcacgacgagctgcatgccgacgtaaatgcgtttgaagagaaaaacggctcacagctgcagttgctgttccgttttcttgatagagccatagcgatcggcgtcattgtaaaagcttaa

SEQ ID NO: 92904 - DNA, 1968 bp, Enterobacter aerogenes
atgcgtgaaattatcgttgataactttgctggtggcggcggtgcctctaccgggatcgaactggcgattggtcgcagtgttgatattgccatcaaccacgatgaaaacgccattgccatgcacaagacgaatcacccggatacgctgcactactgcgagtccgtatttgatgtagatccggtggcggcgactggcggcaaccctgttggtctcgcatggtttagccctgattgccggcacttctccaaggctaagggtgctaagccggtaaaaaaagagattcgggggctggcgtgggtagtcattcgatgggcgctggcgaagcgtccgcgtgtcatgatgcttgagaacgtcgaggagtttaaaacctgggggccgctgctggaagatgagatgcgcccggatcctgcgcgtactggtgaaacatttgctgcatttgttggcatgctgtctaccggaattgatgcggatcatccggcgctggcggaggtgtgcgaatttttgtctatcgatccaggcagcgagcatgctcggtctttgattaatggactgggatacaacatcgattacagagagttgcgcgcgtgcgacttcggggcgccgacaatccgcaaacgcttttttatggtgatgcgctgcgacggtgaaagtgtacgctggccagcgccaactcatggcgatccgaaatcactggaagtacagagcggcaggctggcgccatggcgaaccgctgcggaatgtatcgactgggatattcccgcgaagtctattttcgaccgaaaaaaaccgttggcagagaatacgatgaagcggatcgcgcgcggcatccagcgctttgttattgagagcgcatcaccattcatcgttaagtgcaaccacacaacctcgcgcggtagctatgactgttttcgtggtcaggagttgggcgcgccattacaaaccattactaaaacccacggttacgccattgccgtgccacacctgacaaaattccgtactggtgcaaccgggcagccagttaccgaacccgttcctactgtgaccgcaggaacgtcggcgcgccccgggggtaatggacacgccctcggtatagtggatgtcgctttgaccccattcatggctggaaacggtggaagtgaataccaggcgaagccacgtccgctgaataagcctgctcacaccattctcaaacaatcgcgtgcctgtgtggttgctccagtcattgctcgccaattcggggccagtattgggcaccgcgcggatgaacccagcgcaacgattaccgcgggcggcggcggaaagtcacagttggtatcagcatgcctggctaaacattatggcgggaactactcgggggccgggctaggcctggatgaaccaacgcattcagttaccactgtcgatcatcatgcattggttactgcgcagattgtaggggttggtggtcgtgcagcacagagtcgaccgcggaacgttagcgaaccattgcagacaatgacaacaaaggcagatgctgcaatggttacatctcacctgatcaagctgcgtggcacctgtcgtgatgggcaacgcactgacgagccgatgccgacgataactgcgggtggccagcatgtcggggaagttgagaccacacttgtagctgagcattacgacgagcaaagctcacagcaagtgctggagttcctgaaagagtattgcggagccggcagcactgggctggtggaaatcgccggagtgacttatcgcatcgtcgatatcggcatgcgtatgttacagccccatgagttatatcgggcgcagggttttcctgctggctacattattgatcgcgactatcgcggcaacaaatatgcaaaagacaagcaggtcgccagatgcggcaatgccgtacctccacctttcgccgaggcactggtgagagcgaatctccctggaatgtgtaacgtccaaagggaggtcgcatga

SEQ ID NO: 92905 - DNA, 891 bp, Enterobacter aerogenes
gtgacaaaaaaccaatattgccaggccttagacgcattgcgtaaccagaaggcccattatttgaaagaagttggcgatcaatggcggacgccggacctgctgttttggggtgttaacgctatgtttggcccgctggtgttggacctgttcgccgacgacagcaacgcgaaatgcccagcatggtataccgctgaagataatgcgctgacgcaggactggtccgggcgtctggcggaactcggcggcgcagcctttggaaatccaccgtatagccgttctcagtatcatgaaaagcaggcgattactggcatgacgcacatcatgagttatgcgtctcagcagcgtgaaaacggcggacgctacgttttcctggtgaagtcagcaacgagtgaggcatggtggcctgaagatgccgatcacgtctgttttatccgtggtcgcattggcttcgatctgccgacctggtttgtgccggcggatgataaacagaaacccaccagcgccttctttgctggcgcgatagtgatattcgataaatcttggcgcggtgagtgttttagttatatcgatcgtgtcgagctggaagcgaaagggcgggcaagtatggcgctggcgcagtttgctgtaggtctggtatctccggcccaggatgtggcaccaactccagctgttacacccgtatctgaacctgtcatagaatctcgcatctggccgctggaagtcaatctggcatttggacaggtagacggcgccgccgaactggaagagccgcaacagaataaactgaaatctcacatcaaccagctctggctggagcgtacatcaatcagcgagatcatcaccattgccagtgggctggtcagcagtatgcagggggcggtccatgcgtga

SEQ ID NO: 92906 - DNA, 867 bp, Enterobacter aerogenes
gtgagcgttaaattatccgcatatgtctgggatggttgcgctgcggcaggcatcaaaggcaataaattactgatcatgcttcgcttggctgattatgccagtgatgagggcatcgcatacccaagcgttgcgactattgcgcgccagctcggcgccgggcgtagtaccgttattactttgatcggcgagctggttaaagatggctggctgaccaaaaaagaacgtcgcctgggccagcgcagcaccagcaacctttacaccctgaacgttaccaagcttcggcaggctgcaaatgaacattacgagggtccaaaatctggacgttcagaatctgaaccttcggaatctggacgtccgaaagagccaaaaaatcagggttctcagggtccagaaactggacacgatccgtcagtaaattcaaatacagatccatcagtaggatctaaaccttcttgtccggttcctgcggaacccgacccggaagtggttatcaccgatcttgctaagcaggccctttctcacctgaacctcacaaccggttcacgttttcaggtatgcaaaacctctctggaacacatccggggcaggctgcgcgaaggatttacacctgacgaactggcgctggtggttgattacagcgcggagaagtgggggaaagatttcaaaatggctgaatatctgcggcctaccacgttatttctgcagtcaaaatttcctggatatctccagtctgcaaccaagtggaatgccgccggccgtccgaaatgggttgatggaaaatggacaaaagccggaggtgaagaccaggcgttcaagtccaactattccagcgttgaatacagcacaccgaaggggttccgctcgtga

SEQ ID NO: 92907 - DNA, 180 bp, Enterobacter aerogenes
gtggaagaacgtatccggccactcgaccaatactatcgtgaccagcacggtatcgtcgtgcatgtcattggttatgacgttgaccgccagcgtgtgatctaccgtcgcccaggctatgagtgggaatgtgctgctccgaagatcattttccgcgccagatttaagaggattgataagtga

SEQ ID NO: 92908 - DNA, 720 bp, Enterobacter aerogenes
atggcgcaacagatcaataaccagatgaattcatctttggttcatgcctctccttacatcgctggcgtcgcgaccatgagtagtcgtgagatatcttctctcacgggtaagcagcataagcacgtggtccgtgacattgaagcgatgatgcagcagctgggagagtcccttgaggggtatgcccattattggacacacccccagaaccaccaacaataccgggaataccgtctcgaccgtgagcatacggaatgtttaatcgccgggtacagcgcgccgctacgcatgaagatcatccgtcgcctgcgtgagctagaggaaagcgccaacgctataccgcaaacattgccagaggcacttcgcctggcagccgacatggctgaaagaaatgcgaagctctcacttaaggtccagcaggacgcgcccaaggtggcgtttgtgaatcagtatgtcgaagccggcggtgccaaaagcctgcgtgaaaccgcaaaaatcctgaacatgccggaaaaggccatgatcgacacgctactgcgtgacaaggtgcttttccgtcagtccggcaacttgctacctcatgccctgcgtcagcgtgaaggcctgtttaccgtcaaaacgggtacatcggattatggccatgcctacacccaaacccgagtaactccccgcggcgtccagtggatagcagagcgttacgcctctgaactgatgggaggttga

SEQ ID NO: 92909 - DNA, 558 bp, Enterobacter aerogenes
gtgggtatagaacctgaatggaaagttgataagcagccagcctggctggtggccgcaatcaaaaagacgatcaccgagttagatggtggttacgaagaggccgctgaatggctaggggttacggaaaatgcattattcaaccgcttgcgtgcggatggcgatcagattttcccgctcggctgggcaatggttctccagcgtgctggtggttctaatcacatcgccaatgcaatagcgcgccattccaatggggtgtttgtgccgctggcagacattgaggatgtggataacgccgatatcaatcagcgcttaatggagtccatcgagtggatcgggaagcactcacagtatttacgtaaagcgacagctgatggcgtcatcgacagggaagaacgggttcaaatcgaggagaacagttatcaggtaattgccaaatttcaggaacatttaacgctacttttccgtgtcttctgccagacagaaaagagtgacccccgcgagtgtgcagctccgggggccgtggcgaataaacctatgtgtatggagaaatccgcatga

SEQ ID NO: 92910 - DNA, 210 bp, Enterobacter aerogenes
atgacaacaacagagttagagacgttctttggaacccccaataaggcagcagatttctttggtgtgtcacctgaagctttctatcaatggagaaagcgaccaggcggattgataccaaaagggcgcgctgctgaagctgcataccgtaccaatggaaagctcatttttcgtcctgagctatacgaaaagactaatccaattaagccgtaa

SEQ ID NO: 92911 - DNA, 261 bp, Enterobacter aerogenes
atggagccagaatttaaagaaggagacacaatcattgtggatcccgacctctgccctggccctggtgattacgttgtcgctaagaacggtagcgaatacgctacgtttaagaaatatcgtgcaaggggcattaacgaagatggtgaagaagtttttgaactgattccgttaaaccctgattttgcccccttaaactcctctgtagaaaaaatttccatcattggcgttgttgtcgaacaccgccgccagatgcgccgctaa

SEQ ID NO: 92912 - DNA, 234 bp, Enterobacter aerogenes
atggcgagcaaaggcattgaaaacttaatcaaagacgcactggaaaacggctgtcatgttgtccgtaaagcacaccgttttgaggtaagcaagaaaggtaaaaaggccatcaccttagttatatgtgaagacggaacggcttaccgcggagacgttgatctgacgatagcaaatgcgattcggactcaaaaagaaatgcgcgccatcctgggtctaccagtaaaaggcggctaa

SEQ ID NO: 92913 - DNA, 372 bp, Enterobacter aerogenes
atgagcaatgatcgcatgaccaatgtcccggacttcctgggtgaattggatgctggcgtgttcatgaacaaaatcgccggggcgctcaataccgccgcgctgggcgttctgaacaacggtagcaaaggtaaagttgtgctcactttcgacatcgaccgcatgggtaattcgatcgaagaaaagcgagtcatgatcaaacacaagctgcagtacgtcacccccaccccacgcgggaaagtttccgaagaagacacgacagaaacgccgatgttcgtgaaccgcggcggcaagctgaccatcctgcaggaagaccagggcaacctgtttactctgggcggggatccggatgcaaagctgcgagcggctcagtag

SEQ ID NO: 92914 - DNA, 831 bp, Enterobacter aerogenes
atgtcccagcaactagacagcagcgcaattaaccaaattaaagacctggtgctttcaggctaccacctgaacgatattcaggatctggcctgcccgacgaccattctgccggaaggtactgccgtcgcgagcctcgagcgtttcgcactggagcgttaccgcttccgcggcgccatggacacaaccagcattgacgatttcgttcgctattccgttggttatgcccgggaagacgaaaaagcccgttgcttcatcgatgccgataacatgctggctcgctctatcttcaacatcggtacgctggataatcccggccacgctgataacgtcgcctcgatcaagctgaagaaaacagccccattccgcgcgctgctgtcgatcaacggtgatcacctaaaccagaagcaaatcgccgaatggctggaagactggagtgattacctgactgcgtttgatgccgacggcaacacgatgaaaatcgcccaggccgctcaggcagttcgccgcgtcaccatccagcaaactaatgcctccgatcatgaagatggtgatttcagtggcaaaaaatcgctgatgcagagcatcgaagccagcagtaaagacgtgatgccggtggcgttcgaattcaaatgtgtgccgtatgaaggactcggcgaacgtgcattcagccttcgcaatagtctactgaaaagtaatgatccggtattcgtcctgcgtatcgtccagctggaagcccaggaagaagcgatcgccaatgagttccgcgacctgctgactggtaagttcgacggcaagcctgtggaaacctttatcggcaacttcaaggtctga

SEQ ID NO: 92915 - DNA, 528 bp, Enterobacter aerogenes
atgagctttattcaaacctacactggcaaacactttaactatctcgatatccagcaggacgccattgagatcgaagatattgctaatgcgctctcaaatatttgccgctttgccggccacctgccggagttctacagcgtcggtcagcacagcgtattaaccagccacctggtaccacaggagtttgctcttgaagcgctgctgcacgatgccgcagaagcttatttgcaggatatacctgcgccactgaagcgtcttttgcctgattaccgcgctattgaggatcaggttgatgctgcaatacgtcagaaatttagtctcccggctgagcaacacccgaccgtcaaatatgccgacctggtcatgctggccagcgaacgccgtgattttgaaatcgacgacggcacaatctggccgatgctggatggcgttattcccactgaccaattcgtcataaatccagttcgccctggtcaggcatatgggatgttcatgaaccgttttaaccagctgatggagcggcgctaa

SEQ ID NO: 92916 - DNA, 198 bp, Enterobacter aerogenes
atggcacacgtaaaggtaaaagacctggttgcggcagcacatgccgcatcaaaagaaatgccaccagcaacagcaacgttaatgcgcgacacagctactcgcctggacgttacctacatcgcattaactgaagcaatggaccagaacacggcactggcggcggagatcgaaagattgcggggagcaaccaaaaaatga

SEQ ID NO: 92917 - DNA, 129 bp, Enterobacter aerogenes
atgaacgaggaaaccaattatcgaggattctggcgcgctgtcgttatttgctgtgttctgtgcgccatcgctttttggatcccggcaatcctcatttctgtttactacttcttcgaggttcaattatga

SEQ ID NO: 92918 - DNA, 333 bp, Enterobacter aerogenes
atgaaagaactgactatggctggcagcagtaatgaggcccacgacggagaatcaacggctatggcatttaccatggataaatgccgcgagctttcaggctgcccggctggcgtagacctgcaggactgggtgaagatgctggtatcagagttaagcgttgtagaagagattcacaacagcgctgtattcatcactgatgaactctatgacgcaagtcctaaggaggtgcaaggcatcattcgctctttggcctgcatgaaaatgcccgcttacgctcgtctcgtagccgggattaaggctgatggggtggaagagtgcggcttactgcggtga

SEQ ID NO: 92919 - DNA, 132 bp, Enterobacter aerogenes
atggggtggaagagtgcggcttactgcggtgaagaaaattctgtattcgttgaggccaaggcttattaccgctctttacctgatgcggcctacgagttcgcccagctgctgcgcgagggggccgacaaatga

SEQ ID NO: 92920 - DNA, 201 bp, Enterobacter aerogenes
atgataaccgggactactaactatgacgatgtggcagaagtccgctgcaatttgtgcggcggttattacaaagccgatgagccagaaagccatgactgcgaagaagaagcccataacgaaatcgagtgtgatatctgtggcttcaaaagcacagacccggaaggcgctcactactgctgcgaggataactccgatgactga

SEQ ID NO: 92921 - DNA, 468 bp, Enterobacter aerogenes
atgactgatatcaccgaactggcactactggtcagcaaagcaagagcatccgtatttaccctggaatatatctcccagtttgagcctgatgatattgattccgatgacgttgatttgcggtttgaagtagatggtcgagataccggcaccaacgtttctatcgtcgatgagtgcgggcaggctgcaaaggttattggcgcgctggtagaggcgctggagaaggtgcagcagcaaaataaaagcgactttgaaatcaaagcccgtctctgcaaagagagtaatagcctccacgacaggttgagagaagcagagaagcgcatcgccgagctggagtcaaagctagctaatccggtgcaattgcctaaaacaaacggctactggactgatacagaaaaagcgtttgaagaagctattacgctcgcgaaacggcaggtccgtctggctggattcatcgtggaggatatgtaa

SEQ ID NO: 92922 - DNA, 252 bp, Enterobacter aerogenes
atggctattttcatggaagtgcgctgtgaaggggttggcgatgttgctggctgtttttcttcccagaatgcggagccaatgacctcagcgcatgagagtgttaagggcgtttctgcggccttggcattccttaaagatgattcactgagaaatggctgggtgttgcacaaagggtatttttattgcccggtatgcgccaaagcgaaggcatgggaactaaccgagcagggcatcaagtgggaggctgagtga

SEQ ID NO: 92923 - DNA, 558 bp, Enterobacter aerogenes
atgaccaaatcaaccataaccagagagcgcctgcaggaaatcgccgaagatgggttcctgaagcatggcgaaagcaaagtactggctcgcatggcgctggccgcaatggacagcgagccggtggaggaaagtgtaacgtgctggtcttgccgaaataaggttgagatttcggctatcggtgattgtgatgggtactgtccggaatgcgactcaccgatcgatcttgatgaagaaccatacactgccccccagccagcgccaacgattcaggtaacagatgccatggcttacgcttaccatcatgcgctaaccgatggtcccttatgcgatgaagatgtggaggatattaagactggattgcgctctgctttcgccaatgcaaccacaaatcagccaaggccggtattgcctgatgaattcgaccgcgacaaagctttcgatctgttcaactcgttccctgatggcgatgtagtggactgtgttcagtacacttggaacgcctgtcgcgcagccatgcttgcggtcgcaccaccagcaccaaaaagcacagttaaatag

SEQ ID NO: 92924 - DNA, 1191 bp, Enterobacter aerogenes
atgggctcgacaaaatcgcctaaactcccgcgcggcgtaaccatcaggaaacatagtaatggggaaacgattaatatcacctttacgtataagggtgtgaaatgccgggaacctttatcgaaccttgaagttaatagtaaaaacattaaatacgccgagcgaacactcggcgaaattcacaataaaattgagcgaggaacatttaactatggtgagcactttcctcgttcggcacgccttaagatatttggtaatgcttctacgggaaaaacggtaaaggtatatctcgaggaatatcttgttatttgtgaaacaagaaaattatcaccttcaacaataggcggatataaaaagtgtctaaatgctctggaatcgctgcatatttttcctgcaagcgaattgacacctgctgctttaaaaacatggatccagagccagaaaacaacattaaaaacgatcaggaatcagctttcgttccttcgttctgccctggatgaggcagtgactgatggtgttttacagattaacccagtgtcactggtgactgcctcacgctaccagagcagtaaaactgatgaagaaagtgattacatagttgatccgctttcgccggccgaggttgaagcacttctgcatgctgctggtaataagcaatgggaaaacctgttccggtttgcaatcgaaaccgggatgcgtagctctgaactctgcgcgattcgctggcgcgatatcgactttatcgggaagacagcacatgttcagaatgctagcgtcgtgggtgttattaaagggacgaaaacaaaagcaggtacacgtaaaatcgagttaacagaggaggcgctatatgcactgacctgtcagaaacctttcacatttatgaaagatgcgatggtttttgaggatccaaagaccgaaagcccatgggccggcgcagatgcgatcagaaagaaagcgtgggttccaacgttgcgtaaagcagggatcaggtatcgcaacccatatcagaccaggcatacgttcgcgaccaggcatattagccgaggcgccaacctgttctggctcgcatcacaaatgggacataaaggacctgaaatgttgttcaggcattatggacgctatctgaaggagtatgacggtaacactgaaaaacgacccaagctggtcagcggtggaacctcaaaggagccgtaa

SEQ ID NO: 92925 - DNA, 1197 bp, Enterobacter aerogenes; identical to SEQ ID NO: 92348

SEQ ID NO: 92926 - DNA, 1959 bp, Enterobacter aerogenes; identical to SEQ ID NO: 92349

SEQ ID NO: 92927 - DNA, 630 bp, Enterobacter aerogenes
atgtttaatatcgacggaaacccatggtttgctgcatcagatgtttgcaaggcgcttggcctcactaactctcgcatgtctctgaaagctctagatgatgacgagaagggggtaagctcaacttacaccgtcaagggagcgcaaaacgtcagcgtcataaatgagtccggactctacaccttaatccttcgctgccgggatgcggtgacgccgggcaccatcccctaccgattccgcaaatgggttaccagtgaagtgcttcctaagatccgcaagacaggtcgttacgttcgcgaagagctatcgcccgcggataaagctcagaaggttgtagccagttttatgccagccatcctggaggcaatgaaggaaggggataagccttcatacagctacccactcaagccgggatatcgtgagatgatccactgccctgagggtgttgttggcctggctgagaaatcactactgatgaacctgctgcagcagcttgatgaagatggccacgacgtcgccggcgccgcggcggaattcacaactatggtgagctatattgttggtgttagccgctgcctgcaggacatacgcagccacgcgcagtacatcaacaagaacgcctctgagttctga

SEQ ID NO: 92928 - DNA, 2547 bp, Enterobacter aerogenes
atggctaacgaatttctgacgcaatgtgaaatgaccgtcaatacggcagcagggcgcaagctttctgaggacgaaatggaatcgctggtacgtgacatgaacgacacaaccaaccggatcctggctggcaatgaagccctgacgctggaagaggctgcgatgcgcgccgcgcaagagctcggcaaccgtgatcaactggcaaaagtaatcgaggcacgcaacaaagctataaacacgcgcattgcagcgcagcgccttggcgagcttcgtaggacttggaaagacagacctgacatcgggcttgaggcaatgctggttggccgtaatgacgcgcgtaccggctcacgccgatctgtatcgtctgaggtggcccaactgcgcggtaagtatcacgccggtatcaactacgatttcgaccaggccggactggttaaatttattgccagcggcagcaacgaccgggaggtcgctgacgctatgtggcgcatcggtcgcggacaaaaaacggacggaatgacgccgcaatcagtaagcgccgctaagatcataatgaagtggcaggaaactgcgcgcgtggatgaaaaccgtgctggtgcgtggattggcaagatgcccggctatatcgtccggcagtctcatgacatcctgaaaattcgtgccgccgggtatgagtcctggcgcaatgccattcttccgcgactggatgatgccacctttgacgggatcacagacagagaagggttcctgcgtggtgtatacgacggccttgcctccggtgttcacctgacatctgaaaatccagactggatgaatggcttcaagggatctgcgaatgcggcgaagcgcgccagccaggagcgcgtgctgcacttcaaagacggtgtgaactggcacgaatacaatgagcaattcgggaccggaagcctgcgagaagcagtattcggtggcctgaacagtgcagcgcgcacgacgggcatgatgcgcgtgctaggcacaaacccgcaaaacatgttcaagtacctgacagacaccatcgcaaaagacgtgagaaagcagagcaacccggcggcgctggctgacttcatgaccaaagtgcgtcggctgaaccgcacggtgatgcctcaggttgatggatcgctgaatatccccggtagtgtcggctgggccaatgcctctgctaacgtgcgcggctggctacgtatgagtcaactcggcggcgcggttatttcttctttcaacgacgtgccgatttctgcaaccgaaatgcgttatcagggccagaactttatgcaggcgctgaccggcgctatgaagggccgtttctcccgttataccagtgatgagcagaaggagatcctgtcatccatcggagtttactccgacacgatgacgcaggagataatccggcgcatgtccggcgatgacagcatgagcgggaagatgggccgcgcgcagcagttgttcttcaaatacaacctcatgaacttctggacagaatcaggccgtaacagcaatgccatgatgatcaccaactggctggcgaagaacgccgatcagcagttcactgcgcttccggaagacctgcgccgcgttcttgacctgcacggtatcggtgatgctgagtggaacatctaccgcagcatggacatggcagacagcgagggtcgcaaattcatgacgaccagcggcatccgtgcagttccggatgaggtgatcggtgactatgtagcgtctaaaggcctgaaggtcaccgagcgctctattgcggacgccagagagactctggagagccagctgcgcgggtacattctggaccgactgaacatcgccatgtcagagcctggcgaccgcacgcaggcgtttatgaagatgggtacggttcctggcacggtggcgggggaagcggtgcgcttcgccgggcagtacaaatctttcaccgccagtttcatgcagaacgtgctgggccgtgaggtcttcggacgcggctacactcccgccgggctgggggagtctaaaaccggatcgctgaccaatgcgttgttacgaaatggaaagggagccttccttggagctgcaaacctctttgtctgggcaactatgtttggttatatctccatgcaggcaaaactcatgctgaaagggcagactccacgcccggcagatgccaagacatttctcgcagccgcatctcagggtggcgggcttggcatcttgggcgacttcatgtttggcgaagtaaaccgcatgggagcagggcctgttacgtcgctgatggggcctgcagcatcgaacgctgacagtattatcacgttgctccagcagaccacgcgcggcgatgcggacctgggtgactggtatcgcacagctctggacaatactcctttccttaatgtgttctggctgcgtacggcgatgaatggtttaatattaaaccgtatacaggatgctctggacccaggatcgcttgagcgctaccagcgccggattgaacgtgagcagggtaacgacttcctgatcccaccatcacagttcatgctagggaaataa

SEQ ID NO: 92929 - DNA, 1707 bp, Enterobacter aerogenes
atgccaatttatacagatgatcctgggcagggcataaaccaacctttgtccaatgctccggcagggttaggtgaatcactgctctcctccctgaaagagggatttaaagaggggccggtagtatccggctatcgtttctcccaggccgaacaattggcgaacgatcctaactcggccattgtcgcaaaatctgatgccgatgctcgcctgaaagagtacggcgtgaaaagcattaacgtgccagagagtggcgtaactcagtcatatctcgatcatgtaatcagcgagcgccgtgaatcgctggcgaagcagcagatcgccatgtctgccccttcaggatggcttgccactcctcttaactttgccgcaaaccttgctggctctatggctgatcccggtaacgtggcgctggcgctggtcccgttcggtggagaagctaaagcggcaaccatgctcgggcgatttggtgaacgtctggctaccggtgcgcggcttggcgctggacaagctgttgctaccgtgccactgacagcacaggcagcggcggctgaaggcgatgacttcacctacggcaatgcgttggaaagcacattctttaacaccctggctggcggtctgatgcatgctggtggtggcctgatcgctgatgtggtccgctcccgtagggctggcactgctgaaaattctgcagcctcgccagacgttaagcccatcgctgatgcgcagcctacgccagtggtaacgcctgacaacattccggctggtgtcaatattcctgagtccggtaccaacgccgatctatcagcagcaatcgcgcgagatgcagagtcttatgcctatagccgcgcctatgatgatgtcgtgccggaatatcttgccagacagcaggagctacagaccggttttatcgacaacgttgcagatttgcgcactgaactggcggcaaatagccgacaaagtgaatcacttgacgctacgctggcccagcgcacgacggagtatcaggcgcaacgcatgaacttcaaggctgcgcgcgctagggcactgcgtgatattcagagtgagaaatacgctatcaccgcgcgtaatcaggaaattaaccagatgcttgaacgcaacgctgtcgcagaacaggcgcgcggcagagaatcgcagttgtcccgtaaagagataccggaagacctcgcgccgttaatcgaccagcgcgcacagcagatcagagatagcatgcagatgtcgcctgtcgctggtgctgtacgtacagcgtcggcagcggtacgggaggctgactggagtgtaaaccagcaggcataccgcagcgcactggcgcacatgatggaaggccgctctccagacattgagccattctatgatctgcataaaccagcgctacgcgagcgtgctatccagcgcatacagaatcctgtgcgacaggctgatgaaggctcccgcgcggtcagtgaaagcgccgaacgtgtgtggcaggatacgcagaaggctgaccatgaaatcacagcggccacagccgatctggaaaatgaattcaatatcagcgacgcgctactgaacgacattgcctctgacaatcctgatctggctgcgtcaatgcgtgagaacattgctgcgatccgtgcggaggccagtgacgactctatcggcaaagcgtatcgcgcttttgccgcctgtatgattaaccggggactgtaa

SEQ ID NO: 92930 - DNA, 2622 bp, Enterobacter aerogenes
atgccagtcgtacctaccgtcaccggccgccaggtcgaaagccgcggcgtatccacccagggatttcaggcagtcaatcagccaaacattactgatgcgctaactcaggtcggctctcaggctctggatgtatttggtcaggcaaaacagcgggcgaatgtcgctcttactcaagaggcatcactgaagctgaatgccgttggcaacgatctgctgaataaccctgattccggttttatgaatctacagggtaaaaatgcgatcggaaaaggccatgagtatgtgcagcagttcgattcgcaggtacaaagtattgctgcaagcctgcctgatgagcagtcgagaaatgcattcctacagcaggcaaagcagcagaggatccagtttgcaacaacagctggacgccatgaagttggtcaggtgcgtcagtacgaggcaggtatgcaggaaggtacacttcgtgcattgtctcagcaggctctttctcctggcatgttcgcgccagcattgattaatgcccgtgattccatcattgcctacggtaaagcccacgggcagagcgatgaagaaatcgagtcgaatttcgtgcagtggagggagcaggcagccaaccgcgccagcgaggcatggtatacgcctacctatcagcagatgatggggccggaaggcaggatcgaagttacggacacgccgagtgaatcgcagctcttttccgccatgatctggcaggagtccggcggcaaccagtacggcaaagacggtacgcctctggtgtcgcctaagggtgccgtgggtgtggcgcaggtgatggaagataccgggccggaagccgcccggctggctggtgttccgtgggaccgtgataagtggctgaatgacccacgctataacgcgaagctgggccaggcctacttcggcgcgcagatgaagaaatacgacaataaccctgtgctggcggtggcggcatataacgccgggccgggtgcagtagatggatggatcaaaaagtttggcgatccgcgtactggtgctatcagtaatgagcagttcgctgctgcgatcccttacgatgaaacccgcaattatgtggcgaaagtaaccggcagtgccccggccatcccaggaacagcgacaatgcaaaatctcatcaaccagccattctgggatgcaatgagtccacagaacaaatcagcgatgatgagcaaagtagctggaatgtacgacatgcaggccgccgccgggcgcgtgtcattgcagagtcgcatgcaggatgacatggcgaaactggaggccgggcagtctgtcaatccgatctcagaacgggaatggctggcggtgatgccgttgcaggccagcccggctgaacgcattcagatgcgtgagtccttccagcagtaccagcaggcgatgacgctgcaacctgtttatcaaactattgtacagggttcagcgcagcaggggatcgcagcggtccaagcgatggcaccaaaggaagatgacccggacttcaaattcaagcagagcctttacgcaactgctcaggccaagctgaatcaggtgatgaaggcgcgcgagtctgaccctggtacctggctgcaaaccaactcgccggttgtaaaaaacgcctttgagcagtaccagaataatcaggcgtcaggtgaatatctggtttcccgcctcgaggccgagaaagaccggcttggcataaacagtaagaaggtacttcctgactccatgatcaacagcctgatttctaagatcgacaacaatcaggaatcaagcgttaccgccattcagtcggtggcgcagtcattcgggaaatactctgaccaggttatgcaacaggtgcagaaaagcgcgtatccggcgttgcaggtcataatggcgaccaataacccgcgagctgcaaacgcactctggcaaaaccgcagtgttaaaacttctgacctccgtggaagtttcgagaagaccgacgccgacagcgcagattcatcttggaatgaccaggccaaagatttcgccgggacgatggttgtacagcctggcgggtcagccgtgtggaacaatttcaacgagcaaggtaagcgactgacctatatctatatgcaacgtggcatgccgtcggacgatgctgcgaaaaaggcctatcaggacgttctcggcgaacagtatcagactaacggcacatggcgtatgccgaacactgctgggcaggatatacgcgacgtgagagacggcgccgatgtgtacctgaaaaacctgtcagcggaccagatcatgccgcttataggcgatgcccgcttgcctgatgaggttaaccgcgagcagagcatttcacgcattcgtgataatgctcagtgggtgacaaacagcgatgaaacgggactaactctgatgatgaatggtctgctgatcaacaatgcacaagggcagccgataacagtgccgtttgctgacctggcgaaacttggagctgtaaaccgcaccacctggaacaaactgaccaaattcgtgcagacaccggttaagtatacgccgggccagtcgaagaattatacggtggaaagtcagcgcgataacctgatcaacattatccagagcggccagcagacaggacgataa

SEQ ID NO: 92931 - DNA, 333 bp, Enterobacter aerogenes
atgaaagagaagactactgcagaacgttatgccgcagctatcaatgcagcaatgtcgattgttaacctgcgcgaagagattaacgaccagcttgctattgtccataacaatctgacatgttcagagttgcttggcggcgagtacaacagcgaggcagtgaaggaggcatttaaaaatgccgaggttggaataattccagcaaactatgtcaaggctgaatgtgtattcctaaaggcgcgagtaagtctacatgaagatcctggtaatctcggtcgcactgcaatgcgttacgtgatagacgaatcgaaggccaaacacaatttacctaaataa

SEQ ID NO: 92932 - DNA, 297 bp, Enterobacter aerogenes
atgagcaaattaaccagattgcagaagtaccatctcggctacgcgccgcgcagatcattgaaggtagtcgccgaatcgccggcagctctggaaatagaacggcgcgccatctcacgcgaagagcgcgggcagtttcgactcgcatcacgactttggcttgaatgcctcgatgtcgcgcaaactgaagtggaaagagcaaggatcgccatccgccgcgagcagtgcattaccaaaagtatgaagttgcgccgtggagaatacaacgggataggttgccgcggggtggtttatgactaa

SEQ ID NO: 92933 - DNA, 243 bp, Enterobacter aerogenes
atgtcggtattgcaactgtcgctaaaagaggctcgccatcttcatcttgcggcgcaagggttactgaaaaagccccgacgtcgcgctcgccagactgacatcctttccaccatccagcagatgtcgctgctgcaaatcgatacgatcaacgtggtcgcccgtagcccttatctggtgctgtttagccgccttggtagctatccgcagcactggctggatgattccttgcgtgcggcgaactga

SEQ ID NO: 92934 - DNA, 774 bp, Enterobacter aerogenes
atgataaaaatcagtaagttagtgcatcacgcccgccactttaactgcgtggagggtaataccaccctgtatgccttaccaaaggccgagatagtcgatcgctggtatcaacaaactcacgatgattttcgcttctgttttaaattcccggccacgatttcgcatcaggcggcgctgcgcgactgcgacgacttaagccacgaattttttactcgtctggcgccgctggaatcgcgcatcggccagtactggcttcagttgcccgccaccttcggcccgcgcgacctccctgccctgtggcagtttctcgatacgctaccgaaaaacttcacctacggcgttgaagttcgccatcctgagtttttcgccaaaggcgatgctgaacaacagcttaatcgtggcttgcaccagcgcaacgccaaccgcgtgatcctcgatagccgcccggtacatagcgccgtcgcgcgcaacccggcgatgattgacgcgcaaaaaaagaaacccaaagttccggttcacgcggtcatgaccgcggagcagccgatggtgcgttttatcggcagcgacgatatggcgcagaatcgcgaattatttcgcgtctggttacagacgctgccaaagtggcatcagtcagccacgccatggctgtttctacataccccggatatcgcccaggcgcctgaactggtggatacgctatgggaagatttacgtgcggtgctgccgggcgtcggcgccgcgccgtcaattccgcagcaatcctcgcttttctga

SEQ ID NO: 92935 - DNA, 1260 bp, Enterobacter aerogenes
atgagtaaagaatcatacccaacgggcgttgagaaccacggaaagtcactccgcatatggttcatttttaaaggtaagcgtgtcagggaaaacctcggtgtccctgacaccgctaaaaacaggaaggtggccggggagctgagaacgtcagtttgtttcgctatccgcatggggacctttgactatgcggcccaattccccaactcgccaaatctgaaaactttcggcatcgggaagaaagatatcaccgtaaaagatctgtctgaaaaatggcttgagcttaaacggatggagatctgcgctaatgccataaacaggtatgaatcggtggtgagaagcatgctgccgagggttggcgcgaataagctggtttcgtctgtgacaagagaagagcttctctatatcaggaaggatatgctggcgggggataaagggttgagtgtggtgacggtaaactactacatgaccacgatcgcgggtatgtttcagtttgctgttgataatggctatgtgagtgaaaacccgtttaacggcatcaagccgctaaagagggccaggatagaaccagatccgctcacacgtgatgaattcgttcgcttcatagatgcctgcaagcatcagcaaacgaaaaacctgtggtcaattgcggtatacacaggattacgtcacggtgagttggtatccctcgcatgggaagacatagatctgaaaactggaacgatgaccatacgccggaattatacgaaactcggtgatttcactctaccaaaaaccgaagccggtaccgacagggtcgttcacctgatcaagccagccattgacgctttgaggaaccaggcggaaatgaccaggttaggcaggcagtatcaggttgaggtacaactgcgggagtatggccgaacggtcattcacgactgtacatttgtgttcaatcctcagttggttaaaaaaagtggcagcgtaggttacctgtacaaagccgattcagttggtgactcatgggatgcggcgcttaaacggtcaggtttaaggcaccgcaaggcgtatcagtcgagacacacttacgcctgctggtcgctgtctgccggggccaacccgagtttcattgccagccagatgggacatgccagcgcccagatggttttcaatgtttacggcgcctggatggccgacagcagcagcgatcagattgctatgttgaaccagaaattatcggactttgccccatccatgccccatggcatggcgataggaatatga

SEQ ID NO: 92936 - DNA, 246 bp, Enterobacter aerogenes
atgcagacaattatccagatcgagccaaacgaatgggtttcagaggacttgctgatggcggtcactgggatgaagcgcggcaccattacacgggcccgcaaatcatcctggctgcttgggcgtgagtataagcacgtttcccctgaaggtgacccaaagccaaccagcgaatgcatgtacaaccgcaaagcagtagacgcatggattcaggcgcaaaagcaaccattgggtgatcgggcggtatga

SEQ ID NO: 92937 - DNA, 219 bp, Enterobacter aerogenes
atgagcgcagaaatcatcgatcaggccaacgagctggcagagcgccggctggaaatgaccatccagaacatgcggattaaccatgcggctgtttcggctactcactgctgcgattgtggggaagagataccagaacagcgccgggaagcggtggcgggctgtcagcgctgcgctgattgccaggaagaagaggaattacgcggcaagcatcggaggtga

SEQ ID NO: 92938 - DNA, 192 bp, Enterobacter aerogenes
atgaacagagcctctcccgttgatttaaggaaatgccttgaggccgcacatggcctcgctcatatcggcatccgttttgtgccgatcccggtagcgacagaggaagagttccaggcactgtctgccgagctttcacgaaagcttgagcagatggcggttgaagcggaaaaaagcgaaggcggtgcagcatga

SEQ ID NO: 92939 - DNA, 645 bp, Enterobacter aerogenes
atgaaagaacgcggaatgatttttaacggggagatggtgcgggccattctcgacggtcggaagacacagaccaggcggattatggcaccacaaccagcagacgatatcgagcgttgcatttttcctaacccagaagcaattggctggaaatcatctctgagacacaagcatggcagcaccactgctcatttttgccattatggaaagccaggcgaccgcatttgggtgcgcgagacgtttcagggaccacttttcgactacgacctaatggatagctattgcaaagaccccactccgtttgagaagcccgaattctgcgtttacaaggctgatggagtgccagcgccagagttttacgatgcagatgatgaactgcattgctgctggcgcccatctatccacatgccgcgctgggccagccgcattcttctggaaatcaccaacgtgcgagttgaacgactgaagagtatcagtgacggcgatgcgatacgcgaagggtgcagtaccgccgacatgaaaagtggcgactgtgtagctgatgtgttcgcgcgcctgtgggcgtcaatctacggtgctgaaagttggaatgccaacccctgggtttgggttatcgagttcaagcgcgttgaaggtggtgcagcatga

SEQ ID NO: 92940 - DNA, 768 bp, Enterobacter aerogenes
atgagcaaaggaaccattatctgtctgtgcgatatcactggcgtcatggctgagccatgggtcgaagcaggttatcgcgccgtcctggtggacccgcagcaccctgaaacttcgatcgacggccctgttgagcgcatatcggcaaccatccttgaggcgatgccgaggctatctcagattatccgctctgagaacgtcgtcatcgtcatcggcttcccaccatgcacggacgtggctgtttccgggtcccgttggttcgagtccaagcgcgccaaagacccgcatttccagggcaaggccgcgctggtcgctgagcaatgccggatggttggcttggcgtccggctgcccgtgggcattcgaaaacccggtgagcgtgttcagtagcatcttcggctcggcagattacacgttccatccgtaccagttcactgggctgtgcgcggatgacaactacacaaagcagacctgtctctggacgggtaatggctttgtcgcgcccacagagaacactaacccgatggtctccgccgcgattgagcgcgtgaagcagcactttggccggatggtgtcgaagaaaaaggcgctggaggtgttcaacttccatggtgagaacctcatcaatgactggtatccggacaaccgaattcacgaatgccctcccagcgacgagcgcgccaacattcgcagtgcaactcctcttggatttgcaaaggccgttttcctttctaatgcaccccacctcaataagaggcgggaggtcgcatga

SEQ ID NO: 92941 - DNA, 528 bp, Enterobacter aerogenes
atgactgattatggcggatcgaaaactccaaaaaatgaacgtgactactggcaaacaccgattgaaattttcaacgcgctcgaccgcgagtttggcttctggctggatgctgcagcctctgagagtaatgcgctatgcgctcactatctcactgagctggatgactcgctgaacagcgaatggacgtcatacggggcgatctggtgcaacccaccctattccgatattgggccgtgggtggaaaaggctgctgagcaatcccgggcgcagtctcaggccgtagtgatgttgctacctgctgacatctctactggctggtttatttcagccatgcaatcagctgatgaactcaggctgataacgggtggtcgcgttcagtttgttcctgcatccgttacaggaaagcgccagagcaacccaaaaggctcgctcctgtttatttggcgcccgtacatcaccccgcgacacatcatcacgtccatatcgctggctgagttaaagcggatcgggaatctggaggcagcatga

SEQ ID NO: 92942 - DNA, 621 bp, Enterobacter aerogenes
atgcttcagcgttcgcctgaatggtttgccgctcgctgcggaaaagttacagccagccgccttgctgacgtcatggccagaaccaagtctggctatgcagcaagccggcagaactatatggctgagctgatttgccagcgcctcaccgggaagcttgaagaaggtttctccaacgctgcaatgatacgcggaacagaactcgagccggtagcacgcgagatgtatgcgctgaatgagttcgatgccgaaatcactgaggtggggcttatagatcacccaactataccaggattcgcagcaagccctgatgggcttgttaatgacgatgggcttatcgaaattaagtgccccaacacctggactcatcttgagaccttaaaaactggcgagccaaaacgccagtacctgctgcagatgcacgctcagatgatgtgcacagggcgtaaatggtgtgatttcgttagtttcgacgatcgtctaccgccagacctcgcctatttcaaaaagcgcattcacttcgacgaagcactggcaaatgagattgagtccgaagtgaaaaagttcctagaagagttggagaaagaaatttccagcataaaaaaccacgaccatgccgcatga

SEQ ID NO: 92943 - DNA, 492 bp, Enterobacter aerogenes
atgatggaacaacgtactctaaaaggtctgatggtctatagcccaaaatctggcgtttttacatggattaatccaccgcaaggtcatgaggaattacttggtgagcaggctgggagcccggccaatggaaataagacttactggttgattcaaatcgacggaaagaaatataagcgctcacatctggcccacttgtttatgacgggaaagatgccatcaggaattattgaccatattaacggtaattctttggatgataggtggatgaatatcagagacaccacatacgccattaatgcccaaaacagactcgttgggaagccaggtagagaactaccaatgggggttaagaaattaaaaagcggccgttatttagcaagaattggcgttggaagaaaatcagtttctcttggcaccttcgacaccgttgaagaggctaagtcggcatatctaattggcaaggagaaatatcatgcttcagcgttcgcctga

SEQ ID NO: 92944 - DNA, 747 bp, Enterobacter aerogenes
atgagcacagcactttctacaatggccggaaaacttgcctcccgcctcggcatggatgccggaactgacctgatgaacactttgaaaaatacagcatttaagggtgggaatgtcactgatgagcagttcacggcactgctgatcgtcgccaaccagtacggactgaacccgtggacaaaagagatttatgcattcccggataaaggtggaattgttcctgtagtcggcgttgacggctgggctcgaatcatcaacgaacatcctcagtttgatggaatggagtttgcctacgacaaggaagaaggcgcgtgtacctgcaagatataccggaaagaccggacacacccgaccatcgttactgagtacatgggagagtgcaaacgcaacactcagccatggcagtcccaccctacccgtatgcttcgtcacaagacgctgatccagtgtgcgcgtctcgcatttgggtttgctggcatcttcgatcaggacgaagccgagcgtgtcattgaagggagtacgacagaggttcatgtagggcatgagtcggatggtcgtcgcccggaactgatcgcaaaaggcgagtctgccgcacgccttggaactgttaagtaccaggaattctgggtggcgttaagcgcagaagagaaacaggttatcggcgcggttgagaagcgtcgcatgtatgacatgagccttgcagtcgacaacgcagaacctgtcgatgccgcagcgccggaggataaatga

SEQ ID NO: 92945 - DNA, 285 bp, Enterobacter aerogenes
atgaacgcataccgcgcatacgacgtgatcgaagagcgtaagtgggccgagcaaacgctcaccgaagagaagcagaagtggattgacgatcgggcgcaggaaattatcgacgctctgccgaaagagccgtcaggcctgttccgcttctctgtgccgatggacaaaagcccatacgaaggcctccgcagcgatgcagctggcgaggcatataacgatctcatctcggcagtagcttacgcccaggcggaatacgactgggatcaccgcaccggctgcccgttttaa

SEQ ID NO: 92946 - DNA, 159 bp, Enterobacter aerogenes
atgatgcgcaacgccaaaactggcgccacctggaaggtttcacgtgattacctgaaagaaaccttctggttcgagcctcagggcaacctgcgccacattcgcaaagcatttgaggcacgcgatctgctgccgaacctggttccagccgggacgcattaa

SEQ ID NO: 92947 - DNA, 696 bp, Enterobacter aerogenes
atgaatattgcggacagagtaaaacttaggcgtgcggagctatcattgacgcaggcagagctggcttcactagctaaaacctctcagcaggccatacagcaactcgaagacggaagaacgaagcgcccaagatacttgccagagctagcagcagctttaaagtgctcagttagctggctgttaactggtgagcatgaaatgaccagtgagatccctcccgagaaagaatggtcccaggtcgactcatgggacaaaaataccccgctaagtgagggtgaagtagaagtgccatttttgaaagatatcgaatttgcctgcggagatgggcgcattcaaagtgatgatcacaatggctttaagttgagattctccaaagctactctgcgaagagttggtgccaacagcgatggttctggcgttatctgcttcccagctactggagacagcatggagccagttattcctgatggaacaacggttgcagttgacaccaataacaaacggattattgatggaaaactatatgctattgcgcaaccaggggccggagatgaaaagctaaagcggataaagcagctataccgcaaaccaggtggaattcttgtgatccgcagcttcaaccgagaggacgaagaggcgatggagcaggacgttgaaatcatagggcgagttttttggtattcagttttactttaa

SEQ ID NO: 92948 - DNA, 222 bp, Enterobacter aerogenes
atggaaactctttctgaccgcgttaaaaaacgccgcagtgaacttaatttgacccaggctggtcttgctgagctttctggaacaaaacaacagactattcagcaagttgaatccggattaacaaaacgcccacgcaagctcattgagctagcgactgcccttcagtgcgagccacgctggcttctttttggagagcaagggactaaaactaatgccgcctaa

SEQ ID NO: 92949 - DNA, 222 bp, Enterobacter aerogenes
atggagagttcaacgacacgcaacaaagtggaggcccgcaggatagaaagctggttacacagccagatagctgaactgggaaccacgaatatcgccaaagtggccggagtgaataagtcgacggtgagtcgctggcgggaaagtctgctgccgaacatgtcgctgctgctggccatcctgatttctaacaggccgggagagaagggggactttgaggcatga

SEQ ID NO: 92950 - DNA, 861 bp, Enterobacter aerogenes
atggcaaatactgccgaagtaatcaatttccctgtgcctgtcgtggcactacaggagctgcgcgtggcagatctcgacgatgggtttacgcgcatcgccaatgagctccttgaagctgtcatgcatgcgggtttgtcgcagcatcagcttttggtgttcatggctgtcatgcgcaaaacatatggcttcaacaagaaagctgactgggtcagtaacgagcagatctccgtgctgaccggcattcttccgcacaagtgttcagctgcaaaaagcgccctggttaagcgggggatattaacccaaaccggtcgcgtaatcgggattaataaaacggttagcgaatggtcatctttacccgtaaaaggtaaagaaaaaaaaccttacctgaaaaaggtaacattacccgaatcaggtaagaaaagtttacccgaatcaggcaacgcctattaccagaatcaggtaaacacaaaagacaaacatacaaaagacaataaagacaatattaataacccccctaaatccccccgggcggtttcgttcgatgcgtcagctgttcagttgcctgactggctttctgcagaaatctggtcgtcatgggtggcataccgtcgtgacctgaaaaagccgatcaagtctcagcagacggtcacccaggctatcaacctgctggaccgctgccggctgaacggttactcccctgacggaattattaaccagagcatcgcgaatggctggcagggactctttgagccgaaaggagccaggccgcagcgccggcaggagtcccgcgtcactgagcgattcgctgacaaagactacggcaaaacagaacttccggactggatgagggatcagcaatga

SEQ ID NO: 92951 - DNA, 849 bp, Enterobacter aerogenes
atgaacctggacgaacgaatcaccctggtcgaaaaacagctgcaggagctgtcacagccagcattggacatcccaaacaccgaagtcattaagcagttagtggtctgcgaaaagcacggcgactatgagcaacgccagcgcgtatcaactggccttgtccgtctgccaggggcaccgacaagctgcccgggatgcctgaaagatgagctcgtattcctgcgaaacgagaaggccaaaacggatgacagaactcgcactgcgaatgttgaacgcctgatgctggagctcaaagtcccggcccggttcgaagcctgcacgctggataactaccatccggtgagcgaagacgcggagtttgcgctgaaagtctgccgagcgtacgccacccgctggccagatcgccggaataacggcggcggcctggttatgtgcggcaaacccggcacggggaaaaaccacctggcctatgcaattgcgaaaagcgttatcgcagagcaccagagcccggtcgtgttcaccaccgcgctgaaaatcgcccgggagtttaaatccacctggtcaaagacggcgacccgctccgaggaagacgtgatccgcttcttcaccaagccggacctgctgattatcgacgaggtaggcattcagtttggcagcgaagccgagaagatgatcatgtttgaaatcatcaacacccgctacgagcgcctgaagccgacgatcctgatcagcaacctgccgaaagatgagctgacaaagtttatcggtgagcgcgtcatcgaccgcatgaacgacggcggcggctgcacgatttcgtttacctgggacagctatcgggagaaccggtcatga

SEQ ID NO: 92952 - DNA, 294 bp, Enterobacter aerogenes
atgacaggcaaagacgcaattctgaactacctgaaaacgcataaaacctgcagctctccagatgtcgccgcggcttccggaatgacgcacacctgcatcaaccaggctgcaaacatcttggcaaaacagggtgttctggtcgctgaagctcgggtatggaggacggtttactaccgactggccactgaagaagaaatttcaggcagaaagagcacgaaccagattttcaacgagtgtcggcaaagcccggcaatgaagcgggtactggctgtttacgggagaacatcagcatga

SEQ ID NO: 92953 - DNA, 132 bp, Enterobacter aerogenes
atgttatttggtcactggctaagtcaaaaagagattcctgatccctatcgaaagagtgaagaggcatttgtctctgtttattctttaatcgagcaggccggtaaatattgggctgaaaaactgggctcataa

SEQ ID NO: 92954 - DNA, 1485 bp, Enterobacter aerogenes
atgcagatttctaagaagatttacttttcagattacaaatgttcctcggctaacaagactgggattacgattgctttctctgaaagtgaatataatttatacaacaatatcaaacatttaagttcagccaccctgagggatatgattaacatacaatcatatgaaaaactagaaacaatcgcaaatgaaaagaatgtaggcaagtcaacatttataaaagatattttggcaaaaaaatttgtgaatcagaaaaatgaaaaatcatttatgcgtttgcaatcaacctttagcggtggcaaaggtagtccaatgcatgattggtacccatatttagagggttattctcccgaatttgtgaaatgcttgatttcacgatttgctcctaaagccaaaacaattttagatccattttgtggctctggaacaacagccattgtttccgttttagagggtttaaataattactattgcgaagtaaaccctttatgccaatatattattgaaactaaactaatagctttaacattaagcgaagaagaaaaaacaaaattagtaaatgaactttattctatttctaatgaaataactaatgtactcaaaccttctgcaaccgagacagatctagagaaatcatttaaatccgtttttggtaatacgaaattttttgaggatcacatatttaaagatatacttagttatcaatgttacattagctctatcgaagatgaaaatcttaagagacttctgacaatagcagggattagatcgttaatcccttcctcgttattggtaagacgaggtgatttacgattcaagacacaaaaagaattagagaaaggcaaccagggctttcgctttcatgtacaaaaaagcttagaattaattgccagtgatttattagacattacggaaggtagtggtttagctaccttcttatgtgatgatgccaaagaaatatctgggaataacctgattgatgctgtaataacaagcccgccatatttaaatggcacaaattattttagaaatactaaaattgaactttggtttatagggaaattaaagaccaaatcagatctaagacattatagggatttagctattaccagtggtattaacgatgtaactaaaggtaaaagcttatcttcaaataatactattatctcagaaataccattattatctgaatgtattaaagaactaagcataaaagagtatgatagtcgtatttcaatgatggttgaaaactacttttgggacatgttcaaattcttatcaaaactcccaaaattactaactaatgatgcgactatctgtatagatttaggtgattctgtttattgtaacgtctacatccctacacaagatattttgaaagaaatgatgtcaaagttaggttttgaagagaacgaaagggtcattcttcgtgaacgaaaatcccgcaatggaacaaagttagtccagactgttcaggtttttaaatga

SEQ ID NO: 92955 - DNA, 1140 bp, Enterobacter aerogenes
atgaaaaataaatattttagtaaaaaatgggagcaattcaagaaagaattaccccatcaatcaggtgaaatggtaaagagaaattggggccataactggcactctatgtgttcataccaagggaaacttaaaccatcaatagctagatctttaattgatacattcatgccatcaagtaagggacgtatattagatgtcttctcaggtgttggcaccattcctttcgaagcaagattacttggtcatactgcatatggatttgatattagtccagcagcagttaatatttcacgcgcaaaactagaagttataagtaaaaatgaaatccaagaggtaattaataaattatctgattttattgagcaaaacaaaaattcaatagattataacgaacataatttaataaggtttaatggttcaattgaatcctattttcatcctgaaacttttaaggaaatactgtgtgctcgtaaattctttttaataaaaggtgaattaaatgcatctgaatcgttagtacagtcatgtttattacatattttacatggtaatcgtccgtatgcattgagtagaaagtcccatcctattacacctttcgcgcctactggagattttatatacagtaatttagttataaagttaatcaaaaaagttgaaagagtcttgcaaaattctgatggtatcccagatactggcagcaaagtattttatcaggactctacaaaaagttggcctgaagaagtaaataatttagatgcaattataacatcacctccattttatgatagtacccgtttctattcagcaaattggatgcgattatggttttctggttgggaaaaagatgacttccaaacgaagccaaaagattttgtggacgaaactcagaaaaaaagctttgaaatatatgataatatattcaaacaatctcaacaatgcttaaaaaaagatggcgtttttttaatgcacgttggcaaaagtaaaaaaagtgatatggcaggacaaattgctaaaattggtagtaattatcttagccttatagatatatttgacgaaagtgttgaacattgcgaaagtcacggaattaaagacaaaggcacgacaacccatcatcagtaccttgtctttacgaaagattag

SEQ ID NO: 92956 - DNA, 1005 bp, Enterobacter aerogenes; identical to SEQ ID NO: 92523

SEQ ID NO: 92957 - DNA, 945 bp, Enterobacter aerogenes
atgaaactaatgggattcagtgatactcacctccgttgctatgtcctacatgacgattctgccggtcagcacatacacattatcgcaagcaggatcgacctcaatggagggaaactctacttgggtaggaacgaaaacctcatcagcacccggatcatcggtgaactcgaaatcgctcatggtctgacagtgacaaaaacagccccttccattgcaccaaagcaaccgaagcggaaaagaatctctcgcaacgaacagatgctttcacaacggactggccttccctcctcaaaagaagctctccaacagatacttgataaaagtttggcagatacacctgaccttttaactttcacaaaacgactggaagaagcggaagtaacttggacagcgaatatcgcaagcacaggtaaaatgaacgggttctcattctcctaccgcgatatcgctttcaaggcatctaaacttggaaaggcatactcttgggtaaatcttcaaaagcagcttaactacaaccatgaccacttagaagctatacgaaccaacacaccaacaaaagaccaccctgctgttcctgctcccatgccaatacctgttcctgttcctgctaaagatgttcctgttcctgttcctgttcctgttcctgttcctgctaaagatgttgcagcaaccgatataccaagggaaagcataagtgaaaaaattgccgaactggaactacggctcagagaagacaaacgacacgaaatcgtacaaaagattcttcagaagaatgcagtacaacagcgaaagcatctcaggctttgtagctggcttccctttttacaacggctcatagagcttctcggaagctacggtaagagcattcttcacaacaaccctgcgagattctcaaaagtctatgcaacccgacttctacataaagaaaggaaaattcatttatag

SEQ ID NO: 92958 - DNA, 246 bp, Enterobacter aerogenes
  misc_feature (164)..(173): n is a, c, g, or t
gtgaagggtatgcagaagatcaagaggggtaagagcttcgctggtgttgttcgttatgcattgcagccaagagcacatcataaaagcgatccagtcgtaatcgggggcaatatgctgggtgactccgctcttgaactgattgctgaatttgatggcaccaaacnnnnnnnnnnaaacagcttcggccagatgcccagaaaccggtatggcacaactcgcttcgcttaccagcaggtgaatcactaa

SEQ ID NO: 92959 - DNA, 573 bp, Enterobacter aerogenes
atgaccacggacttcatgtatactggttttttatacagttatggtgggtggtgtatgcttaatggatttgctcgctatgctttgactgctagttcggttgccccagtttgcctgacattggcattcttagcttatatcaatgataattataagattcttgtttcctcaattcttttggctgtcataagtgtggttttttgtgtctttataatcaaacaagcacaaaaatataatccggtcacattgaaaaacttagaatcggcatctccggcagataaggaaataaccaactatttcttgacttacttgtttccacttatatctgggccgaccacttttatggattggcgattagctctgtttttttatttaagtcttttcttctacataaagcactcgtcttcgtatagtttcaatccaattttgtctatcatatttggattcaagttctatgaagccgaagatgacactggggtgagttttgttcttttgtcaacaaaacctcttaccaatgcgaagatcaaaggtttgagggtaaagaagcttactgaacatacctatatgattgtataa

SEQ ID NO: 92960 - DNA, 147 bp, Enterobacter aerogenes
atgcaatcgaacggcctgatgctgttccggtttgggaccccgatgatgtgtcagttcattatttcaaagcgttatttacgggtgagccagcttcgaatggtaatcctactcaggtttggcttcaatgtttcgacagacgacaaataa

SEQ ID NO: 92961 - DNA, 423 bp, Enterobacter aerogenes
gtgctgtcgacggtgcgcgaagtcggccattactcgtgccgttcgatgaccggcaactgcgcggccttaaccaggcttgccgatgaaccaggctatgcgcaaatcaacaccgccgacgccgaacggttaggtatcgaggatgacgcgctggtgtgggtcaattcgcgtaagggccgcatcatcacccgcgcgcaggtcagcgatcggccgaataaaggcgcggtgtacatgacctaccagtggtggatcggcgcctgtaacgagctggtgtcagagaacctgagcccgataaccaaaacgccggagtacaagtactgcgcggttaacgttgaacggattgccgatcagcgcgcggcggagcagtacgtgatcgaggagtacaacaagctgaaagcccgcctgcgcgaaagcgcgatgggttaa

SEQ ID NO: 92962 - DNA, 273 bp, Enterobacter aerogenes
gtgtgggtcaattcgcgtaagggccgcatcatcacccgcgcgcaggtcagcgatcggccgaataaaggcgcggtgtacatgacctaccagtggtggatcggcgcctgtaacgagctggtgtcagagaacctgagcccgataaccaaaacgccggagtacaagtactgcgcggttaacgttgaacggattgccgatcagcgcgcggcggagcagtacgtgatcgaggagtacaacaagctgaaagcccgcctgcgcgaaagcgcgatgggttaa

SEQ ID NO: 92963 - DNA, 480 bp, Enterobacter aerogenes
atgcctgctgcaagattacgtgggaaaagaacaatattccgagccagatgcgggattgaactatcaaatcacggcataatcgataatgtcatttatcagttttcaacaaagattttagccaactcagactatgttaaaagtacttttagtagggtttctaaagatctaagcaaggttatttcgttatataatcctttggatatgaagtttaaacgagatattgctatctgcaatgctagccccaaaggtgatcttgacaggaattatgttattgctgtaatcggcgctattactgaagtcaaaaatcaaatggaagtgcttagagccttttctaaacttaaagatgcatcactaaaattgaaattcataggtgagccaagaagcactgaaaaagataagcaatactataacgaactattaaaatatgcggaagacaataatcttgcttctcaagtcatatttactggttttcaaaaataa

SEQ ID NO: 92964 - DNA, 426 bp, Enterobacter aerogenes
atggtgctctcaacggtgcgcgaggtcggccactactcctgccgttcgatgaccggcaactgcgcggcgctggcggcgctggcggatgaaccaggctatgcgcaaatcaacaccgccgacgccgaacggttaggcatcgaagatgaagcgctggtgtgggtcaattcgcgtaagggccgcatcatcacccgcgcgcaggtcagcgatcggccgaataaaggcgcggtgtacatgacctaccagtggtggatcggcgcctgtaacgagctggtgtcggagaacctgagcccgataactaaaacgccggagtacaagtactgcgcggttaacgttgaacggattgccgatcagcgcgcggcggagcagtacgtgatcgaggagtacaacaagctgaaagcccgcctgcgcgaaagcgcgatgggttaa

SEQ ID NO: 92965 - DNA, 1485 bp, Enterobacter aerogenes; identical to SEQ ID NO: 92954

SEQ ID NO: 92966 - DNA, 894 bp, Enterobacter aerogenes
atggaactttttgcgattacagacagcgaaataccgactagaataattaaaattgacatagatgctcccgcacaaacggtagtagaaaatctatttagaactcagaggagtgagtttataaatgaagatatcgaagaaatagaattttgtgcatcttataatgttcaggatggtgagatattttccatcaatccatttgatgacgaaataggcattattaatgcaatcgaacggcctgatgctgttccggtttgggaccccgatgatgtgtcagttcattatttcaaagcgttatttacgggtgagccagcttcgaatggtaatcctactcaggtttggcttcaatgtttcgacagacgacaaataattaataatgaaaaatcctttttccaagtagtaacacagcctggaaatagattctcagtgtccactcgtcctggtttttcgcttagtgatcgattaactgctatccttgtgggtgataaattattgttcaagagtttctttatgctccggcgattttttaacatggaagagtattttaatgaagctactagagaggatttagataactttatcggtaatgatatatttcatgtagaaaatgctgaagattttatgacgtttgcagattctgcaattaaaaagaaagtatctttgataataagttctggaattctaaacgatcagcctattgaaaatctaattgagtgtgctcagaagattggatatcaattaggtataactaatgtgaatggtgataataaaatcactatgccaaactctaaaagagaagtgaagcaactattatatttccttgatcagggctacttcaattcaataatcacaaatgagctaatgctgacgaattcgaagcgaccaataagaatttga

SEQ ID NO: 92967 - DNA, 861 bp, Enterobacter aerogenes; identical to SEQ ID NO: 92780

SEQ ID NO: 92968 - DNA, 471 bp, Enterobacter aerogenes
atgagcggcgccgatttaaacctctacaatcacggtccggatgccatcgtttcggtgcaggtgaatggctacggcgggccaggcgctaactcctacggcggcggcggcttctgctgtgtgatggtgcctgatgtctggcgcccggggctgacggcaaaaattacctggacctccgatcccaattactggatgaaatccagtgagatgccggatgattatgaaactcactatcagcgccatgggccgattattgtacctattgaacgttgggaaaagggacaggcttgcggctttgacgtgcatattttcccctgcgataaggtgcggatagtgcgttcctgcatcccgccgggacagccgggctacccggtaccccagtcgccgccagactggaaggaaagagcaaaaaatatactttataagcatgttaaggagaacatcgtatgtccgacaccgcagagtccacgctga

SEQ ID NO: 92969 - DNA, 267 bp, Enterobacter aerogenes
gtgcctactaaatccaaatttataccaataaaactctccataaaaagcattatcgctattgagtataccggtaaacgggtatatctgagcaaagttgaaattaactttatagataataaaattgaggatattgggattgtgtcacattctaatatcgatgaaaaaaacttactacttttaaaaaattatctaccacttagaatagaacgcgatatactctctaaaagtatagaaaagcctaatattattaaaaagttatccgtgtag

SEQ ID NO: 92970 - DNA, 420 bp, Enterobacter aerogenes
atgtccgacaccgcagagtccacgctgaatgccctgaaggcgctcattgccgcctttcagaccggcgccactccggttacggttaaagcctccaccgcggaagccgccagtttaccgccaaagtttcccgggccggatgacaaaaagcccgcggataaatccgcgcagcagaaagccgaatacaacgagcgcggccgcctgccggcgagcagaacgcagaccgaaggtaactacgccaggcagtacctggaaggatatgtcggggagtcagaagatccctcggacaaaaaaacggaaccgggctgcccggccagcctgcatatcagcctgttcttcgacggtacctgctgtaatgaagaagatggtgatgaagtgtatggctcgcgaaacccgccgctgaccaatattgctcggctctaa

SEQ ID NO: 92971 - DNA, 2541 bp, Enterobacter aerogenes
atgaaaatcattaaacccttacgcctgagcgtactgaaccggccatttcgctggcagggcaaaaattatcttggcgtttcggtgctggcgttggcggatatggggccaaacccgcagctgcgccccgagatggaactgtggcagcttgccgccgacgaactgcaaaccagcggcggcgtggtggatatggccatccctaaagtccgcgccgaatttcttgccaccggttttgcctatacccatcatcagcaggaaaaaagtgcctgcgtggcgcgcatcgatatcgacaaactgagtaagtcgttggtggtgttcggcgatcgcgagtggacggggcaacgtatgacccgaccgcagccattcagcgaaatgcgcctcgactggagccgcgcctttggcggcggtgattatgccgacaacccgcacggtcttggtgtcgcgccggtaaaacagcaggggcgcgaacatcatcctctaccgaatattgaaccgctggagggaagagtaagctcgccgcagcagaaaccgcagccggcaagttttggcccgttggatatccagtggccgcggcgctttagccgaatgggcaaaaaatatgatgctagttggctacaacaggagtttcccggttttgcccgcgatattgactggaaagtctttaacgccgccagtccggaccaatggtgggaggatcgggataccttgccgccaggggcgaaatggcggatctggaatatgcatcctgagaaaccaatgcaggagggccagttgccgccgtggcaggctcgctgttttattcatcgccagcgcgcggatgaaacgctatttgaagaaattgccttacgcgccaccacggtatggttctttccccatcgggaacagatgatgcttatctggcaggggcacattcgtatcaatgaagacgatgccgccgacgtcctgcagctgatcccggcgctggaaaaagagggcgccgcccgttcgcttaatcactatcgcaaggtactggcccagcgaatggataaagagaagggcgcgctcttctcctttcgtgaaaaagatctcataccggaagagaccatcggcccgtggatcgacaatgaaattgaacagtcgccgagtccgcagcaggagaatatgaaaaaccgcgcccgtctgctgcgtgaacagcaccgcgccgccatcgaagccagcggcggtgatatcgatagcctgttggcggatatcgacgaacccacgttgcctaagcttgaagacctgccggagtttatcgccgacatggagcgtcaggcgcaggaaatggagaatgatgcacaacagcgcaagcgtgagatggaggcgcactatccgcagttgaataacgatgaaaaccaaccgcgcggccccgaatccatgcaccggatgcaggagatgctgcatcagcaccagcacgaactgagcgagaaaaagcgcgcgcaaacgcgcgaggcgctacatcagatgtacctggccgcggtgcagcatcagccgccggcggtccggctgaagggcgatctggcgatgatcctgcgccaacgcgccgagcgtaccatggcgcagggcggcaattttagcgggatggatctgaccggcgttgatttttccggcatggattttcgcggcgccaattttgaaaaggcgttactggaatgcgcggacctcagccactgtcagctggataacgcctcttttcagggggccgtgctggccagaacggagctacagcattcgtcgctgcgtaactgtgattttagcggcgccagcctggtactagcggagtgccatcaaagcgacttcaccggcgctcgctttgaagatagtcagctacagaacgcgctgtttgcgcaatgcattttcgataacgcgacgctaaaaacgctgatccttcgggaaatcagcctgattgactgccgttttcatcgcgccgagctggatggctgcgtctttatggaactgacgctggcacaacctgatttcagccacgcgcggctgcacaaatgctcgtttttacaatctgaactggagcatgccattttccatcaggcgacgctggaaagctgttcgctggtgcagaccatagcggagcgcgctgattttagcgctgcaacatggctagccagcgctgcggtgtcggaaagctcacttatcggcgccgacttcagccacgcgacgctgcagcagagcaatttacgccagacgccattacagggcgcgcgctttgcgctggcaaaaatcgaaaacagcgatctgagtgaggccgattgccgtgatgccagctttatacgcgcgaatctggtcggcagtctgtttgttcgcaccgattttcgcgaggccgattttaccgacgccaacctgatgggcgcgttgctgcaaaaaagccagcttgccggagccaatttcgaaggcgccaacctgttccgcgccgatctttcacaatcctttaccagtaaaaccacgcggctggacggcgcatggaccaaacgcattaaaaccctgccgaagcgcgatggagaagtgatatga

SEQ ID NO: 92972 - DNA, 2073 bp, Enterobacter aerogenes
ttggatctgaaatttcggcggcgagtcccggtcgttcatcagacagaaacgtcagaatgtggactggcctgtctggcgatgatatgcggacattatggtcgtaatatcgacatgatcgccctacgtcgccaaataaatctgtctgcccgtggagcctcgcttgccagtgttcagcaaaccgggattgagttagggatggaaagccgggcattgtcactggatctccatgaacttaatgctctcagaatgccctgtatcctgcactggaattttaatcatttcgtggtgctcgttagcgtacgtaagaatcggttcgtgcttcatgaccctgcgagggggcgaagaactgtcgggagtgatgaaatgtcacagtgcttcaccggcgtggcgctggaggtctggcccggcagtacatttgtgcaggaaacgatgaagagccgaatcggaattcgggcgttaatcagcagcgtgcagggtatccggggcgtactgagcaaaattttctgtctgtcgctgattattgaagctatcggcctggtgatgcctgtcggtacgcaattggtgatggatcatgctattcctgcgaatgaccggggactgctcatgcttatctgtggagtcctgatgttttttattttggggcgtactttggttagcgtgatccgcgcatggtcatcccttgcgatggagtcattgataaatgtgcaatggcagtcggggctattccgtcatctgcttcagttgccgttgacctattttgagcgacgaaagatgggcgatattcactcccgcttcagctcgttggatgcgcttcgcgccacgtttacaacctgtgtggtgggggcaatgatggacagcatcatggttgccggtctcttgttgatgcttatcctgtacggtggaaaattgacggtttttgtactgggctttacagcggtatatgtcttcattcgtatattgacctatagccggtaccgccagctgtcggaagaagcgttaatcgccggagcccgtgctggttcatattttatggaaacactctacggaatagctacggttaaaatgcagggaatggcagaacggcgtgggagccactggctgaacctgaagattgatgccatcaataccggtatcagactcagccgacttgatatgttcttcggcggcattaacacgtttgtggcgacgtgcgatcaggtgactattctgtggctgggcatcagtctggttatggagaaccaaatgactatcggcatgtttgtggcatttggcgcattccgcgcgcagttttctgaccgggtaggatcgctggtcaacttcttattacagctgcgtatgatgagcctgcacaacgaaaggatttcggatatcgctttgaatgaaaaggaagaaagaaaaccggatttaggattaaaggcaaccatgtctccggctagtctggagattaaagcgctaagcttccgttacgacagccagtcagcacccgtctttagcggccttagtttcaggatccgagccggcgagagtgtggccattaccgggccctcaggttcggggaaaaccacgctgctcaaagtactgtgcggcttgtctgaaccgatatcagggactgtcttaatgaatggtacggatatcaggcaactggggataaataactatcatcgcttgattgcctgcgtaatgcaggatgaccggctgttttctggctcaattcgggagaatatctgcggattcactgaaaatattgatgatgcctggatgagagaatgtgcccggacaagccgtattcatgacgtgatattggctctgccaatggggtatgagacgttaatcggagaactgggggaggggctatctgggggtcagaaacagaggatttttattgcccgggcgctttatcgccgtccggatatattattcatggatgaagccaccagcgcactggacgcagagtgtgaaaaagacgtcagtctggcaatgaaaaagttgaatataacccgaataattattgctcaccgtgaaacgaccctgcaaaccgcggacaggatcatcaccctcggcgaatccaattaa

SEQ ID NO: 92973 - DNA, 420 bp, Enterobacter aerogenes; identical to SEQ ID NO: 92006

SEQ ID NO: 92974 - DNA, 327 bp, Enterobacter aerogenes
gtggctatcgttgaagatctggaggtgctggcagccttcgaaacacgcttgttgccggagcttgagcgcaatatcgcgcaattcgaccgtctgtatctgactatcgatctcgacgtgctgccggcgcgcgaaatgccggcggtttccgcgccggcggcgctgggcgtgccgctggcgaccctgctgcggatcgttgagccgttgtgccgcagcggtaagctacaggcggtggatttggtcgagtttaatccgcaatttgacatcgacggacagggcgcccgcgcggcggcccgtctggcatggcaaatcgcccattggtggcgctag

SEQ ID NO: 92975 - DNA, 540 bp, Enterobacter aerogenes
atgaacgcacgaatttctcccatcaggcgcttagtcgttccggcgctgctatttttgttatataccccggcggcgttggccatgggcgataacagcccgagcaaacaaaccccggattgcccgagcggtcaggcctacgacagcgtgagccaaaaatgcgtcccacagaaaaccagtagccttagcgatgaggataaaaccaattatgcctggcatctggcgaaaaaaggcgaatatcaggccgcacttaacctgctggatacgctgcacaacgccaatacgcctgaggcgtggaactatcgcggctacgccacccgtaagctcggcagaaccgatgaaggaattggctattatcagcgggcgctggcgctgaaaccggactacgcgaaagcccgcgaataccttggcgaggcgtggatggtcaaaggacgccccgatttggccaaacagcagctggcggccatcgccggcatttgcggccaaagctgcgaagagtaccgcgatcttcagtcggcaataaacggacatccggaatcctga

SEQ ID NO: 92976 - DNA, 720 bp, Enterobacter aerogenes
atgatcggcttctgctcgtcgcagggggtctacgaccagcatggcgagatcgtttccgagctgttccctaacgaggcgcaggcgcgggtagaggagctggaagcggaagaagattataattccggtaccgtacgcttcctgcgcggggcggtgaaagcctgccgcagcggcgtgcgtcgctgccatttaattagctatcaggaagatggcgcgctgctgcaggagctattctcacgtgacggtatcggtacgcagatcgtcatggaaagcgccgagcagatccgccgggcaaccattaacgatatcggcggcatcctcgatcttatcagcccgctggagcagcaaggcattctggtgcgccgctcgcgcgaacagctggaaatggagattgataaattcaccatcatccagcgcgataacaccaccatcgcctgcgccgcgctctatccgttcccggaagagaaaatcggcgaaatggcctgcgtagcggtgcacccggattaccgtagttcgtcacgcggcgaggtactgctgagccgtatcgccgcccaggcgaagcagatggggctcagcaagctattcgtgttgaccacccgcagtatccactggttccaggaacgcggcttcaccccggtggatattgatttgctgccggagagtaaaaaacagatgtacaactatcagcgtcgttcgaaggtattgatggcagacctgggctga

SEQ ID NO: 92977 - DNA, 615 bp, Enterobacter aerogenes
atggtgaaggagcgtcgcactgaactggtcgagggattccgccattctgttccctatataaacgcgcaccggggaaaaacgtttgtcatcatgctgggcggagaagccatcgagcacgataacttttccagcatagtcaatgacattggcttattgcacagcctcggtattcgcctggtggtggtctatggcgcgcgtccgcaaattgacgctaatctcgcggaacaccaccacgagccggtttaccacaagcagacccgcgtcaccgacgccaaaacccttgagctggttaagcaggccgccggtatgctgcagttagaaattaccgcccgcctgtcgatgagcctcggcaatacgcccctgcagggggcgcatatcaacgtggtgagcggcaattttattattgctcaacctcttggcgtcgatgatggcgtcgattactgccacagcggccgtattcgccgcatcgatgaagaagccattcatcgccaactggacagcggcgcaatcgtgctcatgggcccggtcgcggtatccgtcaccggcgagagcttcaacctcacttctgaagagatagccacccaactggcggtaaagctgaaagctgaaagctga

SEQ ID NO: 92978 - DNA, 225 bp, Enterobacter aerogenes
atgcgcaccgctgcggttgacgcgcagaaagagacgccgccaaaactggaaggcaaagcggccgatagcccggagatgaaagatttccgccacggtctggaaacgctggtcggccagatcgacggcgcgctgaagttagctgacgctggtaagctgaaagaggcgcaggctgccgcggaggacttcaaaactacccgcaatacttaccataagaagtatcgctaa

SEQ ID NO: 92979 - DNA, 144 bp, Enterobacter aerogenes
atgcgtaaaaaactgttagcgatgctggccgtctctgcttttgcgctcggttcggcatcggcgttcgccgatcttggcgaagacatggacacccttgcggaaaacctgcaggtggtacaaaaacctctgacattggcgagctga

SEQ ID NO: 92980 - DNA, 1332 bp, Enterobacter aerogenes
atgaccaaacccgcctatatctgccagggctggggcccgcagcgccaggcgaacggcgaactctccgcgcgcgctatcgccatgctgccgattttaaccggcaacgtcggcattaacgggggtaacagcggcgcccgcgaatcgacctataccatcaccattgagcgcctgccggtgctggagaatccggtaaaaaccgccatctcctgctttagctggaccgacgctatcgctcgcgggccggagatgaccgccacccgcgacggcgtgcgcggcaaagagaagctggcggtccctattaaattcctgtggaactatgctggcaacaccatcattaaccagcattccgacatcaataaaacccacgatatcctgcaggacgagagcaaatgcgagatggtcgtggttatcgaaaactttatgacctcgtcggcaaaatatgccgatattctgctgccggatctgatgaccgtagaacaggaagatatcatccctaacgactatgccggcaatatgggctatctgattttcatccagcccgccaccacggcgaagttcgaacgcaaacctatctactggatcttaagtgaagtggcaaaacgccttggcgacgatgtgcatcaacgcttcaccgaaggacgaactcaggagcagtggttacagtatctgtacgccaaaatggtcgccaaagatccggcgctgccgggttatgacgagctcaagaaaatgggcatttacaagcgtaaagacccgaacggccatttcgtcgcctatcgcgatttccgtcgcgaccctgaagcgaatccgctaaaaaccccctccggcaaaattgagatttactccagccgcctcgccgatattgccgcccgctggcaactggaaaaagacgaagtcattaacccgctgccggtctatgcctccacctttgaaggctgggacgatccgttgcgcagccaattcccgctgcaaatgtttggcttccattataaggcgcgtacccactccagctacggcaacgtcgatgtcctacaagcggcctgccgccaggaagtgtggcttaaccccctcgatgccgaaaaacgtgggattaaaaacggcgacatggtgcgcgtctttaatcagcgtggcgaactgcgtattccggcaaaagttacgccgcgtattatgccaggggtaacggcgatgggtcagggagcgtggcacgatgccaatatggctggcgaccgcgtcgaccacggcgcctgcatgaacaccctcaccacccaccggccttcaccgctggcgaagggaaacccgcagcataccaacctggtcgaaatcgagaaggtttaa

SEQ ID NO: 92981 - DNA, 870 bp, Enterobacter aerogenes
atgaacaagtcatgtattgccgctgcgctgatctctgcattcgcttttaccacaagcgccgcaccgctaaaaattttgattgtcaacgacgatggttgcgaatccacgggcagtatttcgcttcaggaaaaactcacgcaaaaaggttttgatgtgtggatggttgctccagccaccaatcagagcggcatcggttcagccattaccttcaaaacgggtaaaatctttgatgtaaagaaggctgctgataaacgctactgcttcccgggaacacccgccgatgcggttgattttggcttacggggaatactcattaataatccgccggatctggttatctctggcgtcaacgatggcccgaataccggaatggctcaggtcaattcagggacggtaagtgcggcagccagggctgtacgttatggtttcccggcgattgcggccagcattgggtatatctttaccgaagatgaaatgaagaataaatggccaagtacacataaatattggcctgatgcggtggattatgtgtttgatgttgttgaaacgctgaatcataaacaggtttctggaacacctttattgcctaaagggtcgggcttaagcattaactatccgccgctgccaaaatcaaaaattaaaggtgtgcactatgttgaaaatgagatgttccctaccccacagattggttatgatattttgcctgatggacgcgctaaacaaaccatcaatccggaatcgttaaagacagtagagaacgataccgattccggctggcttaataaaggttatatcacctatagcctctttgatggggcaatgaacgccccgcaattccaggcgcaatatgaagaactgttgagtaaataa

SEQ ID NO: 92982 - DNA, 297 bp, Enterobacter aerogenes
atgaaaaacgctgacctgacccaattaaccgcgaccttcccgcttgtgcaggagctgatcgcgctgaaagaaaccacctggtttaacccggcgacgacgaccctggcacaaggtttgccctatgtcggcctgaccgccgcagatgtaaaagacgctcacgaacgcctgcagcgcttcgcgccgtatctggcggaagcctttccggaaacggccgccaccggcgggattatcgaatcagaagtggttgccattccggcaatgaaacgccgcctcgagcaacaggcgatctgttactga

SEQ ID NO: 92983 - DNA, 924 bp, Enterobacter aerogenes
atggatgtgatgaaagagatgggtaatcggctgctgaacggctggcagttgtcaaagctgtatacctttgaagtcgcggctcgccatgagtcctttgcactggcggcggaagagctgtcgctgacgccgagcgccgttagccatcgcatcaaccagctggaagaagagctgggtattcagctatttatacgttcgcaccgcaaggtggagctgacccgcgaggggcggcgggtattctgggcgttgaaatcctcgctggatagccttaaccaggagattctggatattaaaaatcaggagctctccggcacgctgacggtgtactcgcgcccgtcgatcgcgcagtgctggctggtaccggcgctgggggatttcactcgccgctatccgtccatctcgctgactgtgctcaccggcaacgataacgtcaatctacagcgggcgggtatcgatctggcgatctattttgatgatgcgccgtcatcacagctaagccatcattttctgatggatgaagcgatcgtgccggtatgtacgccgaattacgcgcaacagaagcagttaatccacaatccaggcaatctgcgctactgcacgttgctccatgaccgccaggcatggagcaatgattccggtaccgatgagtggttcagttgggcgcagcaatttgcgattgaattgccgcaatcgtcgggtatcggcttcgatcgttctgatttagcggtgattgcggcgatgaatcacgtcggggtagcgatggggcgtaaacggctggtgcagaagcggttagaaagcggggagcttatcgcgccgttcggcgacatgacgctgaagtgtcaccagcactactatgtgacgaccctgccgggccgtcagtggccgaaaatcgacgcctttatcgaatggctgcacagcctgacataa

SEQ ID NO: 92984 - DNA, 249 bp, Enterobacter aerogenes
atgtctgtaaaaaataaggcgcgtgaccgacttcccggtggccgccttaagtcttatcgtcgtgtaggttcacattttgccagttgtgccagatggtttgataaatcgccgtcctggtatcgcaatatgatgatgaccaggcctgagcgccgtgaagtcagaaggcttgtcaatcaggtaatgcgtggtcatgatgctgacggcattgcttttccggtcagtcatcgtccgtttgtttattggtggtga

SEQ ID NO: 92985 - DNA, 1245 bp, Enterobacter aerogenes
atgaaaaagattttactcgcattaacgctactattttcttcatgtgctttcgcagggtcagagcttgaattaaataaagtcaagctaccggaggctatttctcttatttacagtgaggtgcttaaagtcccgtatatgctagatccacagcttgttaatgatgaacgaatgattacattcaggttaacacctgatattgatgaacgggaatttgtaacccgttatcttggcaatatgaacattcgaatatggacgaaaaagggtgttgattttatcgcgccctatacgccgaaagagccggttaagccacgttatacatggacttatacgcctcagtaccgttctgttgcctacctgtctgatattcttggcggctacgtttcaggctccttcaataacagtggagccgtgatttctgacgattcgctaaaaggttcatcaggggcaagcaactacatcaatcgaaccggtgatattctggtttattatggtacgaaagaggatatcgccatcctgaaaacactggtcacttcgctggatacgatgagtgatgaagtggttgtttctggttatgtttttgaggttcaggcctcgcagtctgacggctccggcattcttttagcggctaaaattctgtctgataaattcaatatttcagttggtgctgccggactggataattttatcaatattcgaaccggctccattgatgccattttcaatctgctgaaaaccgacagtcgttttactgttgtcagtgcgccacgactgcgggtaaaaaataatgcctcagcgtctttttcagtcggctctgatgtgccagtactgggcagtgttacggtgaataacaatacgacaacgcaatccgttgaatatcgttccagcggtgttttgtttaacgtgacgccatcaatcaaaagtcggacaatggatctcaagattcagcagcagctttccaactttgtgaccactgaaaccggcgtcaataactcgccaacccttatcaagcgtgatgtaacaaccgaagtcagccttgcagatggtgatattattttacttggtggccttgctgaacagaaagacagtaaggccagttccggctggagcttcttcggttcccgtaccagtgaaagcaacaagactgatattatggtgatgcttcaggtcagaaaggttgaccggagcagggcgacgccccgcagcgccgcgaggagcggtgaactgttccgggacaacctgaactga

SEQ ID NO: 92986 - DNA, 1026 bp, Enterobacter aerogenes
atggctatttctgcatatattggcatacccggctcaggaaaaagttatgaagccgtttgcaatgtcattattccggcatttaccagcggccggagagttgtgacgaacatttatggtttacaaaaagataaaatcaccgaacgttatcctgatgcaacgggagaaattattgttgtggataatgatgatgtgcttaaagcagatttctttccttttaaaggtggggaagggagcttttgccagtttggtgatttaattgttattgatgaagcatggcgaatcttcggtagcgataaggatatgacggctgagaagaaatcatttattgctgaacatcgtcattttacgcaccctgaaacgggtattagctgtgatttggttattgtaaatcagtcactttctaatattgctcgctttctgaaagacaaaatagaaacaacttaccggatgcgcaagctgaaagcgttgggtctgaataatcattactgcattgacgtatattcaggccacaaaatctataaaagcaacctcgtcaccagttatcgcaataaatataaccctgatatttttgaactttacaaaagctatgaaggaaataacggtaatgaaaagcagacagataaacgccagagcatctggaattctggcaaagtcaggttctttcttgtgctttttccattgatgtttatcgggtcaggctggctgatttactcatttttcagcacgtttggccgaagcgatccctcgccagatttgactacaacagatgtacgtgatgcggccatgtttcgttcttccgctgctactccagcaccagatactccttcagaaccaactgaaccgccactttcaaccgagtggcgtatatcagggagaatgaccagtgaaggcagggcgtttgtgattcttgttaacggtgccggtgttttgcgtgccgttcctgcatccagttttaattacaaagggatgttgatgagcggaattattgatggtgagcgtgtgacgctttatacgggaaaaaaataa

SEQ ID NO: 92987 - DNA, 288 bp, Enterobacter aerogenes
atgtttgggattctgattagtgcattaaatactttgttaggttttgtattccggtcattgattattaaattcgtcgtattctttgcgctgtattttgtaatccagggcttcgttgaaatccttgttgagttactgccagattcaagcaatctctcatcgctgtttgccaatttatcagacggattctggtacttcattaacctgagtaaattaccacaggggattagtatgattatctccgcaatggctactcgttttattattcgacgtattcctgttatagggtga

SEQ ID NO: 92988 - DNA, 1713 bp, Enterobacter aerogenes
atggaaattgggttcccttttatgggggatcgtctcagcttatgtcgttattcttgggctaagaggctgacggtttattcctttattttttcctttctctgggtttcctttccccgatattcatattcatttgtaccagcaattgcagcagtggctgcgcgggctgttattcctaaagtcgttggccgggtgcttgttcgtcgctttgctgccaatgatgcgatttatacggcatcacagcttacagcaacccgtgtttttgttggccgcgctgcggctaatgctgccgaatatttgcctgctgcctcatcatacaaaatgaacggtgttgcaacgtgggcgggtattgctgctgctgtatcatcttttgttccgtcttctttgagttcatctgacggctcggtaatggtaatgactaacggtaaaaagatttccgataatttatatgaagtaacgtacagtggtcaaagtggtgaaagtaagacgataaccgttaattttgaaccacaggaattaagtccggtaatccttcatgttagtcgtaataatgtggatgcgggttctccagttgtaggtgttgaaacaggatattccacgccagataatgcactttattattatcaggattcgaaagagctaatttattactatggtgataatccaactgaaattgccagaaattatcttaatgactataactcgcgtacttatactgaaacactaacgaattttgaacgcactgtgacgaataaagttgtcaacagtaatggagatgtatcctttactgaacagaattataagtttacttatccttcctcattttatgaaatacctgagattacacacttgtatagcaacccggccgcatcttcatttcccgcaggtattcccatgtatgaaaatgtagcagggcttcccatgtattacagcgttgcttatttaacagcaggcaagcaatatcagtatcacaacacgccttgtaaaacgactaatcagtcaaatggtggatattcgacgatttgcgccgttcctgaaaaagaggattacaccgcaaaagatattgatgaaaagagtgagcttactatctggaccaataccaaatataaagccatgacggaagtactggaggccggaaatattgagtccatgattgattatctggagtatcttgatagtgttagtgtatcgccagcacttcttgccgacatgattaacgagctgtggtctgaagctgccgttaatgccgattataacggcttaccgtttaaagaggtttcaccggctgaagtaacttctgcgatgtcggaacttaggctatctccaacgttattagatatgctttcacctgtatctgacagtgcaggggctgacgtcaatattgatattaccattaataacaactcaggatctgacactggaaataatggcaatatagatttgggagaagatcccggtgtaaaacagcctgagcttgaagaaacgccaacggcaagagatattttaacgccaattattaacttgttgccttttacaaacgaatttaacatcggctctcgttcagcatcctgccccgttgttgaattcagcgtgtttaatcaccagtacagaattgactcccattgtccgttaattgagcagaacagaagcgccgtagaaaccatatttctgattatatggggatttgttgcgctccgtattattctgagtgcctaa

SEQ ID NO: 92989 - DNA, 234 bp, Enterobacter aerogenes; identical to SEQ ID NO: 10869

SEQ ID NO: 92990 - DNA, 252 bp, Enterobacter aerogenes; identical to SEQ ID NO: 16616

SEQ ID NO: 92991 - DNA, 1053 bp, Enterobacter aerogenes
atgatcgactggtttaccggaatcctgccttgcacacaccgaccgttaccggctggtagtgtcgtcagcgtcgatgctgacggtgcagtggagtgggaaacagtaaaacggttgaccgttcgcggttcgcatgagtccacaatgaaagtaaggtctgttggatctgatggtgaaggtcgggcaacacatctctacattgacggtaatccatcaaagtttttgcaaggtcactctgttatcggttccgacgatttgcaagggttggtgttaacagcttacgccagaatattggcattactgcatattcctcatgatctaccatcctatcggcaggtcatggaagggcaatttaagatctcgcgcatcgatatcaattacatgtattcattgtcaacattagaaaatgtccgcgcatggttatatgccgcagaatttaaagctaaaactcgccacggtcgcgcctgtggtaaaggtggcactgtttacttagggaaaaactcccgtcgttggagcctgaagttttattcaaaatatgatgagcatacatctggaaaaaaagggcaccagatggcagacgaattcgttaaagctggtttactggactggtcaaaagataaattacgcattgaattaacattaagaacaactgaattaattgatttgaatcttacgcttggtaatagctgggatattgagacgcccaataaattattttctgactatgtagggagaatagaaatgaatcaaaatactatattaactgatgaaaaaataattaatctcccaagaaaaatacagtctacatatttattgtggaagcagggcgcgaacatgaaagagatgttaccgaaacctacattctaccgacaccgtaaagaattactttctttcggaatagatattaacttttattgtgagtcaccggattctaataacgttgttccgttggttcgtactcttgaagccaaaccagccaaaattccatcatgggtttatgagaaaggtttaattttcgattataaccgtatttcacatgccagtaactggcattaa

SEQ ID NO: 92992 - DNA, 447 bp, Enterobacter aerogenes; identical to SEQ ID NO: 13744

SEQ ID NO: 92993 - DNA, 576 bp, Enterobacter aerogenes
atgagtatgcaaccgaatgaagaaatggacctcaggaaattttacgcagagggaacagctgactacttaaaaactaaaatcaaaaaaagcgaacgacttttaaaaataaaccaatatctatcatttgccctccctgtcctagttggaggatacgcatcggttgatcacagctccaaatattttgattttttagtttggggcacagggatattatcagtgatagtcttgctttctaatttatacacactggtcatgaagactgatgaaaatttatctcgatatctggaatcatactctttcaataaactcctaactgatttgtatggcgaactgtcgagcatgtttaaatcaaagacaggcaaccagcaacccgctaaccatctgttttcagtgataaaatcaaaagatgacttcaatgccaaggaagatgaaaaatatgttagcaataatgataagaaacggattatgttcgacattctggtaaagaaaaataaagaatgcgtacgttgcaataaaataccgactaaattcaacaagcggaaaggttgcacaaattgtggcaatctcgtgaaataa

SEQ ID NO: 92994 - DNA, 192 bp, Enterobacter aerogenes; identical to SEQ ID NO: 76488

SEQ ID NO: 92995 - DNA, 330 bp, Enterobacter aerogenes; identical to SEQ ID NO: 92578

SEQ ID NO: 92996 - DNA, 270 bp, Enterobacter aerogenes
atgcgcatgataaccagaaagaaacccgcctttacggagctttatcagacaggcgttctgacccgcatcgcggctgttaaaagccctgatggcggcggctggcggttatttggcttatggatgggaaaggatattgctgttttcgtagaggccgctcgtggaggcgtccgggaatggtccggcctggactatctcgctaacttctgcgcgagctgtggtattagtctttgggagatacacaacaaagttgatccaaagcaattgaagtga

SEQ ID NO: 92997 - DNA, 1389 bp, Enterobacter aerogenes; identical to SEQ ID NO: 92117

SEQ ID NO: 92998 - DNA, 471 bp, Enterobacter aerogenes
atgttgtcagacaaaaatcttgcacgccttcgcagtcgccatttaggtttcatatttcaatttttcaatttaataccggtgctgagtgtttttgataatgtttattatcccctgacgctcaacggtcattttagtacgaaagaggccagagagagaacgttacatttccttgagagtgttggtttatcccacttattggcaagaaaacctggccaattgtcaggtggtcaacagcaacgggtcgctattgcaagggcgctagcgcatagccccgaagttattgtcgctgacgaacctacaggtaatctggatcttgctaccggtgaatcaattcttgacctcctgcttgagattaatcaacggacgaaaacaacatttattatctcaacacattcgactcagcttaaagatcgtgctcgacggagagtagatatcaaagatggagcaataatttatgattcagcgaagtaa

SEQ ID NO: 92999 - DNA, 636 bp, Enterobacter aerogenes; identical to SEQ ID NO: 92609

SEQ ID NO: 93000 - DNA, 2400 bp, Enterobacter aerogenes
atgctgcataaaattcattgtcccgaattatctgaagaaattgttgcatcgctcgataatgccgcgctttgggcttacaaagttggtaaggaagcactagagcaggcagaactggccgccaatcgcgagtgtctggaagagatggggatgattgtgggcgtttcttctgcgggtacagaagcgtttctccctctcttcgagcagcgtattcaggacttttcattaagaaaggctctgttttcaggcagtttttcatcatgttgctccagcgcttcaacgctactgggcttgaagggcggagtggaactcgttgcgacggcttgcaccgcaagcccgaatgctgtcggtatggcttttgattatatccaaaatggcaaaagtaaggctatgttggcggtaggtacagaacccatctatttacccactttcgcgggtttttatgccttgaatgttatgcatccgcaatcatgctcgccattttcagggcattcaggtatgtctattggtgagggcgcgggggccattgtactcgaagagtatgaacatgcggtggcgcgtggcgcgaccatcttcggtgaaattctttcttacgcgacatcttgcgacgcatatcatgaaacaggtcccgacccacgcgccagtggcgcagtgcaggttatgcaaaaagcgatggcgaatgctggggtcaagcctgaacaaattgattatgtcaatgcgcatggcacgggtacggaagctaatgatcaaatcgaaactctggcaatgaagaaggttttctccggagcagaaaatttgttaataagttccacaaaatcttattttggccacaatattggggcggcaggaattgtcgaacttattgcgtgcctggtgactctgccagaaaaaaaagttctgccaacactcagtttttcgcaggctcgtcccaattgcgatctggactatgtaccgaacgagtttcgtaaaaaagatatcaatatctttatgaataacaattatgctttcggcggtaataactgctgcatgattgtcagcactaaaccttgttcagttccactcacctcctatgaagcaaaacgagttgctattactggagtaggcgctgtatcggctataggtcacactctaaatgagattcttcactatatccatgaaggcgacagctcagtagaactcagcggtgttgtctttcctgatgacacgcttaacgaggcgaaagagctgttgggtgtattggccaaaaccaatcagtttgcggatatatttggtggtgaatatcaggaagaggagtacaagcagccggagacagaagagaattttaaaacttatcaggtgaaaggcctggaaccacgcaaacatctacgtcgatacgacccgcgtaaggcaactcgcggcggtacgtttgctctacttgcactttcagaaactttgcatatggctaaacgcaagatcaaacgagatggagatgatttgggtatggttctgggaatggcgcgagggccgcaagaaacaacctataagtatttgcaaagtttgaaacctgacccgcggaaagttcggacttcggaatttcccggctctctaatgaactcaattacaacattttgcgggatctcagaaggggtcaaaggatatacaacaacgttggctaccggtgaaaatgctgcgcttggcgcattgacctatggctatgaaattgttcgccaacaactccaaccgcaggttgtaattggcggggctgatgaatactttccttctatgtcgctttatatggatgcggtgacaaataaaattcatatgatgtccgatccggctgattatcagatatatggcaaagaagcacagggctacgtaccaggtgaaggcgcatgcatgatgctcctggaagatccacagtcagcagtggcccgcggcgctgaggtattagctgaaatcgctggttatggtaaggcatgtagcaatacctattttgacgtgacacaggttgaggagaagtccgcagcaatgtctatggcaattactcgcgcgcttgcggatgcgggtattacctcgaaagaaattgatttagtttgcgggaccagtaatggtagcgaagtaaattcaatgatagaaacgaatgcgatatatacgtcatttaattgccttaatcctcatgtaccggttgtgaattacaatgcattctttggttttgtcgcctcttctgcaggtctgctaaacctggcggttcttcttgattgtattcgcagacaatcggttcctgctattccttatactcgacaattttctgatgagagagtcaactttgtgaaccaatcacttaatctaactattagatacgctcttttaattggagcgactgaaggcggaaactattacgctattgtgataaaaggattataa

SEQ ID NO: 93001 - DNA, 273 bp, Enterobacter aerogenes; identical to SEQ ID NO: 92299

SEQ ID NO: 93002 - DNA, 648 bp, Enterobacter aerogenes
atggtactgaacatcatggaccagggcgttcttgagccgatcatcgtctggaaagacccggagacaggtcgctcctgtgttgtcgatggtcgccagcgtgtgcgccacaccattgaggcgaacaagcgtttagcgaaagagggtaaaccgctgctgatggttccagcagtcactaagcgtggttctgccgttcgtatggcacaggcgatggtaagcgctaacgaaatccgccaggcagatacgccgctgggccgcgctaaaaaaatggctgatgcgctggaacgtggacacgacgagcaagacctctctctgatgtttggctgtagcgtccagaccgttcgcgcaacgctgtcacttctggacgccacccaggctgtaaaggatgccgttgaatccggaacagtcaccgtcacccaggctcgtcagctcgcatcactggaaccagaagcccagcgcgagaaggtgaaagagattgaaacggcaaccgcgggtacctctggtcatgaaaaagcccgtcggcagcgtcaggttctgggcgacgctaagccacgtctgaaaacccgtaaagaaattaccaaagccctggaatctgccgagggcgagtatgccagcgctctccgctgggtacttggggaggatgtagcatga

SEQ ID NO: 93003 - DNA, 3108 bp, Enterobacter aerogenes
atgcaacgatatgattcaggcgccgctcgcggccccgcttttcacgaagttctggcccgcgaggactggcaaaaccagactatcactcacctcaaccgcctgcccgcccatccctcttttgccagcttgcgcgatgccgatgcggcgcgcgacaaccgcccttccgaccgccgccgtcagctggacggcgaatggcaattttcctatgcccgtagtccgtttcaggtggatgccaactggctgcagcatgacctgcccgacagccgcccgacgccggtgccttcaaactggcaaatggagggctatgacgcgccgatttacagcaacgtccgctatccgattgataccgtgccgccgcgggtgcccgaagacaaccctaccggctgctattcgctacagttgaccgtcgatgaggcgtggcgggtcgaagggcaaacgcaaattatctttgacggcgttaactccgcgtttcatctgtggtgcaacggcgagtgggtcggctactcccaggatagccgtcttcccgccgcctttgatttaagcccgtttctgcaacaaggcgccaaccgcctgtgcgtgatggtgatgcgctggagcgcgggcagttggcttgaagatcaggatatgtggcgcatgagcggtatcttccgttcggtgtggttactgcataaaccgcaggtccgcctcagcgatgtgcaattaaccccgcagctcgatgctctatatcgcgacgcgcaattgcgggtcaagcttagcgtcgaggccgcgcctgaagcgctggcggcgctggaaattgacgtcgcgctgtgggatggcaaaacgcgccttgccagccagcgccagccgctgggtacgccgattatcgatgaacgcggcagctacggcgagcgggcaattgtcaatctcgatattgagcgcccgcaattgtggagcgccgagcagccgcattgttaccgcgcggtggtatcgctatggcgcggcgagacgttgcttgaagcggaaggctgggatattggttttcgccaggtagaaatccgcgacgggctactgttgctcaacggcaagccgctattgattcgcggcgtcaaccgccacgaacatcatcatcagcgcggccaggtggtcaacgaagaggatatggtgcaggacattctgctgatgaagcagaacaatttcaacgccgtgcgctgttcgcactaccccaacgccccgcgctggtacgagctatgcaaccgctacggcctgtacgtggtggacgaagccaatatcgaaactcacggcatggtaccgatgaatcggctgtctgacgatccggcctggcttgccgcttacagcgcgcgcgtcacccgtatggtgcagagcaaccgcaatcatccctcgatcattatctggtcgctgggtaatgagtccggctgcggcgacaaccatcaggccatgtaccagtggttgaagcataacgacccttcgcgtccggtacagtatgaaggcggcggcgccgacagcagcgccaccgatattatctgcccgatgtacgcccgcgtcgagcgcgaccagccgttcccggcggtacccaaatggtcgatcaagaagtggatcgggatgcccggcgaacaacgcccgctgatcctctgcgaatacgcccacgcgatgggcaatagcctgggcaatttcgccgattactggcaggctttccgcgactatcctcgcctgcagggcggttttatctgggattgggccgaccaggcaatcgagaaaacgttcccggatggtagcgtcggctgggcctatggcggcgatttcggcgataaacctaacgaccggcagttctgcatgaatggcctggtattccccgaccggcgcgcccatccttcgcttatcgaggccaaacatgcgcaacagtatttccagttcgctttgctggagcaaaatccgctgcggattgctatcaccagcgaatacctgttccgcgccaccgataacgaaacgctgcgctggcgcgtagagtgcggcggagaaacgatagccaacggcgacttagcgctggcgctgcagccgcaagaacgggcggaattgattcttagcgacagcctggccctgccgcgcggcgcccgcgatgtctggctgcagctcgaagtgatccagccgcaggcgacgtcatggtctgagcccggtcaccgcgtcgcctggcagcagctagcgcttgccgcgccgctggcgctatctgagacctccgctgaaggcccggcgccggtcctgacaatcgaacccacgttctatcaggtcagcgtcggatcccagcgctgggttatcgatcgtcagagcggacgtttaagcgaatggtatgccgcgggcaaacagcagttgcttaccccgatggcggatcagtttgtccgtgcgccgctggacaatgatattggcgtcagcgaagtcgaacgtatcgatccgaacgcctgggtcgagcgctggaagagcgccagtctgtattcgttgacgacccgctgcgtgaaatgcgaggcgcagcagctggcgcgggaggtgatcgttgatagccactggcactatctgcgcggcgaggagacggtcattgccagccactggcgcatgaccttcacggccgacggcgggctccagatcaccgttgatggcgaacgttccgcaacgttaccgccgctggcgcgcgtcgggctgcgcttccaggtcgccgatcaacatgccgaagtcagctggttgggattagggccgcacgaaaactatccggatcgcaaaagcagcgcctgtttttcgcgctggcaacagccgctgcgcgagatgagcacgccctatatcttccccagcgaaaacggtctgcgctgcgattgcaaagcgctgaactggggatgctggcacgtcgcaggccagttccacttctcggtgcagccgtacagtacggaacagctgatgacgaccgatcactggcatcgtatgacgccggaaaaaggcgtctggatcacgctcgacggccagcatatgggcgttggcggcgatgattcctggacaccaagcgttctgtcacggtggctgctgctcgaggcccaatggcactatcaggttacgcttcattgtcaataa

SEQ ID NO: 93004 - DNA, 1269 bp, Enterobacter aerogenes
atgagagcaggcataattgccgatgattttaccggcgcgacggatatcgccagttttctggccaataacggaatagcgaccagcctgtttagcggcgtcccaggagaagattacctgggtgatgctcgcgcattagtcgtgagtctgaaatcacgttctgttccagccaaagaatctgtgacactgtcactgaatgcgctgcgctggttgcaacaacaagggtgcgatcgtttttattttaagtactgctccaccttcgatagcacgatcgaggggaatatcggtccggtcaccgatgccttaatggatgcgctgggcgtcgcaaccacggtgatctctccggccttgcccattaacggtcgtacggtgtatcagggacatttattcgttgaagatcgcctgctccaggaatccggtatgcgcaatcatccggtcaatcccatggatgacagcgatctgcgacgtttaatggaacgtcagtcacgcggaacatgcgcccttatcaatgctcagatgctggagtccggcgaggcggccgtgcgcgacggcatccaaaccctatccgccgcgggctatcgctatatcgcactggacgcattaaacgataaacatctgcaaattcagggacaagcgctgcacgatatgaagctggttaccgggggatccggcttagccgccggtctcgcgcgctgctgggccaacgccacggcgccttcccttccctttagcgtcaccacgccagcggccagcacggtagtattatccggctcctgttctatgagaactcaggcgcaggtggaaaaataccgccaactggcgccatcgctggccgtggacgtggcaggtttgctggataaacgttggacgcttgatgagtactgcgtccagatcgttgaatggctgaaaaagcagtccaacgcggacatggcgcctatgatttatgccaccacttcggtcgccgaactgcacaatatccagcagcgctatggcgccgagccaagccggttgatggttgaggcgctgttttctctgttggcaaaacaacttgtgcagcaaggcgtgagccggttcatcgtcgctggtggagaaacctccggcgcggtaacgcaagcgctggagcttcgccatttcgctattggcgcagcggtctcacccggcgtgccgtggattaaggcagattcccgaccgcttttcctgctgctcaaatcgggtaattttggcgatgacaatttctttgctcgcgcgcagtccgcggaggtttgcgcatga

SEQ ID NO: 93005 - DNA, 573 bp, Enterobacter aerogenes
atgaatccctgttacaggactttgctgaccggtgtcgttctgctgtttaccggctctcccgtcgcatttgcaggcactatcgaagccatcaaccataccaaatgggcgattaatcatttcagcgttaacggacagtccggtctggatgctataggcccctttcaggggggaggcggtggatgctgttaccgcgcgccgccgtcatggaaacccggcatgactgtcaggatagactgggaaacaggtctgggcagcactcttgatatgacagaacccaaacccatcccacccaataccacagggatgtctcaaaaagacagaaatcgtgcatgggatgagtacggtgataaaaccagcgaatggttcgcaaaaatcaggcgaatgaaaatacagcattcacgcatcgtgccactcccgccctatacctccacagacaaaacctgcggcatcaccgtgcatttccagtcctgtgaccaggtaaaagtcacaacaagctgcgccgattacggcagtccggcttatccgattaaagaccccattcagatgaaggagcccgccgtatgtccgaagtga

SEQ ID NO: 93006 - DNA, 960 bp, Enterobacter aerogenes
atgagcctgcaaacgttagatctgaccagcgagctgttacagggcatgcggctgtcgggagtgaaataccgacggattgaaacctctcgtccttttggcgtggagtttaattcggttcctggcaaagcgcagtttcatttcgtcagccgcggcccgctgctgctacaaatgagcaacggcaaacagttctcgctcgagagcggtgatgcggtgtttattcccaatagcgatgcgcatgctctgctctcagatagcaaagccgcgcgggttaacgtgatggaactcgacagcaaaccggtctgcgggacggtttcctgcgtcaaaaacgcgggctgcgttaataccgaagaaaatgcggttatcttcagcgcctgtatggattttgaattaggcggaatgcagccgctggttcgggccatgccggaggtgatgctggtcagtagcctgttaaacgcccgcccggaaatccagccgctgctggcggcaatggagcgtgaatccctgacgcgtcaggtgggctatgccggcattctggcacgtctcgccgacgtcgtcgcggcgctgatcgtccgcgcctgggtggaatgcggctgcggtaacgccaccggctgggtacaggtactgcgcgacccgaagctatcgcgcgcgatatacgctatgcatcagcagcccggcgtcaactggaaggtagaagacttagcccgcgaatccggcctgtcgcgttcggtattcgccgaacgttttctcaccgccaccggtaccacgccggcccgctacctgacggaattacgcatgcgcctggcggtgcagtacatcagccatgaaggcgaagcgctggaaaaagtcgccttccgcctcggctacaactcgctcgccgcgtttagccgcgcttttaaacgcattaccggcaaagcgccgggagcgctacgcaatggggtcaatgaacaagcggtaacctga

SEQ ID NO: 93007 - DNA, 390 bp, Enterobacter aerogenes
atgataaaaaccgacgcctggctgtggaaaaagcacgcctccccgcttctgctcgaacgccatgagaaaacgttagtcacacccgctgacgatcaggtgctgatcgagaaccgcgccattggccttaatccggtcgactggaagctgatggccggtctctccgacgcctggcaggaggatcagatccccggcgtcgacggtatgggggtgattaccgccgttggccgcaatgcccgccaccttcgtcccggcacgcgtgtgatgtatcacaccgacctgcgttttgacggtagctttgcccgccatacgttagtcagcgcccaggcggtgattgcggttcccgaccacatcagcgacctcaccgctgcggcgctgccggcagtttcttaa

SEQ ID NO: 93008 - DNA, 954 bp, Enterobacter aerogenes
atgaccttccctgcacattcttcaaatctgcccgactatgggtttgctcgtagcctgggactagcctctggtagtgattttgattttaccgcgctggccgcacaactggactgctcccgtgatttctctcaagccgggataatctattccgacggaatgaatcgctggcttgtgcgcccttcacgtagaatcgccacaccaaaccaaagtagcgttagccatgttatcgtgacaaaaattgcatcctcgacgccgcacaatgccgcaaaagccacgatcaaaacgctacaagcaccgtcactggctaatgaaattacctccacggctatagcctgcggcgctgccgtggtcactgtctttttagcgcttggagctggcgcggccatccccctcaccgccggagcctcaggcgtggtggcagcaatgctcactgcaggtggtgtggctaccggtttacagtgttttatcggtagcggtcgtctgttagctatcggtatcggccatgaggaggatattgcctggcttgacagccaggactggtataccgcaacctcaacagccctggatatcgtttctttagctggcgctggtgcgggtttaaaaagtaccattgcaacatataaattaatgaaagccagttcctcctccggggcgataaactggctcaaaagtctgagccgggccgagcgtaagcgtattacagaagaaatcatccgcgcccaaaatccaggaatttctaacggtggaattaaggcggccatgcaggcgcagctttaccctaagcgtttcccgtctgaggcaatacagcgttctttgcagcgcgaattaacgaatgcggttattaatacctcagccttcgcggggagcgcgctcaccggaacaatacgccacccgcaaaatatgacgcaatccggtaagtacgtcatcggcgttatacagtcgttctcattttag

SEQ ID NO: 93009 - DNA, 1137 bp, Enterobacter aerogenes
atgtctgttcattcttataaaactcctcttgtaaaaaattctctgcgctcattgacctttgtcggagtgttgctaatagcatccaacttaagagctcctattaccgcacttgggccagtaattcacgaaatctccgcttcattttccctgtcaaactctgcatcgggtttacttaacgctttgcctttgcttatttttggacttgcttcacctttcgctcctaggctcacccgaaaagttggtcttgagaaagcacttttgaccgcgctcattcttattacggtgggatgtattgtccgttctctgatggggttgcccgggttatggctgggcacttttatcataggattaggtatcgcaattgcaaacgttttggtagttcccctggttaaaagggatttcccttcccataccgcacgttgtgttgggctctatgccgcgacgatggcgctgacagctgcattttccagtggaattgcagctccgctttccgtaatcagtactgccggatggagattatctaccggagtttgggtgataactgccgtgctgggtcttattgtgtggctaagggtttgtgttgggggagctcatgagtctgactctaccgcgaaaacgcgtgttcagggtaaccgttctgtctggaaaagttcgattgcgtggcaggtatcgatgtttatggcattgcatacgatggttttctacacagttattgactggtatccatcaatggcaggggaacatggcgtcagtgctacaacggcaggttatcacttgttcttgtaccaggcggttgccgttatagcaaacctaacgaccgctgcgttcatatcacgaatgaaagaccagagtattctggggcttctgtgttcactctttattactgttggtatcgctggcatcctgattatgccaggattagctgcaatatggttagtgttcgcaggcgttggtgcaggaatgtctatggtaacctgccttactctctttggtcttcgtacacgtgaacatagtcaggcaggtcaattatccggtaaggctcaatgtgttggttatcttataggtgctcttggcccatatctggcagggattattcgtgggtattctatgagctgggattccacgcttgtctgttga

SEQ ID NO: 93010 - DNA, 165 bp, Enterobacter aerogenes
atgatagatatgttctcaggcaaagcttcttttaataaaatggtagttaatacaagattgcctgagttattgagccgcatggattcgccttactacgctaacgtcagggatttcggtgaaaagattattccgactaacatagatactatggtagcggtaatgtag

SEQ ID NO: 93011 - DNA, 570 bp, Enterobacter aerogenes
atgcaagccaatgattatgccgatgagttcatggctgattacaaccgacgctttgcgaaagcgccccggcatgactttgatgtgcatcgtccacttgaaactgacgatgatctggccacatttttcacatggcgggaaccacgccgtgtttcaaaatccctgacagtgcagtatgacaaagtgctttatctgattgaagataatgagttaagccgcacggctattggcaagtacattgaagtctggcattacccggatggccgtaaggaactccggctaaacggggttgtccttccctactctacctatgatcgccttcaggaaatcgaccagggggctatcgtggacaacaagcgcctcgagcgtacacttgaatttatcaaactggttcaggataaacgcgacaacaatcggtcacaggctctccctgccggagatggcccgtcgcggagacggagaaaaccaacggagaagaaatcccagcgctcgcttaacggtgacgatatgctggaagcactaaagacactgcaatcacgttctgaggagatttttggcacaaaggaaaaatga

SEQ ID NO: 93012 - DNA, 849 bp, Enterobacter aerogenes
atgacggcacacgcagcggagtttttcactttggatgaagttaaccgactcaaaatcattcaggacgttgtcgaccggcgtctgaccacacagatggccgcgcagcgcctggggatatctgaccgccagtgccgacgccttctgttgcgttaccgtgaatctggcccgcttggtatgactaaccgccgtcgtggaaaacccagcaataaccagctgcctgatggccttgcacagtacgcgctcaatattatacgagaacgctataccgacttcgggccgacgctggcgtgtgagaaactcgcagaactgcacgatgttcacctgtccaaagagactgtccgttcactcatggtcaaagccggtctctggatcccccgcaaacaacgtgcgccgaaaatacagcagccacggtatcgacgggcctgctgcggcgaactgatccagattgatggttgcgaccatcactggttcgagaaccgtgcgcccgcctgtaccgcactggtctacgtcgacgatgcgacgagtcgcctgatgcagcttcgtttcgtgaaatcagaatcgaccttcacctattttgaaaccaccaggggctatctggaaatgcatggcaaaccattggcattgtatagcgacaaagccagcgtcttcagaatcaacaataaaaatgccaccggcggcgatggttatacccagtttggccgtgcgatgcacgaactgaacatccagactatctgcgccaataccagttccgccaaaggtcgcgttgaacgtgcccatctgacgcttcaggatcgcctcgtaaaggagctcaggctcaggggcatttcttcagtggatgcaagccaatga

SEQ ID NO: 93013 - DNA, 3108 bp, Enterobacter aerogenes
atgctggcccgtttttttgtctttcgcccggtttttgccgcggtcatcgccatctgcatcatggcaaccggcgctctcgccatgatgactttgccggtggaacagtatccggatatcgccccgcctgctattaatgtctcggctaactatactggcgcttcagcagaaaccgtcgaggatagtgttactcaggtgctggagcagcagattaaaggtatcgatgggttgatctacttttcctcaagcagcagttcagctggccaggcccgcattagccttagtttcgatcaggacgttaaccctgatatggcgcaggtacaggtacaaaacgcggtaaatcaatcaattacacgattaccacaagaggtgcagcagcaaggaattaccgttaccaaatctcagggggacagcttgatggtggtagccttgtatgacccaagcaggcaattaaccagtcttgatattagcgatttcctcatcagctctttacaagaaccgttgagccgcgtcgaaggcgtgggtgaaaccactgtttttggcgcgcagtatgccatgcgcatctggctcaatccgctcaaactgaccagctatggattgatgccctcggacatacaggccgcgatcgaggcgcagaattcgcaagtgaccagcggtgaaattggttctctgccgacgattgagggacaatatttgaacgccatggtgacgacgcagtcccgccttggtcatccggagcagtttgagaatattattctacgcacccatcgcgatggctcagtagtgtacttgcgcgacgtggcccgcgtggaaatcggcgcggaaaactatcaaaaccaaacgacgctcaatggttacccttccgctgggatctcaattcagttggcctcgggagccaacgcgctggaaacggcggagaaagttaggactgaagtcgaacgcctttctccccgctttccacaaggcgtaatcgccgcctatccacgcgacagcactccgtttgtgacggtatcgatcgaaagcgtggtgcatacgctgattgaagcgatactctttgtcgtggccgttatgtatctttttcttcaaagctggcgtgcaacgcttatcccgaccctgacggtaccggtggttctgttgggcactttcggcattctcagcctgcttggctacagcatcaatacactgaccctttttgccatggtgctggcaatcgggctgctggtagatgacgctatcgtggtggtggaaaatgttgaacgtttgatggcagaggaaaacctcactccgcaggaggccacgctgcgctcgatgaatgagataaccggggcgctgataggtattgctctggttctctccaccgtttttatcccgatggcgttctttggtggctctgtggggattatctatcgtcagttcaccgtgaccattgtttcagcaatggcgctgtctgcattggtcgctctgacgctgacgccaacgctgtgcgcccacctgctcaagcctggacacataaataaaggtcgtttttttaccctcttcaatcgcggagtagcgataagtcagaacagctacctggccacacttcgtcgaatgaccgcccatccactccgttttgtttgtctggccctgatactaacttttttgatgctctggcaatatcaaaagctcgcaagcggatttttgcccgaggaggatcagggcgcggttatggttcagtactcgctgccgtctggttcgccgatgtcgatgaccgaggccgttggcgcggatattacccactattttatgactgaggagaaagataacctcgacgttatttttatggtcacaggaagaaataatgccggtagcgggcagaacgtcggtatggcattcgctgagttaaaacactgggaccagcgtcccgggaaagaaaacagcgctcaggccattattctacgcgcgaaccagtattttaataaaaatgccaggcaggccaacataagcgtgatgtcacccccgaccattcgcggtctcggacaatccagcggttttgaattatggctgcaggacagcgccgaaaatggcagtgcggcacttttgcaggcacaaaccaccctgctcaatgccgccagagaaaatcctgctcttaacgcggtaaggattaatagtctggaggaaaaggcgcagctgcaagtcgatgtcgaccgacaaaaagcgcaggttcaggggctggatcaggccgatatcaacaatacgctttcagcggcctgggggggcatatatgttaacgactttgtcgatcgagggcgggttaaacgcgtgtatatccagggagacgcgccctggcgttcaacaccggaaaatttatccgcctggtttgtccgtggcaacagcgacaacatggcgtccttcgacagcttctcgacgcttcgctggaccagcggaccgcagatgcttcagcgtttcaatgggctgtcggccgtgcagtttcaaggaggtgctgcgtctggcgtcagctccggcgtggcaatggctgaaatgtccgaaatggtcagctcgctgaacggatttgacctgcaatggagcggtttgtcctggcaggagcgctcatcttcggtgcaaacgctgtgggtctatctggcatcgctagcctttatgtttctgtgcctcgctgccctatatgaaagctggtcgatccccattgccgtgatgttgattatcccgttgggcatcattggcgcgatcagcgcttcgttgctcgccggttatgaaaatgatatttatttccaagtgggaatgttaacaacaatgggcctttcggccaaaaatgcgatcctgatcgtcgaattcgggctatcgcagtttcagcaaggaaaaagcctgacggaagccgcactggaaggcgcacggctgcgcttgcgtccgattattatgacctcactcgcatttgttgtcggcgtgatccctctggtactctctgcaggtgccggcgctgccagccaacaagaaattgggacggcggtgattggcggcatgctttcagggacgctactgacgttgcttttcgttccactatttttcctgctagtgcagcaaggaatcatgcgactgaaaagtcgcaaacagtaa

SEQ ID NO: 93014 - DNA, 333 bp, Enterobacter aerogenes
atgaatccgagcgtcattcagtggaatgaagacaatttctcgcaagttgaacgttatcacggcgtggctgttgtgcgttttcatgcgccgtggtgcggcccttgtcaaagcagcgaaagtctttttctccaggcggccgaccggctaccgtctgatgttttagtcggtacagtaaatgttgttcaggctccggtgctggcggcgaaatatagcgtctgggggttacccaatacgcttgttttccgcgatggtcaggtggtggagcgtctcagcggcccacaaacattcagcactattttggcagcgataattcgcgcccaggccctcatctga

SEQ ID NO: 93015 - DNA, 372 bp, Enterobacter aerogenes
atggaaatcgtctctaccataatgctaaccatggcatgggccattccgctggtagtattgctctttgtggcctgggttgcgatgcagaatatacgctctgcgcgacaagataaaaaaacgaaaatgaatggtgtcaatgttaaggccaccatcctgcagatcaaatacgatcgcgaccagcgaattaataatcactactcagccattttgacccttcgttatcattggcatgagcaagaactgcagggcatccgcggcgttatattccccgcgcaagaccaatctgaggttcaggtgaatcaattaatcaatattcgcgttcaccaggacgacccacaacatttctactacctcgattatcgtaatgtctga

SEQ ID NO: 93016 - DNA, 423 bp, Enterobacter aerogenes
atggacgcttatgcgttaactaaaatgtctattgttagttatcacctcatcatttcttcagttttgtttgttgcagtatttgtaacgttgattatctatcatggttattataaaaaacacgatcaggagttagctggcgctttcgaattattacggcggaacggttttcttgattaccaggattattatttatatgaaaagctggggttacccggtttcggttttcgagcatcattaatggccgcaattcttaaggagaaaaagataaaaagaaaagggggcggttggcttaagcctggggcgagtcagctagtcagagaatactatgacatttcctggctacagaattttcagcgcctgacttggttaatgttatttttatttgcggtgatgttcgtcctggccttgctgggcgataattag

SEQ ID NO: 93017 - DNA, 279 bp, Enterobacter aerogenes
atgtgcctattactcgcgaaagcgggagtgcttagtgctcaggattatgagttttggcagcggttaggattctgggggtttagttttcgcgtggcaatggtttcacgaattcataatggcaagccagttaaattgagtaatgccaaaatattggatgccagggaaggtcagcgttgcatcgcaaacttcgaactcgactggattcgtaattattataaatgcgttactataatggctattgagttcttagtgcttctggtatggacgcttatgcgttaa

SEQ ID NO: 93018 - DNA, 990 bp, Enterobacter aerogenes
atgaagggacaatcaaacttattaccaggttactgtattgtacagcagccgggaacattggattttcaagctcgcttattattcaataatatcaattgtgaatccgcccgttactttatgcagcttaatcgcgataccccctgggtcaaaccaggccagatattaattattgccgacccaaacaacttaaatcaagcattccagatgaattcactttttgtcgccaagaaaaaagtaaacacagcattatcgacagttgataattcagtggctgaaatgctcaataaaaattatgataaaatatctaccattacttcgtggggggatgcgatagttggcaatgcgagcgattcaggcgaaaaatatttcaggcaaatcgagagtattctgaaaaaaattgaagcaacgtatcaaaatcaattcaggacacaaggtgctttgattggacaacaattctatgctgaacgaaattcgttatttactcagctaaaaccactgcttaataaggttgtaagaaagtcccttaaattcaatgactataacgatatgaaaagggtacttggattgtctactcaatctatcgttcatgaatggagcacagttggcattggggcaatacccggttacgcaacttatgtgaacagtgcagccaaagctgccgcttttatgaagatggggggctgggtggcatttggtctatcattcatgaacaccagcaatgacgtctatcacgcttgcaccgcaggccgagaaagcgaatgtggtcaggtagcaatcaaaaaatatagtgagtttgctgggggaataggtggcggtatggctggagcatcatttgcagcacctatttgtatagcggctggtgttcccacttatggtgtaggaactattgtatgtggattagtagttacggcagcaggttcttgggctggtagtatcgttggcgacgaaattggcaatacattaaatagattaatttatcgtggggattga

SEQ ID NO: 93019 - DNA, 3612 bp, Enterobacter aerogenes
atgctgacacttctgctttccatactgaccaaccggctgctgtggggttttctcggcgctacggcggtggcggccgtcatctggatgattggcccgctattgtcgattgtcgatacccggccgctggaatcggaacaaaaccgcgttatatctattgcgctggtctacctcatctgggcgcaaagccacattctgccgcgcctgtacaacgcctggctcaaccgcaagctgatggataacctgaaggaagaaacaccgaagggcaacgatccgcagcagcgcctcaatagcgaagaccagatcctcgccgatcgctttgatgaagccgcgcaaatgttgaaaaaagcgcacttcagtaaaaccggtaatggtcagtggacccagcgctttagcacccactatctgtatcagctgccgtggtatgtgattattggcgcatctggctccggtaaaaccaccgctttagccaactccgggctgcagtttccgctagccgaccgcttcggtaaaacggcgttacgcggcatcggcggcacgcgcaactgtgactggtggtttaccaacgaagccgtgctgctggacaccgccgggcgctataccacccaggagagcgagcaggcgcaggacgccagcgagtggctgaagtttatggggttattgcggaaataccgccgccgccagccgattaacggcgttatcgtcacggtaagtatctccgatctgttaacgcaatcgacggaggcctcgcggcagcaggcggttaatctgcgccagcgtctctctgaactacatgaacaattgggtattcgtttcccggtatacgtactggtgacgaaggccgatctgcttaaaggcttccgcgcctggtttgccggttacgacaaggcgcagcgcgatcaaatctggggcttcactttcccgtgggagcaggcaagccttgccgacttcgatctgatgggccgttttacccaggagtttgcgctgctgcaacaacggcttgaagccggcctgccggatacgatgctgcaagagcatgatgccaaaacccgcgccgaagcctggctgttcccgcaagagtttgcggcgttgcgaccgctgttagcggactatcttagtaccgtttttgcccgctctaactttgaaaccgagttttcaccgcgcggcatttatttcgccagcggcacccaggaagggttaccgttcgaccgcgtgatgggcgaactcaatcgcgcgctgtctttgccgcagggaaatgaaaacgacaactgggactcggtcagtaaagaagcgccgatccccggcgccaagggccagagttatttcattaaaaacctgctgcaaaacgtgattttccaggaagccggcatcgccgggcagaaccgctggtgggaactgcgtaaccgcgcagcgatctggtcaggctatgcggcgctcgcggcgctgttaatcatttcatgcgtactgtggctgaccagctacggcaaaaacaaggcctacctgcaagaagtctcggcgaaggtgccgcaggttgagcagcagagcaaagcgctgcaaaaccccgagcagcgcgatctgttcgccatgctgccgctactcaacggcctgctggaattgccgaagagcgccgattttgacgtcaacgacccgccggtcagccgccggatggggctctaccgcggaaatgatgtcagcgacgcctcgcagacgctgtatcaaaaagcgctgcagcaaatgctgctaccggatgtcgccatgcgtatcactacctggttacgcaacgacaacggcagtgacgccgaatatagctacgaggcgttgaaagcctatcaaatgctctatcagcccaagcagtatgacggcaagtttttactctcctgggtgatgcttaacctgcagcgtaacctgccgcaaaacgtgacgcaggcgcagctacgacagctggaagggcatctggtccagctactggaaccgcaaatccagtcctcgccgtatgccaaagacgatgcgctgatcgcccgcgaacgggcgttgattaaccagcaaccgctctcctcaagagtgtatggtcggctgaaacgtctgcttgagcatgacgacaatctgaaagcggtctcgctggcgacgcttggcgggccgcagagcgaactggtgttctcgcgtaaaagcggtacaccgatcgcagaaggcgtgcccgggctgtacacgccagatggctactggcaggtgttcaataaacagatcgataacgtaaccagcgcgctgcatgaagatgatatctgggtgctgggcgccgccagcgcgtcggaagataagcagcaaaccgataacgccgtccgccagctctatatgcgtgattttatcgccaactgggatcgcttcctcgccgatattcagctcaacaatagcgccgatctgtcatcgcggatcaacaccgcgcgcctgctttccgccagtaactcgccgctgcgccggctggttatcagcctgagccaggtgctgaacctggcgcgcgctgagccggatacggttaaaagcgaaagttcagccgagcagggcaaccgtgcgacccgaacgctggaagcgctttttcgccatgatgagggcggcgcaacccagggcgcggcgcttagccagacgccggaacagctggtaaccgaacactacgcgccgctgatcgagctggcgcagccgttggaaaagggcggcaaaacgattgtgtttgacgacttcctcaaacagatcgacgaactttatcgctatctgaccgcggtacaggatgccgccaacagcggtatgcaaccgccgggcggcgatgcgattagccgtctgcaggccagcgccgggcgcttaccgggcggcctgcaaaccatgttcagcaaaatggcggtcggcgccagcagtgatacccagcgccgcgatctcgataacgtacgtaaacggattaacgtggaagtcggcggattctgccgccaggctatcgccgggcgctatccgctggttcgcagcgccagaagcgaagtcacgccggacgatctggcgcgtatgttcgcgccgggtaccggcatgatggataccttcttccgtgacaacctgaccaataaagtcgataccacgcaatcaagctggcgttttatgcccggcatcgatggcaaaacgttgccgggtagtgaagggttattaaggcctttccagcaggcgcaatcgatccgcgacgcgttctttgccaatggcgcgaccacgccgtcatttaaagtgacggtgcgcaccatcagcatggacaaccggatcctcaacctgacgctggatgttgatggccagcagttgcgctacagccacggtccgcaggcggtgcaaatgatgagttggccagggccgggcggcaccaatcaggtgcgtatgcaactcggtctggccgatggtaccacctcgacgctggtgaccagcggctcatgggcgctgaaccgcttttttgataaagcgcgcaccgcgcccggcagcagcagtttgagccgtcaggcaacgtttaacgtcgatggttatcaggtcacgctggagtttgcgccgaacagtattcgcaatccgttccagcttccccgtttctcatgtccataa

SEQ ID NO: 93020 - DNA, 162 bp, Enterobacter aerogenes
atgaactggcagaaatgtatcagtatgttagaacgtgagatgcctttcttaaccggagaaaggcatcagcatgcggggttcgccagtaacggttattttctggcctcaaaggcaatttttacggccattccggcaagtaccgtcgccatcagccaacgttga

SEQ ID NO: 93021 - DNA, 1122 bp, Enterobacter aerogenes
atgagcaagagagtttatttggtttcatgttccggaagaccaaattatggcgatgaattaatcaccgccacctggctatctttcctttataaaaattatccacagtatgaagtctggttagatacccctgaaccaggtaacgtgcaatcgttgtttatgaagtatcatcccaacttcaaagccattaataccttgtggaaaatctgctggcgttccgtagatattctaaatgatataaataataaaactgccagtcttattaaggattatggttctcctgatattgacctgaatatcgatattttacgctctgctgatattgtacatattctcggcggtggctatatcaatgccaactggaaagaaaactatgccatcctgttcgcttgccaggcgctaaaacaggtctcgcaagctaaaacgattgccaccggcatcagcatttacccgcacgaagagttccttgccgctgaaatttttaacgatgcgataacctcatttgattatttttccgttcgcgatcccgcaacggccagtcgatttgcggttgaaaatactcaggacgatgtgttcctgggttatgacctggatgtggtatccaaaaacaatagccccgatctgccggatattttatgctgtattcagaatgaactttctgaagacgatatatttcaaaagcttgtttccctggttgccgattaccttcagcaacagcatcaatgcggcaagaaaataggttatatagaagctattccaggcgccgacaacacggcatttgtcgaactgcagaaggccatccctgatattcagttttatcctttctcgcatgtctggcatggaggtatcccggttcaggctgatggtgagattattagtacccgttttcatcaccatctggtaggcgcttgccttggaattaaaggcaccgcacttaatattgatagtgaatattataagaacaagcacgaatcgttgagcctgctgggtaccggctggaatgtgcaatcggcagacacccttgccggtaatttacactcaacaatcaatgacgattttcatgcgcaactcagtaatatcgcctctgccaagtttaacaaggcattggcgctgtatcaggaataa

SEQ ID NO: 93022 - DNA, 519 bp, Enterobacter aerogenes
atgttaaagcgtcaggtagtaaaagcagcgttggctatggtgctatcgctaacaatggccgcggcaccggcgcttgctaatcccggaaacggtaatggcaacggtggtcatggtaatagcggcaaccatggcaatagtggtaataacggcaaccatggagacaaaggcaacaatggccatagcgtcagccaaagcgataacggcgctggcaagggacagcgtaagaactacggcaaaccggatcacgtcaacagtgatatcagctataccaccgctcgcgcgctagcggtgaactatggcttaaccggctatcaggcgctgcctccggggattgcgaaaaatctcgcgcgtggaaaaccattacctccgggtattgccaaaaaagcggtgcctgcctcgatgctcaaccaattaccttattatcccggctatgagtggcgggtcgtcggtgacgatctggttctgattgcgctcagtaccgctgtggtcaccgcgattattaatagcgtatttgattaa

SEQ ID NO: 93023 - DNA, 729 bp, Enterobacter aerogenes
gtggaaaatgtgactttcaaagaaaacaaaaacacacagacaatgatccgcgtcgtattaatcctgataggtcttactgctatcttcgcgggtctctctctctttagtggcgatatgtggcgcatcatacccgatgccgacccggaaaaaaccgcaaccggtactctcgttggtcttattatatattcacctagtaaattcttttttgcgttgctttatatttttatcgcccctctaatatggcttttgcttgttcgaaaaatcaattttcaccttctgcaccaccctatcatccctgcaattttgtttctctgcgcaggcatctttgtttttctgcatccagaagtgacaccgggcgaagacttgagcattcagtacagtcgccacaatagttatcatacttctatattctggcgagaaagaatagcccgtatttatcttaataacacaattaaatacgaaacatttgtcgagactaaagactccagttgggattttagtaaatataatattaaaagcgcctggcgctgcaaagtccaacaatattcaagtttttcaactctgggcttcaatgaaagctggtacccggacgatgatccgcaggtaatggccgcgaactgtagacaaattacggatattgaaggactctctaaagaaacactctacagtgcccagcggatcgccactcaaaatcccccgtcagcgtcgcaaaaaaagaacgatgagtaa

SEQ ID NO: 93024 - DNA, 1716 bp, Enterobacter aerogenes
atgagcacatttttaagcgcacaatctctccacgttgatacggcctttggcccacttttcaacgacctctcctttaccctgaaaaaaggcgatcgcattggcctgattggctataacggttgcggcaaaagcacgctattgcaggtgctcgacggcactctcacgccgaattctggcagcgtatcgcgggctaatcactgcctgctggcgcgagtagaacaacatcttcctgatgccctactcagccaaccgttattacaggtggtactggaaaaactggcgcctggcgaacgggattcgctgcgctggcaagcggagcggctgctcgctgaaatgggttttaccgttcaacagacccaacagcaagccgccaccctgagcggcggacagcatacccgtctgttgcttgcccgcgccttgatccaacaacccgatttgctgttgctggatgagccaggcaaccatctcgatctgccgaccctgctgtggctggaaagctttttacaaacctggcaggggagcttcgtggtggtgtcgcacgataacctcttactggatgctgtaactaataccagttggattttacgcgataaaacgctgcacgctttctcactcccctgcagcgccgcccgtcgggcgctggaagagcaagatgcaagcgatgctctgcgccacaaagcggaacaaaaagagatcgaccgcgtcgctgccagcgccaaacggctggccatctggggccgggtttacgataacgaagatctggcgcgtaaagccaagcagatggaaaggcaggtttcacgcctgaaggatagccagacggaactcaccgccggcacgccgtggcgtcttgaggtgcatggcgacgccgttcgcgccgatcgcctgctggagatggaaaatctccccgttccgccggcgccgggtcttcccgccctgttcaccaccggtgtggcgcggctgcaaagcggcgaccgggtagcgataatgggtcgcaacggcggcgggaaatcgtcgctgctgcgcctgttatggtggcaaatgcagcaaccggctagcgaagccggcctgcgtttacatccgcggctccatgcgggttattacgatcaaaccctgcatcaactggcggatgagtccagcctgctggaggcgctggagccctttgagccttcaccggaaacgcgcaagcgggcgctgatttccgccggcttcggctgggcgcgacacgggcagaaggtcagcactctcagcggcggcgaacgttcgcgactgctgtttgtcggcctgtcgctggcgagctatagccttctgctgctcgatgaacccaccaaccatctggatatggagggtaaagaggcgctggcggcgacgttgcgggaatatcccggcggcctgctgctggtgagccacgatcgacagctcatcagccagagctgtaaccgcttctggttaattgatgaagacgggttaagcgagtggcacgacgtcgacgaggtgtacacccgtctgcgcggcaacgagcgccttcatagcccggcgacccaaacgccgccgcaggcgacgaccgtcgacgacctgcaagaggatctgctggaacgtctggtgatgctggagcagttattggcggacgatctgcagcgtaagccgaagcatcagaaaccgcagctacaggcgcagtggcgtcaggagattgaggaaattaatatacagttgagttaa

SEQ ID NO: 93025 - DNA, 261 bp, Enterobacter aerogenes
atgaatagcaatgcgatgaataaaaaacagcgaaacgagtctgatgcggcgattaaacagaccttcgatcggcaaaccattagtgatgcggaaagactacagcaacaccaggaattcataaatgccatgaatgaatttaccgcgcgcgccggtttactgtcggaagacccattcttcgaagggattaagttatcatgcaatttgatgtttatcgtaatccatcaccgaggacaaatgaactccaaccttatcttatggtga

SEQ ID NO: 93026 - DNA, 831 bp, Enterobacter aerogenes
atgatgacgttgactattgattcttatttcagcaatccactcgctaaactggctatttacgccagcgatccagaggataataaccgcgaacatggtcatgaattcgcagagttagtgatagttgaacaagggcatggcctccacgttattaatggccggcctttgtatattcaacaaggggatgttttttatgtttctcctggcgatacgcattattatgatgagcttgggacgctgaagttaattaatctattaattaatccgcaggttgattttatctatttacgcgaacttgcaccgttattgcaaaactttgcggccaccgactcctcgcgctacggttggttatcgcaggaaacccggcaacagtgtaagctattgattgaaaaaatatgtagtgccgaataccaacaaactaagaataacgccctgcgtgaggccaccttttttcagctaattacgcttattcaacgagcggaaagtgaagtcgaatatagtaccactaaatacaaactccataagctgctcacctggctacaggaacattgctttgaggaacataactggccgcaacttgctgaacaatttcacctgacgtcacgcactgcttttcgtcatattaaagaggcgactggattaacgcccgataattatgtcaagcgcctgcgcctggtatccgcacgagtaaaactgcgggaaacggaaatgacgatcacagaaatcgcctttttatgcggtttcgccaatagcaatcacttcacgacgctgtataaaaaggtctttggcctgactcccagcgatgaccgccgccgccaacaccaggcgtcgtag

SEQ ID NO: 93027 - DNA, 1572 bp, Enterobacter aerogenes
atgtcacaagccatgcaatacaacgcccaagttgcgatgatccgccatccgcagtttttacgcaccgcggagtcgcttaaacccgcactgcacagcgaataccgcgaaccgcaggccattattgacgctcatgccgatgccagcgcacctttcggctggcaggcagtggagctttgcaccccacagcaattttatcagcgtgaattcaccagtggcgacagcgtcatcgtggacttcggtaatcactttgttggctatgttgagctggcatgtctaagcgtcggcagtcctcccgatgccccggcgcaccttcattttaccttcggcgagacgctgagcgaggtttgtgaatcatttgatgattaccggggctggctcagcagcagctggttgcaacagcaggatttgtggattgatgaacttcctggagaaatcagactcccgcgacgctattgctttcgttatctcaaagtggaggtcaaggcggtttccagaaaatttaatctgtgtttcacccgactgcgcatccatgccgtcagttcggcccacagtatctgccccccatcaactacccaagacccacgtttacagcttatcgaccagacagccgtactgacgctgaagaattgtatgcaagacgtattcgaagatgggcccaagcgcgaccgtcgtctgtggcttggcgatctccgcctgcaggcgctggttaacgatgtcacgttcgcgaatcactcgctggttcgccgttgtttgtatctttttgctggccatacccggcaagacggtatggtttccgccaatattttcgttcagccgcaagtcatagccgacgacacctttttgtttgattattcgctgttttttgttgatacgctgttcaactatctacgcagttccggcgacgtagccaccgcgcaagagctctggcccaccgccagacggcaaatcgagttggcgcttgaacgttgcgataaacagcatttggttcgcgatagcgacgactggtgggtatttatcgactggcatgagacgctaaacaagcaaacttcggcccagggcgtcttaatttactgcctgcagcgcgccgtattgctcgccggacaatttcagcccgagttagtagcgggttatcagatgcatctgcagcagctaaagtcggctgcgctgtcctgcttgtgggacgaagcgcaaggatttttcattagcggcgcgcaacgtcaagtctcctgggcatcacaaatctggatggtgctagccgaagtcggcaatagtgcgcaacgagaaacgctcatgcgtcatctgctttcctccccgccgtcggtggtcatcaacacgccctatctgcgtcaccattttgttgctgctctgctgcaatgtgggctacgcgcggaagctattaacgaaatcaaagcttactggggcgcgatgatagattacggcgcggatacgttctgggaggtttttgatcctgacaaccctgagttttcaccttacggcagcaagctgattaacagctattgtcacgcgtggagctgtaccccggcctggtttatccgccaatataatctttaa

SEQ ID NO: 93028 - DNA, 1383 bp, Enterobacter aerogenes
atggcaaacaatatattcactctttggcggcaacgcctgggctacggcatcgcagatctctcctgcaatttggtgtggcagcttatctctctgtacctgatgttcttctacaccgatgtaatgaacttacccgcctggtacgtcggcgtgatgtttctggtgacacgtctggtggatggcgtggccgatgtactgatgggactggtaatagacaataccgcaacccgttggggccgctgtcgtccctatttgctgattggcgccgtaccgttcggcctgctatgtatcctcgcgttttacgtccccgaattctccactaccggaaaattgatttacgcctttattacctatctgtgtctgtcgtttctttacacacttgtcaatattccgttttgcgcgatgctgccgtttctgacaaacgattcccaggagcgcactacgctctcggcagtacgaatcttacttggctcgttgggggcgaccattgtcgccgtcaccacgctgccgcttgtcagcactctcggtcagggcgatcaggctcgtgggtttttctataccgcggtgatgttcggcgtgattgccactttttttctactggtcagtttccgcaacgtcaaagaaacaatcaccatcactcaagaaaaaatgactctgaaacgcgcctggttcagcctacgcgccaaccgtccgtggtgggttttcgcgattaacattttcctgatgtggggcgcatttttcttccagacaggcgcgttggtttacttcttccactactacgtcggcaatagcagtctgacggcaatcgtcgccggtatttcgacatttgtgcctctgctggggacattgaccgtcccactgctggccagtcggctaaaaaaacgccatgtctacctgattgccagtgctatcaatctcattggaatgatcgtaatgatggcggcaggggtaaatagttggggtttggttactggtgcggtgatcctttcgctcggtgccggacaacgcacggctatttacttctcgatgcaggcggatccggtggattatggcgtctggaaaaccggagtgaataccgctgggatcctgacctcaatcaatggttttcttggcaaagtggccatggctggcgctggcgcgattacgggcgccctgctcacttcaggcggctatatcgccaaccaggcgcaaagtgaaacggcgatgctggcgataaagtcctgctatctctacattccggcgctactgatctttgcctcgatgttgtggatgggtcgtttttatcggcttgacgatcattacgagcaaatccgcgcagacctcgatgccgggcgctatgccacgtccgacattcattcaacagacggagaacgtcaggcgatttaa

SEQ ID NO: 93029 - DNA, 1605 bp, Enterobacter aerogenes
atgcgtctctctttgatttgcgcagcagtttgctgcgcccttttttcggcctccgacgcgttggccgcgccgctcactatcgagcagcggctggcccaacttgaggccagactgaaacatgcggaacaccaggcagccgaagcaaaccgccgtgcgcagcaggccgaacagcgaacctccgtcgcggaacaacgcgccagcaatgccgaaaaacagatacaaaccctaagtaagcgcactgatgccggcgaacaaaaaaagcagcagatcagtcgtcaattggccaaatccaccgacgataacggttttgaatttaatgcctacgcccgttccggaatgctggtgaacagccacggtaaaggcgcgcgcggcggacccggtatttcaccggccagttcgcttaacggcgacgcccacgtgggtcgtcttggcaatgagaaagataactatgttgaactgagctttggcaaaaaaatgacctttagcgacggttcatgggcacatttcaaaacaatgcttgccgatggcgccaccaacccggatccgtgggtgcaggataataatagccaccaccttaacgtacgccaactgtatgtcgagatgggtagcttcgctgattttagcggtccatttaaccaggcgtcgatttgggccggaaaacgctttgatcgggataacttcgatattcactttaccgatagcgatattatgttcctcggcggtaccggcggcggaatcaatgatgtgcgttggagtcaacagcttcggggcgattattcagtctacgcccgcaactttggcgatttaggtagcgataactatgaagataacgatattcagaatctgatgtttaccgccaatcatttctggcgaaactggcagttaatgaccacggtaatgaccgcgcagggtaatgacacgctaaaagacaacacctcaacgaccggcagttatgcgctacgtagcgacaacaccgccaaaaatggctattacgcgatgttggcttatcacgacaaacagcagttctacggccttgctcccggcatctcagaaagcgccctgcagtacggtggcggtttaggcgcagaagctcgccagccgggcagcgacggcgatcttaccgggaatgctaaatccctgcgttttgcttcttacggcattttgccgctagggaaaaactggcaattggcgccatcggtcatcgcgcaacacagcgaaaaccgttatcatgacggcgaccgctacgactgggctactcttaacctgcgtctttcccaagagatcacccgcaactttgccctgctatatgaagcctcctggcaatatatggatttgaatcctaatggccgaacctatcgctataacgacaatgtttatcagtatcaggccgtcagcggcgatttttacaagcttaccttcgcaccaacgtttaaagtcggcgacattttcgatattaaagctcgcccggagatccgcttcttcgcaacatggatgaactgggacaaagctctggatcactacgccattaacgatgattttggcagttccggttttaccgccggcggcaactggaattttggcgtacagactgaaatctggttttaa

SEQ ID NO: 93030 - DNA, 600 bp, Enterobacter aerogenes
ttgaaggttataattaatagcaaggatatctggtttcgactgggtgtagaatattgtctacaacagatatcttctgagtgtcatgagcccgcttacgttgaattggcttacactaaccattctatacagcaagcggatcttattattttgccgctacatggctatcaagattacaagcatctctatgcgttatctcaattgtttaagggcattattttgggagtaagcacgtccagaagtagtcgccctggacggttgatttatcgggggaatatattgtgggtgagtagtcgcgaatcgacagccaatattcaaaagttgttgttggacattaagcatcggcagttatatgaccatggcggtcagccggactttagtctaataaaggcaaaggggggagccccgctcagtgaaagagagatgatgattatcgatcatgtcgtagccggcatgtcggtgaacgtcgttgccagagtgttaggtctgcgggtaaaaaccatttatgcgcatttagacaagattaaagctaacttcaaccttaaaggcggcagtcatcttcatcgttttatgataagcccgctgtcttatcacttattgtaa

SEQ ID NO: 93031 - DNA, 435 bp, Enterobacter aerogenes
atgataataggtagtgcgttacttggttaccaattagaggatgattttttttacttcttgaagtaccgggaaatagctactgtaagtggtaatagaaaaaacatccgtctacgaaaaacgatggcctgtctaattgaatatttatttgaacatggccttgaaagaattgttagtgatgaagagttgatggtgcatgtctgggagaaaaatgatttaaggccttcatcgcaacgtttatggcaagtgatgcaaaatttacgtcgactccttaaggatgtcggcattgagcaagaaattatattacgcgtcaagactcagggttattatatcaacagtcactacgttacaactgtttattctgtgaaaagtgataaaccgttctgccagaatgatggcgctatcatacagttacgtggaatatccgacgtaagttaa

SEQ ID NO: 93032 - DNA, 669 bp, Enterobacter aerogenes
atgacgaattcgatttatcagcctatcaccctcaacgatccgcggttgttgcaatttgccgaagagttgaatcctggcgccagtccaatctatctcccggttattgataaaccggggcccgagggaaacgcctactggaacgtcagcgcggcgatcgaacaggtcggtggaaaaatgctgctgggctgggagataaactactggccgggctgttttctggtcgcaacgcatcacgccgccttacaggccgacgatggagggatttatgatgtaacccgacgttcgccagcggcggcaatacccaccgttaatctattcgttcccgacgactcaattgctattgatcttgataaaacgccggccgtgaaatcacgattttatatattacattccgccgtgcaaattacggactatctcagggcttatgacaatctcaacgcttttgagaaaaagctaagcaataggctttatgagatcggctatcgctgtgaaacaaataaagcgttggcgagcggcgtcgtcggcacaacgcctgccttcgtggaaggcagttcggtcgatattgacgaaataaaaatgcatatttccgagttaagctggattttaaaagataaaattaaaaggctaaaacaatattctgacgcgctacaggaacagccattacattaa

SEQ ID NO: 93033 - DNA, 285 bp, Enterobacter aerogenes
atgagaaaattttacataatttgttattctgacgttgaatcggttttgaaaaagctagcatttatcctgttactcatcggcgtaagcgcaatgctttacgacaatctccctgcccagcgaattcgcggttgtgaaagcctgggggcaactgagggggtttgtacagcggtcgagtgggataccgaaaagctgaatttcttgccgtcatataacccggaaagtcttaagactattgtagtgcttcaacagaaagccgacgggaaacgcgcgacaattaaatcataa

SEQ ID NO: 93034 - DNA, 123 bp, Enterobacter aerogenes
atgtcaggaatacttgccctgctaatggctttagtcttattggtgatcgcaatctacagtcttatctcttatattcgtgagcgccgccactcgggcctgccatcaaaaaaagacaaacattga

SEQ ID NO: 93035 - DNA, 807 bp, Enterobacter aerogenes
atgcactctgaacgcgcaccgttgtttctcaaaatcgccacctggggcggagtggtatttctccattttccactgctgattatcgccttgtacgcctttaatacagaggatgccgctttcagcttcccgccgaaagggctgacgctccgctggttcagcgaggctgccgctcgcgcagatatcattgaatcagtgacgttgtcacttaaaatcgccgctttatccacggggattgcgctggtgttgggcactctcgctgccggcgcgctgtggcggagttcgttttttggtaagaatgccgtgtcgctgctgttgctattacctattgcacttcctggcatcattaccggcctggcgctgctgacggcatttaaagccgtcaatcttgagcctggcttgctaaccatcgtggtgggtcacgcgaccttctgcgtggtggtggtgtttaacaacgtcattgcccgatttcgccggacatcatggagtctggtggaagcatcgatggatcttggcgctacaggctggcaaaccttccgttacgtggtgctgcccaatttgggttcggcactgctggcgggcgggatgctggcattcgctctgtcctttgatgaaattatcgtcactacctttaccgccggacatgagcggacgttaccgttgtggttgttaaatcaactggggcgcccgcgcgatgtaccggtcaccaacgtggtcgcgctgttggtgatgttagtgacgactgtacccatcctgggggcctggtggctaacccgtgacggtgagaataacgccgaaagcggaaaataa

SEQ ID NO: 93036 - DNA, 237 bp, Enterobacter aerogenes
atgtggcgaaaatttttgacagcggttgtgttgatgtgcgggttattgtccggccatgtgttagcccagcgtcaggggcatgaatatttcccggtgcaaagcctcgaacagcagttactgcacgaggctgattgcgatgagctacgcagccaggctgaggagaccgccagctcgctgcgcgagcatcatcaccggcagtatgcgcgcaaagcaaaggcgcataacggcccgctgtga

SEQ ID NO: 93037 - DNA, 1656 bp, Enterobacter aerogenes
atgaaccgcagacgttttcttaaatcatccatggctgttgccgccgtatgcggaacgtcaggagtcgcctcgttattcactaaagcggctttcgccgcggattccgctatcgccgatggtcagacgcgccgctttgatttttccgtgctgcaggcgatggctcatgacttagcccgccagccgtggggcggagcgccgcgcgacctgccgccgacgctggcgaatctgacccctcaggcctataacagcatccagtatgatgcggcgcattcgctgtggaataacgttgaagagcgcaagctggatatccagtttttccatgttggtatgggtttccgccgccgggtgcgtatgttctcgctggactcccagtctcagcaggcgcgggagatacacttccgtccggagctgttccagtacaacgacgccggcgttgataccaaacagctggaagggcagaccgatctcggtttcgccggttttcgcgtgtttaaggcgcctgaactggcgcgccgcgatatcgtcgctttcctgggcgccagctacttccgcgcggtcgacagcacttatcagtacggcctgtcggcgcgcggtcttgccgtcgacacctttaccgatacgccggaagagttccctgatttcacgtcattctggtttgaaaccgtcaaacctggcgcgacggtgttcaccgtctacgcgctgctcgatagtccgagcgtcaccggtgcctataagttcaccgtgaattgccaggaaacgcaggtgatcatggatgtcgaaaatcatctctatgcgcgcaaggacattaagcagttgggtattgcgccaatgaccagcatgttcagctgcggtaataacgagcgccggatgtgcgataccatccacccgcaaatccacgattctgaccgcctgtcgatgtggcgcggcaacggcgagtggatttgccgtccgctgaataatccgcaaaagctgcagttcaacgcgttccaggataaaaacccgaaaggttttggcctgctgcagctggatcgcgatttcagtcattatcaggacgtgatgggctggtataacaagcgcccgagcctgtgggtggagccacgtaatcagtggggtaaaggcgccgttagcctgatggaaatcccgaccaccggcgaaacgttggacaatatcgtctgcttctggcagccggaaaaaccggtaaaagcgggtgatgaactggactttagctaccgcttgtactggagcgcgcagccgccggtgcgctcgccgctggcgcgagtgctggcgacacgcaccggaatgggcggattcccggaaggatgggcgccgggtgaacactatccggacaaatgggcgcgtcgtttcgccatcgactttgtcggcggcgacctgaaagctgcggcgccgaaaggtattgagccggtgattacgctctccagcggcgaggctaagcaggtagagatcctctacgtcgagccgtttgacggctatcgtattctctttgactggtatccgacttcagattccaccgatccggtggagatgcgcatgttcctgcgctgtcgcggcgacgctatcagcgaaacctggctgtatcagtacttcccgccagcggcggatcggcgtaactacgttgatgaccggattatgaaataa

SEQ ID NO: 93038 - DNA, 1089 bp, Enterobacter aerogenes
atgaaagtaaaagccgccgtgacgttgggttatcaacagccattcagcattaaaaatattcaggttagcgcccctaaaaaagacgaagtgatggtaaaaattgtcgctaccggcgtctgtcataccgacgcggtgatccgcgataacgccgggatcctgccgatgccggccattctgggccacgaaggcgccggtatcgtggttaacgtcggtgatgccgttcgtggggtcgaaattggcgatcatgtagtactgagctacgccgcctgccatcgctgcgaaaactgcctcaccaaccatccttccgcgtgcgaaagtttcaatgacttaaactttggtggacgcttagacgatggctccaccccatatcgtcttgatgatcaagaattatccgttttctttggccaatcttcgtttagtcagtatgtggtcaccaaagcgacgaatgctattgttgtcgaccgtgaagtcgaactttcgcttcttggtccgctgggttgcggaattcaaaccggcagcgggacggtgttgaatcgacttaaaccggttgccggggagtcgctggtggtattcggctgcggcgcggttggtttaagcgccattatggccgcaaagcttaccggctgtagccaaatcatcgccgtcgatattcatgccaatcgccttgagctggcacgtgaactcggcgcaacccacgtgatcgatggcaaacaggaagatagcgttgcggtcattcgccaactgaccggcaaaggggcgcactacgccatcgaaacgaccggcgtcgccgccatcgtcctgcaggcgatccacgcgattaagccgttaggcacggtggcggtcgtcggctttaccggcgatatcacctttaatgtgcaaaacgatctgatggcggaaggtaaatcattgattggagtcattgaaggcgacgctgtaccgcagctgtttattccgcagctggtacagttttataaacaagggaaattccccattgataagcttatcgagttctatccgctcgaagagattaatcaggctttcgcagattcagcttccggtaaagtcatcaaaccggtggtactgatgtaa

SEQ ID NO: 93039 - DNA, 600 bp, Enterobacter aerogenes
atgctgatccgcaataccgatatcgtggttttgtccgacgaagtctacgagcacgtagtcttcgacggcgaaaagcatcacggcatggcgacccatccgcagctggcggaacgcagcgtgattatctcttccttcggtaagacttaccacgtgaccggctggcgcgttggctactgcgtggcgccggcggcgctgatggatgagatctgcaaggtacatcagtttctgatgttttctgccgatacgccgatgcagtacgctttcgcagagcatatgcagaatccggcttcatggctgtcgctggccgctttttatcagcaaaagcgtgatttgctccagcaactgctgcaagactcgccgttccgtttattgccgagcgccggctctttcttcatgctggcggactatcgccatttcagcgatgagcatgacagtgagatggttaagcggctgattaccgaatacggcgtcgccacgattccgctatcggcattttataccgatggcactgataacaaactgattcggctctcttttgccaaagatgaagccacattgcgggccggcgcccaggcgctgtgccgcgttaagccgcgttaa

SEQ ID NO: 93040 - DNA, 270 bp, Enterobacter aerogenes
atggctttgatgaaaggctcaagcgcgctgcttttggctgcgttactaacgggatgcgccaacaaggaaccaccacaactttatcgccacgactttgtgttgaagaatccgcgtacgggtatgccgctgccctatctcccttaccaaatcaccacaccagacggtagagtatttaagggcagaaccgataaaaacggtttaaccgtagaagcgatatcaaccatgccgggagaatttaagatcaatataatccctgagtcagcactataa

SEQ ID NO: 93041 - DNA, 1437 bp, Enterobacter aerogenes
atgactgaacatcaacgtgaggggcaggttcatcctgccgccgacggggagtgcccgtcgcagctcaaacgcggccttggcgcccggcacattcagatgattgcgctgggcggcgctatcggcaccggactgtttatgggggcgggcagaaacatcgccgtcgccggaacgtccattctgcttatttatctactggtaggtttctttacctatatggtgatgcgggcgatgggggagctgttgctgacccgcctggattatcgttcgtttgcggatttcgtcggcgattatctcggcccgcaggccagcttctatctgggctggacctactggcttagctgggtggtgacctgtatcgccgacgtggtggtttgcggcagctatatgcagtactggttcccggagatgtcggcgtggatgcccgcgctgagtacgcttggcatcctgttcttgtttaatctgttgtcggtaaagatgttcggcgaggccgagttctggtttgcgctgattaaagttatcaccatcatcgcgctgattttgaccggcgcgtggatgattgctattggctggacttcgccggatggcgtgaaggcttctttaggccatattaccgacccgacggcctttatgccccacggcgtgaccggtttcttcgccggtttccagatagcgattttctccttcaccggtattgagctgctcggcaccatgacggcggaaacgcgcgatcctgagcgcatcttgccgaaggcgattaacgcgctgccgctgcgcatcattattttctatctgctgtcgatggtggtcattattgccgtggcttcatggcctggcgtctcgccggatgccagtccgttcgtgaccctgttcgccaaggccgggctgcctgccgccgccgcggtaattaactttgtcgccctaacgtcggccatgtcatcggcgaacagcggcgtttactccagtacccgcatgctctacggcctgtcggtagaaaaacatgcgcactggcagttccgtattctgtcgcgtaatacccgtattccggtacgtagcctgctgttctcctgcttctgcatgctaagcggcacgttactgctgttcctggtgccaaacgtgatgacgttatttaccattgtgtcgacgctggcggcgatcatggtggttttcagctggggtatgatcctcgtggcatatctggtgtatcgtcataaacgcccggacctgcacgcgcagtcgaaattcaaaatgccggcgggagtggtgatgtgctggctgagcctgctgtttttcgccttctcgatcttcattatgattttcgacccggatacgctgctggcgctgatggcctcgccgctgtggtttatcgcgctatggtgcttctggaaagtgaaacagaagcgcgaagggcaactggctttggataatgtcaacgcctga

SEQ ID NO: 93042 - DNA, 1086 bp, Enterobacter aerogenes
atgagtcagcaggacgcggccaggcaacaggccaatacccgaaacaacatccgcgtggtgtctatttttaccgccgcggcgatcggcatcgtcggcgtattggttattctttacgcctggcagttgccccctttcacccggcatagtcagtttaccgataacgcttatgtgcgcggtcagacgacgtttatcagcccacaggttaacgggtatatcaccgcggtgaacgtcaaagattttgataccgttcagccgggacaggtactgttccagattgacgatcgtatctataagcagcgggtacaccaggcgcaggcgacgttggcgatgaaacaggcggcgctgaaaaacaaccagcagcagcggaaaagcgccgaagcgacgatcgccaaaaacgaggccgccttgcaaaacgcccgcgcgcagaatcagaaaacccaggccgatttaaaacgcgtccaggagcttaccgcggacgggtcgttatccattcgcgaacgcgattccgcgcgggccagcgcggctcaaggcgctgccgatatcgaacaggcgaaagccacgctggagatgtcgcgccaggatctgcagtccactatcgtcaatcgcgattcgctggaggccgatgtagccagcgccaaagcagcgctcgagcttgccgaaatcgacctgcaaaatacgcggattatctccccgacgaccgggcaactggggcaaatctccgtacgcctcggcgcttatgtcagcgccggtacgcatttgacctcgctggtaccgcctcagcactgggttatcgccaacctgaaagagacgcagctcgccgaggtgcgcgtcggccagccggttaccttctcggtcgatgcgctgaatagcgaaaccttccacggcaaggtacaaagtatttcgccagcaaccggcgtcgaattcagcgcgatctcgccggataacgcaaccggcaactttgtcaaaatcgcccagcgaattcctgtccgtatcgcggtcgatgaggggcagaaaaacagccatcgtctgcgcccgggaatgtcggtgcaggtgacgattgatacccgcgcggagaataaacaatga

SEQ ID NO: 93043 - DNA, 1380 bp, Enterobacter aerogenes
atgatccgcccgttaacccttgccgtggcgctggcgctggtcggttgtcagtctgccgatgtaccacgcgcggagcccacgctggcaatccctgccgcctggcgggccgatgtgggtccatccagcccggtagaaggcgtgtggtggcgtaatttccacgacagcgcgcttaatcagtatgtcgatcgggcgttgcgctacaacagcgacgtcctgatcgcccgtgagcgggttaacgagtatcaggcgcgtgcctacgctgctaatagcagcttattcccctcgcttgatgccagcctgaccggtacccgcgctcgcgcacagtccgccgcgactggcctgcccattcacagcacgctgtacaaagggggcctgaccgccagctatgacgtcgatatatggggagccaaccgcagcgccgccagcgccgccgaggccagccttgaagcgcagaaagccgctgccgccgcggctaatctgaccgtggcgacatcggtcgccgtcggctacgtcaccttgttgtcattagacgagcagttgcgggtcacccgccaaacgctgaaatcgcgagaagatgcgtggaatctggctaaacggcagtatgaaaccggctatacctcgcgcctggagctcatgcaggcggattcagagctacgctccacgcgggcgcagatcccgccgttgcaacatcaaattgcccagcaggagaacgccctgagcgtgctgttgggcgacaatcccggtacggtgaaacgcaatgaattcgcgcaacttaccccactacggctgccctcgcagctgccatcatcgctaatgagccgccgtcctgacattgtacaggctcaacgacagctggtggccgccgatgccacccttgcctcgtcgcaagcgcagttgctgccatcgattaacctgaccgccaccggcagcctgcaggaccggacgctgccggaactgctcgataatccgctgcggctctggagcatcggcggcagcattctggcgccgttactcaaccgccaggcgctaaatgcgcaggttgatgtctcgatggcccagcgcaatcaggcgctgtacgggtatgagaaaacggtacgcggcgcgttcaaagaggtgaacgatagcctggatgccatcagccgctacggggaacagttaaccgagctcaaggagcaggaatcggtcgccgcagagacgttgcgtatcgcgcagaaccgctatcgtaacggctactcttcttatctggacgtgttggatgcgcaaagaacgttgttctccactcaattaagcgtggtgcaggtgaaaaataatcttctgctggcgcagattgatttgtaccgggcgctgggaggcggctggtctgactcatcagggagctaa

SEQ ID NO: 93044 - DNA, 576 bp, Enterobacter aerogenes
atggctgtttccctcgttaaaggcggtaacgtatcactcactaaagaagcgccgtcgatgaatattgcgatggtgggattgggttgggatgcgcgagtaacggatgggcaagatttcgatctcgatgcatcggtctttatggttggcgaagatggcaaggtgctatcggatgcgaattttatcttcttcaataataagaagagtccttgcggcggcgtagaacatcagggcgacaaccgcaccggtgaaggtgatggcgatgatgagcaggtcaaaatcacgctttcccgggtggccgctgaggtcaagaagctggttttctccgtcaccatctacgacgcagaaacgcggaaacaaaactttggcatggtgcagaatagctatatgcgggtgtataaccacgataatggccaggaaattgcgcgctttgatctatccgaagatgcatcaacggaaacggcgatgatttttggcgagctttatcgtcacggtgcggaatggaaatttaaagcggttggtcagggatttgctggcggtcttgctgcgctggcttcagcacatggcgttagcgtttaa

SEQ ID NO: 93045 - DNA, 579 bp, Enterobacter aerogenes
atgagcgtatcactgtcaaaaggcggtaacgtttctcttagcaaaagcgatccgtcaatgaaaaacgtgctggttggattagggtgggatgtccgcactaccgacggccaggattttgacctcgatgcatctgccttcctgttatcagagacgggaaaggtgcgcagcgatagcgatttcatcttctacaacaacttaaaatcggcagacggttcggtcacccacaccggcgacaaccgcaccggggaaggcgatggcgatgatgaatcgctaatcatcaaactggatatgatcccggccaacgtcgccaaaatcgtcttcgtggttaccattcacgatgcacaaatgcgtcgtcagagttttggtcaggtgtcaggcgcttttattcgcctggtcaacaacgattcacaacttgaagtggcccgttacgatttgacggaagacgcttccagcgagacggcaatgctatttggtgaactttatcgccataacggcgagtggaaattccgcgccgttgggcagggatacgctggcggattatccagcgtctgcgcccagtatggcattaatgcatcttaa

SEQ ID NO: 93046 - DNA, 1041 bp, Enterobacter aerogenes
atggtctccactcatttaggttttcccgttgaaacggtgagcgtttttattattctcgccattggggcgatcgttattgacctcgtaatgcatcgtaacgatagcgtcatatcgctgaaaagcgcggcgttatggtcactattttgggttgcggtggcgatggtttttgccgggtttctactggtgcaccacggcgcggaagtggctagtttatttgttactggttacgccttagaaaaagtgctttcggtcgataatcttttcgtgatgatggcgatcttctcctggtttggcattccggaacgctatcgccaccgtgtcctttactggggagtgatcggcgcgattattttccgcgctatttttgtcgccattggcacaggactattagcgctgggcccgtatgttgaaatagtctttgccttaattgtgctttggacggccgtcatgatgttaaaaagcggggaggagagcgatgaaattgaagattactcgcagcatctcgcttaccgtcttgtaaaacgtgtattccctatctggccaaaattagtggggcatgcttttttacttaccgcgaaagaggtcgagcgtgaacgggcgaagccggaaaataaagatctcattatcagcaccggaaagcgcgtcgcgttatatgcaacgccgctgatgctatgcgtggcagtagtagaactctctgatgtgatgtttgcttttgattccgtgccggccattattgcaataagccaggagccgctgattgtctatagcgcgatgatgtttgccatccttggcctacgtacgctttattttgtattggaggcactcaaacattatttagtgcatcttgaaaaagcggtcatcgtattgcttttctttattgcctttaagcttggtctgaacgccaccgatcatctttggcaccatggctatagtatttcggcgaccgccagtctgtatgtcgttctactggtgcttattgttggtattgtcgccagttttgtctttcaggataaaaacgaggaacagccaggggagcattaa

SEQ ID NO: 93047 - DNA, 456 bp, Enterobacter aerogenes
atgggattattcaataaagtaaaatcgacattgagcgccagccgcgtagaactggtcaaacaggttgggcgatttaaaaataagaaattcatgcaaggaactgttgcggtatgtgctcgtattgccgtttccagtgatggtgttagcgccgaagaaaaacagaaaatgatgggttttctgcgctcgtcggaagaaatgaaagtttttgataccaacgaagtaatcgacttttttaataaattggtatccagcttcgatttcgatatggaaatcggcaaaggtgaaaccatgaaatatattctggccttaaaggatcagccagaagctgcgcaattggctgtacgggtaggaattgcggtgggtaaaagcgatggtaatttcgacccggatgaacaggcggcaacccgagaaataatcgctgcgctcggttttaacgctgaagagtttggtctttaa

SEQ ID NO: 93048 - DNA, 1008 bp, Enterobacter aerogenes
atgtgtttttacggccagccgcgaaatgatgataataccattgagctgagtactaataataccgctactgtatttcaggtagcattagggctgctgcaggcggatgtccagaaagtggcctttaccgcaacctgcgataataacaggactatcggtgaattaggccatttgacgatcgcggtggagcataacggtactacgctgattgagtgtcaggtcgatgttcacggtcgaaatgaagcagcgctgatactgggcgaactttatcggcgtaatggcgagtggaagtttcgctttgtcgcacagggatttactggcggcctaaaaccgctcgctgaatactatggcgttgatattgccgatgaagccttgccccctgcagatgaacccgtgaaagtgaacctcagtaaggtcactttgactaaagagaaaccggcaatcagcctcgctaaacgtgacgattatggcgagatacgcgtaaatctgaattggcatcgccaaagctcggctacaggtttatttggttcattattaggggcaggcgccagcagcgttgatctggatctgggcgcttttgtcgaattaaaaaatggcgatttaagcgtagtacaagcactgggtaatgcatttgggcgatatcaacaaccgccttttattcagcttcagggtgacgatcgcacgggggcggttaacgatggagaatggatctggataaatggtagcgaatggcaaaaaattaaccagatattaatctatgcctttatttatgagggggtcgccagttgggataaaacagatggtgtcgtcacgctacatgttcccgggcagccgccaatcgaaacccgactgaccgaaggcaataatcgtcgaacaatgtgcgctattgctcgcttagtcaatgataacggcgccataaaagtagagcgtatcaatcaatatttcaccggccataaagagatggatcgcgcattcggctggggattccgctggcgagccggttcaaaataa

SEQ ID NO: 93049 - DNA, 480 bp, Enterobacter aerogenes
gtgaaacccgttaccggcatttatggcgcgggttctatcgaccttgatgcaagctgcattctattgaataagaatggcaacgtgctggataccatttggtttggccagctgaaatctcgctgtggcgctgtcgtgcatagcggcgataacttaacgggagaaggtgacggtgatgatgaagtcattcgcgttaatctggagaaactttccgctaacgtggaatatctggcctttaccgtcaatagttttcgcggccaaacgtttaacgaagttgagaatgcccattgccgcgtgctcgatcaaaataatcaggaattggcccgctatcagctaaccgagcaaggttctcataccggcattattattgcttcattaagccgccagaacggcagttgggattttaccgcccatggtcaagcagctcaggggcgcaccatcgacgatatgaaaagtgacgtattacgcattgtggtgcgctaa

SEQ ID NO: 93050 - DNA, 315 bp, Enterobacter aerogenes
gtgcaatattatgtctacagaagtaccagtaaaaacccggccttcccacttttaattgatgttaccagtgacattattggcgacattaatcgccgcttagcgatcccgttaatgcccgttgagcgactcggtgttaattccgcgccggagcgtttaaacccgatactggctttggttgacgggaaaaaatacgttttgatgacacacgaagcggcaaccattcctgttaaagccttaggagtcgagttttgcgatgcgagcggataccgcaacgctattaaaggagcgctcgatttcatgcttgatggcatttag

SEQ ID NO: 93051 - DNA, 234 bp, Enterobacter aerogenes
atgactgtaaaacgtaaaacgcaaaacgtgaccgtcactctcgaacgggatttactcaatcgtgcgcgcgaagccggtgtaaatatgagcgctacattagccgcagcgcttgatgctgagctgaaaaaacatgctgccctgcgttggcgagaagctaatgctgaagcaatagctgcaatgaatgctttaggggaagagaccggatgcttttctgatgaatatcggagtttttga

SEQ ID NO: 93052 - DNA, 3108 bp, Enterobacter aerogenes
atgttctcccgtttcttcgtgcgtcgcccggtctttgcctgggtgatcgctatccttatcatgcttgccggggcgctggcgatccgcacgctgccggtgggacaatatccggacgtcgccccaccggcgataaaaatatccgctacctataccggagcttccgcagaaaccctggaaaacagcgtcacccaggttatcgagcagcagctcaccgggctggataacttactttatttcacctccaccagcagttcggatggtacggtaagtattaccgtcacctttgagcaggggaccgatccggataccgctcaggtacaggtgcaaaacaaagtgcagcaggcggaatcgcgtctgccgagtgaagtacagcaatctggcgtaacggtagaaaaatcgcaaagcagctttctgttaatcctcgcggtgtatgacaaaaccaaccgcgccaccagttctgatatctccgactggctggtcagcaatatgcaggacccgctggcgcgcgtggagggcgtcggcagcctgcaggtattcggcgccgaatacgcgatgcgcgtctggatggacccgaccaaactcgcctcttactcgttgatgccttccgacgtacagtcggctattgaggcgcagaacgtgcaggtttccgcgggtaaaatcggcgcgctaccgtcgtccaatgcccagcaattgaccgccaccgtgcgcgcgcagtcgcggctgcaaactcctgaccagttcaaagcgatcattgtaaagagccagtccgacggttcggtggtgcgcctgagcgatgtcgcgcgggtggagatgggcagcgaggattacaccgctaccgctaatctgaacggccaccccgcagccgggattgcggtgatgatggcacccggcgccaacgcgctggataccgcaacgctggtgaaaagcaaaatcgctgaattccagcgtcaaatgccgcagggctacgatatcgcctacccgaaagacagcaccgagttcatcaaaatctcggtcgaggacgtcattcagaccctgtttgaagcgattattctcgtggtctgcgtaatgtatctgttcctgcagaatttccgcgcgacgctcattccggcggtagcggtaccggtcgtgttacttggcacctttggggtgctggcgctgttcggctactccattaataccctgacgctgttcgccatggtgctggcgatcggcctgctggtggatgatgccattgtggtggtggaaaacgtcgaacgtattatgcgcgacgaagggctgcccgctcgcgaagccaccgaaaaatcgatgggcgaaatctccggcgcgctggtggcgatcgccctggtgctgtcggcggtattcctgccaatggcctttttcggcggctcaaccggggtaatctatcgccagttctcggtgacgattatctcggcgatgatgctgtcggtggtggtagcgctaaccctcactccggcgctgtgcggcgcgctgctaagccactccaaacctcatgacaaaggattcttcggcgcctttaatcgcctgtgggggcgtacggaagagggctaccagcgtcgcgtactcggcggcctacgccgcggcgcggtgatgatgggcgcttacgccttgatttgcggggcgatggcgttggcgatgtggaaactgccgggcagcttcctgccggtggaggatcagggcgaaatcatggtccagtacaccttgcctgccggggcgaccgcggtgcgtaccgccgaggtgcgccgtcaggtgaccaactggttcctcaccaaagagaaagccaataccgaggttatcttcaccgtcgacggcttcagtttcagcggcagcggtcagaatgccggtatggccttcgtctcattgaaaaactggtcgcagcgcaaaggcgacgaaaataccgcgcaggccattgcgctgcgcgccaacaaagagctgggcgcgatccgcgacgccaccctgttcgctatgacgccgccatcggtggacggccttgggcaaagtaatggcttcactttcgagctgatggccagcgggggtaccgatcgcgatagcctgatgaagctgcgcagccaactgctggccgcagccaatcagagcggcgaactgcagtcggttcgcgccaacgatctgccacaaatgccacagctgcaggtggatatcgataacaacaaagccgtctcgctggggctgtcgctcagcgacgtgaccgatacgctctccagcgcctggggcggcacgtacgtcaacgactttatcgatcgcggccgggtgaaaaaggtctatatccagggcgagagcgacgcgcgcgccgtgccgtccgatcttggtaaatggtttgtccgcggcagcgataacagcatgacgccgttcaccgcgttcgccaccacccattgggaatacggcccggaaagcctggtacgctacaacggctcggccgcctttgagatccagggggaaaacgccgcgggcttcagctcaggggcggcaatggacaaaatggaaaaactggccgatagcctgccggcgggttccacctgggcatggagcggtatttcgctgcaggaaaaactggccagcggccaggcgatgagcctgtacgccatttcgattctggtggtgttcctgtgcctggcggcgctgtatgaaagctggtcagtgccgttctcggtgatcatggtcatcccgttaggcctgcttggcgcggcgctggcggccacgctgcgcggcttaagtaatgacgtctatttccaggtggcgctgttgacgaccattggcctgtcgtcgaagaacgccattcttatcgttgagttcgctgaatccgcggtggatgagggctattcgctctcgcgggcggcgatccgcgccgcgcagacccgtctgcgcccgattgtcatgacctcgctggcatttatcgccggggtactgccgctggccattgctaccggcgccggggccaacagccgcgtggcgattggtaccgggattatcggcggcaccctgacggcgacgctgctagcggtgttcttcgtcccgctgttctttgtgttggtgaagcgtctctttacccgcccacgtccttctcaggagtaa

SEQ ID NO: 93053 - DNA, 504 bp, Enterobacter aerogenes
atgcccaaccgtagcccggatgaggcgttagccgacatccgggactcttccccggtagcgcttacgcttaccggggctaccggccgaatgcccaaccgtggcccggatgaggcgttagccgatatccgggactcttccccggtagcgcttacgcttaccggggctaccgaccgaatgcccaaccgtagcccggatgaggcgttagccgacatccgggactcttccccggtagcgcttacgcttaccggggctaccggccgaatgcccaaccgtggcccggatgaggcgttagccgatatccgggactcttccccggtagcgcttacgcttaccggggctaccgaccggatacccaaccgtggcccggatgaggcgttagccaacgtccgggactcttccccggtagcgcttacgcttaccggggcaaccgtagccggggaaatacgcttaactcaggtcgacgtttttgctggcgaacagccaggtgagcacaaaaccgcatag

SEQ ID NO: 93054 - DNA, 642 bp, Enterobacter aerogenes
atgaagatagcaaccgtactacgctctggcggtgattataaccaaagccatgtgcagtggttatacaaacaattgccagcagacatcgagaaagtgtgctttaccgatttaactattcctggcgttaacaccattaaactaactgaagatttgcctggctggtggtcaaaaatcgagatgtttaatccggattcggttgccgaagatattttttatctcgatttagatgtcgtcgttgtcggtgatattagtgatattctggcaaataaacagctgaccatgctgagtgattttttctttccgcagaaaaccaaaaactccgctatcatgcgcgttccgcatgaggaaaagtacaaggtctgggaagcttttaagcgctatccggaactattcatgacgcgctatcagagcggtggtgaccaggagtttatcagcaaaatctatccacacgccgctatctggcaggacattttacccggacagatcgttagctataaaaagcatgtcattcataagaagaagaatgaacatgccaccggtgatggcaccgtgcctgcggggacgcgaattgtctgtttccatggaaaaccacgcccttgggactgcggtgaagcttgggtgccaccatttgagaaagcttaa

SEQ ID NO: 93055 - DNA, 1152 bp, Enterobacter aerogenes
atgggtagaaatctcttttacctgtcttcggttattaccttaatttatgcggtaattaacagaaaacgtcttactattaaaaaagaggagatgtttctttctctgacgctattgatgttaggagcttcacagcttatttggtcatatcgctttccgggtaatccggctgaaatttatatggctgatgttagctatcctcgctcaggcgcttatttgatgatcggcgctgtgatgatgttactcttgcctgcggtattaaggacaacagcaatacaatatggcaaaagcttgagttacgcattagtcgcgggcttttcagtattgacgctatacgctttacattatcatttttttgtttccggcgatcgcctgagaatcgataactccgcaaccttaagcgcctatctttatacgatatactcgttattgacgctatatgctttagcttgcgtcaatatccgctatcgcaactatattgccagcggtgtgatatttttctcgctgtggattatttttctgactgaaactcgctcggcgctgcttatttatccggcggtactgctctatgccctactgaccggtaacgtgatgtcgaagaaaaaatcagcgctggcgtgcctgatgctgttggttgctggcctggcagtgattgagttggcgtttccctcgctgaaagatcgggcgagtgaagcggtcactgagatctcggactatcaaagcgataacaatacctcgatgggttcccggctcagtatgtggcataccgggatctatgaaattattgctcatcccggtggcgtaagctcgcagcagcgtttccagatcctctcgcaattgatgtatgagaaagagcaggggaatcccgaggggttacgcaacattgtttatcatcttcataatgatttgatcgaaaccatgtcgctacagggcgttattggcggcctcttcctgctggcattgtatggcgcgatgctgctctatgtttacagaaaggcgacgctgaaatgtgcattggcgtttattggcgcgccggtgattctttttggctgcgtcgatactctgtttatccacgacagatttatcattatgtttattgtggcgttagccgttttcacggcgttatcgccggaaaaatctgcggaagaatcgtga

SEQ ID NO: 93056 - DNA, 915 bp, Enterobacter aerogenes
atgggatcgctattcaagcaaatttatcgctatacccgcccgcgcgcctaccgccacaatgaaaacctgtggccgtgggtaaagatccgccgggcggaaagcggtgaaatttgtgccttacaatacaagggcgaatcggtaccgctgtgtagcctaagtgaattaaaagacgctttctccgggccaatgctgctcaccgcgaccggtccatcgatcaacgatgtcgatttttcaattatcccgtcatcgttgccggtaatgggcgtcaacggcgcttactttctcgaaggaaaggtagggttttctctgtatctgatcgttgatatggagttttttgaccgtaaacccgaggttatcgccggtattgtcagcaatccacggatcctcttttttaccactacccacggtattgccaaaatcattgagcgcatcgggctcaacaatattcagtgtcgactagtcctgattgaagatgcctgttataagatttaccagccaaagatccccggtaacgatatcgcgacggtctttagccgctccccaagtgcgctcctgcaccaaaacttaagccatattggtttctcaaccgatattcgcaaagggatatttgacgcgggaacggtggcttactgggcgctgcagattatcgcctggctgggattcaacagaattattattgccggtctggatatgaataattttgagcaaccgcgattttatgaaaacggtgagaataagcttccctcatatctcgccgataaagtagatggtatggttttcccagcctttgaactcgccagccgtcatttacaggcaaagggtattacggtaattaatctttcccttaatagcgcaattcctgaacaggtatttcctaaaatgccgttatctcaagcgctacatgaagtggcctga

SEQ ID NO: 93057 - DNA, 1152 bp, Enterobacter aerogenes
atggctgcatcgactttttatattccgccagtaaacgttattggcgctggttctgttactgaagcgatgaatactatccagcaatacggatatcgtcgggcattaatcgtcaccgacgcgatgctgaataaattaggtatggcgggtgaagtacaaaaggcgttgcaggaacgggatatcttcagcgtggtgtatgacggcgtgcacccgaacccgacgactctgaacgtcgaaaacggcctggcgttgctgaaagagaataactgcgactgcgtgatttctctgggcggcggttcgccgcacgattgcgcgaaagggatcgcgctggtcgcggcaaacggcggcaacatccgtgactatgaaggggtggaccgttcggcaaaaccgcaactgccgatgatcgctatcaataccaccgccggtacggcttctgaaatgacccgcttctgcatcatcaccgatgtcgatcgccacatcaaaatggcgattgtcgataagcacgtgacgccggttctgtcggttaacgactcttcgctgatgatggggatgccgaaatcactgaccgccgctaccggtatggacgcgctgactcacgctatcgaagcctatgtttctatcgcggcgacgccgatcaccgatgcctgcgcgttgaaagcgatgaccatgatttcacagaatttaactcacgcagtggaagatggcggtaatgaacaggcgcgtgaagcaatggcctatgcgcagttcctcgccgggatggccttcaacaacgcgtcgctgggctatgtccacgcgatggcgcaccagctgggcggcttctacgatctgccgcacggcgtctgcaacgccgtcctgctgccattcgtgcaggagtataactgcagcgtcgccgccgcgcgtctgcgtgactgcgcgcaggcgatgggtgtgaacgttgccgggctgaatgacaaacagggcgcggaagcctgcatcgcggccatccgcgagctggcgcgtaaagtcggcattccggccggtctgcgcgatctgaacgttaaagaagaggatattccgctactggccagcaacgcgctgaaagatgcctgcggtttaaccaatccgattcaggcgacccacgaagaaatcatggcgattttccgcgccgcgatgtaa

SEQ ID NO: 93058 - DNA, 699 bp, Enterobacter aerogenes
atgttagaacaattgaagtctgaggtattagccgccaacctggcgctacctgcgcatcagttggtgacgttcacctggggcaacgtgagcgccgtcgatgaaacgggcaagctgatggttatcaagccatcaggggtggagtacgacgtcatgcgcgctgacgacatggtggtcgtcgatatcgccagcggccatgtggttgaaggcactaaaaagccctcctccgatacgccaacccaccttgccttgtaccgccgctacccgcaaatcggcggtatcgttcacacccactcgcgccacgcgacgatctggtcgcaggcagggttggatttaccggcctggggcaccacgcacgcggattatttttatggcgcgatcccctgtacccgcctgatgactgccgatgaaattaatggtgaatatgagtatcagaccggcgaggtgatcgttaaaacctttgaagcgcgcgatctcgatcccatgcaggtcccggcagtgctagtgcattcacacggtccgtttgcgtggggtaaaaacgccgccgacgccgtgcataatgccgtcgtcctcgaagagtgcgcttatatggggcttttttcccgtcagctcacgccacagctggccgatatgcagcaagaactgctcgacaaacattatctgcgtaagcacggcgcgaatgcctattacgggcaaaactaa

SEQ ID NO: 93059 - DNA, 861 bp, Enterobacter aerogenes
atgcgtaatcatcccttaggcatctatgagaaagcgctggcgaaaaatcttagctggccagaacggctggtgctggcgaaaagctgcggttttgattttgtcgaaatgtcggtcgatgaaaccgacgaacgtctggcgcgcctggagtggagcgccacccagcgcgcctctctggtcgcggcgatgctggagaccggggtagccattccgtcaatgtgcctgtctgcccatcgccgcttcccgtttggcagccgcgatgagccaacccggctgcgggcgcgcgagatcatgaccaaagccattcaactggctcgcgatttagggatccgcaccatccaactggcaggctatgacgtctactacgaagaacacgatgacggcacgcagcaacgctttgccgaagggctggcgtgggcggtcgaacaggcggccgcggcgcaggttatgctggcggtcgaaatcatggacaccgcgtttatgaactccatcagcaaatggaaaaagtgggacgagatgctcgcctcgccgtggttcagcgtctatccggacgtcggcaatctgagcgcctggggcaacgacgtcagcgccgagcttaaactgggcatcgaccgcatcgccgctatccatcttaaagacacgctacccgtaaccgcacaatcgccggggcagtttcgcgacgtccccttcggcgagggttgtgtcgattttgtcggcatcttcaaaacgctgcatgagctgaactatcgcggttcattcttaattgagatgtggacggaaaaagccaaagagccggtactggaaattatacaggcgcgccgctggatagaagcgcggatgcaagaaggaggtttcacatgttag

SEQ ID NO: 93060 - DNA, 663 bp, Enterobacter aerogenes
atgagccgaccattactacaactggcgctcgaccataccagcctggaagccgcccagcgcgatgtcgccgtactgcgccatcacgttgatatcgtggaagcgggcacaattctgtgtctgacggaaggactcaacgcggtaaaagccctgcgcgcccagtgtccggataaaatcatcgtcgccgactggaaagtcgccgacgctggcgaaacgctggcccaacaggcctttgccgcaggcgccaactggatgaccattatctgcgccgcgccgctggcgaccgttgagaaaggccatgccgtcgcccagtcctgcggcggcgacattcagattgaactcttcggtaactggacgctggatgatgcgcgcgactggtaccgcatcggcgtccgccaggcgatttatcaccgcggtcgcgatgcgcaggccagcggccagcagtggggcgacgccgatctggcgcgtatgaaagcgctgtcggatatcggcctgcaactgtctattaccggcggcatcacgccggccgacttacccctgtttagcgatattgacgtcaaagcgtttattgccggacgcgcgctggcgggcgcggcgcagcccgcgcaggttgcgagtgatttccaaacccaaatcaacgccatctggggagaacagcatgcgtaa

SEQ ID NO: 93061 - DNA, 1506 bp, Enterobacter aerogenes
atgagtgaaaaagagaccttctggctgggtatcgattgtggcggtacttatctaaaagccggtttatataacagccagggcgtagagcggcgtatcgagcgctgccctttacgcaccctcagcgcgcagccgggatacgccgagcgggaaatggatctgctctggcaacgctgccatgaaaccatcgccaggctgctcagcgccgctaacgtcaatggtaagcaaatcaagggcatcgctatctccgcgcagggcaaagggctatttctacttgataaacaggatcgcccgttaggtaacgcgatgctctcctccgatcgtcgggcgttggaaatcgttcaacgctggcagcaggatggcatccctgagcgactgtatccccttacccgccagacgctgtggaccggccatcccgcttcattgctgcggtggctgaaagaaaatgaaccgcagcgctatgggcaaatcggctgcgtcatgatggcccatgattatcttcgctggcgtttaaccgggatgaagggctgtgaagagagcaacatttctgagtccaatctctacaacatgaacagcgggcaatacgacccgcgcctgacccagtggttaggcataagtgaaattgacgaggcgctaccgccgatcgtcggctctgcggaaatatgcggggaaatcaccgctcaggcggccgccgttaccggtctggcggcgggtacgcccgtcgtcggcggtctgtttgatgtggtttctaccgcgctctgcgcgggcctcaacgatgaatcagtgctcaatgcggtgatggggacctgggcggtcaccagcgggatcacccacggactgcgtgagcatgaggctcatccttacgtctatggccgtttcgtcaatgacggtgaatacatcgtccacgaagcgagccccacctcttccggcaatcttgaatggtttaccgcgcagtggggcgggctctcatttaccgagattaatgaggccgtcgccagcctgccaaaagcgggaagcgagctcttctttctgccgttcctttacggtagcaacgccggcctggagatgaccggcggtttttacggcatgcaggccatgcacacccgcgcgcatttactacaggcggtgtatgaaggggtggtcttcagccatatgacacatctcaaccgcatgcgcgagcgctttacccaagtccaggctctgcgcgtcaccggcggtccggcgcattccgaggtatggatgcaaatgctggcggacgtcagcggtctgcgcatcgaactgccgcaggttgaagagaccggttgttttggcgccgcgcttgccgcccgcgtcggtaccggcgtctatcgccacttccgcgaggccctgagcagcctgcagcatccggtacgaaccctgctgcctgacatgaccgcgcaccgtctttatcagcgtaaataccgccaataccagcaattgattagcgcactacagggctatcacgcccgcattaaggagcacacattatga

SEQ ID NO: 93062 - DNA, 1320 bp, Enterobacter aerogenes
atgaacatgacctctcgccctacagcaaaagatattccacgccagcgttggctgagaattatcccaccgattcttattgcctgtattatttcctatatggaccgcgttaatatcgcatttgcgatgccgggcggtatggatgccgaactgggtatttccgccaccatggcggggctcgctggcggtattttctttattggttatttattcttacaagtccctggcggaaaaattgccgtacacggcagcggcaagaaatttatcggctggtcgctggtcgcctgggccattatttccgtactgaccggtttaatcaccaatcaataccaactgctgatcctgcgcttcttattaggggtggcggaaggcggcatgctgccggtggtgctaacgatgatcagcaactggttcccggacgctgaacgcggccgcgccaacgccattgtgattatgtttgtgccgattgccgggattattaccgccccgctgtcaggctggatcatcaccgttctcgactggcgctggctatttattatcgaaggcttgctctcggtggtcgtgctggcgctgtgggcatacaccgtttatgaccgtccgcaggaagcgcgctggatatccacagcggaaaaaaactatctggtcgaaacgctggcggcggaacaaaaggcgattgccggaactgaagtcaaaaatgcctcgctcggcgcggtgctctctgacaaaaccatgtggcagctcatcgcccttaactttttctaccaaaccgggatttacggttacaccctgtggctgccgaccattctgaaagagctgacccatagcagcatgggacaagtcggcgtgctcgccatcctgccctacgttggcgcgattgccggtatgttccttttctcttcgctctccgatcgtaccggcaaacgaaagctattcgtctgcctgccgctgatcggcttcgcactgtgcatgttcctctccgtggcgttgaaaaatcacatctggctggcctatgccgcgctggttggctgcggattcttcctgcaatccgccgcaggcgtgttctggaccataccggcacgcctgttcagcgccgaaatggccggcggcgcccgcggggtgatcaacgctctcggtaacctcggcggcttctgcggtccttacgccgtgggcgtactgatcaccctctacagcaaagatgccggcgtctattgcctggctatctcactggcgctggcggccctgatggcgctgctgctgccggcaaaatgcgatgccggcgcagcacccgcaaagacgatgactccgcgtaaccacgcagcttaa

SEQ ID NO: 93063 - DNA, 924 bp, Enterobacter aerogenes
atgaacattactaccggttatattatcggtgcgtatccctgtgccccctcatttcaccaaaagagtgaagaggaagagaaggaattctggcgacaacttgccgatactccagatattcgtggcatagaacagccttgtcttgagcatatccatcctttaggcgatgagtggctgctgcgccatacgccggataactggcaaattgtgattaccgccattatggaaaccatgcgccgccgcggagagaacgcgggtttcggtctggcctccagcgatgaacaacagcgtgtagcctgcgttgaatactaccgccaccttcatcgcaaaattaataaaatcaacggtattcaacccggtaaagtcgccgcgcttgagttacaggccgcgccgctggcgggagatcaaaacatcacccaggcaacggacgccttttcccgctcgctcaaagaaatcgccagttgggactggcgctgcgacctggtgctggaacactgtgacgcgatgaatggcccggcgccgcgtaaaggcttcctaccgctggataatgtactggaagttattgccgactacgagataagcgtgtgcattaactgggcgcgctcggccattgaaggccgcgataccgcgctgccgttggcccatacccgacaggttaaacaggccgggaaactaggcgcgctgatgttttccggcaccacccaaacaggcgaatatggcgaatggcaggatttacacgcgccgtttgcccccttctgcccgcaaagcctgatgaccgcgcagcatgcccgcgatattttcgcctgcgccgccggcgcatcgttgcagttcgccggtattaaattactggaaatagacgcgaatgccgatgttaaccaccgcatagccattttgcgtgacggtatcaccctattaaaaaacgcataa

SEQ ID NO: 93064 - DNA, 465 bp, Enterobacter aerogenes
atgatcttcggccatatttcacaaccgaatccgtgccgtctaccggcagcgattgaaaaggcgctcgattttcttcggactaccgattttcgccaccagccgcccggcgtcgtcgaaattgagggtaagaatatttttgcgcagatcatcgatctgaccacccgcgcggcgacagaaaaccgtccggaggtacatcggcgttatttagatattcaatttctcgcttccggtgaagaaaaaataggtatcgccatcgatagcggaaataaccagatcagcgaatcgttattagaacagcgcgatattattttttatcacgatagtcaacacgaatcgtttattgaaatgatacccggtagctatgccatattctttccacaagatgtgcatcgccctggatgcattaaaatgactgccacccctattagaaaaatagtcgtcaaggtagctatcgatattctgtaa

SEQ ID NO: 93065 - DNA, 999 bp, Enterobacter aerogenes
atgaaagtaacttttgcgcagctaaaagaggcgttcaatcgggtattactctcacgcggtattgcggcggaaaccgccgacgcctgcgcggaaatgttcgcccgcaccacggaatccggcgtctactcacacggagtgaatcgctttccacgttttattcagcaactggataacggcgatatcattccggatgcgaaacctcagcgcgtcaccagccttggcgctattgagcagtgggatgcccggcgttcgattggcaatctgacggcgaaaaagatgatggatcgcgccattgaattggcctccgaccacggcattggcctggtggcattacgcaacgccaaccactggatgcgcggcggcagctacggctggcaggcggcggaaaaaggctatatcggcatttgctggaccaactccatcgccgtcatgccgccgtggggcgcgaaagagtgccgcattggcaccaatccgctgatcgtggcaattccctccactcccatcacaatggtcgatatgtcgatgtcgatgttctcttacggcatgctggaggttaatcgcctggctggccgcacgctgccggtagatggcgggtttgatgatgacggtaatttgacgaaagaacccggcgtgattgagaaaaatcgccgtatcctgccgatgggctactggaagggttccggtttatcaattgtgctggatatgatagccactctgctttccaacggttcctccgttgctgaagtcacccaggacaatagcgacgaatatggcgtatcgcagattttcatcgccattgaagtcgacaagctcattgatggcaaaactcgcgatgccaaactacagcggatcatggactttatcaccaccgccgaacgcgccgatgaaaatgtggcggtccgcctaccgggccacgagtttacgcgattgctggaagaaaaccgccgtaatgggatcaccgtcgacgacagcgtatgggccaaaattcaggctctatag

SEQ ID NO: 93066 - DNA, 933 bp, Enterobacter aerogenes
atgctatttttaaaaatcattaaaatcagttggttgtgttttttcggttcagatcgtgaactgaaccacactttgcgctaccatcagagcgcgattaaaaaggaagccgaagcgatgggcacaaaagagagtgaaatgacgcaagagaaagagaggccagctggaagccagagtctatttcgcgggttaatgctgattgagatcctcagtaactatccaaacggttgtccgttggcgcatctgtctgaactggcgggcctgaacaaaagtaccgtgcatcggttgttgcagggcctgcagtcctgtggctacgttacgccggcgcctgccgccggaagttaccgcctgaccaccaaatttatagccgtgggccaaaaggcgctgtcgtcgctgaatattattcatgtcgctgcgccgcatcttgaagctttaaacatcgccaccggcgagacggtgaacttctccagccgtgaggacgaccacgcgattctgatttataagctggagccgactaccggtatgctgcgtacccgcgcctatattggccagcatatgccgctgtactgttcggcgatgggtaagatctatatggcgttcggccatcctgactacgttgccagctactgggacagccatcaggatattattcagccgttgacccgtaacaccattaccggcctgccggcgatgaacgacgagctggcgcagattcgcgaacgtaatatggcgatggaccgcgaagagaacgaactcggcgtctcgtgcctggcggtaccggtattcgatattcacggtcgcgtgccttacgccatttcgatttcgctgtcgacttcgcgcctgaaacaggttggtgagaaaaatctgcttaaaccattgcgtgaaacggcagaggcgatttcccgcgagctggggtttgttattcgcgaaggctaa

SEQ ID NO: 93067 - DNA, 441 bp, Enterobacter aerogenes
atggaaatgaaagcgacgacatattcacccgcgtttcacctgatctcatggattgcgctggtgggcggtatcctcgtgtatttgattggcctgtggaacgcgccaatggagctcaatgaaaagggctactattttgccgtattggtattgggtcttttttccgccgcttcttatcagaaaacggtacgtgataaatacgacaaaattccaaccaccgctatgtattacatgtcctgcctgatcgccttcgtgattgcgataggcctgctggtagtgggattgtggaacgcaacgctgatgttaagcgagaaaggcttctatggcctggcattctttttgagcctgttcggcgcggtagcagtacagaagaatattcgtgacgcctgggatcgctcgccgttaagcgaggggaacgcagtaatcgaagagaccgcagagtaa

SEQ ID NO: 93068 - DNA, 1620 bp, Enterobacter aerogenes
atggctcattgcgcccacaccccctcatttgttttacatcaggtcacctgtcagttcgcgacggggcagacgctttttggcccgctgaatttatcgctggaaccgttgctttgcggccttgttggacgaaacggcgttggcaagacacgcctgttgcgtctgctggcgggcctcgattctccttccggcggacatatcgaacggtcggctacggttgcctgggtggcgcagcagccgaccctcacggccgggaccaccattgcctcgctactgggttatgcaccgctatttgacgctttgtcccgtcttgaacaggggaaaggactggcagatgacttcgaactgttagatggtcgttgggatctgcccgatcgcctgagttcagcctttcgcgatgccgatctcccggcattctccgccgatcgtcccgctttttcgctcagcggcggcgaacggatgaaggcgctgctgtgcggcgcatttgtttccggcgcggactatctgttgctggatgaacccacgaatcatctcgatcgtcagggcagggagtggctgtatcagcagctggaaatctggcggggcggggcattaatcgccagccacgaccgtgaattactggctcggatgtcgaagattattgagctaacgccggcggcgctgcgcagctacggcggtaattatgccgcatatcagcagcagcgcgaagcggagcaacaggccgcccgagcggcgctggagcatgccgctatcgaacggcggcgcacccgggcgcggatgcaaaaggagcatgatgcggcccagcggcgatcggcgcagacgctgcgtactgtcgatacgctgaatatcgcctctttcgaacgtgtgaagtacaagggggccgcaaaagagcgcccgggcacgctgcgccgtcagcatcgtgaacagaacagcagcctgaatgccgccgtgcagcaggcgtgggagcgggtagaagaagatagtccggtgatgttcacgctaccgggcagtgaagtggccgccggcaagcaggtactggtactggaatcactgcagttagctcactcatccaccgcgccgctcgactggcgggtggatggcccgatgcgtatcgcgctaaaggggccaaacggctgtggcaaaacaacattgttgaaaaccctgatggggctggagcaggcaacctctggcgatgttcggctgtcggtgagcgcggcgtatctcgatcagcatctgacgcagctggatttatcactatcggcaatggagcacctgaacttaggaaacactccgctggatgaaggaatgctgcgtagccgtctggcgcagctccagctgggggctgacaaggtcagccttccgctggcggcgttaagcggcggcgagcgactgaaagcggcgcttgcctgcgcgctctggcggcgggactcaacacaacttctgctactggatgagccgaccaatcacctcgatctggcgtcgacccaggcaattgaaagcgcgctggcggcgtttcccggcgcgatgctggtggtatcgcatgacgaggtatttttacaaggcctgaaattgacccattgcctggagtggcaggatacgggctggcatttcactgtcatttaa

SEQ ID NO: 93069 - DNA, 408 bp, Enterobacter aerogenes
atggacaacctaattttaaaattaattgttttctatcaacggattgtctctccccgtaagggctaccgctgcgcctatagcgttttacatcatacgcagggttgttcaggtgcggtaaaagacattattcataacaaaggcgtcgttgacggttggcgagaaattcgtcagcgattcgccgactgtcgggtggctgcggaaaccctacagcaacaaaaactcgcggctaacccagcgggtaaaaaaagacgtaaaccgggaagaaagcgcgatgcttgcgatggttgtgatgttgtcactggctgcgacggtaagtgctgttcccacctggtgccggataatctgccggatctggattgtccttgcgactgtttatcagtgagattgtggcgccggaataatagataa

SEQ ID NO: 93070 - DNA, 291 bp, Enterobacter aerogenes
atggaatataaagatcccgtatttgatttgttgagtaacctggaacaaattgtttttaaagatcagccgcaaacggccacgcttgcccgtaccccaagcgtttttaatgaatttgaacggctgcgtaaaggcacagggcttaagaccgatgatttcgccaatgccatgggcgtcagcgtcgcaatggtcgaagagtgggagtcgcgacgggtaaaaccgtcatccacggaactcaaactgatgcgcctgatgatggccaatccgcagctctcaaggcagctaatagattga

SEQ ID NO: 93071 - DNA, 711 bp, Enterobacter aerogenes
atggcgacaggaaagtcctgctctcgctggtttgcggccgttgcggccatattaatggtggttagcctgagtgggtgttttgataaagaaggcgatcagcgcaaagcgttcatcgacttcctgcagaatacggcgatgcgtagcggcgaacgtctgccaacgcttaccgccgatcagaaaaaacagttcggccccttcgtttccgattatgcggtgatttacgcttattcacagcaggtcagccaggcgatggatgcaggtctgcgcccggtggttgatagcgttaacgccattcgcgtggcgcaggattataccactcagcgtgaaccgctgcgtcaggctaacggcgcgctgggcgtgctgagccagcagctggaaaacgccaaaatgcaggccgatgccgcgcatggcgcgctgaagcaggctgatgaccttaagccggtttatgaccaggtttttaataaagtcgtgacggcgccggcgaatgcgctgcagccgctgatcccggccgcgcagatctttactcagcagctggtccaggtgggtgattttgtcgctcagcaggggacgcaggtgagcttcgtggccaacggtattcagttcccgacgtcacagcaggcgagccagtacaatgcgctgatcgccccgctggccgcacagcatcaggcctttaatcaggcctggacggcggcggttaacgccacgcgttaa

SEQ ID NO: 93072 - DNA, 972 bp, Enterobacter aerogenes
atgaagccgtctgtcattctctataaaacgcttcccgacgacctgttacatcgtctggaggaacatttttccgtcacccaggtgaaaaacctgcgtccggaaaccgtttcacagcacgcggaggctttcgcccaggcggaaggtttactgggttcgagtgaaaaggttaacgccgcgttactggagaaaatgccgaagctgcgtgcgacctctaccgtgtctgtcggctacgacaattttgatgtcgatgcgttgaacgcgcgcaagattttgctgatgcatacgccgaccgtgctgaccgaaaccgtcgccgatacggtgatggcgctggtgctgagcaccgcgcgtcgggtggttgaggtcgctgaacgcgtgaaagcgggcgaatggaccaaaagcatcgggccggactggttcggctgcgatgtacaccataaaaccttaggcatcgtcggcatgggccgcattggcatggcgctggcgcagcgcgcccacttcggtttcggcatgccgattctgtataacgcgcgccgtcagcatccgcaggcggaagagcgctttaacgcccgctactgcgatctggataccctgttacaggaagcggatttcatctgcctgatcctgccgctgagcgaagagacccaccacctgttcggcgcagcgcagtttgccaaaatgaaatcttccgccatcttcattaacgccgggcgcggtccggtggttgacgagcaggcgctgattgcggcgctgcaggccggtgagatccacgccgccggtcttgatgtctttgaacatgaaccactggcaaaagattcgccattactgaaactgtcgaacgtggtcgcgctgccgcacattggttccgctacccacgagacgcgttataacatggcggcctgcgcggtagacaatctgattgacgcgttgaacggcaaggtagagaagaactgtgtgaacccgcaggtgaagtaa

SEQ ID NO: 93073 - DNA, 1281 bp, Enterobacter aerogenes
atgaacagttcaacaaatgcagcaaaacgttggtggtacatcatgcctatcgtgtttatcacgtatagcctggcgtaccttgaccgcgccaacttcagctttgcatcggccgcgggcattaccgaagaccttggcatcactaaaggcatctcatcgctgctgggcgcccttttcttccttggatacttcttcttccaaatccccggagcgatttacgccgaacgccgcagcgtgcgtaaacttatctttatctgcctgatcctgtggggcggctgcgcctcgctgaccggcgtagtgcataacatcccggcgctggcggccatccgctttattcttggcgtggtggaagcggcggtcatgccggcgatgctgatttacatcagtaactggttcaccaaatcagaacgttcgcgcgccaacaccttcctgatcctcggcaacccggtcaccgtactgtggatgtcggtcgtatcgggttatctgatccaggccttcggctggcgtgaaatgtttatctttgaagggatccctgcagtaatttgggccttctgctggtgggtactggtgaaagacaaaccgtcgcaggtgaactggctggcggaaagtgaaaaagcggcgctgcaggaacagctggagcgcgagcagcagggtatcaaagcggtgcgtaactatggcgaagccttccgttcacgcaacgtggtgctgctgtgtatgcaatatttcgcctggagcatcggcgtgtacggtttcgtactgtggctgccgtcaatcatccgcagcggcggcgaaaacatggggatggtcgaggtaggctggctctcttcagtaccctatctggcggcaacgattgcgatgatcgccgtctcctgggcttccgataagatgcagaaccgtaagctgtttgtctggccgctgctgctcattggcgggctggcgttcatcggctcgtgggccgtcggcgccaaccatttctgggtctcttataccctgctggtgatcgccggcgcggccatgtacgccccgtacggcccgttctttgcgattatcccggagatgctgccgcgcaacgtcgccggcggcgcgatggcgctgatcaacagtatgggagcgctgggttccttctttggctcgtggttcgtcggctatctcaacggcgcaaccggcagcccgtccgcctcgtacattttcatgggtgtggcgcttttcgcctcggtatggcttactttaattgttaagcctgctaagaatcaaaaacttccgcttggcgctcatcacgcctga

SEQ ID NO: 93074 - DNA, 609 bp, Enterobacter aerogenes
atgagtatttccttgaaaaagtcagggatgctgaagcttggtctgagcctggtcgccatgaccgtcgccgcaagcgtacaagctaaaaccctggtttattgttctgaaggttcgccggaaggctttaacccacagctattcacctctggtaccacctatgacgccagctcggtacctatttacaaccgcctggttgaattcaaaaccggtacgaccgaagttattcctggcctggctgagaagtgggatgtcagcgaggacggtaaaacctataccttccacctgcgtaaaggcgtgaagtggcaggataataaagattttaaaccgacgcgcgatctgaatgccgacgatgtggtgttctccttcgaccgtcagaaaaatgacaaaaatccttaccataaagtctctggcggcagctatgagtacttcgaagggatgggcctgcaggacctgattagcgaagtgaagaaagtggacgataattccgtccagttcgtgctgactcgcccggaagcgccgttcctcgctgacctggcgatggactttgcttctatcctgtcgaaagaatatgccgacaacatgctgaaagccggcacgccggaaaagtag

SEQ ID NO: 93075 - DNA, 816 bp, Enterobacter aerogenes
atgccttatccgaacccggctgacatcgcgcgcatgaaggaagataaaaacatcaacctgctggaacagccgggtctgaacgtgggttatctctccttcaacaccgagaaaaaaccgctcgataacgtcaaagttcgccaggcgctgacctacgcggtgaacaaagaagcgatcatcaaggccgtttatcagggcgccggccagtcggcgaagaacctgatcccgccgaccatgtggggctataacgatgacgttaaagactacacctacgatcctgaaaaggcgaagcagctgctgaaagaagcgggcatggaaaaaggcttcaccatcgacctgtgggcaatgccggtacagcgtccgtataacccgaacgcgcgccgtatggctgaaatgatccaggccgactgggcgaaagtcggcgtacaggccaagatcgtcacctatgagtggggcgagtacctgaaacgtgcgaaagcgggcgaacaccagaccgtgatgatgggctggaccggcgacaacggggatccggataacttcttcgcaactctgttcagctgcgccgcggcgaaagacggctctaactactctcgctggtgctacaagccgtttgaagacctcattcaaccggcacgcgccaccgacgaccacaacaagcgtattgaactgtacaaacaggctcaggtagtgatgcatgaccaggctccggcgctgatcatcgcccactccaccgtttacgagccagtgcgtaaagaagtcaaaggctatgtggttgatccgcttggcaaacaccacttcgataacgtctctgtcgaataa

SEQ ID NO: 93076 - DNA, 2007 bp, Enterobacter aerogenes
ttgcgcgtcagccgctcacttacaattaaacagatggcgatggtcgcgagcgtgtccatggcgtttgtcctggtcttttgttccattttactgtttcactttgtgcaacagagtcgctataccacggccacgcaattagaaagtatcgcccgttccgttcgcgaaccgctgtcggcggcaattttgaaagccgacattcccgaagcggaagccattctgggccgcattcagcctgctggcatcgtcagccgggcggatgtggtgctaccgaatcaattccaggcgctgcggatgcgctttattcccgaacgcccggtgccggtgatgatcactcgcctgtttgaactgccggtgcagatatctctgccaatctactcgctggaacgcccggctaacccgcagccgctggcttatctggtgctgcaggcggattcctatcgcatgtacaaattcgtcatgagcgcgcttgcgacgttagtgactacttacttacttttggtgctggttttaacggtagcgctcacctggtgcatcaaccgactgattgttcgcccactgcgcgccatcgctcgcgagctcaacgatattccgcctcaggatcgtctcgggcatcaactgagcctaccgcgactgcaccaggacgatgaaatcggcatgctggtgcgctgctacaaccgcaatcagcagtccttgttgcgccagtatgatgagctatcgctgcaatcgacccgttttccggtgtctgagctccccaacaaagcctttctgatggcgatgctggagcagaccgcgacccgtccgcagccttcggcgctgctggtggtggcgtgtgaaaccctgcaagatgccgcgggcgtcctgaaagagagccagcgcgagatgctgctcttaacgctggtcgagaaactaaaagcggttatcccggccaatatggtactggcgcaggtgagcggttacgatttcgccatttacgcgcccggacttagcgagccttgggaagcggtgtcgctaagtaagcgagtgctcacttctattagcgagcgattgccgctgcacggtgtccagctgcgcccttgcgccagcgtcggcatcgcgatgtttaatagcgagctgaatgccgagcagttctaccgccgtgcggtttccgccgcggtgacggcgcggcgtaagggtaaaaatcagatcgagttctttgaccctgagcagatggaaaaagcccagcgccggttaatggaagagcatgacatcctcaccgcgctcgataatcagcagttcgccatctggttccagccgcaggtggatattgccaacggcgatatttgcggtgcggaagttctgctgcgtcagcgacaggccgatggcagctggtcgctaccgtgcgatctgatcgagcgtattgaaaactgcgggttgatggtgccggtaggttattgggtaatggaagaagcctgccgtcaactggcagcctggcagcaacaagggatcatgctgccgctgtcggtgaacgtctctctcctgcaactgctgcatcccgagcgcggcgttgagctactggcgctcattgaacgctaccgtatcgccccgggcacgctggtgctggaggtgacggaaagccgccgtcttgacgatccgcaggcggtgattgccctgctgcgcccgctgcgcgacgccggtacgcgcattgcgctggatgatttcggcatgggttatgccgggttgcgccagctgcaacatatgaaatcgctgccggtggatatcctgaaaatcgacaaggcgtttattgatatggtgccggatgataccagcatggtcccggcgataattcagctggcacgcgggctcaagctgcggattgtcgctgagggcgtcgaaaaagaagaacagctgaaatggttgcaagcggcgggggtggacatcgctcagggttacctgtttggttgcgccttaccgctggaaagctttatgcagcgcttcctgcacgctgaaaaggatgatgcaagtttgtaa

SEQ ID NO: 93077 - DNA, 543 bp, Enterobacter aerogenes
gtgctttgtgttaattccgagcacattgcgctcccgatatttcttctgcgttatgtctctcatggcgcagggagcgcacagggggcggccagtcgccgccgccccctgtacccccgggctctggccgccaaaatcgccacttcgtggtaccttcgacttatcccggcaggcttcgggtcgggccgaggctgcgtccgtgcaaaacacggccctcagcccgcatccatgcgggctgccccggccttccgggaacgtctcagcgattttgaggccaccaacaccggcagtttcagtagtcatgggtacaaaggaagagttaaaagcttcagttgcaatggcaatggcagtggcaatggcactggccgtaggccgggtaaggcgttagccgccacccggcgcaaaatctgctctgcgtccaccgcctgtggtacggttcgtgcggcctcaaaatccccggtggcgctaccgcttaccggggctacagcactgttcgatttggtagccctgctaagcgcagcgcaagcagggggaatcggagcttag

SEQ ID NO: 93078 - DNA, 384 bp, Enterobacter aerogenes
atgaataatgggtttaaaagggataacttgctccagatactgagcgaattattgccaaatgaaaccattgatgaaaggaaatatgttcatggtcttattcgttcgaagccagcggtgctgtacttcgccgatacacaaatagtccagcttaatctttcattgttttatgattacaaagataattaccagcgcatcccttatactgatatacgcgaaattaaaatgcgcaacgttctctggcgaaagttcgcgctcatatataccaatccgatcgcgcccattgaagttgaaatgcccggcaaatgcctcggttgcccatggcaggctgaaaacttaagctatctattagagaatgatttctttcagaatagttggcctcattag

SEQ ID NO: 93079 - DNA, 477 bp, Enterobacter aerogenes
atgagccactacttatcgcccggcgcttatctaccgcacaagccgccaatgctgctgctggaagaggtcgtcaatgtcaccgacgaaaccgctacctgccgggtcacggtctcgacccatggcgtcctggcgccgtttattgatgccgagggcaatctccccggctggttcgccctggaactcatggcgcaaaccgttggcgtctggtccggatggcaccgccaacaacaggggcaaacgtccatctcactaggcatggtgcttggcgcgcgcgagttagtctgcgcggcaggatacctgccgggcggcaaggcgctgtccatcaccgtaaagctgttaatgcaggacgagcgtttcggcagcttcgaatgtgccattacggcagacgatgaagaactggcaagcggacgggtcaatactttccagccgacgccaacagaacttaacaccctatttcaacaaggagcgtcagaatga

SEQ ID NO: 93080 - DNA, 1350 bp, Enterobacter aerogenes
atgaagcagccccttatgctggcccagtggctcagcacagcgcgtccgtcggacacgctgattgcgtggcaggaagaacaccgctggacgctggcgcatctgcgctacgatgtcgcccagctgcttgcctgtttgcagcaacagcaaggcgaacgctgggcgctctgttttgataacagctatctgtttctggtcgccctgctggccacgctgcatgctggaaaaacgcctgtgcttcccggccacagtcgcgcgtcgttattaaacgaacagcggacgcttttcgacggcatattgagcgataaggcgctggcgtggcgcgggccgttacaggttgtgcattccgccatgacgaccgccccccacgaatacgcattcccggcaatcgacgatgacgccgatattgagctttttacctccggttctaccggtgaaccgaagcgaattagtaagcccgtcaagagtctagaccgcgaggcggcgctgttagccgcgcactatgccggacgcctggcagacagccgggtagtggcatcggtcgcgccacagcatttatatggcctgactttccgcctgttcctgcccatggcgctaggtttgccgctccacgcggcgatgattgagtacgccgagcagttaacggcattgaaccctgactatcgctatctttttatcagcagtccggctttcctcaaacgtctcgatcgccagttgcccccgccaccggtcgcgatgattttgtccgccggcggcaagcttctgtggcaggatgcggtgcaaaccgccagttggtttgctgtctggccggatgaaatttacggcagcacggaaagcggagttatcgcctgccgccagcgcctgcaggatgatacgccgtggcagccgttccccggcattcgctttcagccgcagggcaacacaattcgtctattttcgccgcttatcgccgacgataacggcctggttatcgatgatattttgcatttcaatgaaagcggtcaattccatctggcaggtcgtcgcgaccgggtggtgaaaattgaagagaaacgcatttcactaagcgaagtggaacatcgattactggaactggatggcattcttgatgccgccgccctgcctattacccgcggcagtcgccagagcgttggcgcgttgttagttctgcacccagacgcccgtcgccgctggggaaaaagtcaggaattacagtggcgaaaagcgctgcgcgccttgctggaacctgtggccatccctcgctactggcgggtgattgacgagatccccgttaacagcatgaacaagcgtgtctacgcgcaattacaggagttatttcatgaagccccatga

SEQ ID NO: 93081 - DNA, 723 bp, Enterobacter aerogenes
atgacatttgcatttaacatagttgattggcaggccttcgcgcctggagtcagtgacaccaagcagtggcaacggtggtcacagcatttgcacgccatcgatccaaccgcggcgccggccaaacttagcgaattaccgatgatgaccgcccgtcgactcagttcaggcagcaggctggccgtggagtgcgggctggcgatgctgcgccgccatgagatcgacgccgttctctataccagccgtcacggcgaactcgagcgcaactatcgcatcctgcacgccctggcgctggagcaggcgctctcgcctaccgatttcgccctatcggtacataactccgccgtcggcaatctgacgattgcagcgaaaaagcccattgcatcgtcatcgctttccgctgggcgcgatactttccaacagggtttatatgaagtgatggctctactacaggcgggctatcagcgcgtcttgatggtggatttcgatggttttctgccagaattttatcactcgcagctaccaccggcgatgccaacctggccctacgcggtggcgtgggtcattgaagcgggaagccaatggcgctgcaaagcgcaacgtcatgacgcagtcgaagagagcacgctgccgcaaagcctgttgtttttacagtattatttgcagaatgcgcgcgcattcacgctgcccggcgaacgcgtgcaatggcagtggagctgttcatga

SEQ ID NO: 93082 - DNA, 1062 bp, Enterobacter aerogenes
gtgtatcaacaggactctcttagcgcgctggatgccatcacggaagcgcaacgcatcgctttcgcccccatgctctttcaaaccgcgttatgtctgcgtaactcaggtatcctcggttatctcgatcggcaaggtaaacgcggcgcgacccttgaagcaattagcgaaaattgtgagggaaatgaatatgctgtaggcgttttgctggatatgggattaagcggccgtattgttacctataaagaagaacgctattacctcgctaaagtgggacatttcttactccatgatacgatgacccgtgtaaatatggattttactcaggacgtttgttatcagggattattctttctggaaaatgcgttacaggaaggtaaaccatctggtttaaaagtttttggtgagtggccaacaatttacccggcattatcgcaacttccgcaagcggcgcgtaaaagctggtttgctttcgatcattactattccgacggtgcgttcagcgccgcgctgccacatgtattcgccagtcggcccgcaaccctgtacgatgtcggcggaaataccggtaagtgggcgctgcgctgctgtgagtatgatgaaaatatcgcgattacgttattagatttgccacaacaaattgcgctggcccgcgaaaatatagaaaatgcgggccttacccatcgcattgactgtcatgctgtggatatgctgagtgacgcccccttaccaggagaggcggatatctggtggatgagccagttccttgactgtttttccccggaacaaattatcaccctactcagtaacgtcgcgcaggtcatgaaacccggcgcgcgcctgtgtattctggagctgttctgggatgcgcagaagtttgaagcagcatcatttagtctgaatgcgtcttcgctctactttacctgtatggccaacggcaacagtcgtttctacagcgtagagaagttttatcgctatctggaaatggcgggtttccgggtagaacaacgccacgataatttaggcgttgggcataccttgttgatatgtcagaagaataattga

SEQ ID NO: 93083 - DNA, 396 bp, Enterobacter aerogenes
atgaaaaaggttattcactggattgttgccgccacggttgttggcgcgctggcgggttgcgcacgcaccgcgccgatcgaacaggtccaaactacggttagcgcgggtcatactgaagctcaggtcaaaagcgctattctccaggctggtgtccagcgtgaatggattatgtccgatgcaggccctggcgttatcaaaggacatttacaaaaccgggcccactccgcggatattaaaatcaactactctgcaacaggttattctattaattacgtgagtagccttaacctgatggcttccggcggaaagattcatagaaactataatcgctgggtgcacaatctcgataaagatattcaggtcgccctcgccgctaatacggcgttacagaagtaa

SEQ ID NO: 93084 - DNA, 348 bp, Enterobacter aerogenes
atgtgggatgtagaaacgacggatacgtttgatacctggttcgaattacaaagcagagctttaaaagaggatatgttggccacgatgcttatcctgtctgagtttggtccgcagcttgggcgtccgtatgttgatacggttaaaggttcaaagtttcagaatatgaaagaacttcgggttcagcatcatgggctcccagtccgcgccttttttgcttttgatcctcttcggaaagctatcgttttatgtgcgggcaataaggatggcatgaatgagaaacgtttttacaaagagatgattaccctggctgatagagaattcagccagcacctgactaaggagcgataa

SEQ ID NO: 93085 - DNA, 300 bp, Enterobacter aerogenes
atgggcacgctaaaagaactcatggcgaaacagagtcctgaaagccagcagcgtattgcagcgaaagcggcagagatacgtcagtctgtcgctttaaacttgcttcgcgaagagttacaaatttcacaaacggagatggctgcggctatgggggttaagcagccaacgatcgctaaaatggaacaggctgataacgacccgaggctttcgaccctaaagcgctacattgcggccttgggtggggaactaagtataaatgtcacgttgccgactggaaaaaaagtctcgtttaatttgtga

SEQ ID NO: 93086 - DNA, 540 bp, Enterobacter aerogenes
atggcgcagccgattaatcttctgccgtggcgcgagacgcgacggcggcaacgcttgcgtctgggcgggctgctggtggtggcgatggcgctaaacatcgccgccctgacgatagcgacgcgcgcgttgcgtcagatggacgcggcgcagcaggcgatgcgcgcccaggccgacaatctgctttattccgcgctgttgcaacgcgagcgggagatgcgcgaagaaatacagcgcagtgagcgacaggtacggcaagcgcagcggcgagccgaaatgcaggcctggcagacacgattgctcacgttagcgtcgctgttgccggagccgctgtggttaaccagactggactaccaaccgcagggcatcaccctcagcggcctggcgctgaacctcaaggcggtggcggcgctggaaaaggcgcttggcaagctggagggggttcaaccggcgatggcaggaggaacgcatcgcgatacacagggacgctggtcatttagcttttttctacctggggacactgccgatgcggacagcgattga

SEQ ID NO: 93087 - DNA, 438 bp, Enterobacter aerogenes
atgcggacagcgattgaacgcctgcaggcgctgcgcggatggccgttagcgttactttgcgccacagttttggctgcggcagtgtatctggcgttttcgcttgttgttgtcagcgcttcgcagcctgcgccgccgcccctacagacgcaatggcggcgagtaatgccgctgcgggccacgctgcagcagcgcgtggttgatgattggacggcccggcgtttttcaccgctggagccacccgtggccggtatcttgttacaggcctggcaaccgcgagggcgcggcggtgagatgctggcggcggttaactggcagtcggtgccgccgctgttcgcctggcttgccgattgcggggtacacgctagcgctttttcactaaatgatgaaaaaggggtactacagatgtcgttgcaactggagcgcgacgatgaaatataa

SEQ ID NO: 93088 - DNA, 333 bp, Enterobacter aerogenes
atgaaaaaatggaaccagcccctaatctggggaatgatcatcgcgatcctcaatccgttaggggtaagctatatcgccttaatcggcgtcgctatcggcaacacactggcatttgtctggtgtgcaatgctggcatgggcaatttatttttatgctatttatttgctctgtacccggccccacgatgggcggctggtacaaatctatttactgatcatgggtaccctgatgcttccttgggggttagtgctgcttatcacctgtatcatgaatgagataaaggcaaataaacaacgtacttcatcgtcggcaagcgagacaaaagacggctaa

SEQ ID NO: 93089 - DNA, 1011 bp, Enterobacter aerogenes
atgaaaaagcttgattcattacaatatgcgagagcatttgccgctatatttgtcataatagctcatactgttaatcaattttacatgtatagcaccacaggtaataaattatttgatgaaataatacggagaacgacacatttaggtgaccttggggtttatgttttctttgtcattagtggatacataatgtcttacaccactaaaaacaaagattttggggttgaatatgcatcaactttcataaaaaaacgcctcctccgaatctatcctatttattggatattttttactttactagttatattatgggctgcaggtatagcgctaagatcacaagatatcaatgcagaaaaaatattcttctcatatctactaattccttttggtgcaactgataataagatcgacacccccgtaatgtcacaaagctggacattatcgtatgaaatgtttttctatttcacttttgctctgttaatttctatacgcatcaaaaaagaaagaattatagcaaacctaatttttattttcactttactgtttattacctcatcactgaatgctctaccaactgctgaagccaatgcattcttttccaaatggattatattcctatttataattggcgtgtttattgagcgaaacgaaaacatcttacaaaacttaacatcaaaactcagtgatacaatatgttgggccttggctgcttttcttgtttgtatagctatttatatcgaaaaacctgtatatatcgattgtttaataagcgcagctattttaatatttgtattacccgtaagaaaaaaacacaacttacttttaaaaatcggtgatgcttcttatactatatatttaacgcataattttatcgtgatggcatatgggatatttgtcaaaaaattcccaaacccttggggttgtaccattggcggagctattacaatcgcaatatgcattccattcggactaatattatataagttaattgaaaagaaaattcatcactaa

SEQ ID NO: 93090 - DNA, 417 bp, Enterobacter aerogenes
atgaaattaaccacaacgtttgtcgcgcttggctgcgctttagcactcctttccggttgcacctcatcgaagacctcgccagaacgccatgcttatagcttcgtgtctcaccgttcagatttcgtcggcggaaatttcaccgttaaccgtcagcaaaattatcagatgaacctgcctaacttccgcgatatctatgcccgcgggcaagaagatcggaaaaaaggggtgagtgaaagcgatgcgcagcgggttgccgacgccattaagcaacaggcgctggaaggggtgaagtcacaacactccttcaacggtaatgcgagcgatcggtggagcgaaacgatggaagcgaaggatgctcgtctgtttggtaatgagctggctggcgcctatctggacggcttccacgggataaaataa

SEQ ID NO: 93091 - DNA, 2292 bp, Enterobacter aerogenes
atgagtcctccaggattgcttccaggagcgacaacgatatttaaccgtatatctgttgagcttccgattgacggactttctttctggaaattgtctggagatgcagcaatttcaacgccattttcttttgaagccgtgttgctggcgacggatgcgcgtatcgatcgtagcaccttgctgggagagtcggttacggttgctgttcctgtaaaaaacgcgttagaaccgcgatattttaatggcaaagtcaccgggattggcgtgggggcgatagagctgtcagggaaccgatatgcggcttattcgctgacgcttgaatcagatttatggccgatgcagcgcgatcgtaattcgcgcatctttcaggaaaaaacagttccgcagattgtggtcatgctattggctgaataccaggtaaatgttgaagatgcgctgctggaacaatatcgtgtctgggattactgtgttcaatatcaggaaagtagttttgattttatcagccgcttaatggagcacgaaggtattgcttattattttcgccacgatcgtgataagcatacgctggttctggttgatgccgctgaaagttatcattcgattactggttatgaagacattccctaccagtacacatcattgcgtggaagtacgccggccgagggcatctcacgctgggcgatgcaggataacgtcactccggggctatatagccttgatgattatgattttcgtaaaccgaatgcctggttgctgcaggcgcgacaaaatccgctctccccacggccgggaaaaattgatgtttatgactggcctggtcgctttgtggagcatgaacagggggcaaactacgcccgtcttcgtcaacagcgctggcaggtggaacagcataaaattaacgctacctcgacggcgccgggcattgtgcctggcgcgcgatttcaattaagcaacgcgccgttctttggcgacaatggcgaatatcttaccatccaggcgcattatgaattcgaggaaaaccgttacgccagtggtgctgataatcaggccattcagcgcattgattttgtcgtgatcccgtcgtctaccgtcttccgtccgccactggcgacaccctggccgcgcacctatggtccgcagacagcaagagtggtgggccctcgggctgagagtatctggaccgataaatatgggcgcgtcaaagtgaaattccactgggatcgagaaggaaataacgacgatagcagttcctgttgggtacgcgtatcgagcgtctgggcaggacaggggtttggcgggatacagatcccgagggtcaatgatgaagtgatcgttgactttattaacggcgatcccgaccgcccaataattatcgggcgcgtttataacgaatctagtttaccgccgtgggcgctaccgaacgaggccacgcggatggggtttatgacccgtagcaaagatgggcataaagataatgcgagctatcttttcttcgaagatcgggcgggcagcgaatcggttgatttacacgctgaaagagatatgaatatttcagtagagaacgataaaactgcggctattgatggccactatctcacaaaaataggcaaaacgcagacccatgaagtgatggatgacgccgtttttacttatctgtccaggcgtaccaccagggttgaaaaagcagaagaatccatttttaaccagggtgaaaccaagacaatcgcgaaggggagaaaactggccatcaccgacggtggcgatttttcacagattaacggtgatgtgacgaccaccattaatggtactgcctgcacgacaataaacatcggcgatcggtacctgaccctggaagatggcagcatgtggctgaaggtttccgcgggaggacggcacgttgaaatccacgacggcgatgaattaatagtccgtagcggcgggcgtaaaaataccatcatcggcggattaacaacaaccgtagctggaggttgggcccaaaaagtgactaccggtgatatcgagatatcgacccctgataccatgatattgcgaggagaaaagaaaattgacctccagtgcccggattattttgaatataaagcggcggcgatgtcggtcaaacttaatgataccgcgctggccctaacagaaattagcgtcaaaggattaaaatacgaaactaatcccgtggtgtttaagtttcgcggcggcggggcgcattttgagatcaatggtaataggctggagtataatttattgtctttgcagaccgcactattaacaatcattacatga

SEQ ID NO: 93092 - DNA, 639 bp, Enterobacter aerogenes
atgttagcctttgaaactattcatgaattctaccgcaaacagaattttagcgaacatcgtcaccgcgtgatcgaggcaggcattcgatttaatatgaaatcaaatgaaatcctcaatatggagaaaaattttatttactatgttgataccggggtaatgtctatcgccgttgatgacgatgagcgaattatcggtacaaccattgaatatatgccgattgggcttttagaaagattttgccctatcgctcaattccgttactccacgctcaccccaacttccatgattaaaatttctcaacaagagtttgatcggatattttttggcaatacaaaagagtatatgcaagaactcgcagcgatcctttcgtatatgctgatttttattctggatgtgcatgtagagcgcagaacagactctggctatcatactatcaaggcgatgttgcatcgttacatgtatcgtagaagcgttaattcatttgaaagggaaggcattgccaattttattattcgtagaaccaacctttccagaagctatgttttccgtgttttggcagaattgaaagaaggtcaatacattacaatacagaaaggaaaattgatcgctattaaccggaagctacccaatgatttttaa

SEQ ID NO: 93093 - DNA, 1500 bp, Enterobacter aerogenes
atgaccaagaaaaaaccggccctgcgccttatcgcaagcgcagtgctgtttgcttgccttagcagcagttcggcgtttgcagccccagccagtgcgccgctttcaccgctgatgaagcaattaaataacggcaattggctaccacaacaggaagcgcaatcgctaagcgatgagctctattatcaggatgctatccacgcctacattcagacgctgcctctgctgaacactattggtttacgcgatggttcagaagcggcattcggcaaaggctacaacgtgctgccaatttggaaggagcgtatggacagccgggcggtggtgcccacgccaaatggtgatgttatctattccatgagctatctggatctgaaagaaacgggtccactggtgattaaggccccggcgaatgtcatcggcatgtttactgactttttccagaaaaccatcaccgatgtcggcgctattggtcccgatcgtgctcgcggtgggttatatctgctgttaccgccagattataacggcccagttcctcaggggtattacgcatttaaatcttctacctacaacgtattcctgtttttccgcaccattatgggcaaaggggagggaaaacctgacccggcgccggcggttaaaaatgcggaaactacccgtatttatccgctctgggatgttgaaaaagaagtcataccaatgcagttcccggatgccagcggtaagcgtgtcaacatgatgtacccaacggacagtagttactggaaaaaactaaaagattttgtcgactacgaaccgctgaccgctatcccggaggatacccgcagcgcgttattgagtatcggtattgttaaaggaaaaccgtttaaacctacggcgaaacagcaagaactgctgaagaaagcagtggaaacggcgccgcggatgattctcgcccgtcgtcaggttggacgagacgatcagcgtcagttgtactacaaagaccgccagtacgagaactcctgggcaggcgcaaccgcagaatggatgcaatacggtaccctggatgaaaatcagcgcgcggcgttcttccagattgcgtattccagcgcagcggcgatggtgatgcataccacgggggcgggttcgaaatatccctataccacccgggacaaagagggcaaattcctcaacggcggcaatacgtataagctgcatctgccgcctaatccgccagccgcattgttctgggcagtaacggcttacaacatcaccgatggcaccatgccggaaaccgatcaactgctaccatccaccaatggttattacaatttgccgaaaaacagcgacggttctattgatatctggtttggcccccaaaaaccggatggtgtggcggacagcgcctttatcaagacggtaccggatcgcaacttcctcgttgccctcaggctatatggcaccgaagacggtttctacgatcagacctgggtacctgacgatctggttcagacaaataaatga

SEQ ID NO: 93094 - DNA, 1464 bp, Enterobacter aerogenes
atgaaactcaaatctctggcactactgaccgcattggcgttcagcgctggcgcggcggcacaatcggcgccgttaactatccctcaccccactcagtttgaccagttagcgactacgccgaccgatgtcaaaatgcctgaggcctacgtgaaagcaattgctcaacaggcctatatttgggggtggccgatggtaaaccagtttaaccgtcgtgaaaccatcactaaagccccttacccagcgcttaatggtgggatggttccggtggcgccgatgggtcagttgagcatgctgaccgactacatcaaaccgcaggagacctttgtcacctgtcctaaccaggacgtggcatatggattaggtttttatgaactggataaagagccggttgtcattcaggtgcctgattttggcgatcgtttctgggtatatgcgatttatgacgcgcgtactaaccagatcggtaacgtcggtaaaccttacgcgactaaaccgggtttctatctgcttgtcgggccaaactggaaaggcgaaacgccgaaaggctttaacggggtgatccattcgtctaccgagatggcgaatatgatcccgcgtatccagatggatgatacaccggaagatcgcgccgctatccaggcgccaattaaagaggtgatgtcgtacccgctcagcgaattcaacggcaaaatgaagtcttatgaatacgcgaaaattccggcaattggcgataaaccggatccaaatgccggtgaaacgaaatgggtggttccggaaaaatatttcgatcagctagcgaatgtactgaataaagtcgcgccgttgccgggtgaagaggcgatgtacgcccaatatcgtcatttgattgaagccggtaagaaagatccgcaaatccgtaagtggatggatgaagctgccgttgagaccgataaaacggttatcgccgagttctttaaatggaaaaataacggtgttccggcaggcaacggctggaatcgttcgaagaacaacgcccaatttggtgttgattactacaaccgtaccggcaccgcgaagtcgaacatgttcgataataagccggacgaaacgcaatatttctacacggataatgacgcgggcggcgttcagctttcgggcgatcatgcttataccgttactttcccgaaaggtgaattgccgccggtgaaaggcttctggtcgctgacactgtataacagtaagcatctcttcagcccgaatgagcttaatcgttattctttgggtaccaagaataaggatctcaaatttaataatgatggctcgctgacgctttacgtcagcaaagatcgtccggctgcagacaaaatcaacaactggcttccggcgccggatgggacattctcgctctatattcgcgcatactggggagagaaaccgattctggatggaacctggcagccgcctaaaattgaaaagattaactag

SEQ ID NO: 93095 - DNA, 1503 bp, Enterobacter aerogenes
atgagcgtgaatcgccttgagatgcataacattagcctggctttttccggttttcaggcgctgagcaaggtggcgtttacccttaagggcggaacggtgcatgcgttgaccggcgccaacggcgctggcaaatcgacgctgatggcggtgttgtgcgggacgcatgccgattacgaaggcgaagtggtgatcaataaccagccggttagcattcgttcgccgcgcgatgcaaagcaactgggaattcatctggtgcagcaagaggtggatgttgcgctggttccggggttgagcattgccgaaaatatcatgctggacaggctggctgagccgggtgcggtttttcgctggtcgtatgtgcgtcagcaggcgcgcgacgcgctggcgcagcttgatattgcgctggatgttcgacgttcaatcgatagctgtacccttgccgaaaagcagcaaattctgctggctcgcgcactgtcgcaccattgccgttttttgattcttgatgaacccaccgcgcccttggatcagcacgaaagcgaacgcttatttacggtggttcgtcgtctgcagcagcaggggatcggcgtggtctttatttcgcaccgtattcatgaactcaaagcgatttgcgacaccctgacggtgctgcgcgatggccgtttaatcgaaagcggcccgatggcgcagctcagcggcgagcagatcgtcgaaaaaatgctcggtcacgagctgagcgatattttcccgcctgcgcgtccgccgcacggcgcagaggtgctgttgcaggttgagggtttgcatgacgaggcgctgttgcaggatatctcgctacgcctgcataagggggaaattctcggtatcgccggcttagcaggcgcggggaaaactgaactctgcaaagccttattcggcgccagtaaaagccgcctgcgccacggcgaacttaacggccggccgtggcggccgcgcgacccggctgattccgtcctccagggcctggcgctggtgccggaagagcggcgcaaagaggggatattcatcgatgaggcgatcgccatgaatctggcggtcagcgccgataacagcttttcgcgctggagcctgttcggccatcggcaggcgtggcggtgggcgcaggaggttattgcccgtatcggcgtgcgcgccaccgggccggggcagacgctgcgccgtctctccggcggtaatcagcaaaaagtggccatcggcaaatggctgcgcggcagtgcaaacgtgctgattttcgacgaaccgacgaaaggggtggacgtgaaagcgaaaaccgatctgtttcaattgattgatggcctggcgcgggaaggacggggcgtgatttacgcctccggcgaattttccgagctggtaggcctgtgcgatcgcatctgcgtgctgtgggatgggcgcattgtggcggaaattcccggcgccgaggcgcgggaagagacgattctttattactccaccggaggagcggcagcgtga

SEQ ID NO: 93096 - DNA, 1794 bp, Enterobacter aerogenes
atgtttaagtttaaattaacctatgttgctttagcagcagcgttaagctcgacggtggtatacgccgatccgtcgacttacacccatctatcaggcgcaacggtggttgatattgaagcgccgaatgctgcgggcgtttcgcacaacctgtatcgtgaatttaacgttggcagcaacggtttaatactcaataacagcgacagcgatattaatcatgcgacttttggcaatattgctaaaaacaacaatctgaccaacggcggcgcatcggtgatcctcaatgaagtcacctcaaataaagccagttccctgaatggttttattgaggtcgccggactaaaagccgatgtcgtgattgccaaccccaatggcattacctgctctggttgtagtttcgttaataccaacaaggcggtattaaccacaggccaggtcaatatgaccgatgaaggcgctatcggcagctataccatcaccgatggcaaaattactattggcgagaagggcatggatgcctccaccagctatgccgcattgctggctgacgccgtcgccatcaatggcatggtcaacgctggcaatgctacggttggcggcggtaatttcaccttcgacaacagcactggcgccatgactagcgcaggtaaaagcgctaccgtcctgcaaatgatcagcccggtatacagcattgatatcagtagcctgggcggcatcaaagccaacagtatcagtatggtcggtaacaatttaggctttggcgtgcgtaacaaagggtcaatcaccgccaactcgacgctttctatcaccaacaatggattactgaccaacgatggctccatcgccagtaatggttaccttaccagcatcgccgcctctggaaatttcactaataacggtacgctgacgaccaagaatatgaccatgattactacctatggcgctctcaataacggcagcaagggcacgatcagttcaacaaagcagctggtgctcaatgccagcggcaatatccagaacagcggaacgattagcgcgacgtccagtctggtagccgccagcaacggagcgataaccaacaacgctggtgccaaaatcacttccgatgcgcagattaccgccacgtcgttaggtaatttcaccaatgacgggacgatcaaaggtaaaaacactgcgttaaactttattggcaccaattttaaaaataccggcactatcagcgcgacgggtaaagtggccgtgaaatcgctgaagcaggatagcaccaccaataccggtgagatttataacctgggcactattagcggtgaaaatattgatatgcaaaccaacggcacgctggcgcaaagcaccagtggtcgcatggaggccaccaacgccattaccgcgcatagctactggctgaataacaacggttatatgaaagccgctgatattactaccgatcatggcacgattagtaacacaggtactatcaccgcggccaatgtctctctgacaacttattatgatgttactaatgaagggacgatttacagcaccggcgatctgctgctggacacccagttgaaaggcaatatctataactactcattaattcaggcgaacggcaccttaaccatgaccgcgaaaaaggttgttaacagtggtcgcggctgcggttggttgaaatttaatacctgtgatgtcggcaccatcagcgccaacaagatggtcctcaactcctcatataaatacgccagcgagatgggcggttatcaatactttaagattgcggaaatcaataccgttctgtaa

SEQ ID NO: 93097 - DNA, 774 bp, Enterobacter aerogenes
atgaaattaaatagccgagcgcaatctgcacaaaacccgcacaataaatccccaatcgtcctggtacacggcctgttcggcagcctggacaaccttgggatcctcgcccgcgatctggtcgccgactacgatatattgcaggtcgatatgcgcaaccacggcttatcgccgcgttcgccggagatgacctaccgcgcgatggcgcaggatctgttggatactcttgacgatcatcagatagagaaagcgacctttatcggccattcaatgggcggcaaagcggtgatggcgctgaccgcgctggcgccggatcgcatcgccgggctggtggcgattgatattgcgccagtggcttatcacgtccgccgtcacgatgagatcttcgcggcgattaacgccgtcagcgaatccgccgccagcacccgccagcaggcggcgcaggtgatgcgcgagcatataaatgaagaaggcgtcattcagtttctgctgaaatcctttgtcgacggcgcgtggcgcttcaacgtgccggcgctgtgggatcaatacccgcatattgtcggctgggaaacggtgccagcctggccgcacccggcgcaatttattcccggcggcaactccccttatgtcaccgatgaataccgcgacgcgctgctggcgcagttcccgcaggcccgcgctcacgtcattgccggcgccggacactgggtgcatgcggaaaaacccgaggcggttttacgcgcaattcgccgttatctgagcacaattgaagcctga

SEQ ID NO: 93098 - DNA, 438 bp, Enterobacter aerogenes
atgaaattacaacggaagtccctttttttgttctgggcgtggatggatctctttttcgtcctgcaattcttatggtggaatatttcccaccgccgtcttcctttctacgacgatctactggcgtatcttcagctgctgcacacttacggcgcagcggcggcctggctgtacccgctgaatgttctgctgattatcagcattccgctgtcgatgatcctatttttccgtcagagccgctatgcgctgtggttggcctgggggcaggcgccgctcaggctggtatttatgcagccttcgctgtcgctgggtctgtggctgattcaagccgccggcgtcaggaatttagcgatcctggcaggcttcctgctgctctctgaagggctgaaaatcgccactctctggtactgcagaggcgaatttcagggcataaagcgatag

SEQ ID NO: 93099 - DNA, 171 bp, Enterobacter aerogenes
atgaatatttctggtcttgagcgacacttattattttgtgtcaatgtttctggtttatttaccacaaaaatgataatcgatagtctgcattgggcattgcttgtagcggttttttacaatggggtttatatcattgttttcttcgccagcgagtcacttaccgtggtgtaa

SEQ ID NO: 93100 - DNA, 234 bp, Enterobacter aerogenes
atgaagaagttgttaagctcggtgttaatcgccacatcggtggcgctgttatccgcctgctctccggacgataacaataaagtgaaagtcgcgatcaataccggcccggatgaagctatctggaaagtcgtagagcaggtagcaaaagacaaatataacctcgacgttgaggttatctcttttaatgattatgtcctgccgaatgaagcattaaataataagataccctcttaa
